United States Patent Application Publication US 2003/0073623 A1 - sequence listing, part 6

SEQ ID NO: 28368 - DNA, 461 bp, Homo sapiens
  misc_feature (1)...(461): n = A,T,C or G
ntttgatcgacgtcactaggccangncgnggaattccgaaacagccgagtgccaaagtacatcttccgccacaatgatgtcagccacctcagagaactgctgcaaagatctgacccctcagtccccaagattgtggcatttgaaactgtccattcaatggatggggcggtgtgcccactggaagagctgtgtgatgtggcccatgagtttggagcaatcaccttcgtggatgaggtccacgcagtggggctttatggggctcgaggcggagggattggggatcgggatggagtcatgccaaaaatggacatcatttctggaacacttggcaaagcctttggttgtgttggagggtacatcgccagcacgagttctctgattgacaccgtacggtcctatgctgctggcttcatcttcaccacctctctgccacccatgctgctggctggagccctggagtn

SEQ ID NO: 28369 - DNA, 487 bp, Homo sapiens
  misc_feature (1)...(487): n = A,T,C or G
gggacgcgccngatagannnccntttagtagaccctagtcagtgtggtggaattcgcgtcaaaggtgaagcaggacatgcctccgccggggggctatgggcccatcgactacaaacggaacttgccgcgtcgaggactgtcgggctacagcatgctggccatagggattggaaccctgatctacgggcactggagcataatgaagtggaaccgtgagcgcaggcgcctacaaatcgaggacttcgaggctcgcatcgcgctgttgccactgttacaggcagaaaccgaccggaggaccttgcagatgcttcgggagaacctggaggaggaggccatcatcatgaaggacgtgcccgactggaaggtgggggagtctgtgttccacacaacccgctgggtgccccccttgatcggggagctgtacgggctgcgcaccacagaggaggctctccatgccagccacggcttcatgtgggccttggagctg

SEQ ID NO: 28370 - DNA, 448 bp, Homo sapiens
cactgagaccctagatagagcggcggaattcgcctttgcactcagatccctcccatgggcgtgacgcagctacttcgcggacaggcagcttctgaggctgccagggacaggctggactttcagaagaagccaaggcggtcatctgggtttgtttctaccagaatcctagcagcacaggcccaaatctcctaggactctaagcaagtgcgtgtagacaggctgaaaggcccccggcattaccttatgaaagtggaagctacacgcaacacaaccgtgcattgttcatatttgggattaccatcatagaacacgtcgcgcaccaccgtggactcggacgtgacgcaggcgccggcccgtgtggtggggactcccaggtggaacatggcttcgctgcatagaaactcccggatgcttgaccgtaggaccttgcgaccgtcggcctgtctga

SEQ ID NO: 28371 - DNA, 480 bp, Homo sapiens
  misc_feature (1)...(480): n = A,T,C or G
agttgcccccaatgagactcatagagagcgttgaaancgccaagaaggcggagtaaggcgtgccgctgcaaactggcctctgggccgggggcgagcatcccccggtaggccgagtgcatctgttggaccgtgcgaggagaagaaaaaaaatatcggccagaggagaggaactaaccgaacattcttcctccctaccttatagaggggaggggtcatctacactaaagcaaagagttaggcgcgtccgtgcgaagagaccaccaaacaggctttgtgttccttatcacaggaagaaaactttccttgacctttaggtgcttttatattcatctcaaaaacaaaattctgaactcaggacttggcaagtgtctctatgttgtctcctagagagggtaggcctgcttcttttacccagctactttgcctgtttttgaaatgtggctatcacttctctacacattacctccatgagttggaaag

SEQ ID NO: 28372 - DNA, 438 bp, Homo sapiens
  misc_feature (1)...(438): n = A,T,C or G
tcggaagacatttgatnacctcgggaaannccnncggaccccccgccgcagcgatgggctagctatcctagaagactatgcggttccgtttgttgttcaggagactggcgaaggctcagcaggagcttcaggagccccagagaaggtccctgaaaatgatggctacatggagccctatgaggctcaaaagatgatggccgagatccggggctccaaggagacagcaactcagcccttgcctctgtatgacacaccctatgagccagaggaggatggggccaccccggaaggtgagggggccccctggccccgggagtcccgcctgccagaggatgatgagaggccccctgaggagtatgaccagccctgggagtggaagaaggagcggatttccaaagcctttgcagttgacattaaggtcatcanagacctaccttg

SEQ ID NO: 28373 - DNA, 461 bp, Homo sapiens
  misc_feature (1)...(461): n = A,T,C or G
cttcgatgacctccctagggagngngcaggaangcactgtgccagcaccaccgcacctgcacctactacttcagcgtggatgctgagccgtccttgaccgagcccaacagcctgcggctgctgatccagcagaacatgaatgtcattgccccgctgatgacccggcatgggaggctgtggtcgaacttctggggggctctcagtgcagatggctactatgcccgttccgaggactacgtggacattgtgcaggggcggcgcgttggtgtctggaatgtgccctatatttcaaacatctacttgatcaagggcagtgccctgcggggtgagctgcagtcctcagatctcttccaccacagcaagctggaccccgacatggccttctgtgccaacatccggcagcaggatgtgttcatgttcctgaccaaccggcacacccttgggcatctgctctccctaan

SEQ ID NO: 28374 - DNA, 441 bp, Homo sapiens
  misc_feature (1)...(441): n = A,T,C or G
attgaagaccatnttttgaggacccttagacagngtggtggaattcctgtctcaaaaagaaaagaaaagaaaacagaccttgagccagatttggctcatgggtgctagttgtccaacctctataggattagagggctcatggaaagtaagttttgagggccacgatgggcacccagctctgtccgattccacagctagccaccccatgaatgcagcttcatatcaccaaagatcagcctactccagcggttcctaaaggctgcatggaatcccctccttcatctataccattcatgatttaaccactcctcccacccccatccccaatgttgtccatgtggctgccttaaacagcaccctggcgagcctcatcctagagtcatctttgggccttcccacccctgcctggcttccctctctcactcccctaccccccactcn

SEQ ID NO: 28375 - DNA, 448 bp, Homo sapiens
  misc_feature (1)...(448): n = A,T,C or G
natcgagaccattaattggngngctggaataccacgcctgtaatcccagcactttgggaagccgaggcaggcggatcacgaggtcaggagatcaagaccatcctggctaacacggtgaaaccctgtctccactaaatacaaaaaataagctgggcatggtggcgggtgcctgtagtcccagctactcaggaggctgaggcaggagaatggcgtgaacacgggaggcggagcttgcagtgagccgagatcgcgccactgcactccagcttgggctacagagcgagactccgtctcaaaaacaagaacaaacaaaaaataataaaaattattattattattatcaggtgtttgttgatatatacctccttcttgtaaactacaacttagtataaaaatagttccttttcatcagtaactgagattatcggtagtttttttcctgatttgg

SEQ ID NO: 28376 - DNA, 479 bp, Homo sapiens
  misc_feature (1)...(479): n = A,T,C or G
catcgaccccctnatagtagaccctaggccagngcggtggaattcgaagacgctgagcaggctgccggtcgcaagacacagagcagtgggcctgggctgcagaagaatagccctgggaaaccagcccagtttctggcaggagaggcagaggaggtcaatgcctttgctctgggcttcctgagcaccagcagtggtgtctctggagaagatgaagtagagcccttacacgatggagttgaagaggcagagaaaaagatggaagaagaaggtgtgagtgtgagtgaaatggaggcaacaggagcacaaggacccagcagggtagaagaggctgagggacacacagaggtgacagaagcagagggatcccaggggactgctgaggctgacgggccaggagcatcttcaggggatgaggatgcctctggcagggcagcaagtccagagtcggcctccagcacccctgagtctctccaggccag

SEQ ID NO: 28377 - DNA, 446 bp, Homo sapiens
  misc_feature (1)...(446): n = A,T,C or G
ggagcccccccctgatnccccccaaggatcatagtacangcggnggaattcaggacccgtcgccatgggccgtgtgatccgtggacagaggaagggcgccgggtctgtgttccgcgcgcacgtgaagcaccgtaaaggcgctgcgcgcctgcgcgccgtggatttcgctgagcggcacggctacatcaagggcatcgtcaaggacatcatccacgacccgggccgcggcgcgcccctcgccaaggtggtcttccgggatccgtatcggtttaagaagcggacggagctgttcattgccgccgagggcattcacacgggccagtttgtgtattgcggcaagaaggcccagctcaacattggcaatgtgctccctgtgggcaccatgcctgagggtacaatcgtgtgctgcctggaggagaagcctggagaccgtggcaagctggccc

SEQ ID NO: 28378 - DNA, 475 bp, Homo sapiens
  misc_feature (1)...(475): n = A,T,C or G
gagggccgnnnnnnnnaaatcgagaccattcgacagcgctggaantcccgagtcttcaagccttcaggctttcttctagtcaagatgagtgataaaccagacttgtcggaagtggagaagtttgacaggtcaaaactgaagaaaactaatactgaagaaaaaaatactcttccctcaaaggaaaaaggagtctcgctctgtcgccaggctggagtgcagcgacacgatttcggctcaccgcaaacttcgcttcccgagttcaagcagttctcctgcctcagcctcccgagtagctgggacctcaggcacatcaccaagccaggctaaatttgaacttcattatgtgtgatatggcaagagagaaagtgaatacgctgatataagaagcaagaaaccttccttccttccagatgtgtgtcagtagaattacagagtgtccacggaaacagctcatgccctagtgtacagtggtgca

SEQ ID NO: 28379 - DNA, 485 bp, Homo sapiens
  misc_feature (1)...(485): n = A,T,C or G
agggcgaggccngnnccttgaanacatcgaganctctcggcagngccgnggaattctccatcagcaccaccaccagcgacttgtctgcccgggaggatgcaacaccatctgcctccaccggccacctttcagtgtttcctgctttccaaggaaagataccagcagtgccctcagagcagaccagccagagtttttctgaagcctcccacagggtgctccccggaggaggcccgagatgctctcgtgactttggagccggggtggctggccaccttggcctgggcatctttggggtgggcttcgggagcccggcactgctgcagagtgtggtggatgagaacagctgctgcttgctgtacgtggtggaggaccagctgtgtgatgtggagcaagccttcagagctgagcatttgggccaacaccagagtggttcgggaacaggatgcagacattgtcctcaacgaccagcggcactttgatccggn

SEQ ID NO: 28380 - DNA, 437 bp, Homo sapiens
  misc_feature (1)...(437): n = A,T,C or G
actgatgaccctagaacacnctggnggaanncgncaagaaagaatgaatggatggatggatggttggatggatggatggatggattagcgagaacccgcgcccgcgaacaaagagcgaaccaaagcgatgcttcgaatttttaaaacggaatctctgcacccaaatgcaggactggtgacttaaggagctgcgaagtctgatttaccggcctactctcgacctgccccccacccccagctcaggggaccttttgtctgaacgccagagctactgaccaggtcggggggccgcggtggggagtggaagagccggtcctgctgtccgccctcccagccccaggtggaaggctcagttgtcggaaagacaaaagcgatttcttcccactcctgcagggccagaagttcaggctgccccgcctccactgggggatcgcacn

SEQ ID NO: 28381 - DNA, 471 bp, Homo sapiens
  misc_feature (1)...(471): n = A,T,C or G
catcgtagaccctattgagngcggtggaattcagcagccgggctggtcctgctgcgagccggcggcccggagtggggcggcggagcaaacatgaacgttggagttgcccacagtgaagtgaatccaaatacccgtgtcatgaacagccggggtatgtggctgacatatgcattgggagttggcttgcttcatattgtcttactcagcattcccttcttcagtgttcctgttgcttggactttaacaaatattatacataatctggggatgtacgtatttttgcatgcagtgaaaggaacacctttcgaaactcctgaccagggtaaagcaaggctcctaactcattgggaacaactggactatggagtacagtttacatcttcacggaagtttttcacaatttctccaataattctatattttctggcaagtttctatacgaagtatgatccaactcacttcatcctanac

SEQ ID NO: 28382 - DNA, 458 bp, Homo sapiens
  misc_feature (1)...(458): n = A,T,C or G
gggcgtgnncnncactgagatcatgaaacgtggcggaannccgcagctggggcagcgggtgcccaagatgaagaacaagccgcgctcgcccgtggtggagctgagcaaggtgccgctggtccagcgcggcagtgccaacggcctctgacccgcccacccgccttttataaacctctaatttattttgtcgaatttttattatttgttttcccgccaagcggaaaaggttttattttgtaattattgtgatttcccgtggccccagcctggcccagctcccccgggaggggcccgcttgcctcggctcctgctgcaccaacccagccgctgcccggcgccctctgtcctgacttcaggggctgcccgctcccagtgtcttcctgtgggggaagagcacagccctcccgccccttccccgagggatgatgccacaccaagctgtgccaccctgtgctctg

SEQ ID NO: 28383 - DNA, 463 bp, Homo sapiens
  misc_feature (1)...(463): n = A,T,C or G
aggacgcgggcccccaccgagantcctgantagccacgcaancggcggaanccctgcttctcagcgccttctgactactggaggcggccctggccgccgaggtgaagaaacctgcagccgcagcagctcctggcactgcggagaagttgagccccaaggcggccacgcttgccgagcgcagcgccggcctggccttcagcttgtaccaggccatggccaaggaccaggcagtggagaacatcctggtgtcacccgtggtggtggcctcgtcgctggggctcgtgtcgctgggcggcaaggcgaccacggcgtctcatgccaaggcagtgctgagcgccgagcagctgcgcgacgaggaggtgcacgccggcctgggcgagctgctgcgctcactcagcaactccacggcgcgcaacgtgacctggaagctgtgcagccgactgtacggacccagctcagtgag

SEQ ID NO: 28384 - DNA, 457 bp, Homo sapiens
  misc_feature (1)...(457): n = A,T,C or G
agtgcctttccnctcttgagccanttagatctgngaaannccnngaaagggcacgctgcgagcttcctcccggctgcatgacgagcttttccgttggatccttcgaagccctatgaagttttttgacgcgacccccacagggaggattctcaacaggttttccaaagacatggatgaagttgacgtgcggctgccgttccaggccgagatgttcatccagaacgttatcctggtgttcttctgtgtgggaatgatcgcaggagtcttcccgtggttccttgtggcagaggggccccttgtcatcctcttttcagtcctgcacattgtctccagggtcctgattcgggagctgaagcgtctggacaatatcacgcagtcaccttttctctcccacatcacgtccagcatacagggccttgccaccattcacgcctacaataaagggcaggagtttctg

SEQ ID NO: 28385 - DNA, 441 bp, Homo sapiens
  misc_feature (1)...(441): n = A,T,C or G
ggggaactgagacatcgaaactgtggctttcgaaancnnaaagaaanctgaatagttctcccctttgagtgcatttaactctttagtatcttctctcttacctatttgagcccctctagctacagtctggcttaaatgaaaggggaattatatgcttaagaaaaagtaggacacggttgaggcagtttgctgactgaatacgcgaagaaggacctgatgggctcatatgcaccactgccatcacagtcctcatcgtgatgcaagcttatatgattcttgaggtaactctaccagatacttccagatttagaaatgtgtcaaaggaaaaattggtgatactcttctttcccctgccagaaacagcccagatctcctcttaagcggaaaagagattgaccttctagcagaggcaaaggtaaactcctgtaagttacttctgtt

SEQ ID NO: 28386 - DNA, 462 bp, Homo sapiens
  misc_feature (1)...(462): n = A,T,C or G
agtaggccggnccggncgccctctagtggcncttcgcccatgacggttcgnancnncnggnggaattccttgccaaccttcgagtcaggtgctgtgtgtaagtggagtatttgtggatagtttaagaagctcctcgtgggggttccaaggagaggcaaaggcatctggacttgttccagcccagcccaccgggtgacatcaccgggcagggaggggtgctggtggtggttcatacggagtaagctgctctgcctgtgtgagtggctcctgggccctaaacaggcacctttaggccatgggtcactcaccgtgagccatcaatgtgctctggtctgacatggtttctctctgtcttctagtctagacctagtttttttgttctgttccccacgtatggatatagtagagattgttgtctgtgaaatttctcttttgtagattttgagttttcccttgtagagc

SEQ ID NO: 28387 - DNA, 451 bp, Homo sapiens
  misc_feature (1)...(451): n = A,T,C or G
ggggccnnncgnccccctaccgaggcctccgactgacngcgtcgaacggccggaccccagctgaggtcaccaagctccagcagctctcaagccatgcggttccctttgccattcccagcgtggtgccaggactggatcccggcacacagaccagctcacaggagttcttggttcccaacgatttgattggctgtgtgatcgggcgccagggcagcaagatcagcgagatccggcagatgtcaggggcacatatcaagatcgggaaccaagcagagggcgctggggagcggcatgtcaccatcactggctctccggtctccatcgccctggcccagtacctcatcactgcctgggccgccgccgggcttggcggcctacactgccaagatggcagcagctaatgggagcaagaaggctgagcggcagaaattctccccctactgaggccagg

SEQ ID NO: 28388 - DNA, 458 bp, Homo sapiens
  misc_feature (1)...(458): n = A,T,C or G
gggggccccgccggncgcccaattatggccatccgaatgaacgctctcgganagccnggnggaattcggagtctgtgttatacaaataaatacacatcgctctatattgagggatcgtttataaagacgtttattttacggatgaaaagcggcgtatttatgtgtgtaaatgaacgagcgtacgtagttatctctgttttctttcttcctctccttcgtgtttttcttccttcctttcttcctttctctccttctttaggtttttcttcctctcttcctttccttctttctctctttctgtccttttttccttcgtgctttatttctctttcgttctctgcctctccattttctgggatgagatttcggaagtgctccaagaggaggagcttatagtagggcagcctggctcagggtgctccctgaggtgtgcttctagtctccctcacggccaagcc

SEQ ID NO: 28389 - DNA, 451 bp, Homo sapiens
  misc_feature (1)...(451): n = A,T,C or G
aggggccgcnngncgcccactgagacatcagatgagcgcntcagaacnngcacatccccagaagttgtctttggttcagagaacagtcttcagacctatataggacttgaggagtcccagagaggagccgcatggtgtgaaccattcgattctcacaacagaatggataaaaacaatttgaaccatgaaaccatgcagatgttcatattttggatagggtagggtcagtgccattgtcagaggaaaaactcttggcaatcacaggatgggagagaaagtttccattgtaaagaatactcaaatgccatttaaggaaatgggttcttctgcccctattctttggaatatttagggccaagttcttagtttttgacataaaaattttaaagtattctgttctgattgccgtttcaaacaattgactagaatttcagagcaattacatgagagt

SEQ ID NO: 28390 - DNA, 462 bp, Homo sapiens
  misc_feature (1)...(462): n = A,T,C or G
gggggngggccgcccgccctactgaggccatccgtaaggagccnctcngcancagncnggaggaattctgcgtgtgtgtgtgtacgcttgcatttgtgtcgggtggttttatgagatagagttgggcgggcagtaggcccaggtcccgaaggccttgaacccactggtttggagtctcctaagggcaatgggggccattgagaagtctgaacagggctgtgtctgaatgtgaggtctagaaggatcctccagagaagccagctctaaagcttttgcaatcatctggtgagagaacccagcaaggatggacaggcagaatggaatagagatgagttggcagctgaagtggacaggatttggtactagcctggttgtggggagcaagcagaggagaatctgggactctggtgtctggcctggggcagacgggggtgtctcatgggctgggagggatgagagtag

SEQ ID NO: 28391 - DNA, 457 bp, Homo sapiens
  misc_feature (1)...(457): n = A,T,C or G
gaaattgataccntcngaannnactgatgacatcgtacagngcggtggaattcggatattgcataagttattgaaatgctgacccccgttcaggaaaccatgcagccccttcccttcccttcccttcccttcctttcccttccctagccagggctcaggtacctcactctcctgccttgtgcgtagctcctggggccccggtcagtccccagcagccttggcacacagtgtctggagcctctgctcctgctgcaaaagcagaaaccatgtgaaccttctggccagtactggaaaggggaatgctatttatttttatattgtgtatattttgtcgtggtctgctgattccctgtttcactgagagcgacacttacctcaatagttagttcaatattgtgtgttggataattttttaaaagaactttttaaaaagctttttgatccttggaggtctgta

SEQ ID NO: 28392 - DNA, 437 bp, Homo sapiens
  misc_feature (1)...(437): n = A,T,C or G
tcttagnacactgatgaactggggaanncggggatttggcattagggagccagtgaaggttttagaggtggggagagacaatttctgagctttctccttgggaaggcttggctggctgcattgtgggtcacagtagggtggggtggggcagcttggtggtgggaaggccaaggccacattgtgagccaatggccaagtgaaggtcagaagcaggtctcctgactcctggccccatggccttgccacccctctggcccccagccctttcggagctcagtgagctgctctgggaacaggtgggaaataaacccacaaggagttgacaagggggctggaaaccccccagggacatcatacacctgacagggcatttcctttcccactgaagatcatcccattagacgcagtgcagcagacggtccttgtcgatggaaaac

SEQ ID NO: 28393 - DNA, 574 bp, Homo sapiens
  misc_feature (1)...(574): n = A,T,C or G
ngcggcgaaatctgatcacgtccgtgtggtggaattctagaggcacgcgccctctgctgcacggccgtggaataaaacgagacaacggccccacagtcccctgcccgcagcccacgctcgggcgagcctggaggattgcatttcctcgtaggctggcagagccttacatgaagcgctcatcttctcctactttcctcctctttaaaaaattaacgtgggtgaggagacgtcctagttgagtacatattgatttgaaataaccaaaacttttaacaaatcacttttctcagaagaatccagtaagagaaagataatttcttccaaagacatgagacgttccctggctggccaagaaaaattggcatctggcatacctaggaatcattcaaaatagtttaataggaaggacattttgaggccagccagcattatgacatttgtgggtcctacggcatttcaccttggaaacattttcctgggcatctaanagtattgtggacctgagacactgtgcttacagggcctactgggttgattctaaagaagaaagaaaatctatatgcatganaagatg

SEQ ID NO: 28394 - DNA, 445 bp, Homo sapiens
  misc_feature (1)...(445): n = A,T,C or G
actggagnacatcctanngatctntcganagncnggnggaattcggcctttcaggtggatgttcatgtttctgaccttgcactacccttttgtaggtttcaaacaggcatgcgaggtgcctttggaaagcgccagggcactgtggccaggggtcacattggccaagttatcatgtccatccgcaccaagctgcagaacaaggagcatgtgattgaggccctgcgcagggccaagttcaagtttcctggccgccagaaggtatgtagtgctgcagcccccttctcccacctttgccccaggcctcctgactcagttctttccattgctccttagatccacatctcaaagaagtggggcttcaccaagttcaatgctgatgaatttgaagacatggtggctgaaaagcggctcatcccagatggctgtggggtcaagtacatcccca

SEQ ID NO: 28395 - DNA, 441 bp, Homo sapiens
  misc_feature (1)...(441): n = A,T,C or G
tcttatgacctcttganagcgtggggaaanncgnggaatccanaacactcagtgcctgctcaacgtggaacacctgagtgccggctttccccatgtttccctgcagtttgcagattccaagggcgatgtggggcttggcttggtgaaggaagggctggtcatggtggaggtgcgcaaggagaaacagttccagaaagtggtatgtgatgtggagaggcggccccagcattgcgccaccaccctcacagagaaagggactgttccacaagccaggaagggagcagggaatccaccatcctgctgttcctgctgaggaaagataatggatttggatcacagaatacctgaatgcccaagagtcagccaagagcgccaggctgaacctgtggcgctatggagactttcgagctgatgatgcagacgaatttggctacagccgct

SEQ ID NO: 28396 - DNA, 465 bp, Homo sapiens
  misc_feature (1)...(465): n = A,T,C or G
ntcggaagcctttgaaannncnnatcggtatgtcatcggacagncnggnggaattcggccgagctggtggctgggtgctcccctcactcctccatgctgctaggagcccgttagcagggacttgctctcctctccctccctcctggggcctgcctgtctgtctgtgaactcttgtcggccagcgaggccgggagcaggtggccttcatctgcaactgtgtctctctcagcctccacagccacggggacaccctgcacctattcccacgggacaggctggacccagagactctggacccggggcctccccttgagtagagacccgccctctgactgatggacgccgctgacctggggtcagacccgtgggctggacccctgcccaccccgcaagaaccctgaggcctaggggagctgttgagccttcagtgtctgcatgtgggaagtgggctccttcacctacctg

SEQ ID NO: 28397 - DNA, 455 bp, Homo sapiens
  misc_feature (1)...(455): n = A,T,C or G
nttggaagacatcgcacancccnnttggttgacctcgcananacacnngncggctngnggggagacttcaggagtcgctgtctctgaacttccagcctcagattttgccgcccttgtccccgagggccatgggccgggtctcagggcttgtgccctctcccttcctgacgctcctggcgcatctggtggacgtcatcaccttattctggtcccgggacagcaacatacaggcctgcctgcctcttacgttcacccccgaggagtatgacaagcaggacattcagctggtggccgtgctctctgtcaccctgggcctctttgcagtggagctggccggtttcctctcaggagtcttcatgttcaacagcacccagagcctcatcttcattggggctcactgtagtgcatccggggccctgtccttcttatattcgagcgttgggaatgcactacgt

SEQ ID NO: 28398 - DNA, 442 bp, Homo sapiens
  misc_feature (1)...(442): n = A,T,C or G
cttgagatcgatgatcctagnccggggggtggaattcagctgcgactgcagttctgaagcctaactggttgcccgtgccgcctcggaggtgaagtgtactgcgctgattggcttccaggcgccggccgcgtgtgatgtcccgggcaacgattggctctcgcctaccgggggcttctctcaccgggactcgggactcccgggaagtggaccggcagaagagggggctagctagctgtctctgcggaccagggagacccccgcgcccccccggtgtgaggcggcctcacagggccgggtgggctggcgagccgacgcggcggcggaggaggctgtgaggagtgtgtggaacaggacccgggacagaggaaccatggctccgcagaacctgagcaccttttgcctgttgctgctatacctcatcggggcggtgattgccggacga

SEQ ID NO: 28399 - DNA, 458 bp, Homo sapiens
  misc_feature (1)...(458): n = A,T,C or G
ctagannncactgatgacactagtcagtgcggnggaattcgggagaacccacagctgcttcttgccagcagtgggcaccaggcggtggccagcccacatttgaggccattcttgtcctcagggagaacgtgctggccctggacatcttctttgaggccctcaactatgagaccgtggagcagaagaaggcctatgagatgtcagagctgcttggtgacattgggggccagatggggctgttcatcggggccagcctgctcaccatcctcgagatcctagactacctctgtgaggtgttccgagacaaggtcctgggatatttctggaaccgacagcactcccaaaggcactccagcaccaatctggtaacagcccctcttctggagcccttgcctgctccaagggtgctagggcccacccctgaagcctagaccaccatcccgccccagctgaggaga

SEQ ID NO: 28400 - DNA, 566 bp, Homo sapiens
  misc_feature (1)...(566): n = A,T,C or G
gacgcgaattttgacaccgtccgtgtggtggaattctccggctgaccccggatgtggggcacctggtgctgaccaccctctgcccggccctccacgccctggtggcggacgggctgaagcctttccggaaggacctcatcaccgggcagcgcaggagcagcccctggagcgtggtggaggcgtcggtgaagccaggctccagcacccgctcccttggaaccctgtatagccaggtcagccgtctagccccgctgagcagcagccgtagccgcttccatgcctttatcctgggcctcctcaacaccaagcagttggagctgtggttttccagtctccaggaagatgcagggagctggtgggagcagttgacccagggcctccgggtctatgcctctgggggcactgagggctttcctctttcccgatgggcaccggngcgtcatgggactgcagctgaagaaagtgcacaggagagacccctgccacagatgagatgacaccaggcaggggcctctgggtgggagaactattgagtgcctggggccccgcagaaatgagaatgagcn

SEQ ID NO: 28401 - DNA, 475 bp, Homo sapiens
  misc_feature (1)...(475): n = A,T,C or G
gaaaatgccgggttnnnnnnnaactgagtcatcgacaggcggngttgatgccattgcaganccgactgaggatgtcctggaggctgtagctgcaaagctggttcttccagatgacttgattggatactttagtctattcttagttcgagaaaaagaggatggagccttttcttttgtacggaagttgcaagagtttgagctgccttatgtgtctgtcaccagccttcggagtcaagagtataagattgtgctaaggaagagttattgggactctgcctatgatgacgatgtcatggagaaccgggttggcctgaacctgctttatgctcagacggtatcagatattgagcgtgggtggatcttggtcaccaaggaacagcaccggcaactcaaatctctgcaagagaaagtctccaagaaggagttcctgagactggcccagacgctgcggcactatggctacttgcgctttgag

SEQ ID NO: 28402 - DNA, 494 bp, Homo sapiens
  misc_feature (1)...(494): n = A,T,C or G
ggatgtgccnnnnnnagcccgccnatagattaccctcggcctagatgaccactaggccagngcggnggaattcctactttctaagcatatgttttcgcaatacagatgaggttttatcagtagttttttacaagtctgtctagaaacttcatattctactcagtgcttctagttattaatgagaaatgaattttttcatgaaaatgtagttgcccctctattagaaactgttcatatgagctgtatctactcatcttaaataaaaatgtaatgctactcgaagaaaataaatttcctcaaattaatatttcatttttttttaattttaaggtagaatgtaagaaggaaaatgtataggaaattttaaaaaaacagcatttatttatccagtttcctttagtcacaacattactaagttgaaagagccgtagaagatatagtccaatgtcatcattttacaaaagtgaaaattgaaattctgaaatataaaatag

SEQ ID NO: 28403 - DNA, 494 bp, Homo sapiens
  misc_feature (1)...(494): n = A,T,C or G
gttatctggccagggatannnnnnnnnaaattgatgaccntcgnannnnccnanctgatgccctcagacagcnggnggaanncacngncgcnggngccgagggnggaggccagtccctggncncaccgggcncctgtttagaggacgggcgggccactcctttcatcgaatgcagtggtgcccgaggcacctgccactactttgcaaacaagtacagtttctggttgaccacagtggaggagaggcagcagtttggggagttgcctgtgtctgaaacgctgaaagctgggcagctccacactcgagtcagtcgctgccaggtgtgtatgaaaagcctgtagggtggcacctgccactctgccccttgccctcccctgcccctcacaacagtcacctcacaaacctgaatggtctgaagaaggaaggcctgagcccctttgcctgtcaagttgtacattggagtctcatttgggctagactaccggacactcgtg

SEQ ID NO: 28404 - DNA, 274 bp, Homo sapiens
  misc_feature (1)...(274): n = A,T,C or G
ntttgaaaactcggtccactagtccgagtggtggaattcccggctaacaaagctgtctgggccaaaggaataaggaatgtgccataccgaatccgtgtgcggctgtccagaaaacgtaatgaggatgaagattcaccaaataagctatatactttggttacctatgtacctgttaccactttcaaaaatctacagacagtcaatgtggatgagaactaatcgctgatcgtcagatcaaataaagttataaaattgcaaaaaaaaaaaaaaaaaa

SEQ ID NO: 28405 - DNA, 484 bp, Homo sapiens
  misc_feature (1)...(484): n = A,T,C or G
aganttccnnnnnttttgttggccttcggannnncnnnttgtgatgccttctgganagncnggnggaatncagaacagactcctgcaactacagccccgttgttatgtggaatgggggctgccttatcggtcatttcggggcagcagctgccaaaagtcaacaagaataagaattcaattgtggaccccaaagtgacagtggagatccatggcgtgagccgggacgtggccagccgccagactgctgtcatcaccaacaatggtttcaacccatggtgggacacggagtttgcgtttgaggtagttgtgcctgaccttgccctcatccgcttcttggtggaagattatgatgcctcctccaagaatgacttcattggccagagtaccatccccttgaacagcctcaagcaaggtgagtgtcaagagaaggggatggccaaggtggtgggaaagcagggcctggcgtcttttgggctggggctgg

SEQ ID NO: 28406 - DNA, 466 bp, Homo sapiens
  misc_feature (1)...(466): n = A,T,C or G
nccttgannnccatgatgatcactcagtccagtgcggtggaattcgatggccccagattgggtctgttaatgatgatcctgggccttatctatatgagaggtaatagcgccagggaggcccaggtctgggagatgctgcgtcggttgggggtgcaaccctcaaagtatcatttcctctttgggtatccgaagaggcttattatggaagattttgtgcagcagcgatatctcagttacaggcgggtgcctcacaccaatccaccagaatatgaattctcttggggtccccgaagcaacctggaaatcagcaagatggaagtcctggggttcgtggccaaactgcataagaaggaaccgcagcactggccagtgcagtaccgtgaggccctagcagacgaggccgacagggccagagccaaggccagagctgaagccagtatgagggccagggccagtgctagggccg

SEQ ID NO: 28407 - DNA, 466 bp, Homo sapiens
  misc_feature (1)...(466): n = A,T,C or G
nctagaaaaccccatgatgacactcgtacagngcggnggaattccttctcccaagtcatcaagactccagtggtgaagaagacagagtcacccatcaaactctccccggctacccctagtcggaagcggagtgtcgcagtttctgatgaggaagaagttgaggaggaagctgagaggaggaaggagaggtgcaagcggggcagatttgttgtgaaggaggaaaagaaggactcgaatgagctctcagacagtgctggggaagaggactcggctgacctcaagagagctcagaaagataaagggctgcacgtggaggtgcgtgtgaacagggagtggtacacgggccgtgtcacagccgtggaggtgggcaagcatgtggtgcggtggaaggtgaagtttgactacgtgcccacagacacgacaccaagagaccgctgggtggagaaaggcagtgaggatgtgcggn

SEQ ID NO: 28408 - DNA, 447 bp, Homo sapiens
  misc_feature (1)...(447): n = A,T,C or G
nattgaagatcgtatganattcggccgngcggnggaattccccggctcgaggggagggcctttgtcctgtccaccattgcacccagcacagagctcatggatagacaggaaaacaaactgctctcaagtaccatctgtagtactacaataccgccatgtcaccggcctggtgtcgaaaggccattttcggctggaatgacagccactcccacccccaccctggggtaatctcagtttccctgctccttgcactgctctcggtcctgtggctctctctgccacccgcacccccaccagcacctctgccgccttctctccctcagcttttccctggggaggagaggaccaaagtcactggggagctctcagaccgacatcctgacctctggagatggggcagaatccccgggcctcagagcagccttcggagggtcccaaggatgtagg

SEQ ID NO: 28409 - DNA, 476 bp, Homo sapiens
  misc_feature (1)...(476): n = A,T,C or G
gccttannnnntttgagaccttgaaanncnnnactgagacccttgacagncnggnggaanncgcagaancccatccacctccacctaatcatacagagaaaggagacaggagctgttggagggcagtgctatgtccaagctctcagcaagcagtaggcagagcccaggcccctgctttcccatgcccaccccttcccagttcagggcaaggccacctctccagggcctttccctcccctagagaggaaactccccaagttcctctgaccagacaggagagtgaacgagagaagaaaattccacttcagcacacacacctggagcctgaggctgaaagctggaatcccagactttgacactcaagaaggcatctccacactttttcagcacctccacctgggacattcatgagcacctggcttccctcccaggggagaggggtgtcccagagacactggggcccttagaaggcactn

SEQ ID NO: 28410 - DNA, 467 bp, Homo sapiens
  misc_feature (1)...(467): n = A,T,C or G
nttagaaaacaactgatgacactagtanagtgcggaggaatttggcttgcacacaggatcactcacatatgtacatgtacccaccacaaacgtgcaagctcctgcacacatgcatgcacacaaacgtgtacacaagtgtgagctcctacacgcatacacacacacacgtgtacatgcaccaaagcatgtgtgacctacagacatgcagaacatgcacgtgtacacataccacagacacgcgtgtgcatgctcctacacaatacatatgcacatatcatgaacagcataagttcctacacacggacgtgtgatacacacatgcatgtacaggtaagcacacatgtacaagctcctacaggcttgctctcacacacgtgtatgcacagcagagagacgtatgagcttctactgcacacatgcacacacacacgcacacgtacattcactacaaacgtgcagcctcctgc

SEQ ID NO: 28411 - DNA, 460 bp, Homo sapiens
  misc_feature (1)...(460): n = A,T,C or G
ntccgtagacatcggacangcggntcggttgcccttcgagnaacnnacacaataacttctccttggctgggttgtatatgcaattaaaaaggctcacagcggacttggggacatctgcttcttcctgaactggggcaggacttggtggctaaacctgcagcccagtgtgcctttggtcactagagggtaggactccttgcttgccgcccctggcttcagtggcacctcccatcaacacacctccattacatcatttgcagggggtgaaaggccttctctggtttgggttggacccaagctggaagccaaggtcagccgcttaaacccacgggccaaggaaaggttggcagagagctaaaaggaccactgcaaacaaaggtccctgacctttcgatggaccacgtaagagcaggtgcctgcccgcaagccctatcctttctggaggctganggaaagccag

SEQ ID NO: 28412 - DNA, 448 bp, Homo sapiens
  misc_feature (1)...(448): n = A,T,C or G
cttgacatcgatagccctagnccagngggtggaattcggtttcggtagcgacggtagctctagccgggcctgagctgtgctagcacctcccccaggagaccggtgcagtcggccagcccccttctccacggaaaccatgtgcgaccgaaaggccgtgatcaaaaatgcggacatgttggaagagatgcaacaggactcggtggagtgcgctactcaggcgctggagaaatacaacatagagaaggacattgcggttcatatcaagaaggaatttgacaagaagtacaatcccacctggcattgcatcgaggggaggaacttcggtagttatgtgacacatgaaaccaaacacttcatctacttctacctgggccaagcggccattcttctgttcaaatctggataaaagcatggactgtgccacacacccagtgattcattcaaagac

SEQ ID NO: 28413 - DNA, 478 bp, Homo sapiens
  misc_feature (1)...(478): n = A,T,C or G
ngagcggggggnnnagnaccctgggtgctccgcanannactgagancctncgnaanagcggaggaattcaagcaagtttatgtacagacctggatagatatatgtgtgtatgttcgcgcataattatatacattattatttttaatagggcaggtttaagcaagcccgtgtatacatacttggataaatggtgtgtgcgtgtgtatatctttttaatagggcgggtttcagtgagcctgtgtgtacatacttggataggtgatttgtgagtatttttttttccagcgtttgggctacagagaggcaggcatttgagcgagctcccccgagcctgcccaggaagcggcgcatcacccctcaggagaggtggtgcctccagttccaccctaagcactgtgccgtcaacccctcctgtatctgcatctgcagggcttgtagtatgtacgttcaattccttcagcaacgttcaatgaatgag

SEQ ID NO: 28414 - DNA, 439 bp, Homo sapiens
  misc_feature (1)...(439): n = A,T,C or G
attgangaccatnttttgatgacccctaatccatgtggtggaattctatggggaagccatccctgcttttcttcggtttgatggcctcgtggagaacaagaagccaagcaagaaggacgtggtcaacctcctcaaggatgcctggaaggaacgtcttgctgaggagcagaaagagacgttcccagatttcttcttcaatttcctggagcatcgctttgggcccagtgatgccatggcctgggcttatactatttttgaaaatatcaagatcttccactccaacgaggttatgagtcagttctatgcagtcttgatgggaaagcggagtgagaatgtgtatgtcacccagaaggagacagtagcccagctgctgaaggagatgacaaatgctgacagtcagaacgaggggctactaaccatggagcagttcaacactgtc

SEQ ID NO: 28415 - DNA, 463 bp, Homo sapiens
  misc_feature (1)...(463): n = A,T,C or G
ngaccgggttttgagacctgatcacgtcgggaattcgcaggttatcctgaatacatgtctaacaattttccttgcaacgttagctgttgtttttcactgtttccaaaggatcaaaattgcttcagaaattggagacatatttgatttaaaaggaaaaacttgaacaaatggacaatatgtctattacgaatacaccaacaagtaatgatgcctgtctgagcattgtgcatagtttgatgtgccatagacaaggtggagagagtgaaacatttgcaaaaagagcaattgaaagtttggtaaagaagctgaaggagaaaaaagatgaattggattctttaataacagctataactacaaatggagctcatcctagtaaatgtgttaccatacagagaacattggatgggaggcttcaggtggctggtcggaaaggatttcctcatgtgatctatgcccgtctctg

SEQ ID NO: 28416 - DNA, 470 bp, Homo sapiens
  misc_feature (1)...(470): n = A,T,C or G
ggaagtgccnnnnaggccccccactgagaccataggtagagcgccgtaagtccgctgacgggcacgctgactggaggctggcggacaggcgacagcgacctgcggcaggaccagaggagcgagagcagcaagaaccacacccagcagcaatgtcagcggaagtggaaacctcagagggggtagacgagtcagaaaaaaagaactctggggccctagaaaaggagaaccaaatgagaatggctgacctctcggagctcctgaaggaagggaccaaggaagcacacgaccgggcagaaaacacccagtttgtcaaggacttcttgaaaggcaacattaagaaggagctgtttaagctggccaccacggcactttacttcacatactcagccctcgaggaggaaatggagcgcaacaaggaccatccagcctttgcccctttgtacttccccatggagctgcaccggaaggag

SEQ ID NO: 28417 - DNA, 459 bp, Homo sapiens
  misc_feature (1)...(459): n = A,T,C or G
nttagaaaaccctgatgacactcagaagngcgggaattcctaccccaggggcagccggagcttcagaagcccttcaagtacacgactgtgaccaagaggtcccgtcggatccggcccacacaccctgcctaggccaccccgccgcggcccctcaggtcgccctggccacactcacactcccagaaaactgcatcagaggaatatttttacatgaaaaataaggaagaagctctatttttgtacattgtgtttaaaagaagacaaaaactgaaccaaaactcttggggggaggggtgataaggattttattgttgacttgaaacccccgatgacaaaagactcacgcaaagggactgtagtcaacccacaggtgcttgtctctctctaggaacagacaactctaaactcgtccccagaggaggacttgaatgaggaaaccaacactttgagaaaccaaag

SEQ ID NO: 28418 - DNA, 460 bp, Homo sapiens
  misc_feature (1)...(460): n = A,T,C or G
nctcgtagaccatagaacaccgtcgnggaattcggcggctaccttactagctgctcggggagccgggccagcaccggcttgggggccggaggcgttcactccagactgggaaagccgagaagtttccactgggaccactatcatggccgggcagtttgacgggggcgtggttctgggggcggactccaaaacaaccactgggtcctacatcgccaatcgagtgactgacaagctgacacctattcacgaccgcattttctgctgtcgctcangctcagctgctgatacccaggcagtagctgatgctgtcacctaccagctcggtttccacagcattgaactgaatgagcctccactggtccacacagcagccagtctctttaaggagatgtgttaccgataccgggaagacctgatggcgggaatcatcatcgcaggctgggaccctcaagaaggaggg

SEQ ID NO: 28419 - DNA, 447 bp, Homo sapiens
  misc_feature (1)...(447): n = A,T,C or G
ngggncggnnaattgaagaccctcagtttgagtgccctcaaacagcgnggnggaatgcatggacctcttggcatttgagaggaaactggatcaaaccatcatgcggaagcgggtggacatccaggaggctctgaagaggcccatgaagcaaaagcggaagctgcgactctatatctccaacacttttaaccctgcgaagcctgatgctgaggattccgacggcagcattgcctcctgggagctacgggtggaggggaagctcctggatgatgtacgtcccggcccagcccagcaaacagaagcggaagttctcttctttcttcaagagtttggtcatcgagctggacaaagatctttatggccctgacaaccacctcgttgagtggcatcggacacccacgacccaggagacggacggcttccaggtgaaacggcctggggacctga

SEQ ID NO: 28420 - DNA, 466 bp, Homo sapiens
  misc_feature (1)...(466): n = A,T,C or G
agggcaggccaatagaaaccnctggaatgatgcacgatcagaacagngcggnggaattcggcgctacgtctgctgcggagggcggcgcgcggagctgcggcggcggcgctgctgaggctgaaagcgtctctagcagctgatatccccagacttggatatagttcctcatcccatcacaagtacatcccccggagggcagtgctttatgtacctggaaatgatgaaaagaaaataaagaagattccatccctgaatgtagattgtgcagtgctcgactgtgaggatggagtggctgcaaacaaaaagaatgaagctcgactgagaattgtaaaaactcttgaagacattgatctgggccctactgaaaaatgtgtgagagtcaactcagtttccagtggtctggcggaagaagacctagagacccttttgcaatcccggatccttccttccagcctgatgctaccaa

SEQ ID NO: 28421 - DNA, 451 bp, Homo sapiens
  misc_feature (1)...(451): n = A,T,C or G
gcccgccaatgagaccatagnatgagcgcctgtagacagcnctcagagctctcctatctggacgccttctggggcgactacctgagtggcgccctgctgcaggccctgcggggcgtgttcctgactgaggccctgcgagaggctgtgggccgggaggctgttcgcctgctggtcagtgtggatgaggctgactatgaggctggccggcgccgcctgttgctgatggaggaggaaggggggcggcgcccgacagaggcctcctgatccaggactggcaggattgatcccacctccaagtctccgggccaccttctcctgggaggacgaccatctctacccctagaggactgtcactctagcatctttgaggactgcgacaggaccgggacagcaggccccttgacagcccctcccacaggatgtgggctctgaggcctaaaccatttccagn

SEQ ID NO: 28422 - DNA, 465 bp, Homo sapiens
  misc_feature (1)...(465): n = A,T,C or G
cgggcagccaaatgaagncctttggnactgacgatctttagaaagngcggnggaattcgtcagatcatcggtaacaaaaagtggtatctttcagctttgtaaaagaaccctcttaaccaagttcattccctcaaatgggaactaacgtctagagagcaaagaaacttctggaattagtggcttgctgataatctcattttataatttgttcagcaatccagcaagaccaactttttaaaaaaattaataacagtagttttatgaaaactaagtaagaaaacagtttccacctatttctgaggtctcctttagaaggagtaacagacagcttttatttctcttaaagttataaaaatcacaatcgcaagtcacaatgaatactgggaagggaaattacttttgcagagtgatcaagtaaatgatagcgggggctaaacttttttagtaaacttgtgaagattacat

SEQ ID NO: 28423 - DNA, 448 bp, Homo sapiens
aatgaagaccctaggatagacggcgtaattcattgactgtataaatgcactgtggaagtggttgttggttattatcagagaaatctctattctctgctctgttcagagcctttcttcacccccgactcttaaacaaaacatggctgcctcctgagaactctgctgcttctttaaccctttcaagcgatggtggctgttttttttgctgccacataccactgggcctgggggtggggtggatgtcttccttgatcacatttatggcttccagaccacctttccctgccaagggtgactggggaaattagtagataattgcaacagaggacaagcagcagcctcaaaggagttgaggctttttggaaaagggggaaaggtttcagcacctggtttactgattttctctctaccataactcttgctgtcattcttaacatccatatagacc

SEQ ID NO: 28424 - DNA, 489 bp, Homo sapiens
  misc_feature (1)...(489): n = A,T,C or G
cggggtcccngnnaattgagncactgcagtccctagtcagtgtggtggaattcccgaggtgggcggatcacctgagatgaggagttcgagaccagcctggccaacatggtgaaaccccgtctctactaaaaatacaaaaattagccgggcttggtggcgggcacttgtaatcccaactactcaggagtctgaggcatgagtgtcgcttgaacctgggaggcagaggttgcagtgagctgaggtcgcgccgttgcactctagcctgggagacaagagggaaactctgtctccaaaaaaaaaaaaaaaaaaaattccggttaaaaaacttttaggggggccagggggggggcttaatgtttgaaaccccaccttttgggaaccccaaaggggaaactttgttaaaaccaccattttgaaaccacccggggcaaaaccttttttttccaaattttaaaaaccaaaccaaaccaaaaaaccccaaattttagc

SEQ ID NO: 28425 - DNA, 563 bp, Homo sapiens
  misc_feature (1)...(563): n = A,T,C or G
agcgcgcnnaaatgaaacccatcgaacncctatccangnggngcgaattcgttcctcatccgcctccttgctcgccgcagccgcctccgccgcgcgcctcctccgccgccgcggactccggcagctttatcgccagagtccctgaactctcgctttctttttaatcccctgcatcggatcaccggcgtgccccaccatgtcagacgcagccgtagacaccagctccgaaatcaccaccaaggacttaaaggagaagaaggaagttgtggaagaggcagaaaatggaagagacgcccctgctaacgggaatgctaatgaggaaaatggggagcaggaggctgacaatgaggtagacgaagaagaggaagaaggtggggaggaagaggaggaggaagaagaaggtgatggtgaggaagaggatggagantaacaccacgaancctagtcagctaccggcaatcgggcagctgaagaagacgaggatgacgatgtctataccaccaaccccaagaccgacgggatgacttgacggcacgaaggaatagttatctaagggacaacgn

SEQ ID NO: 28426 - DNA, 458 bp, Homo sapiens
aggcctcccaactgagaccatagttttgacggcggtattcgcaagatggcagaagtagagcagaagaagaagcggaccttccgcaagttcacctaccgcggcgtggacctcgaccagctgctggacatgtcctacgagcagctgatgcagctgtacagtgcgcgccagcggcggcggctgaaccggggcctgcggcggaagcagcactccctgctgaagcgcctgcgcaaggccaagaaggaggcgccgcccatggagaagccggaagtggtgaagacgcacctgcgggacatgatcatcctacccgagatggtgggcagcatggtgggcgtctacaacggcaagaccttcaaccaggtggagatcaagcccgagatgatcggccactacctgggcgagttctccatcacctacaagcccgtaaagcatggccggcccggcatcggggccacccactc

SEQ ID NO: 28427 - DNA, 442 bp, Homo sapiens
gtggcatgcacctgtgatcccagctacttgggaggctgaggcgggagaattgcttgaacctgggaggcggaggttgcagtgagccaggattgcaccactgcactccagcatagacaatgaagcaagaaaaaaaagaaaagaccttgtctctaaaaagagagagagagaaaccctgcatggacctccattcatatggccgttctgttactagaagggtccagaccaacacaagagcactaggagccaaagatgaaattcacaaaagagcaattatgagaaatgggagaaagatggagggactgcaacatagggctaatggaagttttaaaaaaacagcagaaaatcacagagaagcaatatatgatggacaatcaatgagaattttcaaaaactaggctgggcgttttggctcatgcctatagacccagcactttgggaggct

SEQ ID NO: 28428 - DNA, 459 bp, Homo sapiens
  misc_feature (1)...(459): n = A,T,C or G
cggccgccaaactgagacattaggatgagcggcgtaagtccngncatgcagccaaggtttcttttcatatacttaagcagtaaatcctttcattctgccgtgaggaccatttagttcagaataaatacagctgatcagaaaaggcaaaaagaacagctaaggggtttaaagggtcttggcaagtggtactgagatttaataagctaccaaagggccagaacagcgacagacaccgccaccctggggcacagatggcagacaaggggagagggcaaagagctattggggaatctgcacttgtgagggtcaaaacccacactcatcttgtgctgccgccctgctcctccttgcatccatgttcacaggttgcccacccaacggttttcctgtctctagtccctcccactgaggacccacctcacaggaagaaaaccatctgactcataaagggatccgacn

SEQ ID NO: 28429 - DNA, 473 bp, Homo sapiens
  misc_feature (1)...(473): n = A,T,C or G
cgggtccnnnttttgagaactggagnaccgtcgggaanncgctgnctgctggagcctctagtccaccctctccagtggtcactcttgagacacatctgtcacttaattatttccttctttatcaaatatttattgctcatgtacttcgtgccagctttctgcctctgtagtagccctgcacaaagggtggggagtcaggagaccatcccaaaggcatctgcccgtcttcctctaccatgcggctctctgctatagcatggaaatgtgagtggggaaaattttcagcaccaaagcttcactcatacccagttttgtttctgaaactacggcagggggcaggaagaggagcagaaaagaaaggctgggccaggcataggggcttatgcctgtaatcccggtactttggcatgctgaggtgggaggactgcttaagctcaagagtttgagaccagcctgggccacatagcaagacg

SEQ ID NO: 28430 - DNA, 462 bp, Homo sapiens
  misc_feature (1)...(462): n = A,T,C or G
aggccagccaatagaaaaccntnnnaactagagacactagaccangcggtggaattcgggatcttttggagtgatgatttatttttctacgatgtgtagcttaatttatggtctatgtacattttcacctttgcagcagctaaccttcactcatttactatagtgatttttagaatttttactgtttgtcaataacttcctttgcaaagagttcctgctttctggcatgacttttttattttatttatttatcttttttggacagagtctcgctctgtcaccaggctggagtgcagtggcatgatcttggctcactgcaacctctgcctgccgggttcaggtgattctcctgccttggcctcccaagaagctgggactgcaggcacacgccaccaggcccagctaatttttgtatttttagtagagacggagtttcgccatgttggtcaggctggtctcgat

SEQ ID NO: 28431 - DNA, 471 bp, Homo sapiens
  misc_feature (1)...(471): n = A,T,C or G
aggagtgcccnnnagggccgccaactgatgacttctgnatggaggccgtaagncgcacgacaattatggtaaaaaaacatttgcttggtctaaagaagatcattaatgttttgtgaccatacaagttgtaacagtggattgtttttatgtgtaggtattgttaaatacagggactgtttccaggcacagaatatgaatcgtaagttaggatggacattagatgtgattatgatgataaagcgaaggtctgcggtcctgtatctacagacacgtggtgagaaattagaacaaactggagacgggccattgacacatggactctgcctgggcatgttaggttaattctttgactccaagccttaaaatactcacatggagtcagcgctcacctcattcacacaattatcatagagctccctggacactgaacctctaaagggaaaaggtctaccctggagccaggagcatcag

SEQ ID NO: 28432 - DNA, 436 bp, Homo sapiens
  misc_feature (1)...(436): n = A,T,C or G
actgatgaccatagaacacgcggnggaattccgggtctgctacggcaccgcggggctgcagaaacccgggggccaagggcgggctgcttgccgctatggctggcagtcaggacatattcgatgccatcgtgatggcggatgagaggtttcatggggaagggtatcgggaaggctatgaagaaggcagtagtttgggtgtgatggagggaaggcagcatggcacgctgcatggagccaaaatcgggtctgagatcgggtgctaccaaggttttgcttttgcatggaaatgtctactgcacagttgcaccactgagaaggacagcctttaaaaactcttctcggccgggcgcagtggctcactcctataatcccagcactttgggaggccgaggcgggcagatcacgagatcaagagttcgagaccagcctggccaan

SEQ ID NO: 28433 - DNA, 458 bp, Homo sapiens
  misc_feature (1)...(458): n = A,T,C or G
agggccgccnnaatgagactanagcntcgcggngactncgcagtcgcatgttattctgctttccctgatttttatcttctcaccattttatctcttttaacaggagcctgagcacaaggtttaatgaggaagctggggctataaatatgtgtgtatatatgtatatgtatgtttgtacaaatctccatgatgtttgccaagtttgaatgcgcaaaacttggaaaatgtgacaataaagaataaaagtagtaactcacattagtattaagatgtgtttacatagataaattttttaaaagagcaccctggcatctgttcttctgttgaagcaacaaaacatttatgtaacgtaaaaaatgaattgcatgtgcctgggtgcggtggctcgtgcctgtaatcccagcactttgggaggctgaggcaagcggatcgtctgaggtcgggagtttgagaccagc

SEQ ID NO: 28434 - DNA, 461 bp, Homo sapiens
  misc_feature (1)...(461): n = A,T,C or G
agagcaggggaatgagactaggacattgcaccgnctggnggaattccttcaaggcagaaacagcctcagtttctcagatcctagactcccatattctcttctctaggaactaagaactcattcctcactctgaattgactgtagctaaaatgaagtctcttctccctgccttggacttacatgcatggactccaggggaggatgagaggcacccgctttcaggcgccatgggaggcggcatgtctcagagcctcactcacctgttcccaagctgacgacgacacccatgtcctcagagtcttttttcataatgatggcggccagaatcttgcggccgagcaaggagggctggaagctgttagtcagagtgttgaagcaccggtggctcagcatggctatctggtcatggaaggtgctgccagtgagagggagctgtggggaaaagaggctgtgtcagcacc

SEQ ID NO: 28435 - DNA, 453 bp, Homo sapiens
  misc_feature (1)...(453): n = A,T,C or G
cttgacncccctngnntttgatgacccttagtccgngcggnggaattctctatcaccactaccactccaagaggggcatgtggagcgtccgcagcaggaagggctctcgcacgggggcgtcttgaggacgggcagcccctcccagccccggtgggagtcccgaggcagctgctgggggctgggctttgagctcggtcccgagagacccggcagggctggtcagaggggcacagccaccgcctgtgcctgcccctctctggcccactgggcgtcgtgcccctccccggagaggcagccttcacggcgggtcagggcctggccttggtccccactctgcgatgatttctgtgaaattttgctgtagcgatgacattgttttcagaatttccaagagttctgtctgttctgttttttattcagaatgaaatgaaatattttttttagttctgaaan

SEQ ID NO: 28436 - DNA, 462 bp, Homo sapiens
  misc_feature (1)...(462): n = A,T,C or G
agagcagcnnnaatgagactagagcntgtgcggnggcatncaaggcaagggcgaggttagagccaagcctgtgggcagggctacgggcagggggttgggatgaatgtgggtccaggcccaaaggaaaaggttgaagttatagccaggcctgtgggcgaggccgcagcagggcggccataggggaaggagccaatgtgttatgcatgtagaaaataggtaactacgtcttttgctctgttactatttcaacatttgatgtaaaaaacattttctatgcagctaaaagaattgtttttaaaaataatttctaggttttctgccttgctttaaaacatcttttctttttttttgagacaaaatctcactctgtcaccaaggctggagttcagtggagccatctcagctcactgcaacctccacctcccaggttcaagcgattctactgcctcatgcgtccaagag

SEQ ID NO: 28437 - DNA, 511 bp, Homo sapiens
  misc_feature (1)...(511): n = A,T,C or G
agtggtnaaggcccgcccgcccacggaganccatccgtctgtatcgcngtaccgnnancagncnnggngnnngaattccagcgactgggaggcagagcgtgcatcttacaaaagtagagagcacaaagttatattctctgccaggctgtgtgtactcgaagccgctggcagtgatacgcgtgcgcatgctcatgggaggtgtgttgacacgcatacgcgagactttcatctatacaaagaagctttttaacagaaaattattcaggtgtggaaggacacacctggagtcccatgtacttgggaggctcaaaggtgagaggattgcctgggtgacaacagaaagaccctgtctctaaaaataaaataaaaaagaaaaattcagaggccgggcacagtggcttatgcctgtaatcccaacacaatgggaggctgaggcaggcagatcacctgaggtcaggagtttgagaccagcccggccaacagggtgaaaccctgtctctactaaaaatta

SEQ ID NO: 28438 - DNA, 465 bp, Homo sapiens
  misc_feature (1)...(465): n = A,T,C or G
agacgtgcnnnttaagaatacgttggccattgcaccgncnggnggaattcgaatataagttaaaggggaatgagaaggagactgtgcatagaccagtgatgactctaaggtatgtgattaattcaaccctctgcccctgaggtccccattcatatcctccctcatccccccagaagtagaaagatagtttttgttgagagggaaggaagactcctggcttcccctagtctagatattgcagattccaacctgttactcacaagttaggggaagagagagaaatttggaaccaggaggctctgagatctccaccctgacatgcctttcccacctgaagagccttctgggataaaccctgggttcagcctggcaccccagccctcacctgccccgtgggtccatgagcacttcccaccattgaggcatgtgttctggctgcagtagtcactgtggaggcagcactgg

SEQ ID NO: 28439 - DNA, 459 bp, Homo sapiens
  misc_feature (1)...(459): n = A,T,C or G
agagcagnnnnaatgagaatacagcntgngcggnggcattncgaattttctttgacttgagcttttgagcttcatgaatctagatgtctgtatttctttctagatttgagagattctcaggcaacagacattcatttacgtgagctaggtatttcttctattctcctgttgggaccttggtaatgcacatgctcattcatttaatgctgcatcggagcttctgtgtgcttttgtcgtttttaattcacttttctctttagtttctctaactggataattttaaacgatgtgtgtttgagttccctgatgctttcttctgcataactgagtttcctattgaagctattaattttttttttcagttgtcagtgtattcttcagtttcaagatttctgtttggttctttagagattctattcctttattaaactgtttggtttgttcatgtattgctttccg

SEQ ID NO: 28440 - DNA, 552 bp, Homo sapiens
  misc_feature (1)...(552): n = A,T,C or G
ngtagatcacactcgngnnnnatcgatccccactccgtgtggggaattccgggagctctctagcatttcttctgcacctagggagagcccactgctaaaaaaggcctagtcaaatccttatgtgtacatggacatcaagattgggaacaagccggctggctgcatccaaaccctcctgcgttccgacgtcgtgcccatgaccacagagaattttctctacatgtgcacccatttaaaggactcggcttcaagggaagcagcttccaccgcattatcccccagttcatttgccagggcagtgatttcacaaaccacggtggcaccaggggtctgcgcaggcatggcactaagtgtcccatggcacatttggccctcatggaggcctcaaaagggcaggaccagcaccctcttctacggaggaaggaacgggcacagcagaaacaaggagagtcagcaattaccagccagccaaggtcctggaagctgacgaaagctcgtgccgacggcagacctgccggncgtgggagccgtggacgtcatctgcagggacan

SEQ ID NO: 28441 - DNA, 466 bp, Homo sapiens
  misc_feature (1)...(466): n = A,T,C or G
agagcagnnnnttaatgaatacctaaggcctctgcancgncnggnggaattcctgaaagagatggatcttgtgcagaccagggttgttgagtgaggggatcgtgttatggggaccgtgggaaagaggacagctcagggagaagtgacctggaaaggtcctgtttgcatctgacccatctcaactggcccagcatcccaacttctctgcagcgaaagggtggcgccccgcagcctcgggaggcctgcccaggctcccgtggagcttccaacagctgcttggccccgcagctgcccccacttcctttgagacctgcactctcatgcttgccgcatcatgcctccctgtgggggctttgggcatggaggaggcagaagagggggtgccaggcctcctgtatttggggtcttcccccagaggatgtctcatggactctggccccacacactcacaatgactctggctggc

SEQ ID NO: 28442 - DNA, 553 bp, Homo sapiens
  misc_feature (1)...(553): n = A,T,C or G
nttcgatcacagtccgangggnggtattatgacatgccttattacaatttacagcagagttttcttcaagatatggtgattgccatcctgtattttttattggctcattaaaaagctgcttttcaagaggccttctatgtgaaagcccgagatagaaagcttcttgctatctacctccaccatgatgaaagtgtgttaaccaacgtgttctgctcacaaatgctttgtgctgaatccattgtttcttatctgagtcaaaattttataacctgggcttgggatctgacaaaggactccaacagagcaagatttctcactatgtgcaatagacactttggcagtgttgtggcacaaaccattcggactcaaaaaacggatcagtttccgcttttcctgattattatgggaaagcgatcatctaatgaagtgttgaatgtgatacaagggaacacaacagtagatgaagtaatgatgagactcatgggcctgcatggagatcttcacagccccaccaacaggaagatataaacgacgacgatgaacgtgagcgccn

SEQ ID NO: 28443 - DNA, 456 bp, Homo sapiens
  misc_feature (1)...(456): n = A,T,C or G
aggcagnnnaactgatactaagcntggcggnggcancacngncagcnggagggcacccacagcccaagtggagagcttccggattacctatttgcctattacaggaggtacaccctccatggtaactgtggacggaaccaagactcagaccaggctggtgaaactcatacctggcgtggagtaccttgtcagcatcatcgccatgaagggctttgaggaaagtgaacctgtctcagggtcattcaccacagctctggatggcccatctggcctggtgacagccaacatcactgactcagaagccttggccaggtggcagccagccattgccactgtggacagttatgtcatctcctacacaggcgagaaagtgccagaaattacacgcacggtgtccgggaacacagtggagtatgctctgaccgacctccagcctgcacggaatactcacttaag

SEQ ID NO: 28444 - DNA, 458 bp, Homo sapiens
  misc_feature (1)...(458): n = A,T,C or G
agagggtacgcccggcgcccatgagnccctnngactgacgacattcgganagccnggnggaattcgagcggagtgggcgttagctgaagacatgtctgtcccacttgtacctgacacataagctggggagcctaagagagctggtggaagtgtgtctgaactcggagtgctctgggagcgggctccacagcctccttgtgggctccagccccttgtcagccgcagcctctcttgagggggactccctgtctcctgaggcccagctgggccaggactccatcctttcagatgcccctgcaggcctggggctccttctgggaagtatggggcctagggcttggtccccctcttctgaggccctctcctgtatcccgacctggaagctttgatgggtcatgggccatgccataccccctgtggcaatggagtgtgtggatgctcacctgtgccatctgtcc

SEQ ID NO: 28445 - DNA, 448 bp, Homo sapiens
  misc_feature (1)...(448): n = A,T,C or G
agggccaggccggcgccatgatgctctccgatgagcgtcgtcgacnnncancnacagaggngnttttcatttatacctcttgtccttttggtttatatactttgtttaattaatccctttactgtcatttgagtgtaattgtggggatgtggactgtggtcagtcttcattttttacgagaaatttacaaaccatttatttgctcaccattttccttttagtacctggcatgtagtaggttcttaaatagatatttgatgaaatattgaatgaattgttagaagtttttatagttgtgggaagcttttatggtagaaagatacaatgactatgcaaatataacaagttaaaagtcatcttttaaattatggttttactttggcttcatcccattttttgtttttgttccttaacatggtcaaggaaatgaaatattttaaacagtgtg

SEQ ID NO: 28446 - DNA, 458 bp, Homo sapiens
  misc_feature (1)...(458): n = A,T,C or G
agagttaggcccgccgccctactgagcccatcgtcctgacccttcaganagncnggnggaattcagcccatacggatgctggagattgagggtgaacgggagcttccagaggtcagttgccgagaactggacctgcggatcgcagaggaagaagaagctatcttgttagaaatcccgcggctcccacctccagctcctgcagaggtggaaggaataggagaggcactgggtcctgaggagctgaggctgacaggctgggaacctggggccctactcatggaggtgacccccccggaggagctgcgtctgccagccccacccagcccagagaggaggcccccagtccccccacctcctcgccgccgccgtcgtcgccggttactgttctgggacaaggagactcagatctccccggagaaattccaggaacaactgctaaccagagcccactgctggga

SEQ ID NO: 28447 - DNA, 429 bp, Homo sapiens
  misc_feature (1)...(429): n = A,T,C or G
ngcttatgatcaccttggtggggcaggggggtgctgaaactgatttccagttcttctcgagagctcaagtaattccccaatattaaattacatgacagtcacactaggaagccataaagatctcgttcggtgacttatagtcatgtaattgtatatttttatgattatgggagaaaacctgtcatgcatgtcgtacatccttcttgtttatcatatgaggaactgaggcacagaaagaaaaggttaaagacacagaactagctggaagctgggctagtgttagaatccaggttttctgactcccactcagttttccatgtccacggaatcagcactggcctcttcaccgtggtggcagaggatgatggagcatgcatgccacatggcagcagagtgggacacacccagtggctgcaggggcgctgcctt

SEQ ID NO: 28448 - DNA, 452 bp, Homo sapiens
  misc_feature (1)...(452): n = A,T,C or G
gaggccaggggngnnccccaatgatgactttcgatagagcgcgtaagacccacgggcagggcttgggacctccagcctgccttgcccaagcccacctgtggtgggctcccttgaggcccaagcctccccgatgggcactgccccttgctctgcggaggctggtcccatcgactgcccaagggctgaggagtgcaggcacttggggcaggactggtgggcagctccacccacggccctggtgcgggatctactaggtgaagccagctgggctactgtgtcgggtggggacttggagaacttttatgtctagctggaggattgtatatgcaccaatcagcactctgtgtctagcttggggtttgtggatgcaccaatcagcactctgtatctggctaatctggtggggactaggagaacttttatgtctagctagaggattgtaaatacaccaa

SEQ ID NO: 28449 - DNA, 458 bp, Homo sapiens
  misc_feature (1)...(458): n = A,T,C or G
agagggaagcccccgcgcccatgagnccttcgcattatcgccatcggaccagccnggnggaattcggcagggaggggctaggccttgagctaggagcaaggacatgggccgccaggcttggttgttactagctgtgcaaccttgggcgagcctcttcgctttgctgggcctcaggttcccgagtggaagactgggggtcagaacagctgcccttctgggagagcatcaagagaaagtggtataagtgatgggaagtgctttgaagaaattaaaggtctgtctaggagctgggggtaatcatttacagatgaagaaactgaagtctagtcattgactggcccgagttcacagagtggttttatagcaaaacagggacttgagtccagcttattggattcttcccatcagatcatattgcaccaggtatgtgtagacatgaacacataccattcctctaa

SEQ ID NO: 28450 - DNA, 481 bp, Homo sapiens
  misc_feature (1)...(481): n = A,T,C or G
tggtggtannagaatttgagaccctannnagngctgtagtcattagtccatgcggtggaattccacatagtcgccgtctataaattatagtgacgcgtatgtacccgatgagtagaggctttgttgctttaaagttgcatgcttcgcttgtcactgctgtgcacaaacctggctttgctgtaatagactcttttcaaaatgaagcatgctacagccagatggaggacccatataattggccgagggggtgacagtttatatataaacatagccacattaattttgttaagaaacactaatgtcgcttgagtgaagttgtaaaaacttaaatatacttcactgtatttaatgtcttgctgggttctgtggggattatatgtcatcgcggtctctgtcttcaatcaatctgaagtttcattggggagataaatctcacatgaaataaatagcagtatgcatgatatactctgtggtggaatgc

SEQ ID NO: 28451 - DNA, 460 bp, Homo sapiens
  misc_feature (1)...(460): n = A,T,C or G
nctgatagcctanaagngctgataacttcttaccgcctgcctgtagcggcgttgttgccactccgccaccatgttcgaggcgcgcctggtccagggctccatcctcaagaaggtgttggaggcactcaaggacctcatcaacgaggcctgctgggatattagctccagcggtgtaaacctgcagagcatggactcgtcccacgtctctttggtgcagctcaccctgcggtctgagggcttcgacacctaccgctgcgaccgcaacctggccatgggcgtgaacctcaccagtatgtccaaaatactaaaatgcgccggcaatgaagatatcattacactaagggccgaagataacgcggataccttggcgctagtatttgaagcaccaaaccaggagaaagtttcagactatgaaatgaagttgatggatttagatgttgaacaacttggaattccagaa

SEQ ID NO: 28452 - DNA, 568 bp, Homo sapiens
  misc_feature (1)...(568): n = A,T,C or G
ngcagggcnnnattgannncttttcggtcactagtcagtgtggtggaattccagcaggcgcagcccagcctcgaaatgcagaacgacgccggcgagttcgtggacctgtacgtgccgcggaaatgctccgctagcaatcgcatcatcggtgccaaggaccacgcatccatccagatgaacgtggccgaggttgacaaggtcacaggcaggtttaatggccagtttaaaacttatgctatctgcggggccattcgtaggatgggtgagtcagatgattccattctccgattggccaaggccgatggcatcgtctcaaagaacttttgactggagagaatcacagatgtggaatatttgtcataaataaataatgaaaacctannnnnannnnannnnnnnnnnaaaaaaaaaaaaaaaaaaaaaaaaaannnnngggggggccctttaaatttaaagggccctttaaaaccccgttaatcaccctgggtgggtcttttatattgccacctttttgtggttgccccctccccgggcttttttttggccgggggggggcccctcccctttt

SEQ ID NO: 28453 - DNA, 449 bp, Homo sapiens
  misc_feature (1)...(449): n = A,T,C or G
agggtccggnnaggcgccattatgacttacgatgagcgcgtcgnaccnncacatgacaggaagaggctggagattgggaattggccatcaaccaagcttgtagtagtaaagtcatggtcccgcattggaattacttggggaacgtatacagttctgatacccaggctctcctagaccagttcaaccaattctaggtgggggactcaggcatcagtgtgtttcgtagctccccgggtgttttccctgtgcagccgagcttgggaaactgccatgctttttggatgtcaaggcgctgttggaggctgggtgtgacagcacagagccaggttgtcttgtggaaaccacagccacgggtttgccactggctcagcatggcctcactgccagtcccagcctggctgagggacaagatggtttctcttgggagttcctgagtggagcacccttcc

SEQ ID NO: 28454 - DNA, 458 bp, Homo sapiens
  misc_feature (1)...(458): n = A,T,C or G
agagccagnnnaggcgccactgaggccatccgaatgatcggctccgganagncnggaggaattcctctgtgtctatgcctgcccttttcctcctcagaatcagttttcgagaccccttgtaatggaaggctcatttcttggaggctgtggatgatgctttcaagacaatggatgtggatatggccgaggaacatgccagggcccagatgagggcccacatgaatatcggggatgaaccgctgattggacggcggagctgggatgacatacaagtcgagctcctgacctgggatgaggacggagattttggcgatgcctgggccaggatcccctttgctttctgggccagataccatcagtacattctgaatagcaaccgtgccaacaggagggccacgtggagagctggcgtcaacagtggcaccaatggaggggccagcaccagcgtcctagatggg

SEQ ID NO: 28455 - DNA, 449 bp, Homo sapiens
  misc_feature (1)...(449): n = A,T,C or G
gagccnnnnngggggcatgaggactccgntngaccgctttcganggacggaggnggacataaaaagggaaacagtcccctcaggagtgcacaggcgtttcccctgtggtgttcgctcacgcccagctcctgtgcctacactgtaattgtcatttaatccaggggaagagtggcatggacgcaggtcatgctgggagcagaagcacgggatgctgcctccctggggctcagctcgcggccccgtgggagggagctctctcttggaggtctcatcctgaacctcgggtcaggaagtagatgagggagatgggtgggccgcaggcctgggcaccacaccgcggctacctgaatctgattaaaggaggcgctggaggccctggagcgtgcacctgggaggccgctgcccaggcgcaggcctgtggctttcaaggtggaaagcatggagcaccn

SEQ ID NO: 28456 - DNA, 458 bp, Homo sapiens
  misc_feature (1)...(458): n = A,T,C or G
agaggcccnccnaggggggcatgagnccttcgaatgatcgcctcngnancagncnggnggaattcgagagaacgcagcgacgccaaggtgagactgggagggatttgcctgggtttgtatcccagctgtgctcgttgtgggccacgtgacttttgatcagcctcatcacatccctcagcctcagtttgcctgtctgtaaaagggtcacagtgtgcttgtgcccattaacgaggactgtgaaatgcttggcatgaggtagatgataaccagatggtggctgtgaggattggcatggagctgagggggtcctgataggggcagaatgaggaattccgccacccattcccttgggaatattgcagggaacctggagccggactgcttggattcaaatcccagctccaccgcttaccagctgtgtggccttatgcaaggcagttaaccactctgggcctcag

SEQ ID NO: 28457 - DNA, 452 bp, Homo sapiens
  misc_feature (1)...(452): n = A,T,C or G
agaggccnnnnnggcgcctcagtggcctccgactgacgccgtccgacagcgcaagaatggngggtccacgtagaaaccaggtgagggaggagcacncctttgggctggggtgtatgggctggtgaagcagtggggcaggaggggaactgccgctcacagggctgtcctggtcgccctcgggatacagccagacttgacccgagtggctcccggggctgaatggggaccgccgggtgcatatcccaggaggcagccttcagctcagtggggaaagcagtttccaaccttagagctgcccaacactagcacagggcacctgagaaaggaggggcccctctgcctttactctgactcccactagaggcagctggttcctgcagggaactctggtggggggtgagggggtggctggttctcagtgggcaggggtgaccctactgcggtcagtgggn

SEQ ID NO: 28458 - DNA, 464 bp, Homo sapiens
  misc_feature (1)...(464): n = A,T,C or G
agaggcncnnnnnaggcgcgcactgagncccctcgaaangatcgncactcggancagccnggnggaattcccatgctgcagagctgatggagtgatgttgtgggcacaatgcatctgtcagctgcctcctttaacagccatgccttctggaatctggaagaggacaccactcctgcagtcaccgggcagccacatagcagctgcaggtcccaggagggcctgaggtcaaagctgtggaaggccctcttggtatcagggctctctccccatggcctcttccccacctctgattgctggttgtggccccatagctcatcacccctgtctcctgctgaatgtgcagggctgatgtggcactgaggagctgactttggtcaaaggccaggctctgcccagcaggggacttgactgcccctcccgctgcgtgtccaggtccaaagtggagagcctgcctttgggtttag

SEQ ID NO: 28459 - DNA, 531 bp, Homo sapiens
  misc_feature (1)...(531): n = A,T,C or G
natcggaccacagtcggtgtgctggaattccaatcttttgtctacaatgtgaatacatttatccttcggngaccatcaagactttcaggaaaggccccgcctgtctctgcgcggccactttgctgggacaaaggtcaactggaagaagtgggcaggcccgaggcaggagagatgctgaggagtccatgtgcaggggagggaaagggagaggcagtcagggagaggaggaggaggtaccgccagaaggggatcctcccgctccgaaaaccagacaccgggtcttgccctgtggtccaggcaggagtgcagtggtgcaacctcagctcactgcagccttgacctccccgggctcaagcgatcctccggccacagcacttggctgttcagcggctggaggagcagggccccaggtcctccccaccctcacctgctgctcccaggtcgtggccgtcttgctcttccaggtccttctctanggatgcaatattcacattgctaagatgcaggtctaacgcagaacctgtncacagn

SEQ ID NO: 28460 - DNA, 467 bp, Homo sapiens
  misc_feature (1)...(467): n = A,T,C or G
agggcgggggnnnnnngggaactgatacctccngaaggactgagaacctcgagangccggctatgagtttgacatctgcttcacctcagtgcagaagagagcgatccggaccctctggacagtgctagatgccattgatcagatgtggctgccagtggtgaggacttggcgcctcaatgagcggcactatgggggtctaaccggtctcaataaagcagaaactgctgcaaagcatggtgaggcccaggtgaagatctggaggcgctcctatgatgtcccaccacctccgatggagcccgaccatcctttctacagcaacatcagtaaggatcgcaggtatgcagacctcacagaagatcagctaccctcctgtgagagtctgaaggatactattgccagagctctgcccttctggaatgaagaaatagttccccagatcaaggaggggaaacgtgtactgattgcag

SEQ ID NO: 28461 - DNA, 450 bp, Homo sapiens
  misc_feature (1)...(450): n = A,T,C or G
agagtnccaggcgtccncccctaaatgaccatgagacccctcgaanncccngctacnaggctttggcccaccaagtgtgtaccatgctgctattgtcatcttccttgaattctttgcgtggggccttttgacaactccaatgttgactgttctacatgaaacattttctcaacacacattcctcatgaatggtctcattcaaggtgtaaagggcctgctctcttttttgagtgccccactcattggtgccctgtctgatgtgcgggggaggaagccctttctcctcggcactgtattctttacctgcttcccaatcccactgatgaggatcagcccatgtttatgcaaataccgtatacgtgataaacgtccctacaacatgatctttggaatgaactaagacaaaggaaactctgaggaaggaccatggcctgagaggtggaattcatt

SEQ ID NO: 28462 - DNA, 450 bp, Homo sapiens
  misc_feature (1)...(450): n = A,T,C or G
ggagcgccagcgttccccccctaatanccttgagaccctcgaaagngcggggaancgccgtgggccccctgcctggtctacatcctaaagagatgtaccgtcccccctccatgcgggcaccaccactcccaggagccaagctggaggaccgcgacctgggctgggagcaaagctgactgacacgggtggaggtgaccctgagccaagttctctggcacttgctggacatgtcccctaccctcttcccaagaggagccatcccacatttgggtagttagtacccaggactggttggactgatcgggttagggaccctagagggttaagggaacaacagagatggggctgcaatgccctgtctggaactccgctctcccgctggggtggttctgattgtggctcatgcctggttgcaaattggtttttaacccacaaattgtgattattttt

SEQ ID NO: 28463 - DNA, 564 bp, Homo sapiens
  misc_feature (1)...(564): n = A,T,C or G
agacttttnnnagggggccnnagggnnnnnnnattcgaaacccctccgaaccactatccaagtggtggaattccttgcagagaatctgggggcagcagtggccatcctgggggggcctggcaccgtgcagggggtggtgcgcttcctacagctgacccctgagcgctgcctcatcgagggaactattgacggcctggagcctgggctgcatggactccacgtccatcagtacggggaccttacaaacaactgcaacagctgggggaaatcactttaaccctgatggagcatctcatgggggcccccaggactctgaccggcaccgcggagacctgggcaatgtccgtgctgatgctgacggccgcgccatcttcagaatggaggatgagcagctgaaggtgtgggatgtgattggccgcagcctgattattgatgagggagaagatgacctgggccggggaggccatcccttatccaagatcacagggaactccggngagaggttggcctgtggcatcattgcacgctccgctggccttttccagaaccccaagcagatctgct

SEQ ID NO: 28464 - DNA, 455 bp, Homo sapiens
  misc_feature (1)...(455): n = A,T,C or G
ggaggtgcacgggtcgccccaatgaaganccttaaggatctngtacanngcgccggaantcgccagcactcgaacacacagactttgggaaagtgaaaagctccttatccctggggcttgaggggggaaaggggtagggtgggtaagagtccatgggggtgcccactcccaggagaggggacaatgaagggacaggcctggagttactaggacaggcctttgtgctgagtagcaatgtatacaccatttgggctatcagaggtacccctgggcaggagcctctacatccccttccccctcctctctccatgactcttgacatcctagcttcttctaaggggggagggaaaggggggagatttttatatatatatacatatatatatatcaagttttaaattattgatagttcatctggattaccaaaatcactctgcagccctgcccgaggctag

SEQ ID NO: 28465 - DNA, 455 bp, Homo sapiens
  misc_feature (1)...(455): n = A,T,C or G
ggatgtgcccggggtccnncncccttgganccttgntgatctagcacangcggcggaantcgcagaacgacctggccagcctcatccaggcgggccagcagtttgcccagcagatgcagcagcagaacccagagttgatagagcagctcaggagccagatccggagtcggacgcccagcgccagcaacgacgaccagcaggagtgacgctgcctgctcccggtgtgaccgcgtccttccctggccgacccgaaggaagccttctggttgtctgccacttcctcctgttggactgcctgagagaggggaagagagagacctcggacctgcatgtcaagatggattttccccttttatctctgccctcctccactccctttttgtaactcccttacagcccccagacccttcttgaaacgagagccagcaagctgagcacagaccagcagcgacctc

SEQ ID NO: 28466 - DNA, 480 bp, Homo sapiens
  misc_feature (1)...(480): n = A,T,C or G
gcgaggggnnnnnttcgtggtcactacttcangacgngcaattcgcgaactcttcaactttcccaagatctcccgtgaattgctggcagacctggggccagagcccaggccccactctcaggccagcgctgcttcctggatcctaccccgcctccagtgataagagggggtgccctacatcaccccccacaccgccgaaaatacacactctgtttcttacctgccacaactcttcggatctcactcacaaaagtctggaggtaatatgggacacctgggctgtaatgggacgagagcccatgacctccgaaatccatggcaacgtaataaaagtctgattcagtgaataaaacctaatgcctcccggaaataaaaaaataatactgcctaaacctcccgggccgcttgttataaaggggcccatcaacacccccaaataacctttgtttgtctattatagatcccaaccttttatgtttg

SEQ ID NO: 28467 - DNA, 474 bp, Homo sapiens
  misc_feature (1)...(474): n = A,T,C or G
gagaaaaannnttcgtcgacctcactagggagngtggtggaattccccggctctcgtgggtagcagaggaggccgtgggggatacaggcaccaggtcgcagcgctgcagaggtgcgcaagggccgcccaaagaccagcttgggcctcgcactgcgcccgaggcagacacagggcgttccatcctcttccctccccgctcccgcacagaggggcgcccaggaggcagtgacagtcgtcgcggaatcctgcgtgtgacaccccgcccctgcccagcggattagggagctgtcctctggtaaaaggatttctgggctgcttccagcttggggccctcatccctgccctggcaggcctttctacaccgatctgcatctagtggggggtcagcgtgagcagcagcgccgtgagttctgaggccaagaaccttctccacttgagaagccttcctgggggaggctgagtgggccaggcctg

SEQ ID NO: 28468 - DNA, 445 bp, Homo sapiens
  misc_feature (1)...(445): n = A,T,C or G
agaggcccgggtcccccaactagacccctgaanacgtgngggaanncaaagaaccatntatgtccacttttggtggatttcccacgatgcgtgagcacttgattaatttcataacctacagagagacccttggctcttcctacaaatggcccctgcagttgaagctgttggaatcttgggccgtcacctgcatgactcatggtgatgctgagtatccaggaggaaatttccagaagaaacagaccgtcagtcacgggcttgcacttcacagacctccttatggccaagatgagcctcatgttttaacaaaacagttcttgggattgaatgactcacatttaccttgtgctaggttctaaagattgaatccacattttgttactaatgattttcccgctaacataaagatgatgagcagggcactatcatacacactggctgagaa

SEQ ID NO: 28469 - DNA, 452 bp, Homo sapiens
  misc_feature (1)...(452): n = A,T,C or G
gaattaaaaaganngnaaaattgaaaccctnctgatgacccttaaaccagctggnggaattcgccaggggtatggggcgccgggggctccctgaaggtcaccattctgcagagcagtgacagccgggcctttagcactgtacccctgacacctgtcccccgccccagtgactccgtctcctccacccctgcggctaccagcactccctctaagcaggccctccagttcttctgctacatctgcaaggccagctgctccagccagcaggagttccaggaccacatgtcggagcctcagcaccagcagcggctaggggagatccagcacatgagccaagcctgcctcctgtccctgctgcccgtgccccgggacgtcctggagacagaggatgaggagcctccaccaaggcgctggtgcaacacctgccagctctactacatgggggacctgat

SEQ ID NO: 28470 - DNA, 433 bp, Homo sapiens
  misc_feature (1)...(433): n = A,T,C or G
ntttgatgacccttatagaagtgcggtggaattcatgacggagtcgtgctctatcgcccaggctggagtgcaacggcgtgatctcagctcactgcaacctctgcctcccaggttcaagcaattctcccacttcagtctctcaaatagctgggattacatgcacccaccatcatcatgcccagtgctcatcttcaaactctatcagcgggcaaagcatgtgtacagcgaggctgcgcgagtgctccagtttaagaagatatgtgaagaagcacctgaaaacatggtccagctgctgggagagttgatgaaccagagccacatgagctgccgggacatgtatgagtgcagctgccccgagctggatcagctggtggacatctgtcggaagtttggggctcaagggtcacgacttactggagcaggatggggaggc

SEQ ID NO: 28471 - DNA, 454 bp, Homo sapiens
  misc_feature (1)...(454): n = A,T,C or G
gcaagtgaanagaaagaaaaaatttgaaaaccctnctgacgaccctctagacagctggnggaattccgcagaaacagggccttcgagacccagatgacgcgcctggaggctgagttcgtgcggcgggaggcacccccatcctatggtcagctcatcgcccagggcctcattccacccgtggaggactttcctgtctacagtgcgtcccaggcctctgtgctgcagaatcttcgcacagccatgcggagacagatgcgttggcacgcctcccgccgggggccctcccgccgccgcctcggccgcctctggaaccggctctttcaccggccgcgggcgccccgaggccagatcccactgctgaccgcagcacgcccctcacagaccgtgctgggcgatggcttcctccagcctgctccaggggctgcccccgaccccccagcaccgctcatggaca

SEQ ID NO: 28472 - DNA, 433 bp, Homo sapiens
  misc_feature (1)...(433): n = A,T,C or G
ntttgacgaccctnattgaagtgcggtggaattccgcaggaatacagggccttcgagacccagatgacgcgcctggaggctgagttcgtgcggcgggaggcacccccatcctatggtcagctcatcgcccagggcctcattccacccgtggaggactttcctgtctacagtgcgtcccaggcctctgtgctgcagaatcttcgcacagccatgcggagacagatgcgtcggcacgcctcccgccgggggccctcccgccgccgcctcggccgcctctggaaccggctctttcaccggccgcgggcgccccgaggccagatcccactgctgaccgcagcacgcccctcacagaccgtgctgggcgatggcttcctccagcctgctccaggggctgcccccgaccccccagcaccgctcatggacacaggcagca

SEQ ID NO: 28473 - DNA, 557 bp, Homo sapiens
  misc_feature (1)...(557): n = A,T,C or G
natttgaacactcgtaccacagtccagngnggnggaattcctcccttctttntcttttgcctttgcccgctcagccccccgctctgtctcaatggcaacttctcactcaagcaggactcctcgcccgaccacgagaaaagctaccactactctatgcactactcggcgctgcccgggtcgcggcccacgggccacgggctagtcttcggctcgtcggctgtgcgcggnggcgtccactcggagaatctcttgtcttacgatatgcaccttcaccacgaccggggccccatgtacgaggagctcaatgcgttttttcataactgagacttcgcgccggctcccttctttttcttttgcctttgcccgcccccctgtccccagcccccagagcgcagggacacccccatcctacctccgggccgggcgcggngagcgggccaccggtcctgccgctctcctggggcaacgcagtcctgttacctgggggtggcctgtccaggggcctcgcttccccaggggactcgccttctctctcccccaaggttccctcctcctct

SEQ ID NO: 28474 - DNA, 557 bp, Homo sapiens
  misc_feature (1)...(557): n = A,T,C or G
aatcgaaccactgtacaagcggtgcgaattcggggcagcgcgcgactcccatctggcgagaggctgggcttggggcttggccttctaagggaaaggcaaccctgggggcggagtcggggagacgctttccgagcttccccgcttaaggaggaccgagcgagttccctggatgcgcccggagaaggcgaccaggccggagcggcccccgcaaggcagagcagtggggacctagagccagccccagccgcctgggtgttccccggggtccatttgaaaattgggttgtcttcttcgttcgtagaggttctttccagagtctggatacgtgttcttggtccggacgcatgccctttgtattgtagatggattactggattcgcatttattgaagttattgcaaatatcttcctctattttgtggtttacttttgctttggatgaacaggagttactcttagtgatgtgcaatttatcaatattttctttatgggtagtacctttgtattgggatatacgtctgtatttccttatagaagcttggtgtacggctcatattn

SEQ ID NO: 28475 - DNA, 452 bp, Homo sapiens
  misc_feature (1)...(452): n = A,T,C or G
gaaagtcanagaagnnnntttgaaaacattttgacgacctttaaacagtgtggtggaattccagagaattttcaaacttgctaaatttttagttaataaacagtgattaatatttattgagcattcaccaagtgaaaaagctctgttcaaaatgttttatgtagataacctcatttaatacacacagtagttttgagatcagtagtaatgtcagcattcctattttatgtagaggaaacaaaggtgtgggaaagtcccacagccagtaaatggagagtagattagaaccaatgcaatttgtctcaagagcttacattcttaagggaattctgtgctataaatacattctcctctaatctttcatttcagtcctgagatgctgtttctgaataccaaaacacagaaacatttaaaaaattccaaacccagtggaatgcggaatgtcaagctcn

SEQ ID NO: 28476 - DNA, 454 bp, Homo sapiens
  misc_feature (1)...(454): n = A,T,C or G
tgtagatcannggggnnnnnnntttgatgacccttttgatagtgcggtggaattcggcggggggacgcaattccccgcgcggagtcgggcagtggcagcgggagaagctgcagccaggggcgcggcggggccggagagaggcggtcccctgggaggacggggtctcccctcgttgcctttgtagtggagaaggtggacaagtggcagtcggcgtgatcgcagggaagcggggccggcgcgggcggccgagggtccaggcgagcccgcgggcggacgggagatgccgctgctacaccgaaagccgtttgtgagacagaagccgcccgcggacctgcggcccgacgaggaagttttctactgtaaagtcaccaacgagatcttccgccactacgatgacttttttgaacgaaccattctgtgcaacagccttgtgtggagttgtgctgtgacgggt

SEQ ID NO: 28477 - DNA, 436 bp, Homo sapiens
  misc_feature (1)...(436): n = A,T,C or G
aattgaaagacctcnctgatgccctttagacagncnggnggaattcccagagatgggggcaatccaaatcagagatgtctctctttcattgggcagacgtgactggggggaccatggccgaagagaggatgaccggtcatggcagggcacggccgacgggggcatgatggacagggatcacaagaggtggcaaggtgaggagcagctctgggctgggaccaggatgtgctggggagtgatggaaagatggaggccgcgccttctctccttgggggagcacaggaggtgctctgctctcagtgctggaatgaggaatgaagagcactccagacaccgcctgctctctggtggtctggcccaggagttggacagtgggcgttcccgagttctctctgctgggaggaagctggacgtctatggtccctgtgcccaggtg

SEQ ID NO: 28478 - DNA, 428 bp, Homo sapiens
  misc_feature (1)...(428): n = A,T,C or G
nttgaagacctcangaagnccgtggaanaactgccttcctcgtagctcctcagatctactggttctgtctgctgtgcaggaaggcagtccggctctttgacactccccaagccaaaaaggatggctaaatgctcctgggagtcaggcgcaccctcacaccagctgcctcctccactcagcattccatggaccaaattgtgccctgggtagcctcagactttgggtattgataagccgatggatttgagtttttctaaagaatattcatattacctccttcttctaacttgccctatttgcaaaagcacttttgtagcaacaactattgggtcctgtcagacctccacggacagcagagtggttttaatgcaagcccaaggatccttcttaaggtcttatctcaagagctctgggaggtggaagcatgg

SEQ ID NO: 28479 - DNA, 450 bp, Homo sapiens
  misc_feature (1)...(450): n = A,T,C or G
gttgataaaagaagannntttganncccttttgatgaccatagaccatgtggtggaattccaccggcccttaccatcccatctggaccggcagggccaccgatgaggagccgctggggcttcccaagtgctgccagccagatgccgctgacaaggcctcagtactggagcctggaagaccagcttcggcaggcaatgcgctgaagggacgcgtgccgcccggtgacagcccgccgggcaacggctctggcccacggcacatcaatgactcaccctttgggactctgcctggctctgctgagcccccgctcactgcagtgcggcccgagggctccgagccaccagggttccccacctcgggccctcgccggaggccaggctgttcacgcaagaaccgcacccgcagccactgccgtctgggccaggcaggcagcgggggtggcgggactgg

SEQ ID NO: 28480 - DNA, 454 bp, Homo sapiens
  misc_feature (1)...(454): n = A,T,C or G
gccagtnannnaganngnnnnntttganncccttttgaggacccctataccagtgtggtggaattcaatcaatgttttgaaaataatgatctcagactttctaagttaaattttaaaaattttgattgtttgccatattgggtgggtttactcttagaatcgcatgctgtagaaatgctcaaaagtgcatatgggactcagtccttaggtgttctttttcttttaagaaataacctcttacagttgtaaccattgcggctctgtccacttctcgttgctgctctgtggcacatatcggaagcagtacagcgcgcggctctacacgcttgggtagcgggataagtcactgttttctttatttctttaaaaaaaaaaaaagttctgttgcaaacgactgctgttgtattctaagggtggggagggaaaaaaagggagggagaggactgaaaagcct

SEQ ID NO: 28481 - DNA, 439 bp, Homo sapiens
  misc_feature (1)...(439): n = A,T,C or G
gaaaaaaatttgatgacctctttgagngcgctggaatttatttttgaatttcagagtaaaatttgttaacaattttaaaagccaggtaacacctaccagtccagttagcatgatttgctttcagaagtgagctgggttttccaaagtggtataatgtgtgtactgtatattttaacaaagtaatatttttgtattgcatttttctattaaaaaattaacagttaatgtttcagtcaatgtattatctgtagcatttcacaaataatgtttgctttgaaccaaaatgctcagtgcctatcaacatttggactcaagcatcaacaccaaattattcctcccttctcgtataaatagagtgactatccacaggagaaaagtgtgtgctttagtattagaggagataggcagagaagtcttgcttagttccttcgtgcagctt

SEQ ID NO: 28482 - DNA, 459 bp, Homo sapiens
  misc_feature (1)...(459): n = A,T,C or G
ntttgatgacccctcctcagngcggnggaattcccccggccaccacctcggaaggatccggaagcctccaaggcctccccactgccattcgagccatggcagcgcaccccaccatcagaagagcctgtgcttttccagagctccctgatggtctgagggtcccacccctgccccactttaccatagagaccagtgccttggtggcaggtccctccccaggtcccctgagatggggtatggaggggcccttccctctcggccttcgagcactttctttcacttactgtgtcaaagccctgggtcctctttttgatgggcaccggcccctctgaacgtgatgggacctgccttctccactagtagctgggcagctcacaattcacacctgtgtacctgccacatccctcacttggtggaaaacacccagaaggtcttgagtcccccacccctgggtgtcat

SEQ ID NO: 28483 - DNA, 455 bp, Homo sapiens
  misc_feature (1)...(455): n = A,T,C or G
gggctgtgannnggggnnnnnnntttgatgaccctctattgaagtgcggtggaattcgccaaggaggaggagacggaggctgccattggagcccctcctactgccactgagggccctgagaccaaacctgtgcttatggctcttgcggagggtcctggtgctgagggtccccgcctggcctcacctagtggcagcaccagctcagggctggaggtggtggctcctgagggtacctcatccccaggtggtggcccgggaaccctggatgacagtgccaccatttgccgtgtctgccagaagccaggcgatctggttatgtgcaaccagtgtgagttttgtttccacctggactgtcacctgccggccctgcaggatgtaccaggggaggagtggagctgctcactctgccatgtgctccctgacctgaaggaggaggatggcagcctcagcctgga

SEQ ID NO: 28484 - DNA, 462 bp, Homo sapiens
  misc_feature (1)...(462): n = A,T,C or G
cctggattgacgacccctagnccagngcggtggaattcggggtttcgccatgttggccaggctggtctcaaactcctgacctcaggtctgtgcccgcctcagcctcccaaagtgttaggattacaggtgtgagccaccgcacctggccacgccttctcttttgaccagtggttctggcctgtttcctccatgccatcaaaccgtgctaccacagggacccaaagagctggctatttgatgttaatcagggatcaaaatcgtcaatcagtgggaaggtgaaacctggagaagataacgtggtcaccatttgctcagttgcagtctgcaccataatccaacaggggcacaggctattctgcttaatgaaaacttctgatttgttacctttcagagtgtcatttattagagcacgtttgaaatcgtgggaaccaaattatgacatcaatttatgtaagccccttt

SEQ ID NO: 28485 - DNA, 459 bp, Homo sapiens
  misc_feature (1)...(459): n = A,T,C or G
nttgattgaccttcgtccangcggnggaattcctgggagaccagcctgcagctgatcatggatgtcctcctcagcaatgggagccctggggctggcctggcaacacccccctacccccacctccccgtcctagccagcaacatggatctcctgtggatggctgaagccaagatgcccaggtttggacatggcacctttctgctgtgcctggaaaccatttaccagaaagtgacgggcaaggagctgagatacgagggcctgatgggcaaacccagcatcctcacttaccagtatgtcgaggacctgatcaggcgacaggcggagaggcggggctgggccgcccccatccggaagctctatgctgtgggtgataaccctatgtctgacgtatacggcgccaacctgttccaccagtacctgcagaaggcaacgcatgatggggcgccagaactaggggcc

SEQ ID NO: 28486 - DNA, 456 bp, Homo sapiens
  misc_feature (1)...(456): n = A,T,C or G
catcgatnatgatagcatcggccagngccgngtaantttacgagntcatgggcgcagcacaccagcatggcacatgtatacatatgcaacttacctttacattgtgcacatgtaacctaaaagggggcggtaataataataaaatggaataaaaaaaacgagtattgtatggtcagactgttcatatctcatgaaagctccctgcttctctattgcttgtttgatttgacatgtgccatgccatgtattccactggatttctgtactttctactttattccaaaggctaaccattcctgaaagccacagagggagttgatgtgcttaaggaaagaagtatcgcttaatgtggccaaaaaccgattccatttctgaacaaatgcaaggagtttttgccaggagcctgggattaatatgctataggaagggacttattgtacacacgaacaatattta

SEQ ID NO: 28487 - DNA, 458 bp, Homo sapiens
  misc_feature (1)...(458): n = A,T,C or G
nttgatgaccatcgtccangcggnggaattcagggaagggccctggcatccttggccttcagattggcctttcagcctctgctccagtccaagtttcagacttaccacctctaatccacccactagacatggcagctagaaggacctcgctcacacaaaaactgactgtggactccccagctcagaatgcttccgtggctccctaatgatctgaaaacaaagtctagctatttactgagtccctggctacttctccagcttgggcttaaaatccttccctatcaccaaacactacctatttgttgttttttaaccttttttttttcaagacaagaacttgctctgnnncccangctgnnnngcannggctngancttggctcactgcnncctccacctcccgggttcaagcgattctcctgcctcagcctaccgagtagctgggataacaggcaccct

SEQ ID NO: 28488 - DNA, 462 bp, Homo sapiens
  misc_feature (1)...(462): n = A,T,C or G
cttcgattgacgtcccttagtccgngcggtggaattccttcagaccagaagaagacggcgtgctatgacattgacgtggaggtggaggagccattaaaggggcagatgagcagcttcctcctatccacggccaaccagcaggagatcagtgctctggacagtaagatccatgagacgattgagtccataaaccagctcaagatccagagggacttcatgctaagcttctccagagaccccaaaggctatgtccaagacctgctccgctcccagagccgggacctcaaggtgatgacagatgtagccggcaaccctgaagaggagcgccgggctgagttctaccaccagccctggtcccaggaggccgtcagtcgctacttctactgcaagatccagcagcgcaggcaggagctggagcagtcgctggttgtgcgcaacacctaggagcccaaaaataagcag

SEQ ID NO: 28489 - DNA, 501 bp, Homo sapiens
  misc_feature (1)...(501): n = A,T,C or G
aggggcgggnnnnnnnnnaatcgagatcctagagcaccgtcgnggaattcggaactctccagcatgaaaatctgcgcagccattccaacaagcagggctctgcctgaggttgtccgaaggatgccgaggaaaaggatatcaggactggaatggctcttacagcaagatccaggtttttcattagtcaatacagtgaaggctggcatgatcatcagcttcccatccaataatatctactcatcagtgtgctgttgtcaatcagagattttcaagtatgagttctccaactcaaagaaaagtagctggatccaggaagaaaggcatttggggaagaacaacgttctttacagtgctcatgatgtgtctccagagaaagttacttcagcactaaaaaaaacaaacaaacaaacaacaacaataaacaactttcctctacagtatcttccagggtctaaactattagacaggttcctaagtttatccagatctctcctatgtctg

SEQ ID NO: 28490 - DNA, 462 bp, Homo sapiens
  misc_feature (1)...(462): n = A,T,C or G
nattgatgaccattcgtccagngcggnggaattccctgcttgttgtcagaataatctagaagttccttaagtcaggccaggtggtgaagctggacgcgccggccacactgaggccaacacctcaagcccccttgctgtccagccccaaccccgcggttccagaatcccatgggcttccaaaatcccgagcctcacgggaacatcttggccacagaacacaaaccgccctgccagacgaccctccttttcgctcctcatcccagttagtgtgagttttcgcaaattccaaggcagaaaaacgaatgtatttggttcctgttcccaggtgctgtccatagcctcacccaggattgccctcacttagcatttatagcccatgcttcctctcccaaacccagacttgcctaactctgagggttcagatgaggggtggtgaagccatctcagctcacatctatgaca

SEQ ID NO: 28491 - DNA, 449 bp, Homo sapiens
  misc_feature (1)...(449): n = A,T,C or G
catcgaatcataccatcngcanggcannnanntntattgcagacaagctcagcatcctgtccaagtgctgccacgcgatggcggcgctgatttaccccttcgcctggcagcacacctacatcccggcgctgccacccgccatggacgacatcctgtgctcgccgacgcccttcctcatcgggctgctctccagctcgctgccactgctcatggagctgccgctggaagaggtccttgtggatgacctcgtcaacagccggttcctcagacagatggacgatgaggactccatcctgccccggaagcttcaggaggccctggaacacattctggaacagaggaacgagctggcttgcgagcaggacgaacggcccctagacggcatgcacggtccagagtccagccccttgaacgaggtggtgtctgaagcctttgtccgcttcttcgag

SEQ ID NO: 28492 - DNA, 443 bp, Homo sapiens
  misc_feature (1)...(443): n = A,T,C or G
nattgatgaccctcagaannnnctggacngactcttagaccangnggnggaattcgagcatctgctccctggccttcagcatggacggcttgttcctctccgcctccatcaacactgagaccgtgcacatcttcaaactcgagactgtgaaagaaaaacccccagaggagcccaccacctggaccgggtacttcgggaaagtgctcatggcctccaccagctacctgccttcccaagtgacagaaatgttcaaccagggcagagccttcgccacggtccgcctgccattctgcggccacaaaaacatctgctcgctagccacaattcacaagatcccgcggttgttggtgggtgccgccgacgggtacctgtacatgtacaacctggacccccaggagggcggcgagtgtgccctgatgaagcagcaccggctggacggcagt

SEQ ID NO: 28493 - DNA, 455 bp, Homo sapiens
  misc_feature (1)...(455): n = A,T,C or G
catcgatnttatancgctcggcacgngccgnggaantttaaagaaccatgttcaatattaacttttgaatataagatcttaatttactttttaagtttatttttcctgttactttatagcaatggcatatttatggttgattaaaaattttgattgaacagcaaacattcccagttttcccagtttctagacattgcctaacacaaatataggattatataagttagaactaaagtgaactacctcaagtgtggcataaccatgcatcctcttattgaatattgaattgcaaagaaataactatttaccatgatttaaaaacatataaccatttaatagcagtcacttctattaattgcctaatcagattataatagtttgttttctttgcaatgaaatttccccacaattttaatggctgtgaggtacatgaagtcacacagcatgacattttg

SEQ ID NO: 28494 - DNA, 449 bp, Homo sapiens
  misc_feature (1)...(449): n = A,T,C or G
aactgattcatagcatgngcgnggcantgagcagctcccggcccctctacagctgggctggacttcactcaaggggacagactcctcaagagctgggaactcggccacgcatggtggctcatgcctgtagtcccagcactttgggaggctgaggtgggtggatcacttgaggacaggggttcgagaccagcctggctaacatggcgaaaccccataaaaatacaaaaattagctgggcgtggtgtaattccagcatatctgtaattccaactacttgggaggctgaggcaggagaatcacttgaacccggaaggcggaggttgcagtgagctaagatggcaccactgtactccagtctgggcaacagagtgagactccttctcaaagaaaaaaaaaaaagagctgggaactgagttctgggccacccaggaggtctgctgggcaattcg

SEQ ID NO: 28495 - DNA, 456 bp, Homo sapiens
  misc_feature (1)...(456): n = A,T,C or G
aattgaacacgatagcatcggcaagngccgnggaanttctgtgaatttgagcatcgcaaggcggtgccaatggcaccggcacctgcgtcccccgtttgctcgaatgacagcagtgcccggtcacaggaacgggcaggtgggctgggggccgaggagacgccacccacatcggtcagcgagtccctgcccaccctgtctgactcggatcccgtgcccctggcccccggtgcggcagactcagacgaagacacagagagctttggagtccctcgccacgaccctttgcctgaccccctcaaggtccccccaccactgcctgacccatccagcatctgcatggtggaccccgagatgctgccccccaagacagcacggcaaacggagaacgtcagccgcacccggaagcccctggcccgccccaactcacgcgctgccgcccccaaagccactccagtg

SEQ ID NO: 28496 - DNA, 449 bp, Homo sapiens
  misc_feature (1)...(449): n = A,T,C or G
atcgagatcatggcctcgcanggcanctgggccccggggcctgaggttgcctcctcctgtccagacccagccttggcacctcccaagactgccaagggccctaccatggccccacagcccccagggctggcagttccatctaggagggtgcctctaggccccactctcaggctaggatggagaggcagatctgggcctggtgaggtgacctgcttctggaggggcagggccgcacccgagagcagggacaggtgcccgaacacagggtctccaggacgtagcgcccccccgcatacttgaatgtatgtgcgtatttattgctcacgtctgtgccatgttgtcaatgggtcctttccaacccaagaggtacatttgtttttctgtttttcctgaaaaataaagtcggccaagtgatanataggctatctgacacatattcacacctagag

SEQ ID NO: 28497 - DNA, 451 bp, Homo sapiens
  misc_feature (1)...(451): n = A,T,C or G
ttatgatgattattcgacagttgaaggccatctcgcggagaacgctngggggcctgttgtggagtacgctttggactgagaagcatcgatgctataggacgcagctgttgccatgacggcccaggggggcctggtggctaaccgaggccggcgcttcaagtgggccattgagctaagcgggcctggaggaggcagcaggggtcgaagtgaccggggcagtggccagggagactcgctctacccagtcggttacttggacaagcaagtgcctgataccagcgtgcaagagacagaccggatcctggtggagaagcgctgctgggacatcgccttgggtcccctcaaacagattcccatgaatctcttcatcatgtacatggcaggcaatactatctccatcttccctactatgatggngtgtatgatggcctggcgacccattcaggcactt

SEQ ID NO: 28498 - DNA, 444 bp, Homo sapiens
  misc_feature (1)...(444): n = A,T,C or G
natcgagatcgatagcnattgcggnggaattcatctccttctcggcatcatggccgccctcagaccccttgtgaagcccaagatcgtcaaaaagagaaccaagaagttcatccggcaccagtcagaccgatatgtcaaaattaagcgtaactggcggaaacccagaggcattgacaacagggttcgtagaagattcaagggccagatcttgatgcccaacattggttatggaagcaacaaaaaaacaaagcacatgctgcccagtggcttccggaagttcctggtccacaacgtcaaggagctggaagtgctgctgatgtgcaacaaatcttactgtgccgagatcgctcacaatgtttcctccaagaaccgcatagccatcgtggaaagagctgcccaactggccatcagagtcaccaaccccaatgccaggctgcgcagtgn

SEQ ID NO: 28499 - DNA, 449 bp, Homo sapiens
  misc_feature (1)...(449): n = A,T,C or G
attgaatgatagcatggcaangcgngaannctctccctccactgtccctggagccagaacactcacagagacacccctgagagggtggttacagcccaagatgaagtcatcaagacagaaaagcaaaaccgagaaaaacgacgggcacctggaaccagtcacggcttgggaggtgcaggtgccccgtgttaggcgcctttgtcggggacttgcaaggcctcacctgtttggccatgattgatgacgtgactgcttccattttgcagatgaggaaactaaggctcagagaggccacgccacccttgagccacccatggacccctctccatctcctgcctgcgcctttaagtccctgatttattctttccattcattccatctgggaggaacccccccaactcctgccagcttcccctagctggggtctctggtactcttcacacctgcag

SEQ ID NO: 28500 - DNA, 448 bp, Homo sapiens
  misc_feature (1)...(448): n = A,T,C or G
aatggagtcgatgcactcgcacggccnttgggggagctgnaccaatggaaatggtcagttgttcagtagattagaaagtgcagataagagtacggcagagaagggtgagacagcgtggggtgcaggtgtatgccccacctggctgctgtgtgttgcttgctgaccccctcatgggccttcgagtgtaagggagagtcctcttcatgccctcgcaccctcctgggtctctagggcttgtgtgtccccaggggaggagccccctggacacaccctggcgggtgctggctggcaaagagggaggcgttgagggcccgggcagcgcctccatcctggccaggcaagtgcagcttcaggttgtgagaaccgtggtcacctgtgtgttttaaagatgacggcagtgataggtccccttttgggcctggcatggaaattagtcacattcgtagac

SEQ ID NO: 28501 - DNA, 452 bp, Homo sapiens
  misc_feature (1)...(452): n = A,T,C or G
tggcccnnnttctgaatccgtagatacangaagngcgnggaanncggattgggcaagagagagagtaaaaggtgaccgggagcttcgaccttggcctttagatgagccacggtccaatgggcgacgagaggaaaagacagagaagccccggttcatgttcaatatcgccgatggtggcttcacagagcttcacacactgtggcagaatgaggaacgggcagctatttcctcggggaaactcaatgagatctggcacagaagacatgactattggcttctggctgggattgtcctccatggctatgcacggtggcaggacatccagaatgatgctcaatttgccattatcaacgagccatttaaaactgaagccaataaggggaactttctggagatgaaaaataagttcctggcccggaggttcaagctcctggagcaagcgctggtgattg

SEQ ID NO: 28502 - DNA, 442 bp, Homo sapiens
  misc_feature (1)...(442): n = A,T,C or G
attgaaatcgatgacaattagnccangcggtggaattcgagcgaaggagactacctaggtggagaagcgtactgggccggcggcctgcacctctacaccccattacctttccggccaggccagggtggctttggagaacttttccgaacacacttctttctcaacgcaggaaacctctgcaacctcaactatggggagggccccaaagctcatattcgtaagctggctgagtgcatccgctggtcgtacggggccgggattgtcctcaggcttggcaacatcgctcggttggaacttaattactgcgtccccatgggagtacagacaggtgacaggatatgtgatggcgtccagtttggagctgggataaggttcctgtagccgacacccctacaagagaagctctgggactggggcagcagcaaggcgcccatgccacaca

SEQ ID NO: 28503 - DNA, 462 bp, Homo sapiens
  misc_feature (1)...(462): n = A,T,C or G
atggtcacnnnaacggaataccgttgcanccagnacanngcgnnggaannngagcgagtccggaagttgccgaaagggagcagcggggaaggaggatggtttatatcatcgcaagactccgggaggacgggatccaaaaacgtgtgatacaggaaggccgaggagagctcccggactttcaagatgggaccaaggccacgttccactaccggacgctgcacagtgacgacgagggcaccgtgctggacgacagccgggctcgtggcaagcccatggagctcatcattggcaagaagttcaagctgcctgtgtgggagaccatcgtgtgcaccatgcgagaaggggagattgcccagttcctttgtgacatcaagcatgtggtcctgtacccgctgggggccaagagtctncgcaacatcgcggtgggaaaggacccccttggaggccaacggcactgctggg

SEQ ID NO: 28504 - DNA, 442 bp, Homo sapiens
  misc_feature (1)...(442): n = A,T,C or G
nattgaagatcgttagcnagtgcggnggaattcgagattctggaggagtgaaggacagggtggtgtctcagctccttgccgagctatatgggctgcacagcactcacgatgtgtttgtgatgggagccaccaacagaccagatctcctggaccctgcccttctgcggcctggcagatttgacaagctggtgtttgtgggggcaaatgaggaccgggcctgccagctacgcgttctaagtgccatcacacgcagattgaagctagagccatctgtgagcctgggaaacgtgctagattgctgccctccccagctgacgggcgcggacctctactctctctgctctgatgctatgacagctgccctcaaacgcagggttcatgacctgtacgaaagactggagccaggtagctcagcactgatgctcaccatggatgacttgct

SEQ ID NO: 28505 - DNA, 545 bp, Homo sapiens
  misc_feature (1)...(545): n = A,T,C or G
aggaagacttttgagagcgagcaattccggctagcggccctgcgtgtccctgcatcccatgactcggagctgatggccttcatgacgaggaagttgtgggacctggagcagcaggatcagaagatagcggccctagaggacctggtgcagaccctccggccacacccagcggttcctcagtgactatggcctgcagtgggtgggcgagcccatggaccaggaggactcagagagcaagacagtctcagagcatggcgagagggactggatgacagccaagaagttctggaagccaggggactcattggcgccccctgaggtggactttgacaggctgctggccagcctgcaggatcttattgagctggtggtagagggtgacacccaagtgacaccagtgcccggcggggcacggctgcgtaccctcgagcccatcccgctgaagctctaccggaatggcatcatgatgttcgacgggcccttccagcccttctacgatccctccacacagcgcttgcttcgagacatnatagatggcttctttc

SEQ ID NO: 28506 - DNA, 460 bp, Homo sapiens
  misc_feature (1)...(460): n = A,T,C or G
cgcccccatcganncccctnnnnnnatgatgtcctctagtccagctggtggaattccgctgctggtgaaacggctgcaggaggtgagctcccggtatgggaaaggcgatctgggggagccgcccccgacacggcccacggtgggcaccaatcttactgacatcgtggcacagagaaagatcaccatccgggagcttggggggtgcatgggccccatctggtccagttactatggaaactgccgttctctcctgtttgtgatggacgcctctgaccccacccagctctctgcatcctgtgtgcagctcttaggtctcctttctgcagaacaacttgcagaagcatcggtgctgatactcttcaataaaatcgacctaccctgttacatgtccacggaggagatgaagtcattaatcaggcttccagacatcattgcttgtgccaagcagaacatcaccacg

SEQ ID NO: 28507 - DNA, 473 bp, Homo sapiens
  misc_feature (1)...(473): n = A,T,C or G
cgcccgcccngnnnnnnaattgaaatcgatagcctcggcaagngccgcggaanttagcacttgaagagaggtttacctaaactttcctcctgggagcctgtcatcatttgaaagtaacagaagaaagctgtcaggctgaggaaaggttcaacaggcacttggtgagaatgggaagcatccattcactgggaaatcacggggacagaggaggaattcacgggatcagagcactgagaaactccagaggcttctggttcaccgccctgattccacagatgtgggtcagaggcagagatggaagttggaatggacaagcctgccctctcctcagctctccatggctctgtcctcaggctgtttctgcaatttgacatgaggcctggccccagggaaaccagtggggcctcatctcctccctgtgctgctctgaggtggagccttctcagggtcagtccagctctggagcccctctt

SEQ ID NO: 28508 - DNA, 459 bp, Homo sapiens
  misc_feature (1)...(459): n = A,T,C or G
gagcggagggccccaatgaggccatcaatgaggccctccggaccgncnggaggaattcggagggacaatttcatatcttaataggagcggcggcaacattacgtatacagtttccccaaatcatcaaactgtagtttctaaatgggtacggtttattaacattcaaattataagaaaagtcatttcctcaaaagtttcggggttgggggaagagttaaagaaggtcgtggctaggtggttgttgaggaataagggagaaaatcacagtttacaaaatctgagagctgaatccgtgctgtttctcgattgagaagcagtggacatcagcagtaggaatggctcaggtccaagaaggctatgccctaccagacccggttgatgtgcttccccggatttactctgtcccaccgtccacctccaccccggcctgcacctctcgcttagggtagaggcctggcc

SEQ ID NO: 28509 - DNA, 444 bp, Homo sapiens
  misc_feature (1)...(444): n = A,T,C or G
attgatgacccttanccttgtggcgaattccacaaccttgtaaggtatgcatgtaaagctagaggataatatacataaaaggccttttacaggcccttacagagaatgggtatccaacaaatggcagttactgttattaaacaaagcaggagagatgtctgggaacttcttaatgtctttcaaatcacagccctaggtgaatgtttatatccaatctagacaagaattaccctgttcaaatacatcattggatctatacagatgttattatttttcattgttttgttttgttttttgagacagggtctcgctctgttgcccaggctggagtgcagtggcacaatcatggctcgctgcagcctcgacctccctgggctcaggcaattctcccatcccagcctcccgagtagctgagactgcaggtgcatgccaccacgcctggcc

SEQ ID NO: 28510 - DNA, 457 bp, Homo sapiens
  misc_feature (1)...(457): n = A,T,C or G
gcccgcattgcgccccttgnnattgatgacccttagtccagcgtggtggaattctccttacggctccctgcggggccgtagccgccgacctgtcaacctcaagaagtggagcatcactgacggctatgtccccattctcggcaacaagacactgccctctcggtgccaccagtgtgtgattgtcagcagctccagccacctgctgggcaccaagctgggccctgagatcgagcgggctgagtgtacaatccgcatgaatgatgcacccaccactggctactcagctgatgtgggcaacaagaccacctaccgcgtcgtggcccattccagtgtgttccgcgtgctgaggaggccccaggagtttgtcaaccggacccctgaaaccgtgttcatcttctgggggcccccgagcaagatgcagaagccccagggcagcctcgtgcgtgtgatccagcga

SEQ ID NO: 28511 - DNA, 452 bp, Homo sapiens
  misc_feature (1)...(452): n = A,T,C or G
nactgagaccactagttagagcggcggaattcgnggcagtgggcctgcatcacaggttgcagcagatgttctcaatatttctattaaaatttccttatttccatatgcaagaggagccccagagctgcatccttatggtagctaccatgccgtgatgtaagctgccattcactggggagctttggcaatagaattggctagatcaggaagcctatgtcaactatggaacaacaacttgcagctcatctctattgatgatggaatctcgctatgtcaccaggctggagtgcagtggcgcaacctcggctcagcgcaacatccgcctcccgggttcaagtgattctcctacctcagcctcctgagtagctgggattacagattcagggtctcagtctgccaccctagctggagtgcagtggtgtgatcatcgctcactgaagcctggaactcct

SEQ ID NO: 28512 - DNA, 441 bp, Homo sapiens
  misc_feature (1)...(441): n = A,T,C or G
tttgagtcctagaccatcagcccgngcggnggaattcgacagcctggaggaaggtaaggcagagggtgggagtgaagtgccctgttgcttgcttcaactggactcctccttacagctgtgctgagctggagggcctctgaggtggcgaggtggggggcccagaccccacagccaccatggagagctggcactgcttcctctggccctgatgtggcagcagggccagggtcctgaaccccctttcccgccacctagaagcaaaaggccatcctcacacctctccccttccccagactcgcctcgggccctgggctcgggccagcattcggatagccacggcgagtcatcagccgagctggacgagcaggacatgttggctcctcataccgtgcagagtccagcccaggtgcccactccacggaagagggtgggcctctggga

SEQ ID NO: 28513 - DNA, 440 bp, Homo sapiens
  misc_feature (1)...(440): n = A,T,C or G
natcgagatcgtggncnattgcggaggacggnggaagctgccaagcctgaggacactgggaatatattctacctgaagaagcaaactgcccgttctccttgaagataaactatgcttcttttttcttctgttaacctgaaagatatcatttgggtcagagctcccctcccttcagattatgttaactctgagtctgtccaaatgagttcacttccattttcaaattttaagcaatcatattttcaatttatatattggatttcttaatattatgaccaagaattttatcggcattaatttttcagtgtagtttgttgcttaaaataatgtaatcatcaaaatgatgcatattgttacactactattaactaggcttcagtatatcagcgtttatttcattgcgttaaacgtatacttgttaataaaatagctgcaaacct

SEQ ID NO: 28514 - DNA, 450 bp, Homo sapiens
  misc_feature (1)...(450): n = A,T,C or G
nattgatgacccttagactttgtggccgtattcgcaagtgctgcctatgctgagaacaagtcagatctgatccctgccctcatggacctgaccactcaacaaacagtccccaccacacctatctccttaggcaagactttgcctctctcctagtcctgagtataaatcctgtgcatagattcctctagaaaggcatcaaaaggctcaacagactgaatggcctcttggtctgcgaaaattcagttgcaatgaggatgaagtcactatcctagaggctgcttggcccagaagagccaggcacagagctgcagttgggcacgccaaggattccaaaggtggaatgagagagtagggtcaaactgtcacagtatctgctccataggtttctgtttttaatttcaatgttaaatacaactacaatatgagcgagaactgcattttcttgtgtgg

SEQ ID NO: 28515 - DNA, 463 bp, Homo sapiens
  misc_feature (1)...(463): n = A,T,C or G
cgcccgcgattgaaaaccctnnnnnnattgatgacctttagtccatgtggtggaattcccagacttgggttttagactgaacttcggtgttttcttgagactttttgtacagtatttatcacctacggaggaagcggaaagcgttttctttgctcgaggggacaaaaaagtcaaaacgaggcgagaggcgaagcccacttttgtataccggccggcgcgctcactttcctccgcgttgcttccggacggcgccgaccgccggagcccaagtgacgcggagctcgtcgcatttgttataaatgtagtaaggcaggtccaagcacttacaagttttttgtagttgttaccgctcttttgggttggtttgttaatttatacaaagagattaccaccaccaccccctccttcagacggcggagttatattctgggttttgtaaaactttatgtatctgagcatttcn

SEQ ID NO: 28516 - DNA, 460 bp, Homo sapiens
  misc_feature (1)...(460): n = A,T,C or G
gcncgcaattgaccccctnnnnnattgacgacacttagaccagctggtggaattccccctctgcaccagccctgggtcagcaccatcctgacggccccgccctgtctccctcttcactggcagattccttctctcccaccaaaacccgcctctgcagcagccactccggaagcaggcccaagctcctgtgtgtaccccatttcctgccaagcgtgcagggaaccctgaccccacatgccacggcctggttcacagtgggtgcatcgtgcagcctgggggcagagggtaggtaggaaggaagggcccacccggtcggccctcccaactgggcctctgtttgcacagccctggggtcctgaggcctacaccccaggatgccgtgggtaagaacagaccttggaggcccagagccacgcgtgtcctctgaatggtggccaacccaggggcccctctccgaggg

SEQ ID NO: 28517 - DNA, 463 bp, Homo sapiens
  misc_feature (1)...(463): n = A,T,C or G
aggcgccccnnnttttgaaacagtagctntcagnaagngcggnggaantngcattttctctccttcccttcaattcacagactctggtggagcaacgttttggtggttcaggaaagggcagcaataaggtgagatctggacagaggactcgaggcagggggagcttgccaaagagccttctgatgactatgtctttggctgtcccaggggccactaggtgtgacagaggaactgcacatcatcagcttcacggtcaaatatacctaccagggtctgaagcaggagctgaaagtgagtgaaaatggagggcaaggagagagaaagcagctttggaagaaggcataagaaggggataaacagaagcctcttggggacccctggcttccctcatcatctggctggggctatctgtcccacaaggcagaactgtaggactgatgatccattattggcctgggctgan

SEQ ID NO: 28518 - DNA, 577 bp, Homo sapiens
  misc_feature (1)...(577): n = A,T,C or G
ggctgcntcccnnnaggggnncnnngggnnnnnnnnttttgaaaacccctcgaaccactatccangnggnggaattcgcccagccaggagttaagctgaggtcgtctgagccctgcgacagcctggacagcaactcaggatggcatcaggcagggcacgctgcacccgaaaactccggaactgggtggtggagcaagtggagagtgggcagtttcccggagtgtgctgggatgatacagctaagaccatgttccggattccctggaaacatgcaggcaagcaggacttccgggaggaccaggatgctgccttcttcaaggcctgggcaatatttaagggaaagtataaggagggggacacaggaggtccagctgtctggaagactcgcctgcgctgtgcactcaacaagagttctgaatttaaggaggttcctgagaggggccgcatggatgttgctgagccctacaaggtgtatcagttgctgccaccaggaatcgtctctggccagccagggactcagaaagtaccatcaaagcgacaggacagttctgtgtcctctgagaggaggaggaagaga

SEQ ID NO: 28519 - DNA, 453 bp, Homo sapiens
  misc_feature (1)...(453): n = A,T,C or G
ctcgacgaccttnnntttgatgtctcctagtcagtgtggtggaattcgaacttagtcccatccacttccatcttatcctttgtgcccttcatccccctgcatcttgtcctttttgccctctggtacctcccagtgccccatcatctctacccccagggactcggagatcatgcagcagaagcagaaaaaggcaaacgagaagaaggaggaacccaagtagctttgtggcttcgtgtccaaccctcttgcccttcgcctgtgtgcctggagccagtcccaccacgctcgcgtttcctcctgtagtgctcacaggtcccagcaccgatggcattccctttgccctgagtctgcagcgggtcccttttgtgcttccttcccctcaggtagcctctctccccctgggccactcccgggggtgagggggttaccccttcccagtgttttttattcctg

SEQ ID NO: 28520 - DNA, 447 bp, Homo sapiens
  misc_feature (1)...(447): n = A,T,C or G
tttgagaccttatcattgatggcgaattcgnggtggcatgcacctgtagtcccagctactcaggaggctaagagagaaggatggcttgagcttgggaggcagaggctgcagtgagctgagattgcgccactgcactccaccctgggtgacagagcaaaactccgtctcaaaagaaaaaggacaggaaaagagtagaaaaaaagtcagtttgttccaaagggagacaggaaggaagctaaaaggaacccaggaggtgggcaaacatttaacttgaaagccccctggggcgtggtggcgcatgcctggctgaggcaggtggattgcttgagcccaagagttctgggctgtagcgcgttatgccgatcgggtgtcttcaccaagttcagcatcaatatggtgacctcccaggagcgggggaccaccaggttgcctaagaaggggtgaacc

SEQ ID NO: 28521 - DNA, 443 bp, Homo sapiens
  misc_feature (1)...(443): n = A,T,C or G
nattgaatagccctacnccagngcggnggaattcccctgagggaacaaacccttttccttctggggagagagtgcccccccctaccatgtagttgaacaggggctaggagctccccactcccctccctctaacagcaggctgtgtgggtttcaattcccatccttcccaccccggctaggtgtcgtccaccctgtatcctgtgtctgagtgtgtgtgggggggttctgtactaatttccatggccggtggcttttccttccatgcatcactcccccccgcatgcccaggggccacccgcctggcattaccgcatgctggggtcattgggggaggggggtggggctcacgctgtcctgtggtcttgagatttttatttttgcatatgtaatccattctgtacaggtagctaactttgtaaacgctgtgtattccctctgccccc

SEQ ID NO: 28522 - DNA, 446 bp, Homo sapiens
  misc_feature (1)...(446): n = A,T,C or G
natgatgtcctctgactttgtggccgaattccttttttcctactacctaagaaatgcagtgtgtatttacacgtacagcccatctcaatcacacatggctggtggccactgtagtgtgagcacagctcttggttctgggctactccttcaggccttgctctgaactgcagtcactccagcatgaacttatctgattagtctccccttaggagtttgcttctagcatgggcacaactgtttttagcatgctctgcaatcatagtcactcagcctgcccaactgtgacccagctccccaggagacagttcatttctagcatgccctgttcccattcttcccctcaaaggagctccctccacacccctcacctctgcctggacagccctctgccacatgccatgctcccatcagcgaggctggacttggggtaaccaaagtgggagtgg

SEQ ID NO: 28523 - DNA, 460 bp, Homo sapiens
  misc_feature (1)...(460): n = A,T,C or G
attcgattacgatagcatcggcaagngccgnggaantttgagcgggagcgccaggatcgagaggccgagcacggctactcctttgagctgtcctttgacggcgacttcggcagggagaaaacaagggcggccggcctggtgcgcaaggcccctaacaacaagacttcacacaacgagctagaaaagcacagacgagccaaactcaggctgtaccttgagcagctcaagcaactggtgcccctgggccccgacagcacccgccacaccacgctgagcctcctgaagcgggccaaggtgcacatcaagaaactggaggagcaggaccgccgggcactgagcatcaaggagcagctgcagcaggagcatcgtttcctgaagcggcgcctggagcacctgtcggtgcatagcgtggagcgcgtgcgcacaaatagcacgggctctgctgtctccacggacgaan

SEQ ID NO: 28524 - DNA, 441 bp, Homo sapiens
  misc_feature (1)...(441): n = A,T,C or G
nattgatagcactcaccangcggnggaattccgcgtccacctttctcttcatgtcgacgtccctggaaacggccacacggatgccatggttacttttgccacgatcttacaggtgaacaaggtgatgtccatcttgttttatgtgatatttctcgcttatctccgtggcatccaaggtaacaacatggatcaaaggagtttgccagaagactcgctcaattccctcattattaagctgatccaggcagatattttgaaaaacaagctctccaagcagatggtggacgttaaggaaaattaccagagcaccctgcccaaagctgaggctccccgagagccggagcgcggagagcccgccaagtcagcattccagccggtgattgcaatggacaccgaactgctgcgacaacagagacgctacaactcaccgcgggtcctgtg

SEQ ID NO: 28525 - DNA, 442 bp, Homo sapiens
  misc_feature (1)...(442): n = A,T,C or G
attgatcgacgtcactagnccgngcggtggaattcgtgtggccttctctttagaaaagcaggatcatggggtacgttttaagaatatgggataggtcaggcttggtggcttatgcctttaattccagcactttaggggaggctgaggtgggaggatcatttgaagccaggagttggagaccagcctgggcaacaaagcaagaacacccaccccatccctctttccctcaattaaaaaaataaaaaaaaattagtggagtgtgatggcttgcacctatagtcctagatactccagaggctgaggtggaaggttgcttcagcccaggagttcgaggttacagtgagctatgattgtgccgctgtgctccagtctgtctcttcaaaaaaaaaaaaaaaaaaaaccttggggttttggaggatggggttgaaacctggtttctgag

SEQ ID NO: 28526 - DNA, 440 bp, Homo sapiens
  misc_feature (1)...(440): n = A,T,C or G
ntcgttgtcgaccctagtccgtgcggtggaattcatacagaacagtggaaattggaaattccaatcttggaatctctaggaaagtaactgagacatacgatgcctgaaaaggagtagaaaataaaattaataaggtgggaccatatgataagagatttgaggccgggcactgtggctcacgcctgtaatcccagcactatgggaggctgaggcgggcggatcacctgaggtcaggggtccgagaccagcttggccaacatggtgaaaccccgtctttactaaaaatacaaaaattagacaggcatggtggagcatgcctgtgatcccagctacttgggaggctgaggcgggagaatcgcttgaacccgggaggtggaggttgcagtgggctgacattacgccatagcactccagcttgggcgacagagggagactctgtc

SEQ ID NO: 28527 - DNA, 211 bp, Homo sapiens
atcaaattcaaggtgtgggatgttggagaatggccgtgctacggtggtgggaggtggggttgagacaggaagccccctgggcaggggtgggggaactgcttactgcactggcaggcgggagctgggaatccttccagctcgggcctgggagcgaggcaacccttatgtggctgtcctgacccctctcctctctccacccagggtcctgagt

SEQ ID NO: 28528 - DNA, 450 bp, Homo sapiens
  misc_feature (1)...(450): n = A,T,C or G
ggactgaagcttcgnaagnactgagaacntctnganngacgcatcatcatgggaatcccaatgaacattggaaccgggctcttcaagctgcttcacaaggctgacagggacccgaaccctcccaagaggcccctgatcttcgacacaaatgaattccacatcccccttgtcacatagtccaaagaaagaggggaccatgcctgaccttgactccttgtcctgtctccagctgatgtataaagagttttgtgctccctgggacgggggtcctgaggtccccacctatgccagcaatcagagaagccctcttggcatccccaggagcagcttctcctctgatagggtgcagctcacaccagtgaccctgactgtgccacgctgctcgggagagctgagggttttattgtttgcttgcttgaaacctaatctatagacggccccacagctcgg

SEQ ID NO: 28529 - DNA, 467 bp, Homo sapiens
  misc_feature (1)...(467): n = A,T,C or G
ttggatgacattcggacangcggnggtcggtactacatcggacgcgcggggagagagggcgcggaccacaccatgtcacgccatttaatgacaccagctggtcagctttccacccgctctggctaaaactcaagcaaagaaagccgctgcctgtcattgagcatgtgagaggaagcagccctccctcgatggcctctagcccagagaagcccgcgcatcttggacccaccaagcaggcccagccttcctgctgccaccatctctgcttctccccagaggaacttagggatttcacccctggcttttaaaaaaaacgaaataccgacaagccacaaggaccaatgtaggtattctccccgccccatcttcaaggctcagcgactgaggctggaagatgatatggattggaacacaaaaaatctttttttaatctttttaaaaactgctgtgggtttgctgctacacta

SEQ ID NO: 28530 - DNA, 441 bp, Homo sapiens
  misc_feature (1)...(441): n = A,T,C or G
cttgatcgacgtcactagtccgngcggtggaattccggcgcaggcactgaaggcggcggcggggccagaggctcagcggctcccaggtgcgggagagaggcctgctgaaaatgactgaatataaacttgtggtagttggagctggtggcgtaggcaagagtgccttgacgatacagctaattcagaatcattttgtggacgaatatgatccaacaatagaggattcctacaggaagcaagtagtaattgatggagaaacctgtctcttggatattctcgacacagcaggtcaagaggagtacagtgcaatgagggaccagtacatgaggactggggagggctttctttgtgtatttgccataaataatactaaatcatttgaagatattcaccattatagagaacaaattaaaagagttaaggactctgaagatgtaccta

SEQ ID NO: 28531 - DNA, 425 bp, Homo sapiens
ggctcatacctgtaatctcagcactttgggaggcccaggtgggcagatcacctgaggtcaggagttcaagaccagcctggacaacatggtaaaacccccatctctactaaaaatacaaacattagccggccatggtggtgtgtgcctgtggtcccagctattcgggaggctgaggcacaagaattgcttgaacctggaaggcagaggttgaagtgagccaaatcaggccactacactccagcctgggccatagtgagactccatctcaaaaaaacagaataggcatgaggagggctctgggttcagctgggacacgctgcctgtgcctctggcctcaccacctgacccacataccacagacttggaacgcagtgctgctgcgctatttcaaccccacaggtgcccatgcctctggctgcattggt

SEQ ID NO: 28532 - DNA, 444 bp, Homo sapiens
  misc_feature (1)...(444): n = A,T,C or G
nttgatggcattcgtcagngcggnggaattcgaagaattggaagcactgttccatagcaattttgaaattcatctgggcacatgttactaagtctcttaccccatgtatcaaaaatataccttgaatagccttttcacaagatggcgctgaaagcaaagaaggaagctcctgcccctcctaaagctgaagccaaagcaaaggctttaaaggccaagaaggcagtgttgaaaggtgttcacagccacaaaaaaaagaagacccgcacgtcacccgccttctggtggcccaagacaccacgactccggaagcagcccaaatatcctcggaaaagcacccccaggagaaacaagcttgaccactatgctgtcatcaagtttccattgaccactgagtctgccatgaagaagatagaagacaacaacacacttgtgttcattgtggag

SEQ ID NO: 28533 - DNA, 541 bp, Homo sapiens
  misc_feature (1)...(541): n = A,T,C or G
ngggagcacctggaggcgtgcaattcctctccatggaccaagtgctggccacggcctcagctgatggcaccatcaagctcggggcactccaggacttcagctgtctcaagacatttgaggggcacgatgcttctgtgctgaaggtggcctttgtgagccgtggcacgcagctgctgtccagcggttcggatggcctcgtgaagctctggaccatcaagaacaacgagtgtgtgcggacgctggatgcccacgaggacaaggtctgggggctgcactgcagccggctggacgaccacgccctcactggggccagtgactcccgagtcatcctctggaaggatgtgaccgaggcggagcaggcagaggagcaggccaggcaagaggagcaggtggtcaggcagcaagagctggacaacctgctgcatgagaagcggtacctgcgggcgctgggcctggccatctccctggatcggccccacaccgtgctgactgtcatccaagccatncgganggaccctgangcctgcgagaagctgaaacn

SEQ ID NO: 28534 - DNA, 442 bp, Homo sapiens
  misc_feature (1)...(442): n = A,T,C or G
nattgatggcgttcgtccgngcggnggaattcgtgcgcttgttcccgtgagaacagcctgcttccagagtgcccaggagtgctggtcagggacagtgcccgtgaggctgcagaggaggtggggtccatggcccacccatctctccctcgccagcagccctggccagtgtcatcctggtgtagaaagggttgcgcacaggataggagggagccacagttcttgcttagctgtgctcacgaccggcttgcagtcctgtgtttcttaagattgtatttggaatggtaatatccttagaattttgggatattgagcttcatggattttctctccaaaacaagccagcacaactaactgtagcagaattgtatccactcattcattcaactgagatgaagtgccctcccttttccagggcctgggctagttcctggaatgcaacaga

SEQ ID NO: 28535 - DNA, 540 bp, Homo sapiens
  misc_feature (1)...(540): n = A,T,C or G
nggatgcactgacactatccagaggggaattccgaagatggcgccgtccgccttgctgcgtccnctttcccggctgctggccctcgccaagctcccgagcggcccttcagtgcgatcaaagttctacgtgcgagagccgccgaatgccaaacctgactggctgaaagttgggttcaccttgggcaccactgtcttcttgtggatctatctcatcaaacaacacaatgaagatattttagagtacaaaagaagaaatgggctggaataaacttttgaaacactaatgtacatctctgcgccggatgtcatctaacacattccctggatcatctggatcaaatatgatttattatctggttgtaggcgtcacagtcagtgctggtggatattatgcttacaagacagtcacatcagaccaagccagacacacagaacataagacagatttgacagaacaaacacaagcagagatacatccatttcagagtganaaagagaatcgtgcggaaagctgataaagcaagtcagaaaccccacaat

SEQ ID NO: 28536 - DNA, 534 bp, Homo sapiens
ggagcacctgaggcggcaatctcggtgctataaatggccgctgtaagggatctccacaaagccacgaagaagccaggcctttccgagactgtaaccgctgtgcagatagcgccgatccctgggtggccgctctctcgttctgcgcgtgcgctcgttctgggctgggagcggatgggtgctgaggcgtgtgacgtctctagtagtgtcgtaactgggtgtgctgccttttccaggtgtactgaggtcttcgtgagattcagggctaggactcgtgtggctgtgtcatgttccgaatgaagcttaaaaggtgatctttgagaactgaagacttgagatccctccatgggcccaggggctgccaacactaataatttcagagacttagaatctgaggagaatctccaatctaaggggaaacggaagagggtcaggaaagagaaggggcaagcttaagtgactcagaatccaagaagcaagtctcataggagagctgcgatcgaggttaccatacagtatccaatcgtctcaaccttt

SEQ ID NO: 28537 - DNA, 475 bp, Homo sapiens
  misc_feature (1)...(475): n = A,T,C or G
cgacgggaattcgaattcgtgtccatgtgctggaattcgggaggggaccatttgggatggaggggcctcttcagagttttaaaaggcgtttgtggggtggagttgagtgtgctctgggcttggacacttgccgtggtgcccctggctggccgaggagactggctctggccaggggccccgtcctgagaggtcctcagcgtctgactctcggccaggcgccagcaaggaggggccggtccccggggctaccaggcaggcacgtgcacatcgccatcgccacacgccaactccgcctgggttttacaaagtcgttgccttaatgcatgtggacaggaactccctgaggtcgccccatgccccctggctgtgccaggtacggacgccctggaccctgcgaacaggtggggcgggcgaggggcccaagggacgggctccagagacacgcgcagggcaggaggggtctcacggaggggtn

SEQ ID NO: 28538 - DNA, 474 bp, Homo sapiens
  misc_feature (1)...(474): n = A,T,C or G
tgatgggatttgactcgtctacatatccangagcnggaattccggatgagccttaactgacccaatcctttgtgatgcgggagagattgctaggcctcgctcacctggccagaaccagggaaagaggccgcgggtgcagcgcgattccaggccctgggcgccaggcgcggggtgggcagctctccccggtcggtggggtccttgtgaccgagaggcggggcgcaccatgaagggagtggtacagctcgggcgcccagggatgtggcctggttacctgccttctctgatacgtcaagacaccttctacaatggcttgcagctgtaccctgttggttgcacccaggacgcccttttcactgctaagcagtcctacctgaggcccaggggctgccagattgacccatatataatctccggcgcctcagatccagaagctgctgagcctgagcttagtgccttctcctttgtctgtgg

SEQ ID NO: 28539 - DNA, 543 bp, Homo sapiens
  misc_feature (1)...(543): n = A,T,C or G
ncggatgacatgcagagcgtgcaattcggaggaggacgaggacttctaggccgggagaccctcgggcctgggggcgggtgctctggggagggtccgctgtgttactggccgccgccagggtcgccaccggcgccctccctccgcgcctccctccccctcgagccgccgcgatgtcccctgcgctcctgttccctcccacgtagtgcttgcctttgctccaggaatagcgctccaggctcctgctgccgcccctgggcctcactctggagcgagccgccgccctctccttccagccagccagcccctcccatgtacatttggacgctgtcctgcgctccagctgcaagctgggctcctgttacacactggacagaccacccactgacgccgctgccaagccctctcctccccaccagactgccagacgactacatcattctgcccacagacctgcgcttgcacagccatcgccatgcatcgcatcccaccgacagactgctgctcctagtgatctggactcaccctcgatggatctggggctgg

SEQ ID NO: 28540 - DNA, 545 bp, Homo sapiens
  misc_feature (1)...(545): n = A,T,C or G
agggagcacatggcaggcgtgcgaattccatgtttctatgtcttcccgtcttgttttaaggtaaagtgaatgccgaagacagaagatttggatgatacaccactgactttctttgtttggaatacacgttatgaaccctttctggagcatgtctacaagctctgtacgcaaagtaggtatagttgataaattcagtaagaaaacccatttgcttctgtgtctgaaaatagggtcagaatgaaggctaaaataatctgtcacggtcacctgtaatcttgacaaaattacctggtttttctagttaagggtttactcttgagaaataattattttgttggttgaagtctgtttctgagactaggattgcatctcaaatagaaatcgttctggtcatcacaattctaagatgatttaggttatatttacacatgatgaaatttgtaacattgtagttttctactaaactttcagaggtctacgggtagaacagctgtgggaaaggctagtctaatatcattanatcagacttgagggggaactaattn

SEQ ID NO: 28541 - DNA, 449 bp, Homo sapiens
  misc_feature (1)...(449): n = A,T,C or G
gggagaagantttgatgaccatngttgatgacccttagaccgngnggtggaattcgtagcagagaacttaggggggcctccttgcctttctcattcttttgccctgcatcctgtcatttctgttcttgtccctcatacatctttggagaaccgggctccagactttgttccctgactcatagctgccgcttgttaggttagggttagatggggagagacagggcacagaggacctgtctccccggctactcttgccttatggctctagtgtgtgacctacagagcatgctccacaagcccctgcctcacctcactgtcatcactaataaacatcatgcgcagtcactaaaaaaaagacatgcagatagttgagggaaaaaccagagtggacagagaacaaacggaccgatgaccattttgaagcccgcgggcagtacgttgaaatttct

SEQ ID NO: 28542 - DNA, 402 bp, Homo sapiens
ccgggcctctgcgcatgaccggaatgacagcacctatttaatgcctggaaccatctttcatggtactgactggtctgctgccaatggtggcatgcccatgccccaggcctccattgacactgaacggcgccaaccgcaggggatttctcaactcaagagcggagatggactgaccttactatcccggatggaatgtaaaggagggccccaaccgcagcacagtcagccgcccccgcagccaccggctgtgaccccggagccagtagccttgagctctcaaacatcagaaccagttgaaagtgaagcacctccccgggagcccatggaggcagaagaagtggaggagcgtgccccagcccataacccggagctcactcctgtgccagccccagcgggcccaac

SEQ ID NO: 28543 - DNA, 461 bp, Homo sapiens
  misc_feature (1)...(461): n = A,T,C or G
tgggtnnnnnnngtttgagaccctagtcagngnattgaaatcccttatccgacgcgcagccccgctcagcagtcacagaagcagggcccagccaccttggtctttttttgggagttcatgggagtaggagaatgtcttccagaaaaatacataagctagtttctgttctgtaaagtgatatctttcatacttgaccaaagttcccaataacttcccaaccactgttcaaaagctgtgatttttgtctccccttcccaccctccagccaaggagcagccctgcccagggggcattaggtgtgggtacccggggagcaccccgttcctggaccccagtgttgcatttcctggctgaggaagggtggtcatcccagctcctgccctaccctctcacttaactggagctttgggacgcaccctccacagtgggaggtggtggtaggtggcggtggcggtgcctcn

SEQ ID NO: 28544 - DNA, 467 bp, Homo sapiens
  misc_feature (1)...(467): n = A,T,C or G
tgggtttnnnnagtttgagaccattnnnnnnnntttgtagatcattagtcagtgcggtggaattccggcccaccagcaccaaccccatcgccagcatctttgcctggacacgtggcctggagcaccgggggaagctggatgggaaccaagacctcatcaggtttgcccagatgctggagaaggtgtgcgtggagacggtggagagtggagccatgaccaaggacctggcgggctgcattcacggcctcagcaatgtgaagctgaacgagcacttcctgaacaccacggacttcctcgacaccatcaagagcaacctggacagagccctgggcaggcagtagggggaggcgccacccatggctgcagtggaggggccagggctgagccggcgggtcctcctgagcgcggcagagggtgagcctcacagcccctctctggaggcctttctaggggatgtttttttatag

SEQ ID NO: 28545 - DNA, 543 bp, Homo sapiens
  misc_feature (1)...(543): n = A,T,C or G
aggatgccctgatcacagtcagagaggagcgaattcgtggagtttcccagcgcccctcgggtccgaccctttgagcgttctgctccggcgccagcctacctcgctcctcggcgccatgaccacaaccaccaccttcaagggagtcgaccccaacagcaggaatagctcccgagttttgcggcctccaggtggtggatccaatttttcattaggttttgatgaaccaacagaacaacctgtgaggaagaacaaaatggcctctaatatctttgggacacctgaagaaaatcaagcttcttgggccaagtcagcaggtgccaagtctagtggtggcagggaagacttggagtcatctggactgcagagaaagaactcctctgaagcaagctccggagacttcttatatctgaagggagaaggtgatattgatgagaatgtggacacagacttgccaggcatgctggngcagagtgataagagcccgtgcctgctgcgcctgtgcccaggccggtgggcccggccccagtgccatccagatgatan

SEQ ID NO: 28546 - DNA, 538 bp, Homo sapiens
  misc_feature (1)...(538): n = A,T,C or G
aggagcacttgaggcgtgcaatccccgctcgagccggggactgggagtcgttagtgaggatgacgcggcatggcaagaactgcaccgcaggggccgtctacacctaccacgagaagaagaaggacacagcggcctcgggctatgggacccagaacattcgactgagccgggatgccgtgaaggacttcgactgctgttgtctctccctgcagccttgccacgatcctgttgtcaccccagatggctacctgtatgagcgtgaggccatcctggagtacattctgcaccagaagaaggagattgcccggcagatgaaggtgatggggatggggaggaggcggcacacggaggcaggagcttttgagtctgagctcacaggcagagccactcagagccctctgatctcagttccctctgcctggtacaccattcccctcccctgcttccggccaaatccttctcaccgatttcagcccagatgctgcctnctctgagctccttgcagtccccaagatctgccccagtcacctcttctctt

SEQ ID NO: 28547 - DNA, 460 bp, Homo sapiens
  misc_feature (1)...(460): n = A,T,C or G
tgggtannnnnngattgagacattagncagngcgttgtaaatcattgaggagatctccattgttcctacccctccgggccaaatgggccccaggtttctaaggaaggagcaatctgttactcctaaaatgggttggggccctgccaaagttaaagcagtgactggagggtggactggggggttgcagcatctttagacctagatctgtctaactctggggaggcacattgacatttccattacacacagcactgctgcggtgccacggacctaacgcaaggcttttggtaatccataaaatggattctgagactgcgacggcaaggctgtcctgtcccccaggcacccaaagatcctgccagacagcacactttgtaggaaggtctgtacggagcagctgagccatttgttcttgaactctgggaggtataaaggcccgcacccatgatgcgtggactga

SEQ ID NO: 28548 - DNA, 465 bp, Homo sapiens
  misc_feature (1)...(465): n = A,T,C or G
tgcgannnnnnangttgagaccctgnnanngcattgtagacattagtcagtgcggaggaattcaggcagtccttatgcttttggctgacgtagatgttacgtactatttcatgtgttatcacactctccagtgaacacgtaacataagagagtaattaaccactatcaagcgttctcatcttgagacaggaagatgtagaggaaagaccttgatgtgtgtgtcagttacaaggatgtacaccagtgactgacatgacttggtgcaaatcttgggtagagacctatacttaagctcctcacccccacctgccgaggcgtaagggctcatagggggttccatggggtgggcgggagtggtaagggtcgaggtgcatccacagcctgggtctgtgcacacccactgcctgcccctggtaccatgtgcacaccctcttcctgccccctgacgcttgtgcacaccctctg

SEQ ID NO: 28549 - DNA, 458 bp, Homo sapiens
  misc_feature (1)...(458): n = A,T,C or G
catggagaccaattgacagcgcggnggaattcgcgccggcgtcggctgcgtctccggcgtttgaattgcgcttccgccatctttccagcctcagtcggacgggcgcggagacgcttctggaaggaacgccgcgatggctgcgcagggagagccccaggtccagttcaaacttgtattggttggtgatggtggtactggaaaaacgaccttcgtgaaacgtcatttgactggtgaatttgagaagaagtatgtagccaccttgggtgttgaggttcatcccctagtgttccacaccaacagaggacctattaagttcaatgtatgggacacagccggccaggagaaattcggtggactgagagatggctattatatccaagcccagtgtgccatcataatgtttgatgtaacatcgagagttacttacaagaatgtgcctaactggcatagagatctgg

SEQ ID NO: 28550 - DNA, 497 bp, Homo sapiens
  misc_feature (1)...(497): n = A,T,C or G
agggagggnnnnnnnnnaatgagaccatgagcaccgtggnggaattctttntgtaatttttctgtaagcttaagagactatttcaaaataaataatgtgttggaaaaaaagtacattggggcactggcagacttctagatctaggctaggggtgaagggtccagggaacaggcaggggcagagcccaagtcaagccctgaacaggtcagtgtggaccccactgctgccttcacagtacaaagaacagcagagcttgcaccctgactcagcaggcctgagacactggttccgcaactaccctgctgctgctgctgctgctgcccacagaaaccccatgttacagcttcaatggctgcccttactgccaggatggactctctaccatggctacttgtctgtgtccaaaatcctatttcaaaatggagggcagatacggctgattggtggagctgagccacacgttcataccggggctccaagatagtctgtaaaagtgg

SEQ ID NO: 28551 - DNA, 463 bp, Homo sapiens
ccatcgagcccccattgagaatccctagtcagtgtggtggaattcagactgaagtgtgcctctcacagatggaaggtgcacacgctcctgtctcctcctcactctgccacgttcacttggctttttcattggtacctaggaatttaagaatatcgaagcgagagcagtaacaaaccatagatgagcagactcccacaccgggttttcttgcccgtctttaaggcactgtttctaaattttgaacttagctctgaatccccaagaacttgagcacagcaagggttgctgagctgctgtcgccgcagccctggcccctggtgctggagctgcagcacctttgggagaggtcctgcgtcgtcctcagctgcgtcgctgtgaactcccgctctccactgtgttcctcagtgtctgcttttcaggaagtctgctgtgacctttgcccaacttctgagctcctcaggga

SEQ ID NO: 28552 - DNA, 489 bp, Homo sapiens
  misc_feature (1)...(489): n = A,T,C or G
cgcccccccccnnngnnaatcgagancctgaggcactgtgcnggaattcggccgctcgagccgggataaatttaatccttctttgtaatactttctatgtgacatttctcttccccttagaaacactgcaaattttaactgtaggtatgatctcttctggtgttgactggactgcttggggtgggggacgatcaggaggaagtgagcagtcgcctgcctgcagcaggcagcttctactcctgcctcatgcatacgtcccacaaatgcaggtgtcctgagcaccacacccagtgggaagagtgtgggggaggcgcacagtgtgagcccgcccccacgtcgtggggtaacatctgttatcaaactgctgtcgttgttgtggaagcatgtagactgtgccagaggccagacccacgggctcatgcacccctgagccagcagggcatcttggaaaaggaactcttggttcgatacctggagcagaggaggggn

SEQ ID NO: 28553 - DNA, 487 bp, Homo sapiens
  misc_feature (1)...(487): n = A,T,C or G
tggggtccggggntttgaaaaactgagancactagtcagngtgctggaattcctgatgaaggcatcctgacagtgtactccctggccccccataacctgggcgaaatgctgtacaccaagcgattcggtcccaatgccatttcggcgagcctgtccccaatgggcagatatgtaagtggcgggcttggcctcacgaaggatcctgctgcacccctccacagagcacatggtggcccaggtctttaggtggcaacaggcccatggtggagagacctccatgaggagagttttcaacgtcctttatcccatgcctgccgaccagcggagacatgtcagtatcaactctgcccgttggctgcctgagccagggcttggcttggcctatggtactaacaaaggagacctggtgatctgccgaccagaggccttaaactctggtgttgagtactactgggaccagctgaacgagacggtcttcactgtccan

SEQ ID NO: 28554 - DNA, 491 bp, Homo sapiens
  misc_feature (1)...(491): n = A,T,C or G
ccccccccgccnnnngnnaatcgaganatctaagcactgtgcgggaattcgtcagaggtccaggccgagaagcaggctgtggggcgagactagaaggaagtccaggcccaattcaggccgcaggtcccagctggggtccaggcagttctgagtacccccgaccccagcatcagatgaaaagggccgcggcctgggctctggcctaagcgcgcagcctctgtccgctgctctttcagagccaggcccggcagccgaataggatttaggacgtggaatcctgtttcggactagcagaaacttactgaacagtttgtttcaaaaatcaggttgtttctgtctttttaggaccgacttacatcactggagcttttaaattgtagtaatttagggtctatagataactttctgaacctcttatcccccgcagttaacattttcatataaatctcactgctacaactctatgtgacccacctttttttggggtgttn

SEQ ID NO: 28555 - DNA, 465 bp, Homo sapiens
  misc_feature (1)...(465): n = A,T,C or G
ggcaggcggggnnnnnttttgagatcgatgaccttagacagngtggtggaattccgggaagagaaggtgccacgccctcctcccggattcacgccttgtgctgggcgacgccgctgcctgctgccccgacttgcccagctcgccccaaggggcgaggactgaggaaagcactgcctttctgttcttaaagcgaacctttgaaggcctgggcttcgcgcccggcttctttctcagccgttgtttccgttttttggtgacaagaggctagtaatctcgtcaggagccaacgtaagagttcttcactaccacaaccaaggagggatatgataggcggccagtggatataactcctttagaacaaaggaaattaacttttgatacccatgcattggttcaggacttggaaactcatggaaataacagtacaacagctaatggctcatttggatgctatcaggaaagaca

SEQ ID NO: 28556 - DNA, 453 bp, Homo sapiens
  misc_feature (1)...(453): n = A,T,C or G
gggaataccttgagctcncgaatacngtttgcctacggancancnggnggaattcgggcaaccgggtgtacatgccctgcctgtatgtttataataaaatcgaccagatttccatggaagaggtggaccgcctggcccgaaaacccaacagtgtggtcatcagctgcggcatgaagctgaacctggactatctgctggagatgctttgggagtacttggccctgacctgcatctacaccaagaagagaggacagaggccagacttcacagacgccatcattctccggaaaggggcctcagtggagcacgtgtgccaccgcatccaccggtcactcgccagccagttcaagtacgccctggtgtggggcaccagcaccaagtacagtccgcagcgggtgggcctgacccacaccatggagcatgaggacgtcatccagatcgtgaagaagtaac

SEQ ID NO: 28557 - DNA, 473 bp, Homo sapiens
  misc_feature (1)...(473): n = A,T,C or G
natcgagacctctagncaccgtgcgggaagtccatgtattcctcagaggcgaaactgccaaactctttctcctgtcttgggatggctggcactggggcgggcatctagggtacagcctctgctcatggcactgggcctccagttcttccacatgtgtgcacccccagcttggccaaccctcagccttgcggtggggcccgaagcatcttcccttccgcttggcgtctctgggattgggatgagtgcctggctcccatctcctcctcaccttttgttgctatcggcagctgctggctcaggggcatcccacctccgggctctgggttcctctgccctggaagggctccaggacccgtcccaataaccacccacggccaggagggccaaggccccgtgctggatatttaaatttaggggccggtctccagggcgcgtagataaataaatacactcagcgtcaaaaaaaaaaaaag

SEQ ID NO: 28558 - DNA, 467 bp, Homo sapiens
  misc_feature (1)...(467): n = A,T,C or G
aggacgatgcccncaactgagnnccatgangtacctcgcacagngcggnggaattcctctactcgtgaaccaggagtttggggatggcaaggagaaggccagtgttgattctgacagcaatcttctggctctcattcgagatggcttacttccccagtatgagcacattcttttagaacctgacccagtaccagcatatgctctgaaactgctagtcgcgatgactgaacacaacccaactttcacaaggaacatcaggagagcattctgggtaataccatgcaaagtgtgattgcattactcagcaatctagttgcctgcaaagattcgaatatggaactactttatgaacaaggacttgtcagtcacatctgtaacctgctcactgaaactgccacactgtgcttggatgtggacaataaaaacaacaatgagatggcagctccactgctcttttccctgcttgg

SEQ ID NO: 28559 - DNA, 450 bp, Homo sapiens
  misc_feature (1)...(450): n = A,T,C or G
naatgatgactgacagcacttgcggnggaattcgctccccctaaggctctgctcctccctgggcctgaaagttccttctcagcctgagagggggcccttcgatctcaggcatgactcagcccggctgatgcctctgcagtgctgagtcaggatttggggccggctctcttgggtctgtccccttttcccaggtactgccttacaaagctgtggccaggaagtggccggtataaaggatgcccaaggtctttgtacgtgtgtaggagttagcgtgtttgatattgttaatataataataattattttttagagtactgcttttgtatgtatgttgaacaggatccaggtttttatagcttgatataaaacagaattcccaaaaaacaaactacctaaaaaaaaaacaaaaaaaacaaaaaagaaannngggggggcccttcgggaagaggg

SEQ ID NO: 28560 - DNA, 471 bp, Homo sapiens
  misc_feature (1)...(471): n = A,T,C or G
taggtagnacatcggaannccnnntatagttgacatcgnacagncnggnggaattncacgaaagagttcccgtgccgtgggagcttgtctgggaccgctggtcggaccgtagagtcgcagctgtgtgttagggctaggatggctccgggatgcgcgtgacgcaagtgaccttgcgtgtaaagggatacatgatcccttaattcaggctcaggctgaagaactgacccacttacgacagaagacacaggaagggagaggtgtctgctacctttttacccagcatgtgaagaacacagtcaagtcttttgagggccttctcaggaacactgacattgcctactaccagagacagagattctgtgagcaaatggtacaaggaagccagctgacagagatccttgtcagaaaacttgccacagagagacggggtttcaccacattggccaggccgatctcaaactcctgacctca

SEQ ID NO: 28561 - DNA, 462 bp, Homo sapiens
  misc_feature (1)...(462): n = A,T,C or G
ntccgagaccatangaaggcggggtaagagtacctctggagcncggctatgggctccaggtgggcactgtctggatcaacgtccacggcctcagagacccttctgtgcccacaggcggctgcaaggagagtgggtgttcctggcacgggggcccagacgggctgtatgagtatctgcggccctcagggacccctgcccggctgtcctgcctctccaagaacctgaactatgacacctttggcctcgctgttccctcaaccctgccggctgggcctgaaatagggcccagcccagcacccccctatgggctcttcgttgggggccgtttccaggctcctggggcccgaagctccaggcccatccgggattcgtctggcaacctccatggctacgtggctgagggtggagccaaggacatccgaggtgctgtggaggccgctcaccaagctttccctggctggg

SEQ ID NO: 28562 - DNA, 485 bp, Homo sapiens
  misc_feature (1)...(485): n = A,T,C or G
ggggccccggggnatcgagaatatagtccctgtggtggaattcgtggtgggagctcagggtctcccagcaccctgccgccctctgctgggctctgcctgacaccggcgaggctcagtctgggaggaggtggagcccagcgaagtgtagccaagcagggacaaggagagaccgcagcctcgtggaaaaccgggactggaggcaggaaacaggtagggagggaagggggtggccgcaaactggggtgggttggggaaggtgcgaaaggacgacgccccgtagcctaagggcagaatttcaggggggtggagggtgcagagtgaaggggagggcattgcagtgcgcgcggtaagggtttctcatctcacctgagtgtggcgttcgattcactggcagcaggaaagacggggatcagagaagagttaccactggcgcccagcttccctggcctgatccccagccccctcccacacctgtccatgctgag

SEQ ID NO: 28563 - DNA, 492 bp, Homo sapiens
  misc_feature (1)...(492): n = A,T,C or G
ggcggttccggggnaattgagnaatcgtagacctctagtccgtgtggtggaattcaccagctgagaatgttaatcagaattaaaagccagtcagtactattaaagcatcaaacatgaagacctagagaagaaggaagatcaacgaggcaggcaaaggaagcagtgtaactttttcccattttacggatgaagaaaccgaaattcaagagatttgctcaagtttacacagctgtttagggtcagccaagtccaagttaaacaacataatcccctttgctcgtctctacaggcccagggctcaaactgcgcctctggggttcctggcgcgcggcgatcaggggccatcgaaaggccagaggagggcccaacgcagacgtttgttttcatcttctccaaggcggatctcgcaggccagagaagtgggtcccgcttaccgcggggctgttaccaaaaaaggcctttctctcgctggagcgcttggcggcgcgcgtn

SEQ ID NO: 28564 - DNA, 445 bp, Homo sapiens
  misc_feature (1)...(445): n = A,T,C or G
gagcggagggccccactgagccactangaagcttcgaacgccgcacacagncggaaggcggaaggagcagctgggataagctgatgtttacctggaaatttaccctttggggggaccctagcccccaagcccctgtggccgccgtgggggaggcagggcacaccctgttacccgccgtgggggaggcagggcacaccctgttacccaccgtgggggaggcagggcacaccctgttaggcactcctggctgccagcccgggacatgggtattattaccccatttcacagatgcagaaactgaggctcacaaaaggtaagcacctgattaggaggcgctcaagtccatcaggagggaaccagcccatccacgtggaggtgttgaagagtcaggagcccgcgcacaggaggctgcctgaggttgaatcctggcgagttctaaactcan

SEQ ID NO: 28565 - DNA, 475 bp, Homo sapiens
  misc_feature (1)...(475): n = A,T,C or G
aggaggtnnnnnnattgagatccgtagtccctagtccgtgtggtggaattcttcacagctcacaggggcaggaggcagctcccctgcctccaggaccctgttgctatggtgacacagcgtttctaggacagaggggcctgccagtctccccccaccacccgtgcacgacttcctcaccacccccaggttccctgcagatgtagtgtgtgtcctgagtgtttctttggttctttgcacgccaagtctcttggttgtaccatgtgacacaccctgtgcactggtcgctgtcttctgggcttacacccttgttaatgatgctcctgcctctgcctcccagcccctcacccagcacagctctgcctggacttggagagatgggaggcagacccccaccaccatacatgctgtctggggcccctcagacattctgtttcatatcccattcatctccctcctcccaccgcgtcagttattc

SEQ ID NO: 28566 - DNA, 465 bp, Homo sapiens
  misc_feature (1)...(465): n = A,T,C or G
agggcggggnnnnnacaactgagaccattagataacctggcggaanncngcgngcgctacctgctgggccggggggcagcggtcgactgcctgaagaaggccgactggactcctctgatgatggcctgcacaaggaagaacctgggggtgatccaggagctggtggaacatggcgccaatccactcctgaagaacaaagatggctggaacagtttccacattgccagtcgagaaggcgaccctctgatcctccagtacctgctcactgtttgcccaggtgcctggaagacagagagcaaaattagaaggactcctctgcatactgcagcaatgcatggccacttggaggcagtcaaggtgcttcttaagaggtgccaatatgaaccagactacagagacaactgtggcgtcaccgccttgatggacgcaatccagtgtggtcacatcgacgtcgctaggctgctc

SEQ ID NO: 28567 - DNA, 469 bp, Homo sapiens
  misc_feature (1)...(469): n = A,T,C or G
gaaggcagggccngnnnaactgagactgangacctctagacagnctggtggaattccgagcccgggaggctgccctgagcaggagcatggagctctacaggaatgcaccccccaccgccattggcatccccaccaagctcctcccccagaaccctgaggccaagggggccactggctacccctactgcgcggcggcccaggagctcggactgctggtcctggagagctgcccccagaagaagctggagtgcatagtgcggaccctgcggatcatctgtgtctgtgcggaagactactgccccaccccagaggccacaccccaggccgggcccccgcccatcgctgcagctgccattggtgccgatgacctgctgcccatcctgtccttcgtggtgctgaggagcggcctccctcagctggtgtcggagtgcgcggccctggaggagttcatccacgaggggtacctgat

SEQ ID NO: 28568 - DNA, 428 bp, Homo sapiens
gatggtgtgtggacgagggtaggagggggcccaggcgcccccaggggtctgtcctgtgtggtgtgcaggtctcctgtcccctcctggccatgcccattgggcccatagcctgggtcctcccggaggctcacaggctacccagaaatcaggtctgtgctggacggaggcatcctacgggcctagcagctgcaggcacacaggcctcaggacaccccatggaaacccagagacccactgcagatggccctcctgggaagccaccacttgtgctcaggacctgggaccaaaagctgaaagtggcacctcgtgtccctggccctgacagctcagcctgcaggggaccacctgtggcttcctgtgtccatggatgggaggcaggacagcagcccccaatagcgggagggctcttagcagtggcggttggagcg

SEQ ID NO: 28569 - DNA, 460 bp, Homo sapiens
  misc_feature (1)...(460): n = A,T,C or G
gggcgagcncccccactgagatccctganangccatgacangcgnggaantcgactggtagatggttaaggatcactaccaggatcctgtaccaggcatcacccctagcagcagcagcaggacccggacacctgcctctatcaatgctaccccagccaacatcaaccttgcagatctgacacgggctgtgaatgccctgcctcagaacatgacttcacagatgttcagtgccattgctgcggtgacaggccaaggacagaaccctaatgccaccccagcccagtgggcctccagccagtacggctatggcggcagtggaggcggcagcagtgcttaccacgtattcccaacgccagcccagcagccagtggccacaccactaatgacccctagctactcctacacgaccccaagccagcccatcaccacccctcagtaccaccagctccaggccagcacc

SEQ ID NO: 28570 - DNA, 450 bp, Homo sapiens
  misc_feature (1)...(450): n = A,T,C or G
nactgatgactanagacatngcggnggacttcgnggaaagttctttccatttagagcttaaggtgttgtcactttctccaagaagcttgtcttgcccttggcctggtgtggtggttcatggctgcagtcccagcacattgcggggcggaggcgggaggattgcttgagcccaggagttcaagaccagcctggacaacaaagtaagaatcagtctctaaattaaaaaataaaagtaatttttttttgtttttttgttttgagacggagtcttgcactatcacccaggctggagtgcagnggcaccgatctcggcttactgcatggtccggctaccggattcagacaactctcctgcctcaacttcccgagaggatgggattgcggctgcctgccaccatgcccagctaatttttggatttttaagaaagataggggttgacgctgtattgc

SEQ ID NO: 28571 - DNA, 467 bp, Homo sapiens
  misc_feature (1)...(467): n = A,T,C or G
tgcagagcnnnnnnnaattgaaaactgangatcattagacagngnggnggaattcgaattattgggccaaagggatgggattattacaaccaaatttctttccagaaagattatacgaatttgtcagatttgaatttttagaaaaaagaaatctgtgccaactggtgaggtaaaacatactgactcgttgttttatgtgcattccattgattactggtgaggtttccgttttttaaatttgcatttcttcttttgtaagctgtccatactctttatccatttttctatgggttgtttagttttctaaatgtataaggcttcagatgactatataacactgtccaagcttaatttaatatgcatacaatcacctggaaatcttgttaaactatagattgtgactccataggtctagggtggggcctaagattgtatttctaacaagctcctgggtgatgctctattga

SEQ ID NO: 28572 - DNA, 460 bp, Homo sapiens
  misc_feature (1)...(460): n = A,T,C or G
gggcgggnnncnccaactgagccccatgatatcgtngagaannccaccngcnatgcaaaaataggaagtcacctgcatgaatgttgtcccctggaatcgtataacacatggccctaagcatctattaatgtgggccaagaaggttttgtccattgcaatacatttccctggacttctttgaaatagttgcagagaagaagtcaattgccattatcctacaagaggatgatggcaggatatctaaccagcttgtaaccttataaattatgatattcaataaagattatctaggctgggcatggcggctcacgtctataatcccactactttgagaggctgaggcgggtggatcacttgggatcaggagttggagaccaccctgaccaacatggtgaaaccccatctctactaaaaatacaaaaattagccgggggtggtggtgggcacctttaatcccagn

SEQ ID NO: 28573 - DNA, 460 bp, Homo sapiens
  misc_feature (1)...(460): n = A,T,C or G
gagtnnannnnnnnngntttgtagaccactagtcagngttgtggaactctgcaatgtctacttcgatctgaagtctagaggagacaagtatggcaaattggtcggcgtggtccctggtccagtcggagagccagcggactctgacaagcgtcatgccagtgacttcgccctgtggaaggcggccaaaccccacgaggtgttctgggcctctccctggggacccgggaggccgggctggcacatcgagtgctctgccatcgctagtatggtatttggaagtcaactggatatccattcaggtgggatagatttagcttttccacatcatgagaacgaaattgcacagtgcgaagtctttcatcagtgcgagcagtggggaaattattttctgcattctgggcatttgcacgccaaaggcaaagaagaaaaaatgtccaaatcattaaagaactacattacn

SEQ ID NO: 28574 - DNA, 464 bp, Homo sapiens
  misc_feature (1)...(464): n = A,T,C or G
gggtncnnnnnnnaggtttgtagacattannnannactgatgacctctagtacangcggnggaattcaggccctaatccaagatttaatcaactactgtctgagctacattgcgaaaattaatctcccgaagaagaggggtactttcattgaattccgaaatgggatgttaaacgtgtcccctattggaagaagctgcagccaagaagaacgcattgagttctacgaactcgataaaaaagaaaatataagacaaaagtttgtagcagatctacggaaagagtttgctggaaaaggcctcacgttttccataggaggccagatcagctttgatgtctttcctgatggatgggacaagagatactgtctgcgacatgtggaaaatgacggttataagaccatttatttctttggagacaaaactatgccaggtggcaatgaccatgagatcttcacagaccccat

SEQ ID NO: 28575 - DNA, 471 bp, Homo sapiens
  misc_feature (1)...(471): n = A,T,C or G
tggaaaaacacgggggcnncnngcaattgaaagcttcgattgagcncatnagaacangcggnggaattcacatcacagaagttagtccccagccaccaaaccttaaatttttgttgtactgttgcatgtttgaaatttacaaatacttaatttacataactgacatcaaccgtaggcatcatcaatgcctatagtgttgtgccctgtgaaagaaaagccagaatctttcttgtggcgtataatgttctttgtgatcttacctctcccattccttcagcctcattgtttattgacagcatacacacatgcgcgcacacacacacacacacacacacacacacacacacacattattggaatcatgttgatttgtttggagagctagagccaaaactatgccattctttctgctttctgtgccttttacctagaatataccactttcacccaggtgcctttgggctcaacaag

SEQ ID NO: 28576 - DNA, 474 bp, Homo sapiens
  misc_feature (1)...(474): n = A,T,C or G
cgggggctnnnnnntttcgagatcgttagaccgtgcggtggaattcctgcctctcacggaggctgccccctcccaggcccaggccgactccctcaccgtctacctggtggtggcgttggcctcggtgtcgtcgctcttcctcttctcggtgttcctgttcgtggcggtgcggctgtgcaggaggagcagggcggcctcgatgggtcgctgctcggtgcccgagtgtccctttccagggcatctggtagacgtgagcggcaccgggaccctatcccagagctaccagtacgaggtgtgtctgacgggaggctcaggggcaaatgagttcaagttcctgaagccggtgattcccaatctcctgtcccgcgacagcgaaatggagaaagccccacctttctgaatggcgtggaatgcaattagggatctgattatgatgcagaacttttagaatgagtctatttctttgaaatctta

SEQ ID NO: 28577 - DNA, 463 bp, Homo sapiens
  misc_feature (1)...(463): n = A,T,C or G
aggcgggcnnnnnnactgagactgcagccattgcggnggacnncactctgaaacaccaggtatgaagcatggaagaggacaacaactttaaatacctttatttttatattgattatgtgttgaaataatattttagatatattgggtttcaaaagtatcattaaagtgaatttcaactattttgatgactttttaaatgtgtttgctggaaattttaaaattgcatatgtagctaacatatctttattggatagcactgctataaatgggctccagacctaaatgcaaaaggcaaaaaatatgttaataggccgggtacagtggctcacgcctgtgatcccagcactttgggaggccaaggcgggcagatcacctgaggtcaggagttcgagaccagcctggccaatatagtgaaaccccatctctactaaaaatacaaaaattagccgggcgtggtggcacc

SEQ ID NO: 28578 - DNA, 465 bp, Homo sapiens
  misc_feature (1)...(465): n = A,T,C or G
aggacgcgcncccccaatgatnaccccatgagatcctcgacagngcggnggaantcggccacccgtttttcatcgtggcttgaatggagctgtgtgggcggcaagccacccaggcaccgaggcaagagagaggacacgagctgttgcagtataataaaatataaaacaagaagagttataccagatatagatcttagatatgattatatatgaatatcattaatcattagtttgtagcaattactttttattccaatattataataatccttgctcaataatcatagcctaggaaaaaccaggccatacagagataggagctgaggggacatagtgaggtgtgaccagaagacaagagtgcgagccttctgttatgcccggacagggccaccagagggttccttggtctagcggtgacgccagcgtctgggaagacgcccgttaccaggcgggccgtggtccacn

SEQ ID NO: 28579 - DNA, 471 bp, Homo sapiens
  misc_feature (1)...(471): n = A,T,C or G
tgggaattaacccgcgannnnnnnaattgagaccgtcgactgagaccattgnacagngcggnggaattccgaggcctcgccccatccccacccgccttcaactgcaggccaggcacctacgaggctggaacttgtcacggagaagcaatgagcaaacacgcacaggctcccagagcctctgtgggaccagtggggcgcaagctcacacgtggctgataactcggggaaaagtgctcccctcccgagggggctcctgaccaccgattcccggggctgggatgtgtcagatcacatgtgtcaacaaaaagccacttcagacagccacagtgccaacacccagcccctgtctatggggcggctgagcctcaccctcgcctgattccggctctgtcagtgaggcgctggggtccacccggggcagggagctggaaaccccaggagaccacacagactccactcccagcactgctt

SEQ ID NO: 28580 - DNA, 396 bp, Homo sapiens
cgacctactgccaccagttcccagtggaagcccctcagcccccaggtgtgagggcatgggcagtggggcagggcaggagcctggatgatggtatatggggtggggcggcccccaactatcttggcatgttggcctgaggacagctggggccttcaccctgtgccatgaccattccagcttcttgtagcagcacctgcatttccctctgggcagccccctttatccatcctcaggtcatggggagcttgggtggggctgacactcccctgcctaggagttggcagatgacctgggcgcggccagccagactggaccccttagcctcgaggcctttgctgaagctcatgtgagggggcgactgcccctgacaggtgttggattccagctgctgtggcc

SEQ ID NO: 28581 - DNA, 462 bp, Homo sapiens
  misc_feature (1)...(462): n = A,T,C or G
gaggggnnnnnnnnnnnnnatcgtcgtccctagtccagtgttgtggaactcgcttttacttcagaactttttgccactagataaatagaaatttactggcttgcaaaaatatcgtgttggatctaaacagtggtttttatgttaatagaaaaataacagcagattgagagcaggcagaaaagaaaaaatagagaaaaagagtacttaggaactctgtagtttgcaggtcaaccttaagcctccttttccttatgtgaatgtgcacagagaccatattatttccattttacataaactttggcaagtagaggtgccataaaacctatggaatgctcaaaaggggtcattctccttttctcctcattcttcgattatttgcttcctgccctttttcttttttttcttaaaagggggaactgagcttgtagccctaggtttttgtgtggtggatcaatatgtgct

SEQ ID NO: 28582 - DNA, 467 bp, Homo sapiens
  misc_feature (1)...(467): n = A,T,C or G
aagacgagcgcccccaatggaaaatacatggaacgatcagcananngcgccggaanncggncgnncgagccgggcccgcggtactacaagaacatcggcctggtcttcaagactcccaaggaggctattgagggcacctacattgaggagaaatgccccttcactggtaatgcgtccattcgagggcggatcctctctggcgtggtgaccaagatgaagatgcagaggaccattgtcatccgccgagactatctgcactacatccgcaagtacaaccgcttcgagaagcgccacaagaacatgtctgtacacctgtccccctgcttcagggacgttcagatcggtgacatcgtcacagtgggcgagtgccggtctctgagcaagacagtgcgcttcaacgtgctcaaggtcaccaaggctgtcggcaccaagaagcagttccagaagatctgaggctggacatcggn

SEQ ID NO: 28583 - DNA, 475 bp, Homo sapiens
  misc_feature (1)...(475): n = A,T,C or G
gggaggctnnnnnnaattcgagatcattagtccgtgtggtggaattccaacttatagttcatttatggtctctgctttgtagaacttcaaaatttctctacaatcacagttatatattttttctgggttcatatgttgcttagaacacttccctatacgaaaaacatgaaaattttttttcatattttctttcataagtgtctatttacatataggttatttattactcttgcgttaattttgtggtatagtgacatagaggagtctacctttccccctctaatgaggtattgtcccaacacagtgttgcataaatcttttttccaaatgtcagcttttatcacttatcaattctcattgtacttgagtctgttttagattgtctcttatattgatcttttagtttataggaaagctgctttacttnnncnnatttctttttcttctttgttttcgacggacccaattttaaaag

SEQ ID NO: 28584 - DNA, 449 bp, Homo sapiens
  misc_feature (1)...(449): n = A,T,C or G
aggcgggccnccatgagaccatgaaatcgtgggaanccaggcaccaccgggaaacatttgcctggtggaccagatcgagtgggacatgtcagagaaggagaactcaccagataagtttgccctgaagctgtgctcggagctggggttgggcggggagtttgtcaccaccatcgcatacagcatccggggacagctgagctggcatcagaagacctacgccttcagcgagaaccctgtgcccacagtggagattgccatccggaacacgggcgatgcggaccagtggtgcccactgctggagactctgacagacgctgagatggagaagaagatccgcgaccaggacaggaacacgaggcggatgaggcgtcttgccaacacggcccctgcctggtagccagcccatcagcacacggctcccacggagcatctcagaagattgggccgcc

SEQ ID NO: 28585 - DNA, 469 bp, Homo sapiens
  misc_feature (1)...(469): n = A,T,C or G
gaggggnnnnnnnnnngntttcgtagaccctagtccagngttgtagaacactagtccagtgcggaggaattcggatatcctgtttaccctgatgtgactattacaaattgcatgtctgtaccaaaatatctcatgtacccgataaatatatatacctactatataccgacaaagttaaaaatagaaactggaagacaaaaaataaataaaaatcaaataaagcttctcattttgttgtctgcctttggtagatttccagccctgaagtggctgtttttgaaaactgttttcccccagttttatttttgtttatccctctctggagggatttgagtccttctttatacctccacaactccaagtccctcctctcattatcgttttagatgaggaaagtgaagctcagaagagatgaatcaatttgccctataccatgcagctaggaagcctgggagccagcactaaactn

SEQ ID NO: 28586 - DNA, 397 bp, Homo sapiens
cgctttggaatccgtcgacttaggggatggccacgatggagaccttgatacacttccggaaaggcaccaccttggggcacagagaaggcgtttggcgcaaggcacatggttcactgacccaggaggggataccttgaagcgcaccattacagacaagtggggccccagaatcacccgagcaggtgctgttgccccctgtgcagcgtccagcacacagcatgaacttggtcaccttctgagggtgaacttgcgcacacacgtcattggaaataacatggaggtgcacacactgaagtttctttggggtcaagaactcctctggttcaatgctgccccagcctgaggcgtagcaggtggtccccagtgctggctcctgggtgggcaggtacatgacctt

SEQ ID NO: 28587 - DNA, 463 bp, Homo sapiens
  misc_feature (1)...(463): n = A,T,C or G
gtgcgcggccnncaatgatnanccttgangatcatcagacagngcggcggaattctgcgggaactccaccgccaccagcgcgggcgcgggccaaggccctgtaggagcagccaaagatgtaacagaagaatccgtaacagaagatgacacgaggagaaactatggaggagtatatgttggcctaccatctgaagctgtcaatatggtgtccagtcaaacaaagacggatcggaaaaattagaagaaaataacatcatgactcacgaatcaagagcttgctcatcagtttggaaggaatttggctccgtgggacgttgtaatgtgcacagacatttccaaggaaattctaaacagtcacccttcccttttgcattcccccaaatcttaagtgtatacataaaaccctgggtacatattgttgtggtaatagaagggaattggttaaacagtacacttgtttatg

SEQ ID NO: 28588 - DNA, 458 bp, Homo sapiens
  misc_feature (1)...(458): n = A,T,C or G
gtgcgagnccnncactgagaccatagatacacgtggcggaanncgccacttctttaggctcctgtttcctcctttctaaaacggggcgatcacagtccttgttcttagggctgctggatggacaaaaggtgactgtgtccacagagcgtccctgggcaccgagtaaacccgcagcatctcacagggcagccgccagcatcggggctgctggctgggctcggggactgcatgcgttgctactgagaggcgccctggacgccctgggtgtaaaacacatgttgggtttccttggatttcgaagctccaccataaagagtgtaaaatggctcaatcgcaagtttgcatctgatgacaggttcaaatgagagtattttggacctgttgagctaaataaatatattagtaaagttgatttcacctgcttgggtttttctttattattaattcaatgtggcttc

SEQ ID NO: 28589 - DNA, 462 bp, Homo sapiens
  misc_feature (1)...(462): n = A,T,C or G
agggcgcggccnnacattgatnntcattgagaccatcagaccangcggtggaattcttccagttaattttattatcgctcacaacaatcaaatttcttctgtaaagaaaaagggcactcactagtaatgttttagggcactcactagtaatgttttaaaaagtattagcatagggataatcactggcacaaatacaccttcctgcatagctgaggaactaccaaaacaaaacagatcatatagtgtaagattttaaataaatgacttacaatgaaactgcaacagatgtaaatatctgtggcccatataaccctacagtaacatttataaagcagaaactgcaggggatgcattaatatcactaatattagaaactaatatacctctttcattaacagtcaagaacatagaaatggctgggtgcagtggcgctcgcctgtaatcccagcgctttgggaggca

SEQ ID NO: 28590 - DNA, 457 bp, Homo sapiens
  misc_feature (1)...(457): n = A,T,C or G
gggcgtgnccnacactgatgaccatgangatctggggaaanncggggnggggggttcgggatgagaccataactggccggccagcagttctgggcagtcccttcctctctcctgccttggcgcctccatctagacttatgggcgatctctgggatggccagtcagcggggtggtctcctgggtccccagcctcgccattctgtggggggtggtgactgggcgaactctcagatgcctcagcaccctcccaccccttcctcaggcagaacgagatcttgtggcgggaggtggtgacacttcggcagagccacggtcagcagcaccgggtcattggcaagctgatccagtgtctctttgggccacttcaggcggggccgagcaatgcaggaggcaagagaaagctgtccctgatgctggatgaggggagctcatgcccaacacctgccaagttcaacac

SEQ ID NO: 28591 - DNA, 470 bp, Homo sapiens
  misc_feature (1)...(470): n = A,T,C or G
gtggagggcnnnnnnaactgagactgaagacattgcaccgggcggnggaattcgtctcctgggcgtggtctcgagctggctggagggggccgtgctggatcagatctttccctgcttccccaaccgcctcccccagcagatgttgcagagcctgagcacctctaaggagctgcagcgccagttccacgtctaccagctccagcagctggatcaggaactcctaaagctggaggatacagagaagaaaatacaggtgggccttggggccagtggcaaggagcacaagagcgagaaggaagaggaagctggggcagcagcagtggtggatgtggcggagggagaggaggaagaggaggagaatgaggacctctactatgaaggggcaatgccagaagtgtctgtgcttgtcctgtcccgacactcctggcctgttgcctcaatctgccacacactgaaccccagaacctgcc

SEQ ID NO: 28592 - DNA, 436 bp, Homo sapiens
  misc_feature (1)...(436): n = A,T,C or G
ggggctcaaatgagacttcactgaggctgggnacggcggnnccnggcgcagaggacgctggtttggatgaaagaagctgggctgagcaaaatctggagagcgcgagggccgggcggtcagtcagcacccagactggcagcatgaccggtgagtgtccgggaccctgctcccgccaccctacctttcgctctgccctgtgcgtctcccgtcattgaactccagattccttgtctgagcctctttgcctcccctgctgcttttggatgtctcctgcccgccctctgcgtgtcccctccgcggtcgccaggaccaatcggctcggtcgcactggcttttgaagtctcgctttttacccctgttagctacttctcacaggacctagagctggggcctctgaggtcaaagagcctgaacatttccaaacggcgcttttgcc

SEQ ID NO: 28593 - DNA, 461 bp, Homo sapiens
  misc_feature (1)...(461): n = A,T,C or G
agggcgtgncccccaactgagaccaattgagatctggggaaanncgcggngacaagtcgagcggcaagcactacggccaattcacctgcgagggctgcaaaagtttctttaagaggagcgtccgcaggaacttaacttacacatgccgtgccaacaggaactgtcccatcgaccagcaccaccgcatccagtgccaatactgccgcctcaagaagtgcctcaaagtgggcatgaggcgggaagcggttcatcgaggaagaatgcctccaacccagcccaatccaggtcagtacgcactcaccaacggggaccccctcaacggccactgctacctgtccggctacatctcgctgctgctgcgcgccgagccctaccccacgtctcgctacggcagacagtgcatgcagcccaacaacattatgggcatcgagaacatctgcgagctggccgcgcgcctgctt

SEQ ID NO: 28594 - DNA, 447 bp, Homo sapiens
  misc_feature (1)...(447): n = A,T,C or G
naatggagnccctcgactggagcctcagnacagngcggnggaattcgntntggaaacattgggtactatatctgcctcctggaaatttttcaaacattatatattaaagattctgagcagtcttgtagtaaaaaaagtatttaatgttatttatgctagtttatttaattatgaaaccctctttttaagcaaaatacatagaaatgctatgaaacaattttttgccgatgcttattgggaaatgtaagcctgtaaaagtagatggagtcaaggtggtagagtgcctgaacgtcagagtgaagagtcagtgggtggatccatggaagctttctcatgaaagcttcccagataagtggatgagccatgatctggagactgtatgtgagatgggatggatcacagacctggaggagatttgtagggatgcatccaatagtaagtcttttn

SEQ ID NO: 28595 - DNA, 455 bp, Homo sapiens
  misc_feature (1)...(455): n = A,T,C or G
nactgatgactgacgacnctncgganggacagnncaacgcccaggacacctactcgctgctgccgccccaggacccgcacctgccctttgcctttctggtctccatcaacgcggacaacggccacctgttcgctctccagtcgctggactacgaggccctgcaggcgttcgagttccgcgtgggcgccgcagaccgcggctccccggcgttgagcagcgaggcgctggtgcgcgtgctggtgctggacgccaacgacaactcgcccttcgtgctgtacccgctgcagaacggctccgcgccctgcaccgagctggtgccccgggcggccgagccgggctacctggtgaccaaggtggtggcggtggacggcgactcgggccagaacgcctggctgtcgtaccagctgctcaaggccacggagcccgggctgttcggcgtgtgggcgcacaatggc

SEQ ID NO: 28596 - DNA, 567 bp, Homo sapiens
  misc_feature (1)...(567): n = A,T,C or G
gagaggcnnnattgannncntttcgaacactantccgtgtggtggaattccgagtgggtagacaagaaccggctggcgctgaccaagacagtgaaggatgctgtacagaagaactcagagaagtacctgagcgagctcgcagagcagcctgagcgcaagatcactcgcaaccaaaagcgcaagcatgatgagatcaaccatgtgcagaagacttatgcagagatggaccccaccacagcagccttggagaaggagcatgaggcgatcaccaaggtgaagtatgtggacaagatccacatcgggaactacgaaattgatgcctggtatttctcaccattccccgaagactatgggaaacagcccaagctctggctctgcgagtactgcctcaagtacatgaaatatgagaagagctaccgcttccacttgggtcagtgccagtggcggcagccccccgggaaagagatctaccgcaagagcaacatctccgtgtacgaagttgatggcaaagaccatangatttactgtcagaacctgtgtctgctggccaagctnttcctggaccat

SEQ ID NO: 28597 - DNA, 472 bp, Homo sapiens
  misc_feature (1)...(472): n = A,T,C or G
gagtnnnnnnnnnnngnaatcgagatcactagnccagngactgatgaactattagtgcagagcgggggaattggactacaagagctatgaactcatcagccagctacaccattacgtgcaggagctacttctgggcacccggctgcctgtggtggtcgaggccaacaaagctgacctgttgcacatcaaacaggatgaccctcagcttggactgcagctagccagcatgctaggctgctcattctatgaagtgtctgtcagcgaaaatcataatgacgtctacagcgccttccacgtcctctgtaaagaggtcagtcacaaacagcagcctagcagtacacccgagaagcgaagaacctccctcattcccacgcccaagtcacccaacatgcaagacctgaagaggaggtttaagcaagccctctctgccaaagtgaggactgtcacctccgtctgaagcaggaggagcact

SEQ ID NO: 28598 - DNA, 459 bp, Homo sapiens
  misc_feature (1)...(459): n = A,T,C or G
gaggggannnnnnnnnntttgagatcattaggcagngctggagactcttttatcccagggccgtgggaccctggaggctttgaaacaggacaatgggctggctagacaggtgcaggctatggccaggaaaccccccaaatacaacggaattgaaagactcctgttggaatgctggcccccgcaggaaccaccatgatcccgattcacccaggagggccaccctcccgtccagccccccaagagcagcagggctccctcttgcccttgaacctcctctgccctgacaggcggcgtcacccagggctcaggatcctggcttccagcattccagaggtgactcaccaaccaaagtgtcactcaccaaccgaaggaccttgcacaaatgcaccagcctccccatgcctcagtctccccatctgtaaatgagtgttatgacggtactgtcataaactccctgga

SEQ ID NO: 28599 - DNA, 440 bp, Homo sapiens
  misc_feature (1)...(440): n = A,T,C or G
taatgagcccatcgantgnggcctgaaaacggccggggaggcaaatctgtctgtcccagggccaggggcatagtaggtgttcatggaatacatgtggaacgcgtaagaaacgtgggtgggtgtgcggctgcttgggcagcatgcctcacccagcccagggctgaactgcaggcagggcccctagcctgggcccggtccctgtttccctgtgacacagatgcagtcatggcctgctcacccagtgcaggatgacacagagcccggagcaggtgccaaagcagtgaggggcaggagccagctcccccgggacccagagcagctggtgtgcagggctgagactaacaagacatgattgaatgggggtggacgaacacccagcacctcagaagagacctaaacagatactgcccagagctgcccgtggaccttgtgagggcact

SEQ ID NO: 28600 - DNA, 446 bp, Homo sapiens
  misc_feature (1)...(446): n = A,T,C or G
ntaatgagcgntatctanntgnccccctccgaacagngcggnggaanncgncccggcgaagagaagaacacattgttgaagaagcactttgacagctcttcttcctgggactcgccctcatcctcttcctgctccccttgctggggtgcagcctaaaaggacctatgtcctcacaccattgaaaccactagttctgtccccccaggagacctggttgtgtgtgtgtgagtggttgaccttcctccatcccctggtccttcccttcccttcccgaggcacagagagacagggcaggatccacgtgcccattgtggaggcagagaaaagagaaagtgttttatatacggaacttatttaatatccctttttaattaaaaattacaacagttaattcaattaaagagtagggttttttttcaacattcttgggtcatatttaatttcaa

SEQ ID NO: 28601 - DNA, 464 bp, Homo sapiens
  misc_feature (1)...(464): n = A,T,C or G
agggcggnnccccccctgatnatcattgagnatcctagacangcggnggaantcgagagngccaaatgacatcttccctccaccctgcccctgaaaaacagtacacacacatccgttcaacacaagacagggcgagtgtttttcttcctaaaaaaagttctttcttttattattttcacctattggctgctgcattttacgaagtggacttcccggtgtttgtttgtttgcaatacactcagtgcagccttaagcaaatgagatcattttcagatttcattttttttttcagtctttctacttttgtaataataggaagttagtaggactcacttctctgattaataagcaatttgcagcacacagcgttccactgcggggtttcacgctcacctgaaaacacctgttcccaacctacttcttgggggaagttgaccaaatcgttttaagtggtaactctttcc

SEQ ID NO: 28602 - DNA, 438 bp, Homo sapiens
  misc_feature (1)...(438): n = A,T,C or G
tacgagcctccgatgacnctgtganannacgnncnannagcccatcaactatagaagaagtgtttttcaaaaaaaccatttttaatgtgccatttacaagactgctttcagatatgtacaaatccagtgatatctaagctcacaagatacccacttttcaggatgggacagtatcagatgaacttcaacccatggagaacaagcctcaactaacaaacccttcaggaagcatataccggggaatgtgtagccttcaggaaaaaaatgccaattgacacaaagcattccagtagctatgacctgccgccctgaccaggatagggcgggtgggaaggagaggggtgcaacaggaccgcctgcactgaaaactcactgctgccatgccctgggagggggcaaactgggggttgccacaggccgtgccattctgcctcttag

SEQ ID NO: 28603 - DNA, 448 bp, Homo sapiens
  misc_feature (1)...(448): n = A,T,C or G
ctaagacggccttctantgagnccatnagnacagngcggnggaattcgnggggatcggctggctgcccccggcccctcacctccatctttctacccccaggttcgcggcgagcgcgcctatgacatctactcgcggctgctgcgggagcgcatcgtgtgcgtcatgggcccgatcgatgacagcgttgccagccttgttatcgcacagctcctcttcctgcaatccgagagcaacaagaagcccatccacatgtacatcaacagccctggtggtgtggtgaccgcgggcctggccatctacgacacgatgcagtacatcctcaacccgatctgcacctggtgcgtgggccaggccgccagcatgggctccctgcttctcgccgccggcaccccaggcatgcgccactcgctccccaactcccgtatcatgatccaccagccctcagga

SEQ ID NO: 28604 - DNA, 450 bp, Homo sapiens
  misc_feature (1)...(450): n = A,T,C or G
ggaatgagaccatacgaagnactgagaacctctgacatctcccagncatgtgtgaggaccgaaatttgccctatgtctatatcccctctaagacggacctgggtgcagccgcaggctccaagcgccccacctgtgtgataatggtcaagccccatgaggagtaccaggaggcttacgatgagtgcctggaggaggtgcagtccctgcccctacccctatgaggggctccggtagcacctgggcacctgccgctggaagctattgggctggcagcaggacgactggctgtcctcctgcccacccacactgacggcatcttcccagttccccaaggcacgccttcttcccaggcagctctaacagccctttcatgaaggtaatgctagtcttctgtccatcagtgccatttcctgtagaactaaaggctgttccaagaatgtggggtgggga

SEQ ID NO: 28605 - DNA, 446 bp, Homo sapiens
  misc_feature (1)...(446): n = A,T,C or G
natggagactgaagaacatgcggnggaacgcaggacaagcaggtggcctctggacgtcaccgttgccctgcatggtggccccagagcagcctctatgaacaacctcgtttccaaaccacagcccacagccggagagtccaggaagacttgcgcactcagagcagaagggtaggagtcctctagacagcctcgcagccgcgccagtcgcccatagacactggctgtgaccgggcgtgctggcagcggcagtgcacagtggccagcactaaccctacctgagaagataaccggctcattcacttcctcccagaagacgcgtggtagcgagtaggcacaggcgtgcacctgctcccgaattactcaccgagacacacgggctgagcagacggccccgtggatggagacaaagagctgttctgaccatatgcttcctaacacccgctggg

SEQ ID NO: 28606 - DNA, 449 bp, Homo sapiens
  misc_feature (1)...(449): n = A,T,C or G
nactgagatcgctagacagtgcggnggaattcgaagaagaggcgagaacgacccccggaccgaccaaagcccgcgcgccgctgcatcccgcgtccagcacctacgtcccgctgccgtcgccgccgccaccatgcccaagagaaaggctgaaggggatgctaagggagataaagcaaaggtgaaggacgaaccacagagaagatccgcgaggttgtctgctaaacctgctcctccaaagccagagcccaagcctaaaaaggcccctgcaaagaagggagagaaggtacccaaagggaaaaagggaaaagctgatgctggcaaggaggggaataaccctgcagaaaatggagatgccaaaacagaccacgcacagaaagctgaaggtgctggagatgccaagtgaagtgtgtgcatttttgataactgtgtacttctggtgactgtacagt

SEQ ID NO: 28607 - DNA, 447 bp, Homo sapiens
  misc_feature (1)...(447): n = A,T,C or G
natcgagattgtagaccattcggcagngcggnggaattcggcccggcctggagagatcacccagtcgcaggccttcgactttgagtttacccacgtggagaagccgtatgagtcctacacagggcagaatgtgaagctacgctatttccttcgtgctaccatcagccgccgcctcaatgatgttgtcaaagagatggacattgtagttcacacactcagcacatacccagagctgaactcttccatcaagatggaggttgggattgaggactgtctgcacattgaatttgagtacaataaatccaaataccacttgaaagatgtcattgtagggaagatatacttcctgctggtgagaatcaaaatcaagcacatggagatagacatcatcaagcgagaaacgacgggtacaggccccaacgtgtaccatgagaatgacacgatagc

SEQ ID NO: 28608 - DNA, 442 bp, Homo sapiens
  misc_feature (1)...(442): n = A,T,C or G
ctaccttgtcctacgacatngcggnggacttncagccagccatgctcagagtgactggcttccaagttgccaacagcaaggtcaatgttcccttgatcgaccacagnggcgnggagctgcgcttggctggaacttacaagaaagaagattttcatctcctactccaggtgtaccagattacagggcctgtggagatctttatgaataagttcaaagatgatcactgggctttagatggccatgtctcgtcagagtcctccggagccaccttcatctaccaaggctctgtcaagggccaaggctttgggcagttcggctttcaaagactggacctcaggctgctggagtcagaccccgagtccattggccgccactttgcttccaacagcagctcagtggcagccgcgatcctggtgcctttcatcgccctcattattgcggg

SEQ ID NO: 28609 - DNA, 567 bp, Homo sapiens
  misc_feature (1)...(567): n = A,T,C or G
gggnntacggnnnnnnnnnnnnnttttgatcatccgtacactagtccagagtggnggaattcaagatatcttccanaacgaaatcctccagcatcattggatccagttcagcctcacatacttctcaagcgacatcaggagccaatagcaaattggggattatggctccaccgaagcctataaatagaccgtttcttaagccttcatatgcattctcataacaaccgaatctcaatgtacatagaccctctttcttgtttgtcagcatctgaccatctgtgactataaagctgttattctcgttataccatttgaagtttttactcgtctctattaatatttaaataaatgctggggggtgatagttcttctttntaaaataaacattttcttttgaataagcatgttttgctgccgctgcaagtgttgtggccgttgtttctcagaacgtctgaggcagcagctgaatcatctcagtgcaagagcttctgagcataacacganacccagaagccaaaggaagagccacgcgtgggcccttgtgaaactaaagcttttcgtgtaaan

SEQ ID NO: 28610 - DNA, 447 bp, Homo sapiens
  misc_feature (1)...(447): n = A,T,C or G
nattgaagattagtaggccatgcggnggaattcctgcctcttatgtttgcctgtttgttccatctaaaactctacttttcctggattctttactttccagttgtcttgcatatgatcatccaaatgtcccaaaagtgcccatttctcttcttcaccactaccttggggtccatgccactagtgttttcttgcttgatctgttacagtgacctgactggtctttctgctttcactcctacacactcccccaaccctctgtgtgcaagagcagagcgagctttttaaaataaaagtcacatgccttaggtaatcctcccatgttccactatcttggctcattgaattcctgtcttcaggaatcttgtcctctgccttacctcagactctcactctggacttattcatttccacgaatcgaaccccctccctaattgtgtgtatccttcg

SEQ ID NO: 28611 - DNA, 474 bp, Homo sapiens
  misc_feature (1)...(474): n = A,T,C or G
gcggtgacnnnnttcgatggcactacgtcagngcggnggaattcgagagagagaagggaggtgcacagacctacctggggatggagggaggaagggagtgcttgtggcctcctcgttccttctacttccctggagccagcccctcgggccctccccgctatggagagtagaaaggtgttgtgctcaggctctgggacccaaatgctggtttgagtcttggttctgcatcttcaccattgtgtgacctcagactagtcttctacttgccctgtgcctcagtttgcttatctctaaagcaggaatgataagaactcttgtctcttagggttgtagtgagaagtggcttaaatgcatgtagagggctttgagcagatcctagcgtttagcagacatcaataactgtgagctatttttattatactgggcactgtgctaataagcagtttactcacattattacccttgaccttccca

SEQ ID NO: 28612 - DNA, 569 bp, Homo sapiens
  misc_feature (1)...(569): n = A,T,C or G
ngacgcgnncctcgatcccactcagtgagccgctannccttntaaggaaagaagccgtgtttcgatgaagacctggccacatggggccactgggacttcaacccagcccatcggtgggaaggtcctttttgggggactttgacagccatatccctcccagcacaccaggcgccaggtgagctggttcagacccctccaggggtactccagagacctcacgtgtggagccaggcctggccagggcaggggcctgaaacccactcctccatctcatggggctcacggcctacagcagcccacaagctgccactggccggcgacactgacacctgagcagtgtccagaacctttttgcctttttttgttccccgtgaaaagcaacatggacatttccttctagtccttccaaggaggggagagaagngtatgtgcatctgtgtgtgtgtggtgtgtgtgtgtgtgtgtgcgcgcctaaagagaaagagagcatgctcgggaggccctgcccagggtaagaggaagcttctgctttgcaccatctggtgggcgcacgcccctgaggcaccccn

SEQ ID NO: 28613 - DNA, 540 bp, Homo sapiens
  misc_feature (1)...(540): n = A,T,C or G
nttgaaaatcgttcgcctagtccgagnggngcaattcgagcaccagctcctgaccaaccccaagtgctcctatatccctccctgtaagagagaaaatcagaagaatttggaaagtgtcatgaattggcaacagtactggaaagatgagattggttcccagccatttacttgctattttaatcaacatcaaaggtcttgatgattacccctctttatttctgagaactcaggaagcatctccggcaggggttatccttaataggcccccgatctcagggttttaagaatcacattgggaaaaccgacagatggataaaaaataattaccacacagtaccagatgatgtgcttctgcatcgcactcatgatgagattgtcctcctgcattgcttcctctggcccctggtgacatttgtggtgggcgttctcattgtggtcctgaccatctgtgcccagagcttggcggcaaggcggaagccatgaagaagcgcaagttctcttnaaggggaagaggcttgtagaaagcnagtacagagctgg

SEQ ID NO: 28614 - DNA, 562 bp, Homo sapiens
  misc_feature (1)...(562): n = A,T,C or G
aggtgccnnnnnttttgaacatcgttcacctagtccgagtggnggaattcgggcagagaaggaaggagatgaggaaaagcgaggggcagaggaggaggaggtagaagaaccattgggagtagagaagaaaggaggtgaggaagagccagaggcaaccaaagaaccactggaggcagagagaaagggaggggaggagacactggaggcagagaaaaggggaggtgaggaatcattggagacagagaagacccaagggacggagggagatctgaatctagaacaagggtctagggaaggaagtgaatcccaggcagaggagatgaatgaggcagggcctccccttgaggctaacacggagacaaggccagagaaggaaggaccccagccccaggagaagccagtacgagccctggaggaggaaggagggaagcccccataccgctgctgagggccaaggccccttggnggatgccacacctcttctggcagagaccccagccccagagcagcccgccgaatgccagccactgcttcanggggaggggcccagcgccaaccccag

SEQ ID NO: 28615 - DNA, 561 bp, Homo sapiens
  misc_feature (1)...(561): n = A,T,C or G
agggnnntnnnnnnnnnntttcggacctctagtccagcgtggtggaattcanatccttttagttctctgagacatggcagaatccaatgtccctgactacccctcttctatcactctagaccaagctgccatcataatgcatgaacctctcaattggttttctactcccatccttaccctctatactgttctcaacacacaagccagaggaaatgttaaaagttgtagctctgaggcattttatagaaagttgatactcatacacataaaaagtagtaggaacctaaaattcatcatacattgatttcatttttgagcttgacgtagtaaatccttagcttcattgatttgggttgctatataaggagatccttctttgggcgatttaagatcatatttgttactgagcatctcttatttttcctttaatggcagtaaggcttaaaggtagtattgctgcttcccattntgtccttntagttcaagcccacctctctaatagccaccgctgaaagcagattntgtagaccttgaaaaatctgtttacttcggctatatggg

SEQ ID NO: 28616 - DNA, 561 bp, Homo sapiens
  misc_feature (1)...(561): n = A,T,C or G
tggngacnnnnnnntttggaacattcgttccactatccgagtggtgaattccgggctccagcggtcatgtccggcagaggaaagggcggaaaaggcttangcaaagggggcgctaagcgccaccgcaaggtcttgagagacaacattcagggcatcaccaagcctgccattcggcgtctagctcggcgtggcggcgttaagcggatctctggcctcatttacgaggagacccgcggtgtgctgaaggtgttcctggagaatgtgattcgggacgcagtcacctacaccgagcacgccaagcgcaagaccgtcacagccatggatgtggtgtacgcgctcaagcgccaggggcgcaccctgtacggcttcggaggctaggccgccgctccagctttgcacgtttcgatcccaaaggccctttttagggccgaccacttgctcatctgaggagttggacacttgactgcgtanagtgcaacagtaacgatgttggaaggtaactttggcagtggnngcgacatcggatctgaagttacggaaagctaccgcgcccatagcgct

SEQ ID NO: 28617 - DNA, 462 bp, Homo sapiens
cattgaagaccattattgcagtgcggtggaattcctgagtgtggcttttcttgttgaactgatcattcctgctcttcctgcatataagtcctgcatacggaccctggaactaaaaatggaaaatcagagcatgccccctcccaattttgtatagctttagcgggctctaaagctgcccgtttttagtgtgaaggaaaaaacgttgatttgcagatgtcgtgagaatgaaacctcaacatagacgttaggttcaggtgcttcagcagttgagggacacttttttcatgttgaacaagaagccaacttctccggttgcgttacagcacagccttctggaacaatccgagctgagattgaattgcctttgctaggcgaggggaccgcattcattcttactcttgcatcacgtcctggtctgtgtcaggcccaggggacacaagagatcccagctcagatgacaag

SEQ ID NO: 28618 - DNA, 443 bp, Homo sapiens
  misc_feature (1)...(443): n = A,T,C or G
natcgagatcgttagccagtgcggnggaattcctaaaaaataaccaatttttacattttttgagggggagtgagttttaggaaaggggaattaagattccagggagagctctggggatagaacagggcgcagattccatctctccccaagcccctttttagtgactaagtcaaggccccaactcccctcccccaccctacgctgagcttattcgagttcattcgtactaataatccctcctgcggcttcctcattgttgctgttttaggccaccccagctcagccaatgattcctttccctctgaatgtcagttttgtttttaaaagtcacttgcttagttgatgtcagcgtatgtgtatttggtggggaaaacctaatttcggggatttctgtggtaggtaataggagaagaaagggcactgggggctgttctccttccttc

SEQ ID NO: 28619 - DNA, 452 bp, Homo sapiens
  misc_feature (1)...(452): n = A,T,C or G
agaaacttggaccctccgacagctacnggaagccttcgcaaccancacannnngaanagcaaccgtgccaacaggagggccacgtggatatgctggcgtcagcagtggtaccaatggaggggccagcaccagcgtcctagagggccccagcaccagctccaccatccggaccagaaatgctgccagagctggcgccagcttcttctcctggatccagtaagagtttcggcaccgttgacgaactgcagcgatcttactggccaagccagagcgcctcctctcagattccttctcgacacagcaccctaggcggcttcttcctgtcagtcggaggtggcatgcaagatgaagctctctttgctcttcctgctttcattttgggcttttccttgtgttttcatgttttgggtatcagcgttacattaaagttgccaaattaaaaaaaaaaaaag

SEQ ID NO: 28620 - DNA, 442 bp, Homo sapiens
  misc_feature (1)...(442): n = A,T,C or G
aactgatnaaactnggatgaatctncggaaagncnggnggaattccccggctcggactggagtgaggctttggaccccgagccgctttttgccgttttagctggagctgagtcccgggcgctgggtgggcgggcaacacccgtgcttgatcattgccgagatcggccagaaccaccagggcgacctggacgtagccaagcgcatgatccgcatggccaaggagtgtggggctgattgtgctaagttccagaagagtgagctagaattcaagtttaatcggaaagccttggagaggccatacacctcgaagcattcctgggggaagacgtacggggagcacaaacgacatctggagttcagccatgaccagtacagggagctgcagaggtacgccgaggaggctgggatcttcttcactgcctctggcatggatgagagatgg

SEQ ID NO: 28621 - DNA, 548 bp, Homo sapiens
  misc_feature (1)...(548): n = A,T,C or G
nttcganctttcgttccctagtccgagtggtggaattccagtttggaaacgatgtgcagcacttcaaggtgctccgagatggagccgggaagtacttcctctgggtggtgaagttcaattctttgaatgagctggtggagtatcacagatctacatctgtctccagaaaccagcagatattcctgcgggacatagaacaggtgccacagcagccgacatacgtccaggccctctttgactttgatccccaggaggatggagagctgggcttccgccggggagattttatccatgtcatggataactcagaccccaactggtggaaaggagcttgccacgggcagaccggcatgtttccccgcaattatgtcacccccgtgaaccggaacgtctaagagtcaagaagcaattatttaaagaaagtgaaaaatgtaaaacacatacaaaagaattaaacccacaagctgcctctgacagcagcctgtgagggagtgcagaacacctggccgggtcaccctgtgaccctctcactttggttgaactttagg

SEQ ID NO: 28622 - DNA, 465 bp, Homo sapiens
  misc_feature (1)...(465): n = A,T,C or G
agaggcgtnncccccaactgagcccatangatnggctcggaacnccgaccggaataagagcgagcgcagaggattgctgaccgaatccagggcttcttctgccttccttttatcattggctgcaaccccaccatactgggcgtgcatgagctatatatccgtgccttccagaagctgacagacttccctccgatcaaggaccaggcggacgaggcccagtactgccagctggtgcgacagctgctggatgaccacaaggatgtggtgaccctcttggcagagggcctacgtgagagccggaagcacatagaggatgaaaagctcgtccgctacttcttggacaagacgctgacttcgaggcttggaatccgcatgttggccacacatcacctggcgctgcatgaggacaagcctgactttgtcggcatcatctgtactcgtctctcaccaaagaagattattgag

SEQ ID NO: 28623 - DNA, 559 bp, Homo sapiens
  misc_feature (1)...(559): n = A,T,C or G
agcgcgnnnnaactggagnacacatagaagaggcgtacncacnnaaccgcgancctccagtgcacttgccagttgtgccggacacatagaaagataacgacgggaagagctttgcccgctttggggtccaggcaggttttggggcctcctgtctggtgggaggaggccgcagcgcatcaccctgctcgtcacttgggatggagaccggctttcccgcaatcatgtaccctggatcttttattgggggctggggagaagagtatctcagctgggaaggaccggggctcccagatttcgtcttccagcagcccgtggagtctgaagcaatgcactgcagcaaccccaagagtggagttgtgctggctacagtggcccgaggtcccgatgcttgtcagatactcaccagagccccgcttggccaggatcccccgcagaggacagtgctagggctgctaactgcanatgggcagtacaggatgacctgtggcccggggatcacaagaatcaagtggtattctggatcagaaaatgccttccctccagctggaaagaaagcacg

SEQ ID NO: 28624 - DNA, 438 bp, Homo sapiens
  misc_feature (1)...(438): n = A,T,C or G
attgatgaccatagttgaggacgctctgaaagngnggtggaattcccagcggggccgagacctaatcaggagctgagctttgatggcggcttctggagggacaaagaaggcgcacagcggggggaggaggctgcgagaacctagctcccgccccagccgacgtgcgagacaaaggccccggcgcggggctcttcggaaggccgggaggttcctgtgacaatgcgagtctgcgccccacgctcccgcaccgtgatgccgaggccaaatggctagagtgggcccaggcatcagcatttctgtttggcagccgggcagttgtggtgcacgttttgaggaactactaaagcctgcctgtgatgaaaaaggcaaaagctgacttcaccaaaattactcccagggagacttctgcatttggctggaaggacatttgagtaaacc

SEQ ID NO: 28625 - DNA, 558 bp, Homo sapiens
  misc_feature (1)...(558): n = A,T,C or G
cattagaacaccnttnagngggnggnnnnnattagaaccactagtcagagtggaggaattccctcaccccagctccgacctctctcagccccatcgccccaactccaacctctcggccccatcgccccaccgcagctactcccctttcttccaaacttttgcagaaaaaacaaaaaaactacaaacaaaagcagccctctgcctcctccccagggaagaccctgaccgtgtacatagccctggtgctcctgcccagccacccctcaaatgcgttcgcctctggccctggggtgtgtctcggtgacgttttctatcagacgtgctccctcccatcctccagccctgcccaccctccctccactcctctcaactgcctcagcgatttcaagaaggaaataaagggataaagaaattcatgctggcaccgagtacaaggacagacagcaggcacggcccgcagcctggcatctgtgcgtgtggcgtgacccgtggcttggcatctgtgtgcgtggagtggccgtggcctggcatctgtgtgcgtggcgtgagccgtggact

SEQ ID NO: 28626 - DNA, 585 bp, Homo sapiens
  misc_feature (1)...(585): n = A,T,C or G
cgagcgtcgacactgtcagtgtggaggaactcggccctccgctccctgtgcggagtggagcctcggttcgtgcggtgccgcaacgcgacggccgaggtgcggatgcgcaccttcctgtccccatgcgtggacgactgcgggccctacggccagtgcaagctgctgcgcacacacaattatctgtacgcagcctgcgagtgcaaggccgggtggagaggctggggctgcaccgacagtgcagatgcgctcacctatggattccagctgctgtccacactcctgctctgcctgagcaacctcatgtttctgccacctgtggtcctggccattcggagtcgatatgtgctggaagctgcagtctacaccttcaccatgttcttctccacggtatgcggtggtgctgcatcttatcactgggtgcttgtgcatgggggtgggcacagtctgtatttcaccacgtctccgagggttgagaatgctgtgccttactgtgtttctacgacagagacagcagtgcttccaaactggcatggcatagatatgtcattnntgtaagacacatggagtaatgaacanactggttgn

SEQ ID NO: 28627 - DNA, 476 bp, Homo sapiens
atcgagacctcgtagacctctaggccagagtgcaggaattctcagatcaaagagccagccgagaagcaaaaattcttccaggagctgagcaagagcctggacgcattccctgaggatttctgtcggcacaaggtgctgccccagctgctgaccgccttcgagttcggcaatgctggggccgttgtcctcacgcccctcttcaaggtgggcaagttcctgagcgctgaggagtatcagcagaagatcatccctgtggtggtcaagatgttctcatccactgaccgggccatgcgcatccgcctcctgcagcagatggagcagttcatccagtaccttgacgagccaacagtcaacacccagatcttcccccacgtcgtacatggcttcctggacaccaaccctgccatccgggagcagacggtcaagtccatgctgctcctggccccaaagctgaacgaggccaacctcaatgtgga

SEQ ID NO: 28628 - DNA, 492 bp, Homo sapiens
  misc_feature (1)...(492): n = A,T,C or G
gggggtccnnnnaatcganncactgagaccctagtccangncgtggaattcccgagcgagagtcccgccctgcatcagtttgcggaaccgccttggtagaaggagagaaggggagtggaggaagcacgggactggagggaccaaagttccccgatggcggcccaggggtgcgcggcatcgcggctgctccagctgctgctgcagcttctgcttctactgttgctgctggcggcgggcggggcgcgcgcgcggtggcgcgcggagggcaccagcgcacacttgcgggacatcttcctgggccgctgcgccgagtaccgcgcactgctgagtcccgagcagcggaacaagaactgcacagccatctgggaagcctttaaagtggcgctggacaaggatccctgctccgtgctgccctcagactatgacctttntattaacttgtccaggcactctattcccagagataagtccctgttctggganatagccacn

SEQ ID NO: 28629 - DNA, 511 bp, Homo sapiens
  misc_feature (1)...(511): n = A,T,C or G
agggcngccnggnnnnnnaattgaactgagtancataggccanngcgnggaattcggatgagaacgccctgcacctgcacctcatcgtcaagcccgtataccacacccttattcggacccccaagtagcctcggggtctgggaataaaggcctggcctaggtggtccctgtgggtctgggaagggcaaggcgagcctggaggtggcaacaagcctggtcccctggatggccaggcgccggccaccctagggctggggtggagtccaggtgaggcgtggtagacaagatgcctggtttcaagagctgatttcacagctgacttgaaggaacgttcttggtcctgaataaaccgatgctcagagtggtaaannnaannnaaaaaaaaaaaaaaaaaaaaaaanaaaagcggcccttcaatttaaagggccccttaaaaccccgttgaaaaccctgaaggggcttttttattgcccacccttttttgtttggcccccccccgggcctttcttgg

SEQ ID NO: 28630 - DNA, 497 bp, Homo sapiens
  misc_feature (1)...(497): n = A,T,C or G
gggtggcaggggnnnnnnnncctcgagaccttagtcactgtggtggaattcctgctagtcaagtgcgtccacgagctgtttactagggatccctcatctgtccctccgggacctggtgctgcctctacctgacactcccttgggctccctgtaacctcttcagaggccctcgctgccagctctgtatcaggacccagaggaaggggccagaggctcgttgactggctgtgtgttgggattgagtctgtgccacgtgtttgtgctgtggtgtgtccccctctgtccaggcactgagataccagcgaggaggctccagagggcactctgcttgttattagagattacctcctgagaaaaaagcttccgcttggagcagaggggctgaatagcagaaggttgcacctcccccaaccttagatgttctaagtctttccattggatctcattggacccttccatggtgtgatcgtctgactggtgttatcaccgtccgctcc

SEQ ID NO: 28631 - DNA, 442 bp, Homo sapiens
  misc_feature (1)...(442): n = A,T,C or G
ggnattcgcgaccattannncgnattgacgacccctagtccgtgtggtggaattcagtgaaaccccgtctctaccaaaaatacaaaaaaaataattagctgggtgtggtggcgggtgcctgtgatcccagctacttgggaggctgaggcgggagaattgcttgaacccaggaggcggaggttgcagtgaactgagatcgcgccactgaactccagcctgggcgacacagcgagactctgtctcaaaaaaaaaacaaaaaaaaagtaaaaacgtatagcttcaaatcactgaaatacaatatgttttgtgagattgggtatcttactgtgagtttaaaatgtatttgcatttcctcatctgttcatgtccttttcctatttttcttggaagggagggtagcattggttaagagtgtagggttcaaatcccagttctgccactt

SEQ ID NO: 28632 - DNA, 504 bp, Homo sapiens
  misc_feature (1)...(504): n = A,T,C or G
cgcgcgcggcccnntttgaatgcgttgcctaggccangncgnggaattctgagaacattcctccttcatcattagaaagattattaaaaaccagattcaaagaaactatcaatactacttatgaagtatgtctgtaaaaaaaattaagcctgaatcttatcaggcctctagaccagggattctcaaggtatgggccccagaccagaagtatcagcaacgaattgctaaaaatgcagaatcttgggtcagaaattggggaccagcaattggaattttagtaagtataccagatgattcagatgcctgctcaattttgaggatgactcttatcagtttagttattaggatttacaggggatggggaacatgttaaagagcaccaactagataaggtcaataagtcaaaagtaagatgtctggacattctgggcctcctgatgtcttagaaagcacacaataccatctatggtgtatttttgtccaccatcccacccaattgcacct

SEQ ID NO: 28633 - DNA, 501 bp, Homo sapiens
  misc_feature (1)...(501): n = A,T,C or G
agttgaanaggggncncggggnattgagaccctcgagnacactagtccgtgcggtggaattcggcacagatgccccccgcctgagctcacacagccagggggaggagggctgggttccaaaacaagtctagatgggctctggggtccagctcacaggcccactcagagtgggtgtcaggcgactgttggtcaattccttccttatctggtggccccatcagcctggagaggaaggctcttcctgaatcactcagtgaggcttccatgcccctcttttccttttatcagctcggagcccaagatcctcttctcctacaaatgccaagtggacgagacagaggagccagatgtacacctaccccagccctacgctgtggcccggcgggagggcctggaggctgcaagggctgctggggcctcagctgccagctactcgagcacgcagttcgactctgccggcggngtggcctacctggatgacatcgcttccatgccctgccc

SEQ ID NO: 28634 - DNA, 503 bp, Homo sapiens
  misc_feature (1)...(503): n = A,T,C or G
agagctgcngnngcnaattgactgcgtacataggccanngcgnggaantctgcaagaccacaatcctgtacaaactgaagatgggggagattgtcaccaccatcccaaccataggcttgaatgtagaaacagtggaatataagaacatctgtttcacagtctgggacgtgggaggccaggacaagattcggcctctgtggcggcactacttacagaacactcagggcctcatctttgtggtggacagtaatgaccgggagcgggtccaagaatctgctgatgaactccagaacatgctgcaggaggacgagctgcgggatgcagtgctgctggtatttgccaacaagcaggacatgcccaacgccatgcccgtgagcgagctgactgacaagctggggctacagcacttacgcagccgcacgtggtatgtccaggccacctgtgccacccaaggcacaagtctgtacgatggtctggactggctgtcccacgagctgacaaag

SEQ ID NO: 28635 - DNA, 457 bp, Homo sapiens
  misc_feature (1)...(457): n = A,T,C or G
naatgatgntccatctgaacattgaggngcaattccacgccctgncccctttctccaccctgcaagctagttgcatttagctcacagagcctgggctgcgacttgaaagagtttaggcagcaacagagtgaccctgggggtgctcttgaccgacagccgcacccccggcgtctaggacctccgagcagggatgcatctggaggtctagggaagcacttccaccccctcctctcctcaatcctggcaggatggctactgctgcttcaagacagtgacgtttctctccggtcagctgtcaggagcgctggtgagcttcctactgtgccacaaggtgcgggtgctggagacacagctgagcctggaaatgagagtgggcatcgccgtggtcatcatgactcctctgcggcgtggtcaccatgttggttcactgtgttgngctcttattgacgggtctccn

SEQ ID NO: 28636 - DNA, 487 bp, Homo sapiens
  misc_feature (1)...(487): n = A,T,C or G
cgccccgcccagncnncctttagaaaactcgatgaccactagtccagagaggtggaattccgggccgggccgctgccgcgccatggactcccgtgtccagcctgagttccagcctcactgagtggccacccccaaagtgctgccagccgaggaagcccccagcactgaccatgtctattatggaccacagccccaccacgggcgtggtcacagtcatcgtcatcctcattgccatcgcggccctgggggccttgatcctgggctgctggtgctacctgcggctgcagcgcatcagccagtcagaggacgaggagagcatcgtgggggatggggagaccaaggaacccttcctgctggtgcagtattcggccaagggaccgtgcgtggagagaaaggccaagctgatgactcccaacggcccggaagtccacggctgagccaggatgcaaggctcctggtcctgtttgcagccggccaagaggcgctg

SEQ ID NO: 28637 - DNA, 498 bp, Homo sapiens
  misc_feature (1)...(498): n = A,T,C or G
tgatgtacggggncagggtttgagaccttgtagatcactagtccagngcggnggaattcggatcgctttcgcgttttccagtgtggcatacatcttctatgcatactctttcttcgcattatttatttccctaggataattttccaaagtgggggtttttgatactgaacatttcttgggtccttgaaatctgtacaaactactctccctaaaagcccaacagcttgtgttgcctccagcagcccctgggtggtactttccgtggccctaaggctggtgcaggcacacctgtgtgtggaatttcaggctgccagtccggtttaccagctggtgagctgaggcctcacttctgtcactcagatacccatctgtgctctctccctgagacccgcctctcctgaacagccttgcccaagaggctcgttgggaccactagcttcacaatcccctataatgcaaggggagagggacttgttactanatctggagacgaggaga

SEQ ID NO: 28638 - DNA, 504 bp, Homo sapiens
  misc_feature (1)...(504): n = A,T,C or G
aggctgttnaggggnnnnnnaggggnctcgtagacctctagtnactgtggtggaattcggactttggggtcaggccttgcttgcataaaggagaaaacaactctatgtacatgctgggggagagtgcctaatgtgggagaccaaatagggatcaccaggctaatggggggcgtcagcagctttctctccctcctatcttggcctgttcttttttgttttttgagacggagtctcactctgttgcccagggtggagtgcagtggcatgatcttggctcactgcaacttccacctctgggatcaagggattctcctgcctcagcctcttgagtagctgggattacaggcgcccaccaccacagcctgctaatttttgtatttttagtagagatggggtttcaccatgttggccaggctggtctcaaactcctgactcgaagtgatccgcccaccttggcctcccaaagcgttgggattataggcatgagccatgtgcctggtccac

SEQ ID NO: 28639 - DNA, 497 bp, Homo sapiens
  misc_feature (1)...(497): n = A,T,C or G
cgtctctagnnaaaagccggggnnnnnnnnnaatcgagnacctcgatgactactcgaaagngcggnggaattccgggagccaaatgtgcagagtgagcagtgtggctgggcaacaggcttttacccccatttacatgtcacttcactcagtcctcaaaacagctctctaactctagatattatgatatctagagtttctgtaagttcagtgttttgcctctgtttgtgtagttaggaagtgattaaccacacaagaaatcccagaggtattgcaaggctactgctttcagtaatcaaaacaaggtacagccaataagtgctctgaatttacggacttcatggagaaagaccatgtgggctggggcagtcagggaaggcttcctagaagagacaggtcttggggtgagcacagagaattggcccaggctgtggacagctatagagagagagccaggaaagcctgtgagcagtgtgcagctggagatagagaccagtcn

SEQ ID NO: 28640 - DNA, 504 bp, Homo sapiens
  misc_feature (1)...(504): n = A,T,C or G
tgatgataggggnnnnnggggnctcgagaccatcgatgacattagngcagngcggaggaattcgtctggagacgacgtgcagaaatggcacctcgaaaggggaaggaaaagaaggaagatcaggtcatcagcctcggacctcatgtggctgaaggagagaatgtatttggtgtctgccatatctttgcatccttcaatgacacttttgtccatgtcactgatctttctggcaaggaaaccatctgccgtgtgactggtgggatgaaggtaaaggcagaccgagatgaatcctcaccatatgctgctatgttggctgcccaggatgtggcccagaggtgcaaggagctgggtatcaccgccctacacatcaaactccgggccacaggaggaaatatgaccaatacccctggacctggggcccagtcggccctcagagcccttgcccgctcgggtatgaagatcgggcggattgaggatgtcacccccatcccctctgacagcacn

SEQ ID NO: 28641 - DNA, 485 bp, Homo sapiens
  misc_feature (1)...(485): n = A,T,C or G
nttgatcgagtacataggccangncgngtaattcggtgcgggccangtctggcgccaggggcaggcagctaggcagggagggggctgtgaaagaacttggacttctaaaggcggagggtctccctgggcaccctgcaggcaggcagaccacagtgtggggggtgccccacaaggctcagccctgggcaaggaagctttggaagcagcaaggtgggggtcaggctacaggtgccccacctccccagagccctgcagtcacgtgaggcccctgtgcagtagagagcctttctccagcccatgctggctgtggccggggctgccgcatctgcctggagcctgggcagcacctccgggactgaccttcggcagtggctgggggactgctttcagtgcctgctgttcgtgactcanaaacagaagaaaaacactgagaaaaagcattaaaaataagccaaaataaaaaaaaaaaaaaaaaaaaaaaaaan

SEQ ID NO: 28642 - DNA, 475 bp, Homo sapiens
  misc_feature (1)...(475): n = A,T,C or G
gagggtngccccccccccagtagtagacatcatagagngcgtggaanncctcacgtgcaattgagtagctgttgccaggctgtccatgcctgttgtgactaccggttggggtcagatttggggcgaagaatgagtaagtttctgcatgctttgtctctacctgagacacttctacaacaagccaagtataatctctccagccctgcagattttcacctgacttgttcagccccatgcgtagactcccgctgcaggcctctggcctgtggctcactgcatgcagcccctggcgtgcaatactagtgctccacggcgcgaagagcttctagcccttgcactgcacctaggctcagggttcaaacggccagcccgaaaagcctgcctgccttctttatggaaacagcacagtcccggccgagtgcctgcccctttctctactgagctagtccccaaaccaaaggcaagcccnctctgg

SEQ ID NO: 28643 - DNA, 476 bp, Homo sapiens
  misc_feature (1)...(476): n = A,T,C or G
gggttccnnnnnaatcgagnacatgagtaacntcggnggaattccgtctctggagagcagcagccatggccctacgctaccctatggccgtgggcctcaacaagggccacaaagtgaccaagaacgtgagcaagcccaggcacagccgacgccgcgggcgtctgaccaaacacaccaagttcgtgcgggacatgattcgggaggtgtgtggctttgccccgtacgagcggcgcgccatggagttactgaaggtctccaaggacaaacgggccctcaaatttatcaagaaaagggtggggacgcacatccgcgccaagaggaagcgggaggagctgagcaacgtactggccgccatgaagaaagctgctgccaagaaagactgagcccctcccctgccctctccctgaaataaagaacagcttgacnngannnnnnnnnnnnnnnnnnnnnnnnnnnnnnaagggggccgtctgatg

SEQ ID NO: 28644 - DNA, 482 bp, Homo sapiens
  misc_feature (1)...(482): n = A,T,C or G
cattgaatagcctaccncacgncgnggaattcggaatgtcacctgaaattacttctttagatgacattaggaaattagacaggtttacggaacctcccgcctttggacctgtgtgtgacctgctttggtctgatccctcagaggattatggcaatgagaagaccttggagcactatacccacaacactgtccgagggtgctcttatttctacagttaccctgcagtttgtgaatttttgcagaacaataatttactatcaattatcagagcccatgaagcccaagatgctgggtatcgaatgtacaggaagagccaagccacaggctttccatcacttattacaattttctctgcccccaattacctagatgtctataacaataaagctgctgtgttgaaatatgaaaacaatgtcatgaatatcaggcagtttaactgttctccacacccctactggcttccaaactttatggatgttttn

SEQ ID NO: 28645 - DNA, 504 bp, Homo sapiens
  misc_feature (1)...(504): n = A,T,C or G
agctgaccgggnnnnnnnnaatcgagaccctcgagatcattcgtgcagngcggnggaattccatgggagagcagcagacctactcaaaaagaatggctaaaggagttctcttaagaggtaggaaataataaaagggaatcttggaccatcataaaacaaagaagaacaagggcgaggaccacgtctctgctgaatcccagcccagaggagcttctggcagacagctgacatgcggcagaggtaacatgatgtgtgctatgacaacaggccaaatgcggaaggagagactgatgatccgctgtcttctctgaagccaggctttaaaaagacctgcacaaagctgaagcaatgccactcttctcactgtttgtttttattttggaaaaacagttattttgaattaaaaacaaggaggctctgccacatctccaggcgatggattctgccctgggattcccgccagctcctgagatgtgtgactcccaggtgaggaggtgagacaan

SEQ ID NO: 28646 - DNA, 476 bp, Homo sapiens
  misc_feature (1)...(476): n = A,T,C or G
cgccccccgcccccccccgttgtagaccctattgagngcggtggaattcggcaggtgcagatgtgcaagcggaacctggaagtcatggactcggtgcgccgcggtgcccagctggccattgaggagtgccagtaccagttccggaaccggcgctggaactgctccacactcgactccttgcccgtcttcggcaagggggtgacgcaagggactcgggaggcggccttcgtgtacaccatctcttcggcaggtgtggcctttgcagcgacgcgggcgtgcaacagtggggagctggagaagtgcggctgtgacaagacagtgcatggggtcagcccacagggcttccagtggtcaggatgctctgacaacatcgcctacggtgtggccttctcacagtcgtttgtggatgtgcgggagagaagcaagggggcctcgtccagcagagccctcatgaacctccacaacaatgaggccgg

SEQ ID NO: 28647 - DNA, 450 bp, Homo sapiens
  misc_feature (1)...(450): n = A,T,C or G
ggaagtaanaaatcctagaactnctaaacctgggaaannnccngacacaaagattcatgttttagatgaacaagctaagatataaaaaagntattttagagactttcaaggtcacagtcctagtaagggacagggctgagtaagccttcagtaaatatattctcctaccccagtataaaacccagaaaagtctttaatgtcccaagtcacggatcctaacacatgggccatgaactttagaacacagagcccagcagcaatgtgagggagacgtagaaatcaaaacaactcacatttagtaacttgctgaatgctagacagtcttccccatgttgtgagaaatgaaagaacatagccccatgactttgaggtctttacaagcctccctgaagaactagcttctcgagctgacagacaggcatgttttcacaaatttaccaggtacctgtg

SEQ ID NO: 28648 - DNA, 480 bp, Homo sapiens
  misc_feature (1)...(480): n = A,T,C or G
tggttaagccgccccccccgtcgaccccntttttgatgaccttagaccagngcggnggaattcaaaccatgacaatctctccgcagggaagaacgcggctttgaggtggggagtggctgaccgaggccctttgtggtttctaaatggcagaatgagagaggtgggggcgttgagggtgtcacgcccaggaagcagttggggagggcagggctggacactgaccaagcctagcctgggtgcacgaactgagcttgggatttttgcttggggccctctagggattaggatgaattgtcagatgagttctcagcagacagggctttagggaactggtccagggaaataagacgtagagccagaggggaaccagggcctctgtgaaagcctggcagtcatgagatctgacttgctgagcttctgaggagtggtaataggaactaatcctctcttccgtgtgctntatatgtttactcgtttcat

SEQ ID NO: 28649 - DNA, 459 bp, Homo sapiens
  misc_feature (1)...(459): n = A,T,C or G
atcgagacctgaggcccntcggnggaatccgctacgggtgtgctgcagtctccaacgcagctacgaacccactcctttagtgagtgaaactagtggccccgtgaacaatgaccacatggcctaaattctcccatattcctatattctgtcctttggcctcagacacacctcagcatccaaaggatatctcccagatactccagtatctgtgtacaacagccgcagaacctccttccaagctccaaatcaggccaggcatcctgatttttataaccatactcatatatccagatccatgacataacactagtttatagccaacacatttaaataatttccccactggggccaggcgcagtggctcacatcagtaatcccagcactttgggaggccgaggtgggcggatgactaagtcaagagatcgagaccatcctggctaacacggtgaaaccccatct

SEQ ID NO: 28650 - DNA, 489 bp, Homo sapiens
  misc_feature (1)...(489): n = A,T,C or G
cccgccccgcgcccccnccccgtagaccncccctnatagatgnacccttagtccagagcggtggaattcgcctgtgaatgactctgccccacaccctgagtcagacgccacatgccaacaacctgtcgagcagatgaggctcaaaaaggccattcatctgaagaagctcaatttcctgaatgcacataaatccgcagagcaagtatctgaacccaagtcagatgatggtttgacaaagaggttggaatctgctagtaaaaataccctagagaaagctagcagccaaagtgctgaagaaaaagaaagtgaagaagtcgtcagtcgtgagaattttaattgcattagtgagacggagaggcctgaagacccggctgccctggaagaccagtcccagacacttcagtcccagagacaatacgcgtgtgaattatgcgggaaaccttttaaacacccaagcaacttggagcttcacaaacggtctcatacagg

SEQ ID NO: 28651 - DNA, 476 bp, Homo sapiens
  misc_feature (1)...(476): n = A,T,C or G
cgaagaannngggggaatcgtagtctctagcacgtgcggnggaattccctggccgtcagccccacgtcgccggcctggaggggcgaagaggacgagggggccaaggcttcctccggggacattggctccctggattatcaagagtttgtagttgacattgaatccaggctgaggatggaaggtgtggaacttaaagaagaatggcaagatgaagattttccgatacctttaccagaagatgatagtattgaagcagatatactagctataactggaccagaggaccagcctggctcactagaagttaatggaaataaagtgagaaagaaactaatggctccagacattagcctgacactggatcctagtgatggctctgtattgtcagatgatttggatgaaagtggggagattgacttagatggcttagacacaccgtcagagaatagtaatgagtttgagtgggaaggtaaatg

SEQ ID NO: 28652 - DNA, 474 bp, Homo sapiens
  misc_feature (1)...(474): n = A,T,C or G
aatgaagnaactgagatcctcgnaagngcgnggaattcgctcatgcctccattatgaaactgaaccaggccagcatggataagctctatgacctgttgaccatggctttcaaatatcaagtattgctgtgtccccgacccaaggatgtgctgctggtcactttcaatcacttggataccatcaagggattcatccgagactccccaaccatcctgcagcaagtggacgagactttgcggcagctgacagaaatatatggtggtctctctgcaggggagttccagctgatccggcagacactcctcatcttcttccaagacctgcacatccgagtatccatgtttctaaaggacaaagttcagaataataacggtcgctttgtgttgccggtgtccgggcctgttccttggggaactgaagttccaggactcatcagaatgttcaacaacaaaggtgaagaagtgaagaggatag

SEQ ID NO: 28653 - DNA, 570 bp, Homo sapiens
  misc_feature (1)...(570): n = A,T,C or G
aatatgatnnccnctcgngnggtggaattcctctcactattntctagcagcattctgagacacagggggcagaaaaacctgatccagagtcttctcattcaccccccaggtatacagaccagggcggcgaggaggaggaggactatgaaagtgaggagcagttgcagcaccgcatcctgacggcagcccttgagtttgtgcccgcccacgggtggacagcagaggcgattgcagaaggagcccagtctctgggtctctccagtgcagcagccagcatgttcgggaaggatggcagtgagctaatactgcattttgtgacccagtgcaatacccggctcacacgtgtgctagaagaggagcagaagctggtacagttgggccaggcggagaagaggaagacagaccagttcctgagggatgcagtggaaaccagactgagaatgctgatcccatacattgagcactggccccgggccctcagcatcctcatgctccctcacaacatcccgtncagcctgagcctgctcaccagcatggtggatgacatgttgcaatacgctgcgggacagn

SEQ ID NO: 28654 - DNA, 474 bp, Homo sapiens
  misc_feature (1)...(474): n = A,T,C or G
natggagnccttgagnaacngtcgaggaanccggngagcactgactcgacctcttggctttgagttgtgcttgacgtggcttttgtagttttcttttaaatgaagggtgaacagatacactggattattgtgcatttgctttgcagaattttagggggggcctctggggagattgggtttggaggagggcagtgggtctcggaagttcacagcacagtcttggattccagcacttggccccttgctcttttaagaacattagctgtggacaggcctgtgaatctacatgtgtatttccagcactaggcttggggaaggaaggtagtcagcgggcggcgatagagaggtagacattcacagcagatcatggtggtttgtttattcctcatgaatctcgtgtcacctgatttcatatcactttcccacaactttcttccttactgtgagtgaaaacaccttttatgttccttttag

SEQ ID NO: 28655 - DNA, 478 bp, Homo sapiens
  misc_feature (1)...(478): n = A,T,C or G
gagtttaacgcccccccccttttgagaccttatagagngccctagacagcgcggnggaattccaaatgtctcttaagtttcatcattggacctatcgagaaaggagaaatcaattgagttgtggagataaaagaaaattacacacacccatgcatgaccaggcaacagagtcccatgcctggggctaggctgggtggctggctgtgccattgactttcagggtgtgtaacttttgccatctgtatggggatgataaaacttccatgtgatccttcacctgtggtgaggattctgtgagctggaaggtgaagagcatggtgcattctgtgcctgatgtggactgtgcacccaatggaggagggatatcatcatctcaaaccatacccctatccccattttacaggtgaggaaactggngcatagagaggaccagttcctctgaggtcagccagcangtgcacggcacaaatcagtctaa

SEQ ID NO: 28656 - DNA, 459 bp, Homo sapiens
tttgaccccaatgatgacattagtcagtgcggtggaattcaaggagcacatcatgcgtcacacccggctgcagcggcaaactacagagccagcgtcatccaccaggcacacgtccttcaagcgccacctggcaaggcagatgcatgtctccagcgtacactatggcaatgagcttccaccagcagcagagcagcccaccagcattggccgcatcaagcctgagctctacaagcaaaagtcggtggatggggaggatgccaaggctgaggccaccaaaagctgcgggaagataaacttcagcctacgctacgattacgagaccgagaccctgattgtgcgtatcctgaaggcttttgacctccctgccaaggacttttgtggaagctctgacccttatgtcaagatctacctcctgcctgatcgcaaatgcaagcttgagacccgggtgcaccgcaagat

SEQ ID NO: 28657 - DNA, 465 bp, Homo sapiens
  misc_feature (1)...(465): n = A,T,C or G
nggaggcgggccnncaatgagnntcattgagatcatagaccaggcgnggaattcgccatttgttgaatgagattccccaaaagcccctgacgtgctgccgccgccccttctcctcgaggcagtcccctgcccttcccttctgctgcttacactaccctatcaccacccctcaatctctatcttcctctgcacgtcccttgccccttctagtccgccacctctctttagatttcccgttttcatttccacctctcccgccgaacgcctcctctgcccaccttccagagaggcctgggtctggtacacgcttttccactgaccacctgtgtgattctcagcaaggctctcggccgcctgcgccccaccctcgtccccttgcagggttgatccggtgagacagaaaaggctttgagagctggttctgtgaagagtacatgaaattttggctacttctttcaggacttn

SEQ ID NO: 28658 - DNA, 436 bp, Homo sapiens
  misc_feature (1)...(436): n = A,T,C or G
actggatgacttgatanactggaaaaanncnnnctagntatttgcctaactcacagtattgattactaattaagacatttctttgtctcttttttttctttttttgagaaatgtggtgcttatacaggaaataacatgaggaagcaaaccccagtacctgataaaaaggagaaagatgtaagagtacttaaaaaaaaacaaaacaaaacacaaaactactgttgtttctttataggaatatgagtcattaaattgtattatcaacttgatatctgttaatcagctctgctgaaaaatgggctgatacttttgggaataaaggctctaggatggggtgatgaggaggacagttctgcttaccatcagtcttgatgtcaggcttattcccaccacaagaggggcatggactcactctttggagtcctcttttcactag

SEQ ID NO: 28659 - DNA, 495 bp, Homo sapiens
  misc_feature (1)...(495): n = A,T,C or G
tgggaaannancctgagncctgagntncactantccagngtggcggaatacggatgttgaccgcatgaacccgtcccttgtctgcgtggccagagagaccgatgtggaggacagccgcttcctggtgcactttgacagctgggatgatacttatgactactggtgtgatcccagcagcccctacatccacccagtgggctggtgccagaagcaaggaaagcccctcacccctccacaagactacccagaccctgataacttctgttgggagaaatatctggaagaaactggggcctctgctgtccccacctgggccttcaaggtgcgacccactcacagctttctggtcaatatgaagctggaggctgtggaccgcaggaacccatccctgattcgcgtggccagcgtggaggatgtggaggaccatccgataaagatccactttgatggctggagtcatggctatgatttctggatcgacgctgaccacccata

SEQ ID NO: 28660 - DNA, 439 bp, Homo sapiens
  misc_feature (1)...(439): n = A,T,C or G
nttgtagaccattagatagcgtggaggaattcggaagagggcactgtcctgggggtcaggatgcctgctttctagtaggctcagctactaacttcatcattatgataataactggtattattatcaagaccatagttggttccagatgctgtggagatacacagccacctagcagggctgataatatataatgtgtggataatacagagataatttaccttgatacaggtagtagcaaaatggaccataattgaggtacaaacatcagtctgtggaaatgttttaggaaaaccctcctctcagactgggtttttcttcagctcttacactaccaccacaacaatcatcaacatacgacttccgggaccaaaggtgtgggggtttctccccatacaccaagtagtagacaccagctgggtgatctctaatttgattcatg

SEQ ID NO: 28661 - DNA, 446 bp, Homo sapiens
  misc_feature (1)...(446): n = A,T,C or G
ggactgagccctagnaagnactgagacntcgaaccncaggatggaactaggtcctggacaccccctctcaagtgcggggaggctgatactacaactcccagcatgactcgcggtggctgtccggtttctgcgcggctgttcgcgcaaaggcctcatgggagttggagttctttgttgtgcgtggggctcaaaggacgtctggggtgggaatgggggactagggtgcttgagtgtctctgcagaaaagactccaggaccccgccaccatgttcccggagcccccaaccccggggcctccatcgcccgacacgcctcccgactccagtcgcatcagccacggcccaggtgcagccagaagtagaggagctggagccagcaccatccgggccagggcagcaggtggcagacaagcatgagctaggacgactgcagtactcccttgatta

SEQ ID NO: 28662 - DNA, 455 bp, Homo sapiens
  misc_feature (1)...(455): n = A,T,C or G
aatgagaccctgttgaggccntgaaaaannncgnacacgtccagagaattcctgaaggaaagaatctggggttgtcaggctgatatcatgaaccccacatttaacacattaagtgaagagaggggacaaaggccaggcttgggaaggaaggagggatcaacaaagcccttacccaggacagataaaaatgatagaatggcagtaaccccatttggagcccccatttgtagtcagcaagcaaagtactggtcctttttacaccttatctaaccatcgagacacgcccctgtggttggtatcattatctcagtgtttgagcagggaaacgtcacttcccagaggacccacagccagtactcggcagagctggaaatcaaacccggtccatccaaagctaaagccagatgtctctttactggacctctctggaaatgcttctcaactttgatgatggg

SEQ ID NO: 28663 - DNA, 441 bp, Homo sapiens
  misc_feature (1)...(441): n = A,T,C or G
actgataaccctgcatgacatctagacagncnggnggaattcgcgaggagccccgggaggtgcttctgcggctgtacggagccattttgcagggcttggactccctggtgctagaaagcgtgatgttcgccatacttgcggagcggtcgctggggccccagctgtacggagtcttcccagagggccggctggaacagtacatcccacttcctgggtgcagagtcggccattgaaaactcaagagcttcgagagccagtgttgtcagcaaccattgccacgaagatggcgcaatttcatggcatggagatgcctttcaccaacgagccccactggctgtttgggaccatggagcggtacctaaaacagatccaggacctgcccccaactggccttactgagatgaacctgctggaaatgtacagcctgaaggatgagatggg

SEQ ID NO: 28664 - DNA, 440 bp, Homo sapiens
  misc_feature (1)...(440): n = A,T,C or G
ntggagaccatttgatgacattagacagngcggaggaattcgccaccgcgcccggcctctaatggtttctgtacttaccattactgtatgagagagaggttcattgagcactcgttatgagccaggcactgtgcattgttcctacattatgccatgaaatttctataaaaaccttcaggtttgtagggatggatgattacctatcagctagatatgagtatcatacttacttgacagacaaggagtctttgacttaagtagcttgtccaagatcacaacatgagagttaagagaagggttttaaatgtgaagctttgtgatagaacccaaacccttacccaataagctggaccaccacggatctcaggaattggtcactctggctgccaaatttctgctcacctcttctctctcttcctttttattcttttcccaaaata

SEQ ID NO: 28665 - DNA, 434 bp, Homo sapiens
  misc_feature (1)...(434): n = A,T,C or G
actggatgactttgaaaccctggngaaanccgnnaggagctttccatactcattgagttaagatttaatcattcgctaacggttatcttactttctttcattttccctctgttaccaaatttcagctcttaggagctgctctacaattctgaatttgcttttcttgcctctctttagtcacctgtcacaggaggttcctgctcagtaatgatattgcgagttaggataataactttttttttttgggcttcagatttaaaaaaaaagatcctgtttccattggaaaggaactggaagctttaatcttttaaccaactgaccaatacaccaaaagcggcctagggatgagcatttctttgaaagcaattacgttatccacctgggattaaaactatttactgtgaaaaaatctgcgactccgtgaggtggatttt

SEQ ID NO: 28666 - DNA, 474 bp, Homo sapiens
  misc_feature (1)...(474): n = A,T,C or G
ggnnagtgccttattgaaacccctgcagatgatccctcggaagngcggnggaanncgggacgggcatctacgtctggtcaatggagcccaccgatgcgaggtacgtgtagagttctacctagggcaacggtggggcactgtctgtgaggatgcttgggacctgcaggcagccggtgtcctgtgccgccagctgggctgtggccaggccctcgcagcccctggcgaggctcactttggcccaggccgaggccccattctcctggacaatgtcaagtgccgtggggaagaaagtgctctgctgctctgctctcatatccgctgggatgcccacaactgtgaccacagcgaggatgccagtgtcctgtgccagccttcatgacccagcccgctctgcagaccacctcttcttctgggagctgtgacctcccttcctcctccaggaagccctcctcttgtgatgactacagttcactg

SEQ ID NO: 28667 - DNA, 453 bp, Homo sapiens
  misc_feature (1)...(453): n = A,T,C or G
ggggaagtagacatctgnccgnattgaggaccttccaaccgtcgggcgcaagggctacagcgcctgttgaaagagaaacatgaccaaggtgctcagaaaacagattgttaaaaaaacttgggaaccgtgggtgctgttgccttggactgcaaagggaatgtagcctacgcaacctccacaggcggtatcgttaataaaatggtcggccgcgttggggactcaccgtgtctaggagctggaggttatgccgacaatgacatcggagccgtctcaaccacagggcatggggaaagcatcctgaaggtgaacctggctagactcaccctgttccacatagaacaaggaaagacggtagaagaggctgcggacctatcgttgggttatatgaagtcaagggttaaaggtttaggtggcctcatcgtggttagcaaaacaggagactgggtggcaaan

SEQ ID NO: 28668 - DNA, 466 bp, Homo sapiens
  misc_feature (1)...(466): n = A,T,C or G
atcctgagacccctctacctgatgacactaggacagngcggnggaannccgagagtcgtcggggtgtcctgcttaacagtgcttggacggaactcggcgctcgtttcccaccccggccggccgcccatagccagccctgcgtcacctcttcaccgcaccctcggactgccccaaggcccccgccgccgctccagcgccgcgcagccaccgccgccgccgccgcctctccttagtcgccgccatgacgaccgcgtccacctcgcaggtgcgccagaactaccaccaggactcagaggccgccatcaaccgccagatcaacctggagctctacgcctcctacgtttacctgtccatgtcttactactttgaccgcgatgatgtggctttgaagaactttgccaaatactttcttcaccaatctcatgaggagagggaacatgctgagaaactgatgaagctgcagaac

SEQ ID NO: 28669 - DNA, 453 bp, Homo sapiens
  misc_feature (1)...(453): n = A,T,C or G
ngggaattgtacgaccactagtccagtgtggaggaacttacaactggcaagcgcaagggctacggcttcattgagtacgagaaggcccagtcgtcccaagatgctgtgtcttccatgaacctctttgacctgggtggccagtacttgcgggtgggcaaggctgtcacaccgcccatgcccctactcacaccagccacgcctggaggcctcccacctgccgctgctgtggcagctgctgcagccactgccaagatcacagctcaggaagcagtggccggagcagcggtgctgggtaccctgggcacacctggactggtgtccccagcactgaccctggcccagcccctgggcactttgccccaggctgtcatggctgcccaggcacctggagtcatcacaggtgtgaccccagcccgtcctcctatcccggtcaccatcccctcggtgggagtg

SEQ ID NO: 28670 - DNA, 454 bp, Homo sapiens
  misc_feature (1)...(454): n = A,T,C or G
gggattgagcccctnngnnngnattgacgacttttagtccagcgtggtggaattcaatgaaaccacccttgccacctccacccccagcgcctgtttccaaaagttttatgaaactttgtggatgctttacctcaaagatgcccttgggcttcttccaggagagccatataatccatagaaggtcaagaagaggtcagtgagcctgcttcctgtcccctgttctctgtcatgcatccagaatcagagcaacagattctgaagtcaagctgctggaatcttgtgtgctaccatctcactttaaccacaagtttcttcttgactttcaacatcgttgatcaaaattagatcttgtggtgagggggtatagtgtggggtggtgtagggagaagtaaggaaacgccgtctttcctcagtacaaagcctggccccctcagattctgctgccctgagttcc

SEQ ID NO: 28671 - DNA, 559 bp, Homo sapiens
  misc_feature (1)...(559): n = A,T,C or G
natcgaagcactgtaagagcggtggaanncagctgagagcaagggatggcatatagccaggcctctgaggttcggcccatcactagagaggctgggaactccatcccctcttagccagcagcacttaacttgtcctacctgacctcagaggtgctgaccaatgcgtggaatccaggagtcagaatctggcccattctggacccggtgcctgctgctactccaaccagcaatggggtggggtgcggccagagaacaagccctgtgcctggggtgcatgcttgccccagtacccacaaagctgctgccgcttgcctccaagggggtgggcacaagagtcccgggccagggtgcagggcctgctaggagggaggatgtgcagtgccctgacacccgctcgccatgcccgctggaaccccaggcccgcgcccctgacacccgcttaccgtgcccactggaaccccaggcctgcgcccctgacacccacttgctgtgcctgctggaaccccaggcccacactctcctgtccagtggatcccccagctatcactgcagcacctgg

SEQ ID NO: 28672 - DNA, 443 bp, Homo sapiens
  misc_feature (1)...(443): n = A,T,C or G
nattgaagacattttgatgacactcggacangcggnggaattccggcgactacccaaccgtgtggcacccagaaatactctccacaccatgctgcacttttgcggatgagggaaggatggtgtcggggcttcaagactgtttttcctacctcttcagtgcctctttcagtgatatgaagttaaaaccaggaacatggaggagacatatttccacctatttctctccataagtataaaagaccataaaagaccatctagggacttcagaacccaaataatgacacaatgttaatttgcaggttctccttctgcctgccaccccacccagcaaggaggagaggaagtgttgagaagggaagagatgagtcctggccctgtcacttcttaggggtgtgcttttgaacaacctgctcaccatgtatgaacttcactcttcttgtttn

SEQ ID NO: 28673 - DNA, 447 bp, Homo sapiens
  misc_feature (1)...(447): n = A,T,C or G
gggattgatgacactagnacagnattgaggatctctgaccccccgcgcgaggcgctctggaccgctggtgagctctgactccgggcttttttgagaccgtttatttccggatgtcgcccacctccgaccctctctcagtcggagggcggaaaagaggaagataggtccttcctccagccgcggggcacccccttctcccaccttgcccttcccccagccctgcagccccagagtgtaaatatccaagcccgccctctctgcgctcagagtccccatctgggataggggccgggataggggtcgcgctggcaggaggcctggcagcctcctctgaagggggaggagggaagggggaaaggaggggatgggcgattgaggtggacctcgagacagggcaacggtgtccccacaggagcatggcccaggaggagggtgggagccttgccg

SEQ ID NO: 28674 - DNA, 452 bp, Homo sapiens
  misc_feature (1)...(452): n = A,T,C or G
nggattgtagacatctgnnagngtggacgacttcttatcagcgtggtggaattccctggaggcctgggtcttgagagcctgtcaccggagttttttacctcagtggtgcagggtgtgctcagctccctgctgggctccctgggggctcgggctggcagcagtgaaagtattgctgccttcatacaacgcctcagtggatccagcaacatctttgagcctggagctgatggggcccttggattctttggggccttgctttctcttctgtgccagaacttctctatggtggacgtagtgatgcttctccatgggcatttccagccactacaacggctccagccccagctgcgatccttcttccaccagcactacctgggtggtcaggagcccacacccagtaacatccggatggcaacccacacattgatcacggngctagaagagtatgtgcg

SEQ ID NO: 28675 - DNA, 441 bp, Homo sapiens
  misc_feature (1)...(441): n = A,T,C or G
nttagtagaccactagaaagcgtggaggaattcgagcgagtgagtgagtgagtgagtgtgtgtgtgggggggactcggcttgttgttgtcggtgacttccccctccccttcaccccttcccctccccgccgccgctgcaatgggcgctccctgggccgtacgaaatgagcgataacgatgacatccaggtggagagcgacgctgacaaacgggctcattataatgcactggaacgaaaacgtagggaccacatgaaagacagctttcacagtttgcgggactcagtcccatcactccaaggagagaagctctatttcctcttttggaaattgagtactcctgtccttcatcgtcaaagtttgatgcagaaatgccacaccttcatttcaagctaccaagtgcacaagaaaaaagaatgcaagatttaaaaaatgattgttn

SEQ ID NO: 28676 - DNA, 441 bp, Homo sapiens
  misc_feature (1)...(441): n = A,T,C or G
nactggacgaccactagaccagcgcggnggaantcgcaggctaggccttgccctggaacgtggaggccctgcccggggctggggcctagtccagcagccaccaaagtctggcagactttctgcatttgagaaacatgacaaagggccccgcagcccttctgcacccagcacagcctgcccagcccagccctgcccccgggcactgcacagcctgtctgggggccagaccaccccattgtccatccttgttgtccgtgagtccttggcctccaccaagcacgtgtggccattgtgtgcctgccttagtgactccgtggttttgtgaggagcagagtgcgtatgatttttgcctcagaaactatactcttctgtgtaacagaccaataaacaacatttgtcntccggnnngnnagnnanaaaaggaaagaagacatgggggag

SEQ ID NO: 28677 - DNA, 453 bp, Homo sapiens
  misc_feature (1)...(453): n = A,T,C or G
nggattgtagaccttagtcagngtggaggacttttagtccacgtggtggaattcgggccacccgaacagtctctcctcctcacagaagcctggagctgggcatccaataagaagcagcctcatttgttttctggtgtcatcgtaggtggccacctatggcttttgggcttctcacctggggcgggtgggttctgcaccaccctcccaccctccttcctccgtgtggacgatagagccacatccagcaccacggacagctcccgggcgatcccatgggagtagaagaggtgtgagcaggttgcccagctggttagcggaaatgccaagatccaggctcctgaatttcagcctggccctttctatctgtctgatacctcctttacgagtctctctgcctgcgttgtgtggagcgggcctgctgctggttgggggagtttgcaggttgcccctatg

SEQ ID NO: 28678 - DNA, 447 bp, Homo sapiens
  misc_feature (1)...(447): n = A,T,C or G
gggattgtagacattagncagngtggaggaactttgctgaacctctgcgtgcctcagttttctcagctgcaaaaggaaaagcctccttttgcctacatcaaagagttgttgtgtgaatcagtgatacgcctgcctggaaaggcacagtgcctgatacagggacatgcaatgaggtggaagtgcctggtttagacacagcagcagtgaactcccaaatgagtgcctaagcctgctgctgtccctgcgtgctgtgatgtgacatctctttgcccagctttccttctttctttaaaagataccaccaggccccgaaagagccatgagaaggaaggagtggaatatcactttgtgtctaagcaagcatttgaggccgacttacatcacaacaagttcctggaacatggtgaatataaggaaaatctgtatggaaccagcctggaggccatn

SEQ ID NO: 28679 - DNA, 457 bp, Homo sapiens
  misc_feature (1)...(457): n = A,T,C or G
gggagactgagaccctcgnanaactgagtcctccgtacagncnggnggaattcgcggncaaagagtttagaattcagtgctgagctcttctccctaatcaagtgccacatttacaccttggagaaccggaggtgaagaggatctgagacaggaaacctcgtgttcaatgactaagaagatggggtcctggagcaagacagaaaacactaagggcatggtggtataaggtttgggacatgcaggccaaggaaggatggaaagaggacaggaaactgggggtacctagaacaacccctctctgaaaagcttgagccaaaacagtcccaaagacaacaagacccctctcccagcctccacagaatggaagatctaaaggttctcttgagatgatccagctagtatggaagatctaaaggttctcttgagatgatccagctagtgtcctattctcctgcag

SEQ ID NO: 28680 - DNA, 456 bp, Homo sapiens
  misc_feature (1)...(456): n = A,T,C or G
nggaaatcgacgaccatctgaccagcactgaggaaccctctgaccctcgcagggaattcgaaagatatccctcgtgtactttagagaagacatttgacttatccccaacttttgtggttgcatgttgccctaataatggcttagaacagtgctgtctcctcttttgagaatcactatcttactcagttacttttattatggcactctattatatagctcacgcatcagacgtaattgagaaccatcagctcaaagtttttaggtaagtcagaatagctggagtttctgcgatagctcccaggagctatggaacccagccatcaaagtggagacctaggtaccctggtcataacctcccaggattcattctgagatttgccgatctcacagtcctacccttcagcaggataattcagaggtttccataaacctcagagcttacctacagccacatgc

SEQ ID NO: 28681 - DNA, 446 bp, Homo sapiens
  misc_feature (1)...(446): n = A,T,C or G
ngggttgacgacattagtcagngtggaggactttctggcacctccaagccatctgctcttcagcctctgggcccaggactagactagtgctaaaatagctgctcctgggaggggctggacccccaccgtgggcagagagggcctctgctttttggggcaggaggggccaccctggcagggtaaaaagagataaacagaaaaacaacagcaacaataatagtaacaatccggggttgttgccatggggcctgttctgaacaggctgcgcccagctcactgcgaggaaggacgcttagccaggccctggctgaagcctgcagctgggctggacacagcagtcattggcctgtgttgtgggggacttgggcctgccatggctgcagtggggaccctgcctgagacagacagagctggggtggtgaccaacaccgtcggngcaccctcgc

SEQ ID NO: 28682 - DNA, 453 bp, Homo sapiens
  misc_feature (1)...(453): n = A,T,C or G
ggggttgatgnccntctgnnnnnnattgacgacttttagacagtgtggtggaattcggcagaatagcacaattgacagtgaggatggggaacagtttgacaacatgactgatggagtagctgagcccatgcatggcagcttagccggagttaaactgagcagccaacaggcctaagtgccaggttccctggcgttggtgacatgctgcagcctggaactctgatctccagtgtgactgcaaagctgtcttctcactggtactgccttgtgagtactggttggactgtggggcatgtggccgctgcagttccagtggttatttctaagtctatgacaggacaggctgttcttgcttcagaaccttctctgacagacacggtaactaaatgtgaaaaaccaataagctggtgactcatgaatacacacgaggaaaagcagaggtttattttatct

SEQ ID NO: 28683 - DNA, 434 bp, Homo sapiens
  misc_feature (1)...(434): n = A,T,C or G
nttgatgacaatctttcgagngcggtggaattcctcgctgcatcggggctgccgagctgcgatgccgccgtcaacctggccggagagaacatcctcaaccctctccgaagcttactaccagcccagtctgactgcggagtatgatgaagacagcccaggaggggactttgactttttctccaacctcgtaaccaaatgggaagctgcagccaggcttcctggagattctacacgccaggtggtggtgcgctcaggggttgtgctgggccgagggggtggtgccatgggccacatgctgctgccctttcgcctgggcctggggggccccatcggctcatgccaccaattcttcccctggatacacatcggggacctggcaggaatcctgacccatgcccttgaagcaaaccacgtgcacggcgtcctgaatggag

SEQ ID NO: 28684 - DNA, 453 bp, Homo sapiens
  misc_feature (1)...(453): n = A,T,C or G
nttcgatgaccattggannnnattgacgacttttatacagtgtggtggaattcactctgtcattgccatctgcgtagatgggaccttccacaaatatgtcttcacttctgatggaaactgcaacagagaggctttcgacgtgtaccttgacatctgtgatgatgatgacttttaaggaccctgggggctgtgctagggacctgcagtggcagaactgcagagctgagccttggcagtggggcgtgcttggaagccaccagccagcaagcattaatggggctggtgcccactttccactcagcagagctatgtctaaataaagagctcacttccccccagcnnaaaaaaaaaaaaaaaaaaaaaaaaaaaacaataaaaataaaaaaaacaaaaaaaaaaaaaannnnaaaacaanaaaaaaaaaaaaaaccccaaaaaaaanctatctctttc

SEQ ID NO: 28685 - DNA, 472 bp, Homo sapiens
  misc_feature (1)...(472): n = A,T,C or G
ntcgagatcatatccttgtggtgcatattangacacccagtccacatctaccatatagcaagtttagtaagggaaggcagcatacgtcccagggacagtgggtttggatctgtctagaacagcggtttgtggctgtggcccagctccgagagtgatatttgctctggtaggtgagggcctgagggtacatttctccacctgtgccccctcatgttcacagaggatttcagcagctgcaactgcgcacgccaggtggggaagggtgggggtgggcctggttgccccatgttaggaaatcactaccagtcaggtggggctggggctgggtggacaggatcaggattcccttgaaagcccaggcagggtgagcagtcccagtggtcctagtgccgcatcatatccaggtgggtgagggcaggaggccctgcggaggcagcgtggatctgcccacacataggctactggaatagtt

SEQ ID NO: 28686 - DNA, 458 bp, Homo sapiens
  misc_feature (1)...(458): n = A,T,C or G
gggccgtcctttgaaaccctnnaatgagaccattanccangcggtggaattcggctgctttgagtcagtttctctctcgatgacttttccacgttggcttcgatctgggagttccgttttctgtgtatttgctgtcaatgtctatgcctttggatgttagtcattttccgaggtgctaaaaggggctggtgtgtgttttttcattcctctacaggtggccctgggatggtaacagatgcggagagatccatagtatcaccaagtgaaagctgcggccccatcaatgtgaaaactgaacccatggaagattctggtgggtaccaagatgcttttagaatcaagtatcggccaagcgtggtagctcacgcctgtaatcccagcaatttgggaggccgaggcaggcggatcacttgaggtcaggagttcaagaccagcctggccaacatggtgaaaccccc

SEQ ID NO: 28687 - DNA, 450 bp, Homo sapiens
  misc_feature (1)...(450): n = A,T,C or G
nggattgacgacattagnnagngttgacgacctttagaccagctggtggaattcactgcgctatgtgacccaatccatgcctacctcttcagccttctcccttcctgctggaccctctactgatatgtttcagtctcactgggtacttttaatcccttaaatctgtctggcttctttctgctatggggcattttcacaggctgtgtcatcagactggaatattcttgcctgatcttcacgtggcctcttgactttgaaatctcaacttaaatatctgtagagaaagcgtttttgatgcactgagtcatttgccatcatactatctgatattttctgtgtagtaccaactactatgtggtattttcttatttgtgtccttctattcctttcttctcctcctgtctcctttcctttatctatttttgttcattcccactggagtgtaagatn

SEQ ID NO: 28688 - DNA, 444 bp, Homo sapiens
  misc_feature (1)...(444): n = A,T,C or G
nggattgtagacatctgtcagngtggaggactttccccccagcccctgcagagagcacttagagttatggcccaggccctggtccacccttcccctgtgcacctccggctgggtttgccaagtcagggagcagggctggccgcaggaactcccaaaccttggctttgaatattgttgtggaggtgtgctcgtccctttctggacgtgcaaggtacctgtcccagcaggtcagatggggccagctgaggcgctcccccaggcaggaagggccagccttcaccatcgcgtgggattgggaggaggggcctccgtgagcagcccctcctctgccgctgtcccagcccagtccctctcccggagccttggcagcctcccacaacccagacacttgcgttcacaagcaacctaaggggcaggtgaagaagcgcagccctgccagacgcg

SEQ ID NO: 28689 - DNA, 457 bp, Homo sapiens
  misc_feature (1)...(457): n = A,T,C or G
cactgacagccctcgnnatgancgacactaggccangcggnggaattngcggactccactttcccagcctggccgacctcatcgagcacatcgaggacaaccacatcgatacagatccacggggtgtaaaaaaacaagaattacagcagccaacctatgttgccctgagttacataaatagattcatgacagatgctgcccgccgagagcaggagtccctaaagaagaaaattcagccgaagctctcgctgactctgtccagctcagagtctcgagggaatgtgtccactcccccacgccacagcagtggaagccttactccccccgtgaccccacccatcaccccctcctcttcattccgcagcagcactccgacaggcagcgagtatgacgaggaggaggtggactatgaggagtcggacagcgatgagtcctggaccacagagagtgccatcag

SEQ ID NO: 28690 - DNA, 454 bp, Homo sapiens
  misc_feature (1)...(454): n = A,T,C or G
catcgaaatcgatagactaggccgngcgnggaanttcggcactaagaaatcaccagggtcttccctgctgagccaagactcagcctcagacacctcagcagtgctctagttatcttccaacgatcagagctggctctcaccttatctgctatctctgccacaaaccctttcctagccacacactatggagctgggcagagcgtcaagttgtgggatttcatctagaccaacctcagcactatggacatctgggaccagataattcttggttgtgggggcctgtcctgtgtgttataggatgtttagtaacatccctggcctccacccccaccactgtgacaaccaaaagtatctccagccatggccaaatgtcacaaaagggcaaaaacttcccctactgagagctactattgtggccatggaccaccctgaggttagccaatcagagcagaag

SEQ ID NO: 28691 - DNA, 483 bp, Homo sapiens
  misc_feature (1)...(483): n = A,T,C or G
gccgatctggggaatcgagaactgaggaaccgtgcnggaannccaaatcagtagcgttccttgtcattcttttgtggctggtttcacgtaaatattttgtgtgtatgataatagaatttgattttaatgaatatactttaaaagcaactttttttttattcttcctcaccatcgaagatggagaaaaataagaagggctgtcttgcggttccatttcttttgtggatagtaagaagcgctgtcttctggttccgttttttttttctggatagaaaggaggtttatcttactctgtcttcattgccctcaaacctcaagtagtcactaataccctggctatgacagcttttatcgaagggttaaatggcagatttatttacttggcaaacattgtcaagtctcagaaaaattaccccatgggcttgccttcttccctcgtgaattgccttccactgatggagaggatttgatctgttccctgct

SEQ ID NO: 28692 - DNA, 558 bp, Homo sapiens
  misc_feature (1)...(558): n = A,T,C or G
agcgtgcnnaatcgatcactatccagtgtgctggaattcgccataaatgtaacgttcacagttttcagggattaggacaaacatatctttgggactggaggagggggtaatttctcagcttaccacaaaggttttgtgcaacatgtgaactgtaaaaacactcttctaagctggatgcggtggctcacccctgtaatcccagcactttgagaggccgaggcgggtggattacctgaggtcaggagtttgagaccagcctggccaacatggttaaaccttatctctactaaaaatacaaaaattagccaggtgtggtggcacacacctgtgatcccagctgcttgagaggctgaggcaggaaaatggcttgaacagggaggcgaaggttgcagtgagccaagattgtgccactgcacttcaaaaaaaacaaaaaactattctcttcggcctcgacagcatccctacattacctgaaaaatccagatatttccaatggtaatcaactaatagctgaaattggcaactttctctttaatgtcattgccgaggaccctttac

SEQ ID NO: 28693 - DNA, 450 bp, Homo sapiens
  misc_feature (1)...(450): n = A,T,C or G
catggagaccctcggtttgagcggcggtattncaaaccccatctctactaaaaatacaaaaaattagctgggcattgtggtgggcgcctgtagtcccagctactcgggaggctgaggcaggagaatggcgtgaacccgggaggcggggcttgcagtgagcagagatggtgccactgcactccagcctggccgacagagcgagactccgtctcaaaaaatagtgctttgtagttttcaagtgtacaagccttagacatatcttgtcaaattcatctctaaataattcatatctatgcttttgaatggtaccagttatttttaaatttcaatttccaatatttctttgctagtacatagaaatataattcacttttatgtgttgatcttgtatacgataaccttgctaaactcacttattatttctagtaattttggaaatcctgtaagctt

SEQ ID NO: 28694 - DNA, 552 bp, Homo sapiens
  misc_feature (1)...(552): n = A,T,C or G
nttggaactttcggtcactagtccagagtggtggaattccccttgggcaacgtggaggagtgctaccgctacttcaccagtgtccttttttgccatggagtcagggtcagttcccctggaacattctggaaactttacccatccccagacaaggtctcacccagtctctctcacattcatcacccttatcttcttgtgaagaccccagtgggctctccttgctcctgttgctgggcttttggaggcaaagccagggctccggaaggtagtcagggttctaattccgagtcaccaccacagcggcctcctttcagcatcgacctcttcaaagaggaacagctgctggccttggaagactacgtggtcaacacttacttccgccacttcaagctctataaatacgtcttcacaccccaggtagggggtggtggaccatgaggagccaccctcaaccgcccctcccctcagacaggtgcacgtctttcagnctccctctgccttgcttnccangtgcggctggatctgtctttgactttacatgggctacnagcn

SEQ ID NO: 28695 - DNA, 459 bp, Homo sapiens
  misc_feature (1)...(459): n = A,T,C or G
gggcagcccaatgatgccntcgtaatgatgaccattgacagngcggggaattccggtcgccgctgcgaagggagccgccgccatgtctgcgcatctgcaatggatggtcgtgcggaactgctccaggttcctgatcaagaggaataagcagacctacagcactgagcccaataacttgaaggcccgcaattccttccgctacaacggactgattcaccgcaagactgtgggcgtggagccggcagccgacggcaaaggtgtcgtggtggtcattaagcggagatccgagtgagtttttctcaggtccttgattggaactgcctcagagccaagggtccttttactcagtggcagcaacaaacgcagtctgttggctagtgatcctcctgtctcagggacacgtagtccagggagcagccaattgcttggcacttggggaccccgttctggggagtcctg

SEQ ID NO: 28696 - DNA, 452 bp, Homo sapiens
  misc_feature (1)...(452): n = A,T,C or G
aatgatngacatctggatagagcggcggaattcagaaaggatcacaggagctttgcctgcaggagatgctacatgtcctctctgtgtattgacaaatatgcttctgcatcaagttggagcagaagcttgctgacactggatagtgctgtcttgccctcttctttcccagcacacacccccagaacaggcttccctggcacggagctctggtgtggggccttcagcatgcaatgggtcatgacgagcaagcgcggtgtgaagctcaccacagcgtccatgccaagggcatgctcaaggggggctatttgtcagctcacacggtgacctcctgctaatctcagtgtctagaagggttacacttctcctgagtgaccagatcttgatgagcctcatggacggtgtgaactgtatcttggccaccggaaagtttcgcacccaggcttcagcctgcg

SEQ ID NO: 28697 - DNA, 455 bp, Homo sapiens
  misc_feature (1)...(455): n = A,T,C or G
cttgaccccctcnnnatgatgacccttagncagngcggnggaattcctcagacgatgacatcaagagcgtgtttgaggcctttggcaagatcaagtcctgcacactggcccgggaccccacaactggcaagcacaagggctacggcttcattgagtacgagaaggcccagtcgtcccaagatgctgtgtcttccatgaacctctttgacctgggtggccagtacttgcgggtgggcaaggctgtcacaccgcccatgcccctactcacaccagccacgcctggaggcctcccacctgccgctgctgtggcagctgctgcagccactgccaagatcacagctcaggaagcagtggccggagcagcggtgctgggtaccctgggcacacctggactggtgtccccagcactgaccctggcccagcccctgggcactttgccccaggctgtcatggcn

SEQ ID NO: 28698 - DNA, 450 bp, Homo sapiens
catagagcacattaggttgagcggcggtattcggaaagtgctaggcagcctgtgattagcaacattctttgtgcttttttgttgttcctctgctctgtcacagttgtacgttgtttgccttagaaatgtaatttttaaaaaccattttaaaaatgaacggtgatttggctggctggaaaaaatcacactgtcaggggactatatttgaagccagtctagacggggctggactaggaacccacctggacccaggagaccccacaggacccaggaggtccctgccggaaggcagaggttcaggtgagagtggctcacctctgagctggtgaagtgaggacttgcctgtgacatgacccaaggatctgctgctggcttctggagacagggccttgggctgacttctcaggttgattgaggcctcctgactagcggtgttcccaggctagaggt

SEQ ID NO: 28699 - DNA, 549 bp, Homo sapiens
  misc_feature (1)...(549): n = A,T,C or G
aatcgaacactgtattggagggcaatcncgnngcaccactgagaaggacagcagagagatgaaggtcttagaatcattgattggaatgatccagaaattttcttatgatgactctacttacgataaactccatgaagacttagacaagaacagaggaaaatttaaacagttttgttcgttactcaatgttcagccagactttaaaattagtgcagaaggttccggactttcattttgaggaggatggatgaacagagaccgaacgtcgaggaacagatggtcaccgaagtccccacacgctggctctccacacccctcctgttccagaaagcatgtccgaaagcagtccaggagattattaaggggtcgccatgaatccactttggttttaaaaccattcccgaatgtcctagtggatggtgttgtgctgcctaaactgccggctgcaggagccagagaagtgacccccgcgggagcagcggcaggtggatctncacggtggctcgctatggttttggttggtttttccttttaagacggggcntactt

SEQ ID NO: 28700 - DNA, 562 bp, Homo sapiens
  misc_feature (1)...(562): n = A,T,C or G
cgggcccnaaatggagcccactantgaagggcaatccgcaggngcagctccatgatggagnagctgaaccctctcgtggacgtggggtgccagtgagaggccggggagttgcacctcctctaccacctgttcccacgggcacgtggtgtgggaccacctcggggggctttggtgcgtggtacaccagtaaggggagccatcaccagaggtgccactgtgactcgaggcgtgccacccccacctactgtgaggggtgctccagcaccaagagcacggacagcgggcatccagaggatacctttgcctccacctcctgcaccagaaacatatgaagaatatggatatgatgatacatacgcagaacaaagttacgaaggctacgaaggctattacagccagagtcaaggggactcagaatattatgactatggacatggggaggttcaagattcttatgaagcttatggccaggacgactggaatgngaccaggccgtcgctgaaagcccctcctgctaggccagtgaagggagcatacagagagcacccatattgaccgtatn

SEQ ID NO: 28701 - DNA, 582 bp, Homo sapiens
  misc_feature (1)...(582): n = A,T,C or G
tgtcatctccccccccgccccccnnaatcgatgcccagnatcgatgcactgtcncgagcngggcgaaaccccgccgagccatgctggctgacatctacaacacaacagagctggtgatgatgcacgacttctctccagattttgaggacacttggcgcttcctggaagaccgcattaatgatgcaatgaacatgggccacactgccaagcaggtaaagtccacaggagaggcactggtgcaaggactcatgggtgcagcagtgacgctcaagaacttgacaggtctaaaccatcgtcggtgagaggaaggggtataagctacaatgcctagaagagaatgagcggacagattgaaagagctttgaaaagtataaggtgccatccacataacctggtgttcacgagaacacactaaaggactcctgagtcactaccacagccacctggaaaccacaaggcatttgatgctaccgttctggtcagggattgggctgcttcttcagttcctaataccagaccaagcctcctgatgcctttctgcactgcaactgtgtgattgaaaaatgagatgttcatcccacg

SEQ ID NO: 28702 - DNA, 488 bp, Homo sapiens
  misc_feature (1)...(488): n = A,T,C or G
gaggttccggggcggggnnattgaaaccctattgtagaccttagtccagtgcggtggaattccagccacgactcctccttcctctgcgcttccagtgataagggtactgtccatatctttgctctcaaggatacccgcctcaaccgccgctccgcgtgagtaccccctccccaccctaccgtgtccctgtccccctgcccatttaccatacctgggcttagccagtgctgcctgcaggctggctcgcgtgggcaaggtggggcctatgattgggcagtacgtggactctcagtggagcctggcgagcttcactgtgcctgctgagtcagcttgcatctgcgccttcggtcgcaatacttccaagaacgtcaactctgtcattggtgagtgggaacagccccttggttgggggtactgcatggggcaaaggcctgcaggttggacctgaaaggattttagggccatgtgaggctcagcttcatcatcan

SEQ ID NO: 28703 - DNA, 312 bp, Homo sapiens
  misc_feature (1)...(312): n = A,T,C or G
tgagcanagaacagtatgggaccccctcaccaggcctggaacacctacagccacaaagaagccaaagaataaactccttacagaagttaactctgcagactgacaagacgtgaacagagagagtcaaggggagcgatgactatttcacagacaggaaaggacagaagagatgaccaaaggcacccccaagggatcaaggcacagaggaagagggactttatgcacacaggagcctcgctcctgcaggccatggcatggctcttcgcgctgccagcaaggcttcccataacatatgtgtgctctgcggcggcg

SEQ ID NO: 28704 - DNA, 452 bp, Homo sapiens
  misc_feature (1)...(452): n = A,T,C or G
ngggggaactgagactctagnaagactgatgcccttgcaaggnctagccggctggcccgggctccctcgggactggggcgactgcgcatgctcgctggccgcgctgggccagtagccgagccgcggtgacgaaccggctccgcggttgcggtgtttgcggttgctgtgatggcgatgtgagggggcccggggcgggatggtgctgacccgggtcgggccgtcttcttgcagctggacaacgagctcctccgttcgacaggcgggggaagaggccgagccgggcgagagggttgaagatcaactggattatgtatttggttctggaatctcaaagcagtccacaaacaaattcttccttatgttgtctgtgtcagattcgagtatttgccaaatttctatgaagaactgcttcaagaattgggaagggtctgagattttaccccacttgcaag

SEQ ID NO: 28705 - DNA, 458 bp, Homo sapiens
  misc_feature (1)...(458): n = A,T,C or G
gggggcctgagnacctcgaanaactgagatcttcgcacagncnggnggaattcggcgaggcgtccggttgcagagccggcgacgtctctggaaatgcatcctgcattcccgcatggataacagctgcagctatatcagaattgcacaaagaggggagagtgtcattgtgtgccttttgacacatacattaccaccaaaaaggaaaaaaagcgtctatctgtgctgccaccgaccagactcatggaggccagattttctccaattaaccagatcttgccctggtgcagacaaaacttagccatcagcatcagcaaagccatcaacacccaggaggcccccgtgaaggagaagcacgcccggcgcatcattctgggcacacaccacgagaagggggctttcaccttctggtcctacgccattgggctgccgctgcccagcagctccattctcagctggan

SEQ ID NO: 28706 - DNA, 363 bp, Homo sapiens
  misc_feature (1)...(363): n = A,T,C or G
actcacacaacgaagagatcggctggcaatggaagggggaggggcattatatgtggcaccaaccagatggtattcaagacagaggacctgatagcctgggtctcccagtgagtgacaggggctgtcctgccagccccgcttcacctgccacacatgtggaggctgacctgagccctccatctttggctgtggccacctcagccagcccctggtctcaccgggtcctttctgctttgatccanggttggtaccttttacccaggggatgtcatcctaactgggacccccccaggtgtcggtgtattcaggaaacctcctgtctttctcaagaagggggatgaagtccagtgtgagattgaagag

SEQ ID NO: 28707 - DNA, 551 bp, Homo sapiens
  misc_feature (1)...(551): n = A,T,C or G
natcgatcccgtatgggaggcctaattcagagatctgcatccacctggagatgcagctaagtgggtccttatgtacacaccacgttcacacacacacagagggaccacgtgtgcacgcatgaccgtgtgggtggcggcgtttgctgtgaaccacgctcaggccacacagagacacatacttggtttctgggactgagacccaggcctggcaggacccgtgcctacagatactgcaaacgttcctacagcctagaggtgcgtatacacacccaagtacacgcagccaggcattcaggggtgtgtttgccacatggagcatcccttcctggtcttgccaggcacctgcacagagcgtctccagccccatctcctaacggnggctgggggtaagagaaatctaactgcgctcccccaacccctcgccctgccatcttnccctcaagcctgctaagntatcccaggcctgtgcgtggnggaaaaagccagcctttgccctgcagccttcacctcgccgctggggaccaacaggnttgctacagctttgcaccccg

SEQ ID NO: 28708 - DNA, 575 bp, Homo sapiens
  misc_feature (1)...(575): n = A,T,C or G
tggttgcccccnccggccccccaatcgancccccntatcgaacactatccgngnggtgcaattcgcgggccacaagctcttcaggccaagtcagagctgctgttgctgccacttggatggggacctgaaaaagagaatgttgatagccccagctaagacccccaatcagctgtgggacctttttcctcctctgcgctccattcctggggggtcagcctgagagtgaactcagctgtcatctgcagcctctgcctccagcccggcagctctggggaggcatccgtgtgccggccctgcagtgcctgcccacggtcaggcattgaaaactaagcccaaccactctgcactttgtttcccactcccattagccctgggccacctcctccagttcttcctcttttactaattagttggtcagtttggagagttgactggcaccatggagggtaggcaggtgggggctgggtggnggactgcccacaggagcatgtacatatggaaaaacagaacaacagtggactttntatgatataatanatgtcttagtaccagcaaaaaaaaaaaaaaaaaaaaaa

SEQ ID NO: 28709 - DNA, 546 bp, Homo sapiens
  misc_feature (1)...(546): n = A,T,C or G
gttcgaccactgttcgangggnggtatacaaccctcatagccatgcgcgggatataatctcctggtgtgccgcttggtaagaccattggaaatgagcagtattagggtgggagtgacccgattttccaagtgccgtctgtcaccccttctttgactaggaaagggtactccctgaccccttgcgcttaccgggtgaggcgatgcctcgccctgcttcggctcacgctcggtgcgctgcgcccactgtcctgcacccactttctgacactccccagtgagatgaacccggtacctcagtgggaaatgcagaaatcacccgtcttctgcgtcgctcacactggcagctgtagactggagctgttcgtattcggccatcttggctccaccccaaagcccatgcttttaaccaccatggtatttcacacactcctacctcatcgtagtacaggacttgtgacctcattattttatacacactagaacactgagctcttgtgctttcagagtggcctgtgtgtacaaaaataccatagaaaggattattgn

SEQ ID NO: 28710 - DNA, 578 bp, Homo sapiens
  misc_feature (1)...(578): n = A,T,C or G
tgaatgcacnnnncncgcncccnnaattganccnccnttttcgaagcacagtccgngnggnggaattccgctggtgcaggtaacctccgacactctcggccggtcccgagtccgactccctcaagggtgacgcgagctctgccctttaaccggaaacgtctccctgctcaccccacccccgcgcagacgcagtgctgagcacacagctaccggacaaagagtgacgcccggagctggagttatggcggctacggagccgatcttggcggccactgggagtcccgcggcggtgccaccggagaaactggaaggagccggttcgagctcagcccctgagcgtaactgtgtgggctcctcgctgccagaggcctcaccgcctgcccctgagccttccagtcccaacgccgcggtccctgaagccatccctacgccccgagctgcggcctccgcggccctggagctgcctctcgggcccgcacccgtgagcgtagcgcctcaggccgaagctgaagcgcgctccacaccaggccccgccggctctagactcggtcccgagacgttccgnctagcgttcctgc

SEQ ID NO: 28711 - DNA, 491 bp, Homo sapiens
  misc_feature (1)...(491): n = A,T,C or G
agagtatgccgggntgnnnnnnaaattgatgaccacatcgacgacccgtggaaancgcagaagggacgcagaaatccattactgcgcgcggcggggaagaggacgccgccggtagctggtgcgtgacacactgcagcctcgcgggctgccctggacttcatcaagcccgggtcggctcggggcgggcaggggtaggatccataccgccgaactgcggccccgctgctcgcagccgctctcccgggagcgcccgcttaggactcactcccgcccattccttacctcgatggaatccttagcccttagagagagggctaaaaaacaaataaacaaacaacagacaaacaaaaaaaaaccaaattccaaatggcccccggaccctcccgcagatgcagggcgcacactggccagttctaaccatagacttgactgcatgttgacaagggtttccaacctagcttccccgaggtactgcatgaatcagtccttgg

SEQ ID NO: 28712 - DNA, 486 bp, Homo sapiens
  misc_feature (1)...(486): n = A,T,C or G
agaggttccngggnngnnnnnaaactgaaacccctcgacgnccgtggaannccatgaggngggcaggatccagtcctccctgagggctttcaattctaagctgccaaaccctgtggaatatgagaccggcaaactctgtagctaatgggcggcccacttcagcactgggcaaggaggggatccatgaatctggggtacaaagataatctaagccctcaccttagtgccaacagggtgtgctcccacgagactttcagcatccagtagatgggacctcgaggctcgagctgaagcaggcgagagagaaacagctactgcgtgcgtgcgcgcacgcatacacacacacacacacacactggcacagggaggctacaactaagcagcctcagatctgtaaagttgattggtgctttctaaaatgaatgcaattgaaagaaaggagccaaggaagagattaagaaaaagaaccagctgaaccatgaaacn

SEQ ID NO: 28713 - DNA, 490 bp, Homo sapiens
  misc_feature (1)...(490): n = A,T,C or G
agaggttgccgggnngnnnnnnaactgagaccatactgagaccntcggnaagngcggnggaattcgatcgcaggcgagattacgaggcgaggctcgcgcgcccgcccccgccctggcccccattgcccacccggtcggcccggcacagccatgatcaaggcgatcctaatcttcaacaaccacgggaagccgcggctctccaagttctaccagccctacagtgaagatacacaacagcaaatcatcagggagactttccatttggtatctaagagagatgaaaatgtttgtaatttcctagaaggaggattattaattggaggatctgacaacaaactgatttatagacattatgcaacgttatattttgtcttctgtgtggattcttcagaaagtgaacttggcattttagatctaattcaagtatttgtggaaacattagacaaatgttttgaaaatgtctgtgagctggatttgattttccatgtag

SEQ ID NO: 28714 - DNA, 495 bp, Homo sapiens
  misc_feature (1)...(495): n = A,T,C or G
agggaggagggnnnnnnnnnaatcgtagaccttagtccacgtggtggaattcgcctgtgctctggctggctgggcctctatcctgaagagggaaggtgctagaaattagaacaagtgactgtaggggggaccgtctagaaacaccaggcccagacacacggtccctcaggtcaggaggagtgagcagccggcacagcctcctgggaggatcccgaagtagggactggggctgagagcagagaggagggtcgggcgggcccgcctcagtgttgcttctcacagaagctgcgactctagaccaggcctgcagccagaacgccgattccgggagcttgggagccctgcgtcagggcccagagcctcgcacttgctgtgtgcgaagatcgccttgctttactgtgaccacagccccgacgcggggctgtttaacaagaacttcagcgcagccggcgtttcttgtaccccggccgcggctcttggcggcgggagaggcgc

SEQ ID NO: 28715 - DNA, 459 bp, Homo sapiens
  misc_feature (1)...(459): n = A,T,C or G
nntgattgccttcgttcgagcggnggaattcttacctgcatccactatgcagggttccctaatgaggcactgtccagcatggggctggggcctgctgtgcttttccctgaggagcctttacctgcccgacccagggcctctcaccctctcttgccctttctctctttctagcactttccacatccggatctgaggacactgccgaggctgtaggggcctagaagtccaccatcctgccctgcagtcacatgggtgtggcctccaagctccccaggaaagcagtggcagcctctggggtttacaccacaaatatatcctgtggccctttcagcaaaaaaaaaaccttaaccaggaagggggcctgtgaaggttaggacccttcccacagccccgctgtggtccagccccgggacccatggcctctctccaggccctccgcaccccgccccatgccccagt

SEQ ID NO: 28716 - DNA, 451 bp, Homo sapiens
  misc_feature (1)...(451): n = A,T,C or G
ggtgggccgggtccnccccctgaagancctggganacatagcacagngcggnggaattcaagaccgacctcaaccccgacaacctgcagggcggcgacgacctggaccccaactacgtgctgagctcgcgggtgcgcacgggccgcagcatccgtggcttctgcctccccccgcactgcagccgcggggagcgccgagccatcgagaagctcgcggtggaagccctgtccagcctggacggcgacctggcgggccgatactacgcgctcaagagcatgacggaggcggagcagcagcagctcatcgacgaccacttcctcttcgacaagcccgtgtcgcccctgctgctggcctcgggcatggcccgcgactggcccgacgcccgcggtatctggcacaatgacaataagaccttcctggtgtgggtcaacgaggaggaccacctgcgggn

SEQ ID NO: 28717 - DNA, 453 bp, Homo sapiens
  misc_feature (1)...(453): n = A,T,C or G
tgagtcccaggagtccncccccctttganccttaagngtgctagcananngcggcggaantnnacaaaaaagtgtctagatattgcctaatattcactgggggaaaattactcccagttgagaaccactaatccaaatacttgtcccctggccaaatgaacacacatgccgctaacacaaaatatgtttatagatatgtttatggactggatacctttgcaaaagagaacatttttctttaaatttggaagaatgaaggagatgtacatgtttaaatgtgaccaactgaatttgaatatggggggaaatacgctgcttgtaagaggcagcatgccctagtagtttaaccacatgaattctgagtaaaaattaatatagtcttattctacctctgccatttaccaaggctgtatccccatgcaagttgctgaatctctctgttctttgctgttc

SEQ ID NO: 28718 - DNA, 476 bp, Homo sapiens
agacgaactcggatcgtagtccatgtggtggaattcggcagcagcactacctgcacaaggacaaggacagcacctgcctagagaacagctcctgcatcagcttctcatactggaaggagacagtgtccatcctgttgaacccggaccggcagtcaccctctgctctcgttagctacattgaggagccctacatggacatagacagggacttcactgaggagtgaccttgggccaggcctcgggaggctgctgggccagtgtgggtgagcgtgggtacgatgccacacgccctgccctgttcccgttcctccctgctgctctctgcctgccccaggtctttgggtacaggcttggtgggagggaagtcctagaagcccttggtccccctgggtctgagggccctaggtcatggagagcctcagtccccataatgaggacagggtaccatgcccacctttccttcagaaccctggggc

SEQ ID NO: 28719 - DNA, 454 bp, Homo sapiens
  misc_feature (1)...(454): n = A,T,C or G
tgagggcaacggggtccnnccaatgaaganccttgngnagcttagcacanngcggnggaantcgagnggggcctaactgcagccggagcctgggagacgatgcatcactgtaagcgattccgctcccctgaaccagacccgtacctgagctaccgatggaagaggaggaggtcctacagtcgggaacatgaagggagactgcgatacccgtcccgaagggagcctcccccacgaagatctcggtccagaagccatgaccgcctgccctaccagaggaggtaccgggagcgccgtgacagcgatacataccggtgtgaagagcggagcccatcctttggagaggactactatggaccttcacgttctcgtcatcgtcggcgatcgcgggagagggggccataccggacccgcaagcatgcccaccactgccacaaacgccgcaccaggtcttgta

SEQ ID NO: 28720 - DNA, 452 bp, Homo sapiens
  misc_feature (1)...(452): n = A,T,C or G
ggaggtcccggggtcccccccctgatnancctaagaatcctcgcacagngcggnggaattcctgcctgagtgaggacaagaagaacatcatcctggaggagggcaaggagatcctggtgggcgatgtgggccagactgtcgacgacccctacgccacctttgtcaagatgctgccagataaggactgccgctatgccctctatgatgcaacctatgagaccaaggagagcaagaaggaggatctggtgtttatcttctgggcccccgagtctgcgccccttaagagcaaaatgatttatgccagctccaaggacgccatcaagaagaagctgacagggatcaagcatgaattgcaagcaaactgctacgaggaggtcaaggaccgctgcaccctggcagagaagctggggggcagtgccgtcatctccctggagggcaagcctttgtgagcc

SEQ ID NO: 28721 - DNA, 569 bp, Homo sapiens
  misc_feature (1)...(569): n = A,T,C or G
cttcgacattcgatccctagtccagcgnggngcaattcgcanaagtttcttcaagaggagcgtccgcaggaacttaacttacacatgccgtgccaacaggaactgtcccatcgaccagcaccaccgcaaccagtgccaatactgccgcctcaagaagtgcctcaaagtgggcatgaggcgggaagcggttcagcgaggaagaatgcctccaacccagcccaatccaggccagtacgcactcaccaacggggaccccctcaacggccactgctacctgtccggctacatctcgctgctgctgcgcgccgagccctaccccacgtcgcgctacggcagccagtgcatgcagcccaacaacattatgggcatcgagaacatctgcgagctggccgcgcgcctgctcttcagcgccgtcgagtgggcccgcaacatccccttcttcccggatctgcagatcaccgaccaggtgtccctgctacgcctcacctggagcgagctgttcgtgctcaacgcggcccagtgctctatgccgctgcacgtggcgccgttgctggccgccgccggcctgg

SEQ ID NO: 28722 - DNA, 565 bp, Homo sapiens
  misc_feature (1)...(565): n = A,T,C or G
nattgagctctntncacngtggngcaattcgcacttccagcctgggcgacagagcaagactccctctcanaaccaaacaaacaaaaaaacctcaagtgcctgcaaggccaagcagatactgtagatgtgtaaagggtagcatagattggcagggttgggagttgggggcaggctgggcaaactggagtgagcaaggcctacttatattttaatactttaaagttatttttattaaactgtctgctgtccaaacataatacatgttgtaggccaaaatggccatgaagctaccagtttgcaaaccctgaactgtgaaatcttttagccacttccctatcttctctgttggagccatcattagtacttaaaaaagtacctttgagtcagggagttctattctactctgtgtttgtgagaaatacggccctgcccctctgggccacagtttcctcatatgtaaaatggggccactcatgtccacttcccaaccccagtgccttgtggtgagactgttgctccggngatgacggtcccgcccctcctttcangaacaggcctttgagag

SEQ ID NO: 28723 - DNA, 562 bp, Homo sapiens
  misc_feature (1)...(562): n = A,T,C or G
catcgacatcgatcactatccgcgnggtgcaattcancaagtcagggattaagagacagcggcttggtttattgctatgcagctggaggactgctacgggcagctgcaggaggaataccagggccacggaggggccacgagtcttacagcggagggcagactctaacagatgccatctgaacgctcgctggccctggatgtcatacgagttggggaccagaaatctggtctcagagaacccgtccagggagatttgaagccatgggttatcttctagagttgatactgataatatattttaatttttattgatgtttaataccttctgaaacaggagggtaagatcagatgggaagcccctctgttgaaggatcttgggaaccttggtggttttttttttttggttttttttttttggaccgacctggggccttctttttaaatccaattctggggatgggttaaccaaaaagagcccaaaacaaaaaagggcccccccaccttgtttggggaacctgtctgtgttggaagtccacgccttccatgggaacccatcatgtgg

SEQ ID NO: 28724 - DNA, 449 bp, Homo sapiens
  misc_feature (1)...(449): n = A,T,C or G
nggggacactgagaccatccgaaactgagggcatngaaggggcagcncnntcccaagcccggcgagtgcctgcatgcaagaaggcgggattccttctgccagcagttagcatggcacctgctgtgtaagcatcttaaacatgtgcctagatgcgggaggccagatgcgcaagatggacactcggctcctccttcgtccccgcctctcctcgcttccagggtagcagcctcaacaagggaaactattgttccagtggaggctgcgaggatgtcggtgatttacgcgccgagctgtagctgcaaaaggacaagggcaagtgccggcccgacctagggcccaccggtctctggcttgctcttgtgagtaggtgcaccctgcccgcttgtggtggcctcaggggtaagaaatcaggacccacccagtgagagaaataacccaagctgtcagca

SEQ ID NO: 28725 - DNA, 456 bp, Homo sapiens
  misc_feature (1)...(456): n = A,T,C or G
tggagtccccggngttcgccccaactgatanccctagntgatcctagcacagngcggnggaattcaaactacatccatgggcggctgcagagcctggggaagaacttcgccttgcgggtcctgcttgtccaggtggatgtgaaagatccccagcaggccctcaaggagcttgctaagatgtgtatcctggccgactgcacattgatcctcgcctggagccccgaggaagctgggcggtacctggagacctacaaggcctatgagcagaaaccagcggacctcctgatggagaagctagagcaggacttcgtctcccgggtgaggccacctcacctcccatccctgcctgggcctccccgcagctcctgggtggttgagcttcagttccaattttaaggcactgtccattcatccctgggcctcgtctttcctggcccatcccaccgaaactgcagg

SEQ ID NO: 28726 - DNA, 449 bp, Homo sapiens
  misc_feature (1)...(449): n = A,T,C or G
aggaggcccggagtcgccccccctttgacccctgaaagcgtggagaaantcctcaaatcaccagcagtcttccaaaagccccagggcggtgacaggtaccatcccatagttgggtgggcccgttgtatctttagtagctggagatttagcaaagtttctcctgagtgtgggaaagggtgttgtgcccagggcttttcatggtaatgttagacagctcagtctcggaaataagtgtgccttcgagtccaagtaacgcgtcacactggctgagcactggttcccatccttgtaccgggcgctgaagtcaaaggcaggccttggatgcacccgcagggctcccctgccttgtcagctccccttggaaataaacacgaccatgcacagaggttgctggtgagagcgtgggacagcccgggggtggatgctgggatttggatgcttatttccag

SEQ ID NO: 28727 - DNA, 463 bp, Homo sapiens
  misc_feature (1)...(463): n = A,T,C or G
ggggnncnaagagggccagggttctcccccaggtactnactgatacctttggaannccaattgagttgccggggaacacagccccggccgccgccagagcgatgctcccgcagagccggcacccgacgccgcaccaggctgcaggccagcccttgaagttcactatcccggagtccctggaccggattaaagaggaattccagttcctgcaggcgcagtatcacagccttaaattggaatgtgagaaactggcaagtgaaaagacagaaatgcacatgcactatgtgatgtattatagaaatgtcatatggattaaacattgaaatgcacaaacagactgagatcgccaagagattgaatacgatttgtgcacaagacatcccatttctgtgtcaggaacatcaacaacaggcggcccaggctgctgaacgtgccatacaggtgaccatggcagagttgaatg

SEQ ID NO: 28728 - DNA, 470 bp, Homo sapiens
  misc_feature (1)...(470): n = A,T,C or G
agcnnnnnnaaggtggcncagcatgtccnccaatgagtantccatgagnatcctagaccangcggnggaattcgggtgaggctctctcattccagatatggagactaaaaagttcaagatggaagtaatagcaaaaaaattacagtactaatcacaacagctaccatttctcagcattagacacagtaactgtatgaaagaagtatgattattaggtctgttttacagatgaggaaactgagacccagaaaggtggaagcacttgtctaaggtcacgcctccaggaagcagtgtgtccacgactccagtccaagtggtcaggctccagagcccacagtcccaggggtccatgatgccgagctgcaatcgttcctgcagctgcagccgcggccccagcgtggaggatggcaagtggtatggggtccgctcctacctgcacctcttctatgaggactgtgcaggcactgctc

SEQ ID NO: 28729 - DNA, 564 bp, Homo sapiens
  misc_feature (1)...(564): n = A,T,C or G
nattgagatctatcagcanggggcaanncgaggntccgctgcagcttccggcagcgagactgcgcagcccactctctccgggctgtgccctttgagcaggagtccaagatcatgtttgtggtcaatgcagtgtacgccatggcccatgcgctccacaacatgcaccgtgccctctgccccaacaccacccggctctgtgacgcgatgcggccagttaacgggcgccgcctctacaaagactttgtgctcaacgtcaagtttgatgccccctttcgcccagctgacacccacaatgaggtccgctttgaccgctttggtgatggtattggccgctacaacatcttcacctatctgcgtgcaggcagtgggcgctatcgctaccagaaggtgggctactgggcagaaggcttgactctggacaccagcctcatcccatgggcctcaccctcagccggccccctgcccgcctctcgctgcagtgagccctgcctccagaatgaggtgaagagtgtgcagccgggcgaagtctgctgctggctctgcattccgtgccagccctatgag

SEQ ID NO: 28730 - DNA, 568 bp, Homo sapiens
  misc_feature (1)...(568): n = A,T,C or G
nattcgaacttctagtccacngtggnggaattcgtgtgtggctgggccctgccccacaaccggatgcaggccctgacttcctgtgagtgcaccatctgtcctgactgcttccgccagcacttcaccatcgccttgaaggagaagcacatcacagacatggtgtgccctgcctgtggccgccccgacctcaccgatgacacacagttgctcagctacttctctacccttgacatccagcttcgcgagagcctagagccagatgcctatgcgttgttccataagaagctgaccgagggtgtgctgatgcgggaccccaagttcttgtggtgtgcccagtgctcctttggcttcatatatgagcgtgagcagctggaggcaacttgtccccagtgtcaccagaccttctgtgtgcgctgcaagcgccagtgggaggagcagcaccgaggtcggagctgtgaggacttccagaactggaaacgcatgaacgacccagaataccaggcccagggcctagcaatgtatcttcaggaaaacggcattgactgccccanatgcaagttctcgtacg

SEQ ID NO: 28731 - DNA, 566 bp, Homo sapiens
  misc_feature (1)...(566): n = A,T,C or G
catcgacatcgatccacagtccgngnggnggaattcggagcccaaggagtccaggagcccgcagcagagtgctgccctgcccaggaggtacatgctgcgggagcgggagggggccccagagcctgcatcctgcgtgaaggagactccagacccctggcagagcctggacccctttgactccttggagtctaagcccttcaagaaaggtaggccttactctgtgcccccctgtgtggaggaggctctgggacagaagcgcaagaggaagggcgctgccaagctgcaggacttccaccagtggtacctggctgcctatgcagaccatgccgacagcaggcggcttcggcgaaagggtccgtcctttgcagacatggaggtcctgtactggacacacgtgaaggagcagttggaaactctccggaagctgcagaggagggaggtggctgagcagtggctgcggcctgcagaggaggaccacctggaggattccctggaagacctggnggcagcagatgactntctagagcctgaggagtacatggagcccgagggagcagaaccccagg

SEQ ID NO: 28732 - DNA, 452 bp, Homo sapiens
  misc_feature (1)...(452): n = A,T,C or G
aggagtcccggngttcgccccaatgaaanccatgangatcctagcacangcggnggaattcggactctcggctcccattttctctgctggcgtttctgctgtgcccagcagtggctgctggggaagcagctgcagcaggagggagacggtcttgcctctcagcccctccctgccccaccccagctcctgccctggaaatctggagccccttggagctgagctggacggggggccagctgcgagcatgtgcactaaacgcagccctttccaggggaagagaacaggatggagaatggaaggaaagccccccaggcttcgtgaattgcaagaagggacccttccaggatgacactaggaacagggctagggcactcgctcagtccctaggggcttgtttgttctttattattgtgtttaaatccttatagagcaatatcaggatggtgttaata

SEQ ID NO: 28733 - DNA, 447 bp, Homo sapiens
  misc_feature (1)...(447): n = A,T,C or G
tgagtcccggagtcccccaatgagaccatgananacgtggcgaaanncggccatggacatccacttccacagcccggccttccagcacccgccaacagaattcatacgagaaggcgacgatgaccggactgtgtgccgggagatccgccacaactccacgggctgcctgcggatgaaggaccagtgtgacaagtgccgggagatcttgtctgtggactgttccaccaacaacccctcccaggctaagctgcggcgggagctcgacgaatccctccaggtcgctgagaggttgaccaggaaatacaacgagctgctaaagtcctaccagtggaagatgctcaacacctcctccttgctggagcagctgaacgagcagtttaactgggtgtcccggctggcaaacctcacgcaaggcgaagaccagtactatctgcgggtcaccacggn

SEQ ID NO: 28734 - DNA, 566 bp, Homo sapiens
  misc_feature (1)...(566): n = A,T,C or G
natctgacttctagtccaccgtggnggaattcggcctacgaattggccgactacagcaacctacgggagaccgatatttaaggaccccagagctaggccgcggagtgtgctgggcttatgggtaagggggaccagagaggcgggctggtgttctaagagcccccgtgcaaatcggagacccggaaactgatcagggcagctgctctgtgtcatccctgaggaactgggcagagcttgaggctggagcccttgaaaggtgaaaagtagtggggccccctgctggactcaggtgcccagaactcttttcttataagggagaggctgcgggctccgtggggccttttgctcccaatccctatttgagaaacactgccccatcctccatgccctgaaccctgagtagacagccccaagcatggccaggaaggcctgcccctcctcttctgggaaataggcacagaagctttggccggctaccccagtgcctcccttatggaaaaagtcagtgggaccagggctcctcagtggacaaatttctccttcttactgccaactggaggaaccca

SEQ ID NO: 28735 - DNA, 455 bp, Homo sapiens
  misc_feature (1)...(455): n = A,T,C or G
tgaggtccccnncgttcttcccccaaatanccctganaatcctagcanagngcggnggaattcccagaggaaaatacaatgtatatgtgtgtaaacaactcaattctaaaataggaaaaataattgaataaaaattttaccaaagaatagatatgggccatgcacggtgactaatgcctgtaatcccatcactttgggaggctgaggtgggtggatcacaaggtcaagagttcgagaccagccgggccaatatggtgaaacccccgtctctactgaaaatacaaaaattagccaggcgtggtggcaggcacgtgtagtcccagctactcgggaggctgaggcaggagaatcacttgaactcggcaggcagaggttgcagtgagccgagatggcaccagtgcactccagcctgggccacagagagtctgtctcaaaaaaagaaaaaaataaataaa

SEQ ID NO: 28736 - DNA, 567 bp, Homo sapiens
  misc_feature (1)...(567): n = A,T,C or G
cttcgacattcgaatcactagtccagagnggngcaattctcttggtcaggacagtttaagctagaattgaggtctgtgcttttacatgaataattaatgtttggagttcatggcctaagcgtggggttcagaaaaccccccaggacaagagctggggagtctgaaggctgctagctgcatttctcctccggctttagagtcacaccagatccctgacattttagacaaaatggccaaactccagtgagtatctccgggaagttttcagagaacctcttggtactttttcgtgttctttgaaatactttaaccctttaggattcctttgaagggaaggatattgtgaatttataaaagagaataaaggccaagccctgtgtagatctctggattcatagacaggaaggcaacatggaggggcatccttcctgtctgaagtccttttgtccatgtgtgttttaaagcaggcattcatcacttgatcactggctctcacatgttgcccctctttctcttcacttgcatctccacccaccactgcttttccacctttcaaggattgattgg

SEQ ID NO: 28737 - DNA, 434 bp, Homo sapiens
  misc_feature (1)...(434): n = A,T,C or G
attgaagacctnctgatgccgtttgaaccagcnggnggaattcccggcatctgtgctgtctgcaagccttgtcagctgtatcaactcatcccagcattgtcaaggagacactgtctctgctgatgcagcatctctggcaagtgatcagagggaatatggttgcacaatccagtgacgttattgctgtctgttagagcctcagacagatggcagaaaaatgtcatcacgaccctgagagttgctggtatttccaccagacagctataccttgcctgcttgccttggctgtgcaggcctctatgccagagaaggagccctcagatctgagaaaagtactattggaggatgaggtgttggctgccatggtgtctgtcattgacactgctacaacccacctgagccctgagttgaaaagcacgtctgtggaggatagg

SEQ ID NO: 28738 - DNA, 442 bp, Homo sapiens
  misc_feature (1)...(442): n = A,T,C or G
gaaaatannatttgaagacccttattgaagtgcggtggaattcctgtgtgccaggcctgaagccaggctctgaaagggacagtgaggtgaatcctacacagtcttccctctgggaacacatgattagtgggggagacagactggctgtcgctactaggctgtgcggctgggctgaaatacgggcggtcaccctggagggcttgccaggcacttgcccatcactgctgcctactcccctctgccagcctctatatttgcatcctatccatctttcctggcccagggaaaatgccatctcctccagaggtgtctgagtcgtcacactttaagattctaagtctggaatttgatgtgtctgaagcaggaagcatctgggtatggagggagatcctggctgggaacagcagtttcaaagtcccagtgatggcactggctcacttcn

SEQ ID NO: 28739 - DNA, 568 bp, Homo sapiens
  misc_feature (1)...(568): n = A,T,C or G
nattcgaacttcagtcagcgtggnggaattcgcggctgctccagcgctgacgccgagccatggcggacgaggagcttgaggcgctgaggagacagaggctggccgagctgcaggccaaacacggggatcctggtgatgcggcccaacaggaagcaaagcacagggaagcagaaatgagaaacagtatcttagcccaagttctggatcagtcggcccgggccaggttaagtaacttagcacttgtaaagcctgaaaaaactaaagcagtagagaattaccttatacagatggcaagatatggacaactaagtgagaaggtatcagaacaaggtttaatagaaatccttaaaaaagtaagccaacaaacagaaaagacaacaacagtgaaattcaacagaagaaaagtaatggactctgatgaagatgacgattattgaactacaagtgctcacagactagaacttaacggaacaagtctaggacagaagttaagatctgattatttactttggttattgtctatatgccttttaaaaaaataaacttggtatgcaaaataaaaaaaaan

SEQ ID NO: 28740 - DNA, 433 bp, Homo sapiens
  misc_feature (1)...(433): n = A,T,C or G
nttgaagacccttattgcagtgcggtggaattcgaaacttctagctcagggattagagcatggtttgccccagtcctgccatttactaattctctgacgttagccaaattagataatctccctgagcttcagtctcctcatctataaaattggcaggacaattacagtactgctgtatagggtcgatggaaggacgaaatggggtatctgtgaaatgattagacctgggtttggtgcataataagtgctcagataatgttatacatcacaattcactgtatcacattaaaaagaaaacccatgtggttatgttagcatatttaaaaggcatgtcatacaattctgccgctaatcttaatgaaaatctaaaacagtcatagaatctacataaatacagaaataggcgccaacacccagcagcaagcctgttaag

SEQ ID NO: 28741 - DNA, 566 bp, Homo sapiens
  misc_feature (1)...(566): n = A,T,C or G
ntttcgacctctatccacngtggngcaattcccagcatttggacttcacacggtgtgagcgcatgattgggtttggaatggggataatattttgaaaataataaatggatatattctttattcttctccaggaaaccacgtgcccctgtctagttccatggatttcatggggcaggaggaggttgggatgtaggggaagttctggcagacaggacgaggaggcagacagatcacctcttcaggaccgcaggggattgtcagcaagagaaaaagggagacaaattcaggggggcgctgggaggccaggtgggcgtgtcttcaccttccctcttacgggtgaggatgttgtagagatgcccagttgaaaaggcccctgggagccctggaagatggtggcgcataaacctcgaagagaggcatccacagccctccctgaaccaggtgagtgtgcagagttcanaagtctccatgggcgttcaggaacacgtacagaggctgcagtcaggaggaggaggctgcttcgagcctggacatttgcaactggagtgatggnggcaggggtcact

SEQ ID NO: 28742 - DNA, 435 bp, Homo sapiens
  misc_feature (1)...(435): n = A,T,C or G
nttgatgacactnatagaagngcggtggaanacggggaaactggccatccgaaaatagcaacaacccagactggctcctcactcccttttccatcactaaaaatcacagagcagtcagagggacccagtaagaccaaaggaggggaggacagagcatgaaaaccaaaatccatgcaaatgaaatgtaattggcacgaccctcacccccaaatcttacatctcaattcccatcctaaaaagcactcatactttatgcattcccgcagctacacacacacaacacacagcacacgcatgaacacagcacacacacgaccacagacacacagacgtgcaccaccatacctggcgaagttttgtatttttggtagagatggggtttcaccatgttgctcaggctgttctcaaactcctgagttcaagcgatctacctgc

SEQ ID NO: 28743 - DNA, 434 bp, Homo sapiens
  misc_feature (1)...(434): n = A,T,C or G
nccgaagacccttttgcagngcggtggaattcgnctcgcacagcttggcctcgagaaggtgagaggaaggcaaaggccagggaggggacccagagaggcctggcacacaaggcccaagcaccaccgtcaacacagcccagtccatacagaaatgggtttcatgcctgaaaagctttttacagaaagatgccgcctgtagccagtgacagccgcaaccctacaggcctcagttccttgcagaggtgaggggtagagagtcagcctctctcccttccagcagcgacccagcttccctccacttccaggtggtgctgggctcaccaagggagcactggtgggtgctctgaaaacccacaggatcccacctccaggcccacctgggtcccatctcactctcttcttctttcaccaattgctaacatagaccttgttgg

SEQ ID NO: 28744 - DNA, 438 bp, Homo sapiens
  misc_feature (1)...(438): n = A,T,C or G
atttgaagccctngttgatgacccctagacagngnggtggaattccgccccgcgagcacagagcctcgcctttgccgatccgccgcccgtccacacccgccgccagctcaccatggatgatgatatcgccgcgctcgtcgtcgacaacggctccggcatgtgcaaggccggcttcgcgggcgacgatgccccccgggccgtcttcccctccatcgtggggcgccccaggcaccagggcgtgatggtgggcatgggtcaaaaggattcctatgtgggcgacgaggcccagagcaagagaggcatcctcaccctgaagtaccccatcgagcacggcatcgtcaccaactgggacgacatggagaaaatctggcaccacaccttctacaatgagctgcgtgtggctcccgaggagcaccccgtgctgctgaccgaggccct

SEQ ID NO: 28745 - DNA, 439 bp, Homo sapiens
  misc_feature (1)...(439): n = A,T,C or G
aattgaggnccntncttgaggacccttatacagngtggtggaattcgggacaagaaggtcatcgcaacgaaggttttgggaacagtaaaatggttcaatgtaaggaacggatatggtttcatcaacaggaatgacaccaaggaagatgtatttgtacaccagactgccataaagaagaataaccccaggaagtaccttcgcagtgtaggagatggagagactgtggagtttgatgttgttgaaggagaaaagggtgcggaggcagcaaatgttacaggtcctggtggtgttccagttcaaggcagtaaatatgcagcagaccgtaaccattatagacgctatccacgtcgtaggggtcctccacgcaattaccagcaaaattaccagaatagtgagagtggggaaaagaacgagggatcggagagtgctcccgaaggcc

SEQ ID NO: 28746 - DNA, 448 bp, Homo sapiens
  misc_feature (1)...(448): n = A,T,C or G
gggagattttcttgannaccatntttgatgacacctagacagtgtggtggaattcgacagatggaggcagtggctggtgggccactctctccaggtgcccctcagccatgggccctacagtcccctcaggggactctaacctgggggcctgaggtgccagggttcacagacagggtttcccaccagccacacgcaccagctctatttgggggaagtgtagtgaggaggagcccagaggaccccaggggagtgaggagggagaacttggaagggtgcagcccacttccagactctcccctctcccacccttctaccctgtgaagggaaatgagggctttagtttcctgggcagggaggggcagcttctgaggttgccaaaggcccccactggatggaacctgttagctgctcctctccgcagccagaaatgctgccggctgcacccaga

SEQ ID NO: 28747 - DNA, 461 bp, Homo sapiens
  misc_feature (1)...(461): n = A,T,C or G
gggagtggcananaganaannnnnntttgatgacccttattgaagtgcggtggaattccgccgagtgacagagacgctcaggctgtgttctcaggatgaccgagtgggagacagcagcaccagcggtggcagagaccccagacatcaagctctttgggaagtggagcaccgatgatgtgcagatcaatgacatttccctgcaggattacattgcagtgaaggagaagtatgccaagtacctgcctcacagtgcaggacggtatgccgccaaacgcttccgcaaagctcagtgtcccattgtggagcgcctcactaactccatgatgatgcacggccgcaacaacggcaagaagctcatgactgtgcgcatcgtcaagcatgccttcgagatcatacacctgctcacaggcgagaaccctctgcaggtcctggtgaacgccatcatcaacagtggtccccgg

SEQ ID NO: 28748 - DNA, 452 bp, Homo sapiens
  misc_feature (1)...(452): n = A,T,C or G
ggcgtcaaaagannnnntttgagaccttttgatgaccttagaccatgtggtggaattccaggagaaagactttcccccagaggtcctgtcactcctcagcccttctccaaggtattactgagcagaggctgaaaagagttgtgttttggaaagagtggtcacagatcccacaggctggaagaaatgtgtctaccctcccaccccccactcccaccatggactggctagggaagacagaatctcattcctggtcctaggggctgccccaggagtctaatccaaccacttcacttcctcaggaggctggacctgcccctgcggggctgtgggctgaacacagggttcaggctaggtaccccatccagtgggaccccaaatctgagcatggcagctgccccctgagctcctatgaggtggagacgtcacacagtggctgagcgtaagctcaaggg

SEQ ID NO: 28749 - DNA, 481 bp, Homo sapiens
  misc_feature (1)...(481): n = A,T,C or G
atttgagaccccttnncctcgtagaccactatccgtgtggtggaattcggatcctatgacccatgatgggacccatgatggtgttagtgcccttctaacaagagaccccagaacttcatctctctctctctctacaccacgtgaagacacagtgagaagatgaccctctctccaagccaggaagagacctcccgaggagcccagccagccagcacgctgacctccaacgtccagcctctggaaatgtgagaggccaacgtctgcgttgggagccacgtggtcccgtgggatctggcctggcgctaaagccgtggggataccgaaggctgcgctcctgccccgcaccaggatgtgggaactttgagaaccgctggagagtcgagagatgtcatcgaaacgacacccgatacgtgttccctgagcatccgttttgagtgaagacactcgtactgttgacgcctgctgcggtaagcggagacag

SEQ ID NO: 28750 - DNA, 435 bp, Homo sapiens
  misc_feature (1)...(435): n = A,T,C or G
nttgtacgaccctttttgagtgcggtggaattcccaggatgtcaaagctcagaaggtgtggtgccggttcttgccggaggggtgccagcccctggtgtcctcagctgtggatcgcagagctccagcgggcaggcgtacgtttctcacagacctgggtgggggcctgctgcaggtggaaatggttaccctgcaggaagaggatgctggcgagtatggctgcatggtggatggggccagggggccccagattttgcacagagtctctctgaacatactgcccccagaggaagaagaagagacccataagattggcagtctggctgagaacgcattctcagaccctgcaggcagtgccaaccctttggaacccagccaggatgagaagagcatccccttgatctggggtgctgtgctcctggtaggtctgctggtggc

SEQ ID NO: 28751 - DNA, 469 bp, Homo sapiens
  misc_feature (1)...(469): n = A,T,C or G
ggggtggcngncgccnnnaactgaatcgatgcatgngcgnggacnncggactagactctctgaccccggccttgccacctctagcagagagctcagacagcgaggaggatgagaagccacaccaagccacgataaagaaaagcaagaaagaaagggagttggagaagcagaaggcagagaaggaactgtcccgcattgaggaggcgctgatggatcctgggcggcagccagagtccgcggatgattttgaccgactggtgctgagctcccccaacagctccattctgtggctgcagtacatggctttccacctgcaggccacggagatcgagaaggcccgtgccgtggctgagagggcccttaagaccatctccttcagagaggagcaggagaagctgaacgtgtgggtggctctgctgaacctggagaacatgtacggctctcaggagtccctgaccaaggtctttga

SEQ ID NO: 28752 - DNA, 459 bp, Homo sapiens
  misc_feature (1)...(459): n = A,T,C or G
nttagannccttagtagacactagtccatgcggtggaattcccggctcgagataagggttccgatgttagctctaaataaatctcattgttttctgcagagacaccctccatttgaaattcgttgaagaaggtctcctgttccagctcacaccacatgctcactcctccattagccagcttgtcacaaaggatgaagttaagcttatcagggctgatgcggagggtgcaggttttggcaagcttggctatcatgttactgattccgcgcgctcactgcttccttccgttcctccctcgctcctctccggcctccctgctcacgtgtgaagtggttcagacaggccccgtccacgatcttggcccgaaacttcggcctgatcaccctangctcatgaatgagcgcagtggccatggggaagggcgcaacgggaaccgagaccctggggactgattgggct

SEQ ID NO: 28753 - DNA, 458 bp, Homo sapiens
  misc_feature (1)...(458): n = A,T,C or G
caggggnnnnnnnnnngtttcgagatcactatccgtgttgtggaactcccgcctgcgccccaacactggcttagagacctatagacacagggtagagtgaacaggagagggtcacgtggtcccatgatgcaacagccccaacatcacgcatgtcattcattgacttgccactccatcttcctcctggctctagccaaccctgagctgaagctgccattgactgcatcagaacctgcatgtgtatgtcggcctcccctggtccggtgtttgtgttccccacccctcacagactgcctgagctcttctgtaagctggggtagggtgatggcagtgctccgggaactgggcctgcagccttcctcttctgggactgctgtgaggcagaggaatgatggagaatctagtgtagcagcctccaggcaaggatcagcacaacactggggagtcacccttccctc

SEQ ID NO: 28754 - DNA, 448 bp, Homo sapiens
  misc_feature (1)...(448): n = A,T,C or G
nggggacgatccccttgnnnnncatgatgacctttataccagctggtggaattccctgtacctccctatacacacacacgctgtccttacactggcttacctgcctatacacacacacacacgcacacgctgtcctgtacctccctacacacacacacatgctgtccttacactggcttcctgtccttctcaccccttttcaggaacctccgcaggctggacatctcggacctccctgccgtgtccaaccctggcctcactcaaatattggtggaggagatgctgcccaattgcgaggttgtgggagtcgactgggctgagggcctgaagtcagggccggaggagcagcctcgggacacagccagccctgtccctgcctagcctttagccctgtccccactcacgtggcttctcagcgggctgcatggaatgtctggtagctcaccac

SEQ ID NO: 28755 - DNA, 474 bp, Homo sapiens
  misc_feature (1)...(474): n = A,T,C or G
ggtnccggnnnnnnnnnaactgagaccatttgaagccgttggaannngcggaaagngccatccgcggtgaagcactgcctcagctaccagcagcttctccgggagcatctctggatcggggattcagaggcaggggcgctcgaccccgcgcagatgggaattaatgtggtggactccgcagtatccggattaggtggctgcccttatgcaaaaggtgcttctgggaatgtacccactgaggatttgatatatatgcttaatggcctggggctcaatacaggtgtgaatctatacaaagtgatggaagctggtgactttatttgcgaagctgtgaataaaaccacaaactctaaagtagcacaagcctccttcaatgcttgacttgaatggatttatgacgtaccgttgagaagatcaatttcagctacaatactcatctgaaaatcattaatgccaacttgctctgatatgtga

SEQ ID NO: 28756 - DNA, 478 bp, Homo sapiens
  misc_feature (1)...(478): n = A,T,C or G
cagggcagnnngnccnnnnattgagnncactgagancctccgcagngncgnggaattcagtggagttaacagttgcagggggcggagccttatgaagggagcatttttttgggctcagctgttcttagagggtggggcttgcaggggatggggtttcagggagtacctgggccttcttgggtgggcatttgggacctgaccaaccctgtgccccagggattgagccatgtacccagaaagggcaatgcccaccgccccctggcctcccctgcccctgcaccggcgtcagtgactgctctgggggaactgacaagaaactgcgcaactgcagccgcctggcctgcctagcaggcgagctccgttgcacgctgagcgatgactgcattccactcacgtggcgctgcgacggccacccagactgtcccgactccagcgacgagctcggctgtggaaccaatgagatcctcccggaagggga

SEQ ID NO: 28757 - DNA, 482 bp, Homo sapiens
  misc_feature (1)...(482): n = A,T,C or G
tggagccccggcccnncctcgagaatagattnccgtgtggaggaatccgagagagcaagcaggcagcaggctgccggcgggcgggcggacggcacagagggagggagcgagcgagcagtgagtaagccagcaagggcggtcgggtcccgaggtcagccgagatttctcaggtccctccggccccctccctggagtccacagcgcctccggtgtccagaggatcggacacggcccggcccggccatggcctcgttgctgaaggtggatcaggaagtgaagctcaaggttgattctttcagggagcggatcacaagtgaggcagaagacttggtggcaaattttttcccaaagaagttattagaacttgatagttttctgaaggaaccaatcttaaacatccatgacctaactcagatccactctgacatgaatctcccagtccctgaccccattcttctcaccaatagccatgatggactgga

SEQ ID NO: 28758 - DNA, 433 bp, Homo sapiens
gttacagagctgggtgctgccggtcaccttgagctgtggtggctcccggcacacgaatgtccggcgttcggccatgtgctcacgcgggcaggggtgggagccctcacaggcaagggggctgtgggatttccattttatgtggatttctaagcgctccttatgtgaatttcagacacgtatggaattcattccgcatggactctgggatcaaaggctcttttctcttttgtatgagagatggctgccttaaagcttaatgcatgcatctattttaaaataaatttttctgtctggggcacactagaaaaggaggtagcccgtgtgccctactgcaccgactactccactcctgtcttggagaggctttcccgtgggcccagcaacccccttacctttggcacttgccctgattctctggccagcttcctacaac

SEQ ID NO: 28759 - DNA, 482 bp, Homo sapiens
  misc_feature (1)...(482): n = A,T,C or G
gagtncacggnnnnnnnnnnaactggaaaccacctggaagngcgtnggaannntcgggnnagcagancactccaagcttggctggagctgtggtggtaaggagggtaatagataagcttcctcaccctcaaccccaccccttccttcctggagttgccagccctgactttagatccctcccacactggaccttcaaaaccctcagggcagagagcagccctacactccctacaccacacccatactcagcccctgcaggcaaggagagaacaggtcaggttcccgagagctcaggtgagtgacacgttgaaatggcccagggcaccttcaccctgctcagcttgtggctccaacattctagaagccgaggcctctgccatccctgccctttcccatggatattccatttcaattagacaacccagcctggccggaatccccctgcgttccttcttttcctttgtgtatttttgagacggagg

SEQ ID NO: 28760 - DNA, 474 bp, Homo sapiens
  misc_feature (1)...(474): n = A,T,C or G
agcnacgngnnncnnaatgagaccacctagacccctcgcagngtcgnggaantctaccatagttctttacgaacagagttcctggtcacctttgggaccatgtttttgcaaacttttatacacaccagccactatttgaagtgttttatgcttattatcatttattccttacaacaaccctatgaggtaggtactattattcccattttaaagatgtgaaaattctatacagagaggttaagtaacttgcatcaagtcagagagttaataaatgagggagctgattaaaattcaggcgcctggtacccaagttcctgttcttaaccactacactctagcagcctctaagtttagccctgcaaccagagttcctccagggaaggaacgcttcaggtcatggagaagttcaaggggaaaatatccaaatggctctgtctccaaatggggagatcctaagggccagagaaggtgagg

SEQ ID NO: 28761 - DNA, 459 bp, Homo sapiens
  misc_feature (1)...(459): n = A,T,C or G
atgagaactagccctggngaatctgcacttaacctcccaagtgctgggattataggcgtgagccaccgcacccagcctattttctgtattcttaatgcactggccttgggcgtcttgatcctggagagatcacccctccagagcccacaggtgcctccttctcacagtcacacaaagccagggtccctgccctcagtcaccccagggcgaggtcctggccgaccaagggctgccgagcccacggcccagggaaggcgctacaactccaatcccgtactgatctcacctggcagcgtccaccctgcctcatttgcccttcccgcagagcccccatgaactggggctccctccactccgcggccctgtgtgctgcgcccccttctcttgggaaatgcaatggatcttctttgcacgaagttgtcttcacgtctgccaccttaccgcacctgactaaaacta

SEQ ID NO: 28762 - DNA, 449 bp, Homo sapiens
  misc_feature (1)...(449): n = A,T,C or G
ggggccggnnnnnaaactgaatcngatctctagaccagcggnggaattcgtgatttggttgtacaactatcttgagaggtgggagggtgtatacattatagaatttccaagctagaagtgatcattaaggaatattgttattcccttaggactgtgaccaagtcagaaacttgagactgttttagtatagatgtaggcagtataatttaagtcttatagtaaccataatgaaaacacatacattttccttcttaatactttaaacttttaattatgatataatttcaggctcaatgaaaaactgcaagaatagcattctgtacatattctacatgttacacacattctagtgacgagtctagagaaaattcagtgaaaaattcctctaaacttttcactgagattccccagtgttaacattttaccttatttttttattggtgtctgtg

SEQ ID NO: 28763 - DNA, 471 bp, Homo sapiens
  misc_feature (1)...(471): n = A,T,C or G
natcgagacctctaacgaccgtgcnggaattcgatttttttctactgggattttccaagcagactgaatcctgataataccaccaatctagattctaccagttctagaagaattgaatattccttgctaattaccgctgcttttcctttatggaaaaaggaaagttttcttttatagttttttcccctgtttatcattgtttgccttattaatggccttttaaatctaggttctacagggtatttattcttgaagctggggctacactgtattattgatggaacattcccatgtgaattctaatactcccagaaggtactgcacaacaaatcctatttctgccaagatataaatagaagatttagaactatataagagggatggacagtttttgacattcaccactgcttctcaagagtgcataaaatataatagatgtacaaggaaatgcattttctgcctccaccccct

SEQ ID NO: 28764 - DNA, 476 bp, Homo sapiens
  misc_feature (1)...(476): n = A,T,C or G
agtnccgnnnnnnnnnnactcgagaccaatcgatagcccctnggaanncgcaaactggagagcacactacagggaccccattgcgctgccgtcaacgccgtggcctggtgctactccgggagccacatggtgagcgtggaccagggcaggaaggttgtgctctggcagtagggccacgacctgcctgcctgggctggagctcttgcccgaagcctgaagcttccttcggcgccatgcaggggttggggttgggactggagctggccttgggatttaatggggaagaaggcctggcaggacctggcctgtttgtttaaaaatgaagtatgggttgggggattacgctagtttttctttgtatttttatctctatctatctcctcactttttctcccaaagtagaaaaaaatgatatctgannaaaaaaaaaaaaaaaaaaaaaaaaaaaaaaaanctggggggccggtgaggtgtgg

SEQ ID NO: 28765 - DNA, 469 bp, Homo sapiens
  misc_feature (1)...(469): n = A,T,C or G
naagagctaccgagaccatcgcagnggcaggaattccaggtcctcggaccccgcccagccctggtatctgcctccggaggagggctccgtccagtgactccaaggatcccttggtctctggcccccctgacagcatggctgcctcgccctccccaaagaaagatgtgctgagtctctccggtttatcctctgacccagcagacctggacccctgagtcctgccccactttcccactcacctttctccactgggtgccaagtcctagctcctcctcctgggctatattcctgacaaaagtttcatatagacaccaaggaggcggaggcgctcctccctgcctcagtggctctgggtacctgcaagcagaacttccaaagagagttaaaagcagcagccccggcaactctggctccaggcagaaggagaggcccggtgcagctgaggttcccgacaccagaagctgttggg

SEQ ID NO: 28766 - DNA, 568 bp, Homo sapiens
  misc_feature (1)...(568): n = A,T,C or G
tggtnttgccncgcgtccccnnaattgatnaccacattcgaggactcgtccgcgcggtgcaattcctgctcacagctgcccagctgaaagccaagggggagctgagctttgaacaggaccagctggtggctgggggtcagctgggcgagctgcacaacgggacacagtatcgtgaggtccgccagttctgctcgggctctggccaccaccttgtgcgcttctacttcctcactcgtgtttactccgagtaccttgaggatgttctggaagagctgacatatggacctgccccggacctggtgatcatcaactcctgcctctgggatctctccagatatggtcgctgctcaatggagagctaccgggagaacctggagcgggtgtttgtgcgcatggaccaagtattgccagactcctgcctgctggtgtggaacatggcgatgcccctcggggaacgtatcactgggggtttcctcctgccagagctccagcccctggcaggctccctgcggcgggatggtggtgaagggaacttctacagtgctacgctggccggngaccactgctt

SEQ ID NO: 28767 - DNA, 452 bp, Homo sapiens
  misc_feature (1)...(452): n = A,T,C or G
attcgagaccattgaagaccntgaggaannncggggaaancnaggacgatcagccaggtcatgtttgaaattctctgaggagaatttggaagagaaagaggacgaaacagcattctggttttgttgttttaaccagggacatttttcttcctactttttaatcattgaaattagatttaagcgatcagaaaataagcctttagacctgcgccaggttgtcctcaggtctgtgcccctcccggacctttctgcagagatgaagcaggtgcccggacaaggtggtgagcacagctgggtcccagtgccagccactgagggtgggcatgagatgcgcaggcagcctcgtggcaggctctgcaagtcggctggagaacacgccacacgtaaacaaaagacatgtatgaaaaaccacacaggagccaggacgtgtgacaagttctgaacagtagcag

SEQ ID NO: 28768 - DNA, 434 bp, Homo sapiens
  misc_feature (1)...(434): n = A,T,C or G
tccttagaactttgagaccctcggaaaaacnagcagggctgccagggatattcctgtgatgagggatgtggcgacatcagcggtatggcattctttggccatgngtcactctgcacacttgaaacgtggccaatgcaatggaggaactcanttaatttgattttaatttaaacagccccacgtgggccgggcatggtggctcatgcctgtaatcccagcactttgggaggctgagaagggtggatcacttgaggtcaggaatttgagaccaacctggctaacacagcaaaactccatttctacttaaaatacaaaaattagctgggcatggtggcgcacgtctgaaatcccatctgctcgggaggctgaggcaggagaattgcttgaactcgggaggtggaagttgcagtaagccgagatcgcaccactgcact

SEQ ID NO: 28769 - DNA, 447 bp, Homo sapiens
  misc_feature (1)...(447): n = A,T,C or G
nttcgacgacccttagnctgggtggccgtattccaggcatgagctaccgcacctggccaccagttgtatctttttgcattccccagctcagaccccttccccactggaaggctgccatggtctttctgctctataccctttcctggttcctcttctccctccctctccagctgctttctggagcctgtcagagttgcagtgaggacaggaaggagaatgaaggcacaggacatttcttaattggctgggtggctttacgtcctctgaacctggcaggtggttggagctggtgtctttgggtgggtctgggaggtgatgcaagtgaacttttttttattctgaggtggtttctggcatttgaaatttccttgctggacttgttgcttttatagtttcttttcctaggaagctgcatctctgctgtgggtagtcatatgggacagcttc

SEQ ID NO: 28770 - DNA, 454 bp, Homo sapiens
  misc_feature (1)...(454): n = A,T,C or G
ntttgtagaccattagaccagcgtgtnggaagtccagcgacacaggcctcgaggctgtctctgacaagtgttcacaggaggtggggacgcctctgcgcgaggaacgaggagctacgggcctgggcccggttattgccatgggcagcggctgccgcatcgaatgcatattcttcagcgagttccaccccacgctgggacccaagatcacctatcaggtccctgaagacttcatctcccgagagctgtttgacacagtccaagtgtacatcatcaccaagccagagctgcagaacaagcttatcactgtcacagctatggaaaagaagctgatcggctgtcctgtgtgcatcgaacacaagaagtacagccgcaatgctctcctcttcaacctgggcttcgtgtgtgatgcccaggccaagacctgcgccctcgagcccattgttaaaaagctggc

SEQ ID NO: 28771 - DNA, 454 bp, Homo sapiens
  misc_feature (1)...(454): n = A,T,C or G
nttcgagcccattagatgaccatctggacangcggaggaattccgccagctcacctgaaaacctgcgagacagggcctgtgcacgagtccaggactcctacttcgccaagtctcagggacccatccccgagcaacggtggcggcgcanagaagagcacggcgccggcgcaggtgcagagagacaggaggctgatggggggaagttgaggcacctggggcagagaaaaaaatgcattgccaagaggtttctgggtcatctactgacgaaaatgtcttcccatcagcccttgcgctggtccccagggaccctggcatccgtcgttggcgcccagggtgcgcgtcgggccactaggggtaccccaactcggacagaaggcccatgagttgaatttgaagtttgtgggaatagaggtgaggcaccaggggcagaaaaaaaacaggagacctcgcctca

SEQ ID NO: 28772 - DNA, 452 bp, Homo sapiens
  misc_feature (1)...(452): n = A,T,C or G
ntttgaagaccactagtagaccgtgnggaattcgggagatattctttgtcttttgcttgcattttctagatccacacctggatactgctcatgttgacgagacagcagcagggggagagggagggaaggaaggtgcggctgcaagaaggaaggcacgggacaggcatgtgacactaggccacaagcgataagcacaggcacctgacttttaagtttttgtttgtttgttggttcccaaagtgctgataacaataacaacaacaataggattccaaccaggagcctcaagtgacagccaggaagagacctgaaggttggggccaccacaatgccaaatcgtttctaaaggaagctgaaaaatgggactgtcttttgcccacttcgttgtgttaaaaggggacatttgtccaaactccccaaccgagttctagaagctcctgacaaggaggcag

SEQ ID NO: 28773 - DNA, 452 bp, Homo sapiens
  misc_feature (1)...(452): n = A,T,C or G
ntcgagaccattgatgaccatctgaacangcggnggaattcgtggagagagccccgagcaggagtgcatctccctcgccccctgagtttctcgtggtggaggagcgaccgagtggccctggtggtggcgggaagcagagagcagatgagaaggagccatcaggaccttatgaaagcgacgaagacaagagtgattacaatctggtggtggacgaggaccaaccctcagagccccccagcccggctaccaccccctgcggaaaggtacccatctgcattcctgcccgtcgggacctggtggacagtccagcctccttggcctctagccttggctcaccgctgcctagagccaaggagctcatcctgaatgaccttcccgccagcactcctgcctccaaatcctgtgactcctccccgccccaggacgcttccacccccgggcccagctcggcn

SEQ ID NO: 28774 - DNA, 552 bp, Homo sapiens
  misc_feature (1)...(552): n = A,T,C or G
ggcnccgcnnaatcgaagcactatattgtgtggtcgaattcgcagnggcgcgatcatagctcactgcaaactccaactcccaggttcaagcgatcctcccgcctcagcctcccgaatagctgggaccacaggcgcgcaccactacgaccggctaatttttttttcacttttttgtagggacaaagtctcactatgttgcccaggctgatctccagctcccgggctcaagcgatcctcccgcctcggcttcccagagtgctgggattacaggcgttagtcaccgcgcctggccaagcccagcctttttctaaaactgagtttgcttgggtcgatcgaggtttatgaaagctctgtcaccagtcagcgtctcaaaatggggttggcagaatccctgctattgagtagctggagagctacacgctaatcctagctctgcccttcctgtctgagggatctttggcagtcatttaaaacccaccccngcctcaattttttgtggtggtgttactttttatagaacgcttcacgtatttgcgtgcatcctttccatan

SEQ ID NO: 28775 - DNA, 565 bp, Homo sapiens
  misc_feature (1)...(565): n = A,T,C or G
cgggttacccnngggcccccnnnaatcggaccactnnatcgaagcacagtccagngnggnggaattcgacggngcgcaccaggcttattaagggagatggcgaggtcctagaggaaatcgtaaccaaagaacgacacagagagatcaacaagcaagccacccgaggggactgcctggccttccagatgcgagctgggttgcttccctgagggcccccgctggccaaggcctgtggacgacgctggcggcccagcctgggcaggtttcagggtgccagtgggaagcctgatgggtgctggtggcctttcccccgtggattggtctctggcccagcccagtctcttctcaagggcagggggtggaggttggggtcaccggcctgcttggcacccccatctgaaagagcagcacttctcagctattaaaggccccctgggtngaannnnnnnnnnnnnnnnnnnnnnnnnnnnnnnnnannnnnnnnnnnnnngggggcccgtaaattaaaaaggcgcttaaaaaccccgataaccccctggtgtgctttaaaggcccaccattttgg

SEQ ID NO: 28776 - DNA, 546 bp, Homo sapiens
  misc_feature (1)...(546): n = A,T,C or G
nttcgaacatccgtaccactagtccagagtggggaattcctgtgggatgagtccagcttccctgacatcccaggggctgtaagtgccaacatgactgtgaagggccagagtgaagaccctggctccctcctttccttgttccggcggctgagtgaccagcggagtaaggagcgctccctactgcatggggacttccacgcgttctccgctgggcctggactcttctcctatatccgccactgggaccagaatgagcgttttctggtagtgcttaactttggggatgtgggcctctcggctggactgcaggcctccgacctgcctgccagcgccagcctgccagccaaggctgacctcctgctcagcacccagccaggccgtgaggagggctcccctcttgagctggaacgcctgaaactggagcctcacgaagggctgctgctccgcttcccctacgcggcctgacttcagcctgacatggacccactacccttctcctttccttcccaggccgttggcttctgattttctctttttataacaaan

SEQ ID NO: 28777 - DNA, 445 bp, Homo sapiens
  misc_feature (1)...(445): n = A,T,C or G
nttcgagaccatagaaagcgtgaggaantccgngattgtgccattgcatttgagcctgggtggcagagcaagaccctgtctcaatcaaacaaattcttgatagcggngttgaaacctctgactgtaattgcagatttgtctgtaatttttccttgcagctctatcagcttttgcttcatgtgttttgagactctgtgctcacatcgtgcatgctcctgactggttgacccctgtgtcatcatgaaatgaccctctttatccctagactctgacttgaaattgactcctgctttcctttgattagcttagcatgggatatcttcttttaccttgttactttttacctagtgtgtcttatacttaaattagcttcattggagatttccataagatcaaagtatctgctttgacatatttattaacctaaaaaagtaataacagcttt

SEQ ID NO: 28778 - DNA, 454 bp, Homo sapiens
  misc_feature (1)...(454): n = A,T,C or G
nattgaagaccattagatgacccttaggaagtgcggnggaattcagaaagtaaaagaaaacaaattcatggggccaggaaactatagccctcaggccaaattcattcagccagtacctattgaggctcagaaactttcaagctaagaatagtttttactttttttttatgagacaggatcttaactctgttgcctagcctggagtgcagtggcacaatcacagctcactgcagcctcaacctcccaggctcaggcgagcctcccagctcggcctcctgagtagctgggaacacaggcatgtgccagtgcgcccggctaatttgtatttttagtagagacagggttttgccatgttgtccaggctggtctcaaactcttaggctcaagtgatcctcccaccatggactcccacaagtgctggaattacaggtgtgagccaccgcacctggccgan

SEQ ID NO: 28779 - DNA, 449 bp, Homo sapiens
  misc_feature (1)...(449): n = A,T,C or G
nttgaagacattagtagaccttaggccangcggnggaattccatggaggcccaggagtttggcatcttagacaaggttctggtccaccctccccaggacggtgaggatgagcccacgctggtgcagaaggagcctgtagaagcagcgccggcagcagaacctgtcccagctagcacctgagagctgggcctcctctccagaatcatgtggaggggccagaggcctgccagacccccagctgggccctgctcaccccttgttgctgggcttggaggggcctcttgaggaacttttaatttgcaggggtgcccgctatggacggggcattccagctgagacactgtgattttaaattaaatctttgtggtctttgctctgcgtctgggacaccctcccttctgcaccatgacagcgtgtacacatctgtgtttcacaggccccttctgctt

SEQ ID NO: 28780 - DNA, 446 bp, Homo sapiens
  misc_feature (1)...(446): n = A,T,C or G
nttggagaccatagaaagcgttaggaantcgccccaggccggaagggcagcatccaggaccggcctctgcccccacccccaccccttctgcctggttatggaggccccaaggtcgagggggatccagagggcagggagatggaggatgacccagcaggacaccacaatgagtacgagggcattccgatggccgaggagtatgactatgtccacctgaagatcagcactgcactgttagctgagagtgcgggcaagacataaactgtccagagtttgaaggttctcggaaagaccggagggcttctccccacagaaggcggagagagctggggctcagacatgggtgtgcaccttaataaaccctgctgtctgcctccctgactctgcttcttgggagcatggtgagcagccctggtgctcagcagccatacctatgggacacacac

SEQ ID NO: 28781 - DNA, 552 bp, Homo sapiens
  misc_feature (1)...(552): n = A,T,C or G
nttttgaaaactggatccccnatcccgagnggngcaattcgagcctgaagcanaactaatctctggagctaaaaataggagtgggcctggcgcggtggctcacacctgtaatcccagcactttangaggccgaggtgggcggattgcctgagctcangacttcgagaccagcctgggcaacacggtgaaaccccgtctctactaaaatacaaaaaactagccgggcgtggtggcgcgcgcctgtagtcccagctactcgagaggctaaggcaggagaattacttgaacccgggaggcgaaagtgcagtgagccaagatcgctccactgcactccagcatgggcaacagagcacgactccgtcttaataatagtaataataagaagaagaagaagaagaagaagaggagtggctgcctatgccggagttgttgactggaacaagaggaggaaccttctgggctgctggaatgttctatgcctggatttgngtagtagttacatgggagcacgcataagtaaacattcttcanactgtcttcttaagatgagtg

SEQ ID NO: 28782 - DNA, 448 bp, Homo sapiens
  misc_feature (1)...(448): n = A,T,C or G
nttcgagacactagaacagcgcggnggaattcctgaggccaggagttcgagacctgcctggccaacatggcaacaccccgtctctaataaaaatataaaaattagcctggcatggtagcatgcgcctatagtcccagctgctcaggaggctgaggcatgagaatcgcttgaacctaggaggtggaggttgcattcaactgagatcataccacttcattccagcctgggtgacagagcaagactctgtctcaaaaaaaaaaaaaaggaaacctctgggagggacttttgttaaaaaaacccctcaagaattaatccctcctttccccacagaagttttttttcttgtaaactaaaagggagcgggaggaaaaaaatccttttgggggggactaggccaccccacctttaaatcatctcccatttcctttaaacattaaaattccagggg

SEQ ID NO: 28783 - DNA, 442 bp, Homo sapiens
  misc_feature (1)...(442): n = A,T,C or G
nttcgatggacgtcacttagaccangcggtggaattccccgttattggggtatgtgaggagcagtaaatataaaaccagttcaactgtcctcatggaatcaccctttctgtttttgcagtattcataaagctagtgtaaggtctggttttagtctattaaatcttagagatctaaaggaaatgctcaaaatgtagccaggttttaaatgctttaacttttaaaaaatgtaaatttttgtatgtttatagcttctaaatatgaaagttaaagaatgtactgtgatgaaatgttcagtattatgttgcttctcagtatcatgttgcttctcagtattgtgttgcttctgattctatgaatgttcattttaagaccccttgttgaaatgggacagttggcagcggctctgatgagcccgagaagaggcctgcccttgggtgcgga

SEQ ID NO: 28784 - DNA, 442 bp, Homo sapiens
  misc_feature (1)...(442): n = A,T,C or G
ntttgattgcgctcgaccagnccggngcaattacaggcaggagatgctgcaggcaggtgtacgtagttggcaaaaatgggcagaaggtgaaatggagatgcttcaacctttctcagtcccggccctcactgtacccaccaagtcaagcagagctgggtgggctgagaccaacatcccagctggactgagcctggggggaggggctggagccaaggagcccccctgggtgggggcatcaggagcaggggcagggcctgaggactgctccccctgcatggagggcaggccaggatggagcccagggtatactttgaggaaggctcagtgggctcagcagaaggaaggctcttctcataggtgtggtttttcacagatggatttgggtgatctgagtgtggccaggccctgccgctggggaatgaatgccacactggggttgttg

SEQ ID NO: 28785 - DNA, 551 bp, Homo sapiens
  misc_feature (1)...(551): n = A,T,C or G
nctcgaacatagtcagccggtggcaanncgganaacaagaagatgtcccagccagggtcaccctccccaaaaactcctacaccctccactccaggggacacgcagcccaacactcctgcacctgtcccacctgctgaagatgggataaaaatagaggaaaatagcctcaaagaagaagagagcatagaaggagaaaaggaggttaaatctacagcccctgagactgccattgagtgtacacaggcccctgcccctgcctcagaggatgaaaaggtcgttgttgaaccccctgagggagaggagaaagtggaaaaggcagaggtgaaggagagaacagaggaacctatggagacagagcccaaaggtgctgctgatgtaaagaaggtggaggaaaagtcagcaatagatctgacccctattgtggtngaagacanagaagagaagaaagangaagaagagannnangaggtgatgcttcagaatggagagacccccagcgacctgaatgatgagaaacagaagaaaaatattanacancgtttcatgttaan

SEQ ID NO: 28786 - DNA, 462 bp, Homo sapiens
  misc_feature (1)...(462): n = A,T,C or G
nagacggtnnncnncaatgaggaccatcgangatctgnggaaanncnagcagcagcctctgaggtgtccctggccagtgtccttccacctgtccacaagcatggggaacatcttcgccaacctcttaaagggcctttttgggaaaaaagaaatgcgcatcctcatggtgggcctggatgctgcagggaagaccacgatcctctacaagcttaagctgggtgagatcgtgaccaccattcccaccataggcttcaacgtggaaaccgtggagtacaagaacatcagcttcactgtgtgggacgtgggtggccaggacaagatccggcccctgtggcgccactacttccagaacacacaaggcctgatcttcgtggtggacagcaatgacagagagcgtgtgaacgaggcccgtgaggagctcatgaggatgctggccgaggacgagctccgggatgctgtcct

SEQ ID NO: 28787 - DNA, 434 bp, Homo sapiens
ttgatgcctcgccaggcgggaattccggggcgccgcctcttccacgtggctttgcagcctccggcctggccccctctgcgggctccgtgaccacaggagggggcccctgatgtgaccatttctgtatctgggaggtttctcttcttatttgtgtcgttcatatctggattccattttcaagtttacaataaatgtttgggcttggctagcccgactgcacttttcttggcaagtccaaaccctggggctgctctgcctggtggtccgaggcgagggggacagagcgagcgccccaggacggcgacttcccacggaggaagagcagacagagacgcagagcagctggtaattcagaaagaagaagtgagaacacccaacagcaacactttgtacacggatgtgcctgcttttgttgatactttcttactgtaaag

SEQ ID NO: 28788 - DNA, 481 bp, Homo sapiens
  misc_feature (1)...(481): n = A,T,C or G
agaatgtaactcgagttcgtatccagtgtggtggaattcgccagatcagaaaagggagctcaggtaccttccagagagtgagacccagcgcccttgtctcgcacccagtatgctttcatccccgccatggcggagctgatccagaagaagctacagggagaagtggagaaatatcaacagctacagaaggacttaagtaaatccatgtcggggaggcagaaacttgaagcacaactaacagaaaataatatcgtgaaagaggaactggccctgctggatgggtccaacgtggtctttaaacttctgggtccggtgctagtcaaacaggagctgggggaggctcgcgccacagtagggaagaggctggactatatcacagctgaaattaagcgatacgaatcccagcttcgggatcttgagcggcagtcagagcaacagagggagacccttgctcagctgcagcaggagttccagcgggccn

SEQ ID NO: 28789 - DNA, 453 bp, Homo sapiens
  misc_feature (1)...(453): n = A,T,C or G
attgaacactgangaccttcgacagngcggtggaattccttccgcagaacaagcactgggaatttgtctttgtcttttttgtttataatatcaagaacaaaatactcatttggactgagtttgtaagtaagcaatgcgttctctccaacatccgcatcagatgcgccttctagtggaaatcgagagtcaagcagtctggattcaggtattgagagcttttgttctgttacggagaacctgggcgggttgtcgttaatgtccttcacttccacgtccacatggaaaacctgcagcggcctgtccacgatcacctccaggtggatgctgcactccacgctccgcccgcacagctcctcgcggtcaatccgagaattcacaaacaaaatgccattctgcagatttacctccagaaggtccccgtgtcttttggacgccacccggaacaggcgctgc

SEQ ID NO: 28790 - DNA, 464 bp, Homo sapiens
  misc_feature (1)...(464): n = A,T,C or G
agcagggcnnnnnaaatgagactgaagacatngcganggacnncggcccggccgggccgggcagtctgggacgcgccgccgccatgatcatccctgttcgctgcttcacttgtggcaagatcgtcggcaacaagtgggaggcttacctggggctgctgcaggccgagtacaccgagggggacgcgctggatgccctgggcctgaagcgctactgctgccgccggatgctgctggcccacgtggacctgatcgagaagctgctcaattatgcacccctggagaagtgaccacgctggaacccacccacccgctgtgctgaccatgggccctgagcgtcctaccccgaattcacgaggctgaggcatccgggagctggcgtaatgcctggccgcagtgtgtgtgtatcccataccccactctggaaggaaccatccagtaaaggtctttcagaaccaaaaaaaaaa

SEQ ID NO: 28791 - DNA, 546 bp, Homo sapiens
  misc_feature (1)...(546): n = A,T,C or G
nttcggaccatagaccagctgtgggaattccatcctagggttagagagtcaacgatgtcctctctgttccatcaaggtgacaactgtgtggggcacacgaattatcaacttctgtccaaatgtgagcttgttagcatcttcggctaacaaggcagtggcagccagggccttgaaacagggtggccatcccatagccaccaagtccagttgcttggacaaatacgctacaggccaataccatgactctagtgtttgcactaagactcctgtagccataccttttctttcatgaacatacaagtaaaagggctttgtcatgtctggcagtcctagtgctggggcccaggttaaagctttcttgatttccttgaaagccatgtcctgttcttttccccaaaggaggggctctttntctcccactntggttgcctcatataaaggctttgctaggagcgagtagttaggaatccatatgtggcaanagcagctgcccctaggaantcccacacttgccccttgtgtctggctgaggaatctacagacatn

SEQ ID NO: 28792 - DNA, 550 bp, Homo sapiens
  misc_feature (1)...(550): n = A,T,C or G
ntttgaacacctgatcacagtcgcgagnggngcaattctcctggatcaacgtggctgagggccacacccgaggccgggccaccatccacttggctttcctcctgagtgacaggattctcctggtggccacctgggtgacttatagcccctggctgcccagcaggattccactgcagctgtggctgcctgtaggaggcggatgcttctttctgggcctggctttgtggcttgtgtgctactgctggctgcaccctagctgctgctgggagcccaaccctgaccaggtggacaggacccagagtctactttcctcagaggggtatcagctgcctcagacccagttagcacagaacttttttcccaagggtaaggctgaggctgcttcgccagtgaagggagaggtgaacggcgtcctttgaagcangatcagacccagccagcatagatggagagtgactgctggcagaaggcaggcgaggataagctaacaatgctgctgtggcctccatgcactcagcaagagtgggatgcctctgctgtgccgtgcacn

SEQ ID NO: 28793 - DNA, 443 bp, Homo sapiens
  misc_feature (1)...(443): n = A,T,C or G
nattgattgcattcgtccgngcggnggaattcggagccactgacgacagcaagaccaacctcatcgtcaactacctgccccagaacatgacccaggatgagttcaagagtctcttcggcagcattggcgacatcgagtcctgcaagttggttcgggacaagatcacagggcagagccttggctacgggtttgtgaactattctgaccccaatgatgcagacaaagccatcaacaccctcaacggcctcaaattacagacgaagaccatcaaggtgtcctatgccagacccagttcagcatccatccgggatgctaacctgtacgtcagcgggctccccaagaccatgagccagaaagagatggagcagctcttctcccagtatggccgcatcatcacgtcccgcatcctggtggaccacgtcacaggtgtctctcgggggtgg

SEQ ID NO: 28794 - DNA, 444 bp, Homo sapiens
  misc_feature (1)...(444): n = A,T,C or G
nattgggactgangaccttcgacagngtggtggaattcctgaacccttccagatctcgctgccttcctcggagttggccagcagctgcacagacagctcaggcaccagctcagagggagaggatgacagcacactggagctccttgcacccaagtcccgcagccccagtcctggcaagtccaagcgacaccgcagccgcagcccgggactggccaggttccctgggcttgccctacggccctcatcccgtgaacgccgtggtgccagccgtagcccctcaccccagagccgccgcctgtcccgagtggctcctgacaggagcagtaatggcagcagccggggcagtagtgaagaggggccctctgggttgcctggcccctgggccttcccaccagctgtgcctcgaagcctgggcctgttgcccgccttgcgcctagagactgn

SEQ ID NO: 28795 - DNA, 440 bp, Homo sapiens
  misc_feature (1)...(440): n = A,T,C or G
nactgtgactggagcnttngcggnggcattcggcccggccgggccgggcagtctgggacgcgccgccgccatgatcatccctgttcgctgcttcacttgtggcaagatcgtcggcaacaagtgggaggcttacctggggctgctgcaggccgagtacaccgagggggacgcgctggatgccctgggcctgaagcgctactgctgccgccggatgctgctggcccacgtggacctgatcgagaagctgctcaattatgcacccctggagaagtgaccacgctggaacccacccacccgctgtgctgaccatgggccctgagcgtcctaccccgaattcacgaggctgaggcatccgggagctggcgtaatgcctggccgcagtgtgtgtgtatcccataccccactctggaaggaaccatccagtaaaggtctttcagaac

SEQ ID NO: 28796 - DNA, 448 bp, Homo sapiens
  misc_feature (1)...(448): n = A,T,C or G
ggggaaatgataccatcgaaaaatgatgtcttgcgacaggcgaggngnccctgagttcagatggaggtggaagccagagtggggctgtgaccacccagtgacatgaggatggggcttgggataaagccctggggacactgacatttaaagtgtggacagaaggagctactgaaggcaatggatttagaaaagcaattgagtatgatttccttcttcaagaaaggctgtccaactagctctcacttcctctcgtgtgttcagtgtcacccggaagcagagtttaatgtgactaaagtcaacattggctcacactgtcagggagtgtgggaagatgagtaaggactcatcgcagggcgatacccacagcttaaaataggcaccttcccctcccaggtctggttagggcagttgttacatatgaggggcgtggagttttgtcttgtatttt

SEQ ID NO: 28797 - DNA, 543 bp, Homo sapiens
  misc_feature (1)...(543): n = A,T,C or G
ntttganattcgttcactagtccagagtggtggaattcccagcggcgacatgacggngtacactccggatgagaaactgcggctgcagcagctgcgagagctgagaaggcgatggctgaaggaccaggagctgagccctcgggagccggtgctgcccccacagaagatggggcctatggagaaattctggaataaatttttggagaataaatccccttggaggaaaatggtccatggggtatacaaaaagagtatctttgttttcactcatgtacttgtacctgtctggattattcattattacatgaagtatcatgtttctgaaaaaccatatggcatagttgaaaagaagtccagaatattccctggtgatacaattctggagactggagaagtaattccaccaatgaaagaatttcctgatcaacatcattanagattatgtanaaaggtaanaggcttatgagcctaagnnttgtctatattacatattactgattttctgganagtaacttaataaagttaatctcagaaattgcata

SEQ ID NO: 28798 - DNA, 563 bp, Homo sapiens
  misc_feature (1)...(563): n = A,T,C or G
agagnttannnaagggannnnnaggggnnnnnnnaatcgaaccacagtcggtgtgccgctattcacaccagaatcacctggcanattaaaaatacgtggacctgccaccagagcttgtgatttaatcagagtcggcatcagagttttcaattttttatttatttattattattattattattattattattattgagacaagatcttgctctgtcgcccagactggagtgcagtggtgtgatcacggcttgctgcagcctcgacctccctggttcaggccatcctgccacctcagcctcctgagtagtagggactacaggtaggcaccaccacacccagctaatacttttaatttttttttgtagagatagggtctcattatgttgcctggggtagtctcgaactcctaggctcaagcgatcctcctgcctcggcctcccaaagtgttgagattataggcgtgagccaccgtgcccagattcacagaagagtttcatacacctttcacccaggttcccctaatgttaacagcttacatataaccttggtacatttatcanaan

SEQ ID NO: 28799 - DNA, 442 bp, Homo sapiens
  misc_feature (1)...(442): n = A,T,C or G
cattgatcgacgtcattagnccgngcggtggaattcgcgagaccctgtatgtcactgcagacctcaccctggaggacaaccggcgggtgattgtcatggagaagggaccccttcccagccccactgcagggctggaggagagcagtggccagggaccaagctcaccggtggccctgctggggcaggttcaggacttccagcagtctgcagagtgccagccgaaggaagagggttccagggacccggcagacccgagccagcagggcagagtgagaaaccttagagagaagttccaggccttgaactctgtcggttgatgctgactcctgggggagggaggagtcatgttggaggttggggaagaacctgggcatccttcccctcaagcctgggctcatggagcccctgcccagggccctcaggtgggcggaaagtccatccc

SEQ ID NO: 28800 - DNA, 446 bp, Homo sapiens
aaagatgacccttagacagtgtggccgtattctcttgagaatcataatgtgtatttgtgaaacaacagaatgatttgcaggcagcagatgtaatgcttatgcagagttgctgggaaactgctttattcacacaaggaactgagggacattagagacgagctgtcacctgagagtatcagtcagctcttggagttttcagtaagatttctttccccttatacagcgaatactgttctcctttcctccccgtcgattggtttctcggcatctacttggtatgacacagtaaacaggctctattctctgttttcagcaacatagaaatattgttcagcctgtcctgatggagtacagcaacctgctgattaagggattaacaattttaaaagtattttgtacagtggttcagggaagattagagagggttgagtataattgtgggttgg

SEQ ID NO: 28801 - DNA, 470 bp, Homo sapiens
  misc_feature (1)...(470): n = A,T,C or G
ccccccccggggnagnnngtttgatgacattagaattgaggtcctttataccatgtggtggaattcgacaccaaagcatctcagggtcagaaaggggaaaaagcaattgcagggaatttagggggtagtaaaaggaacccatctcttgccgcataaatgccccccacccccacccaggactgattctggaagcaacctagtgttcgaaagggaaaggctcctacttttccattacagccgcggaaatccgcaggcaaatctccgaggagaattttagggaagcttcattgacagctgtctggagagcagtagttcccgcctgtgcaaatattccagagagttaaatcatttagaaagcactagttctttcaagaacaggtagtgtgattgtctgcagtcctgggccaagctgggaaaacaaaacagcagagagaggtgtaacattaaatagcgtcctgaccacactgcgc

SEQ ID NO: 28802 - DNA, 475 bp, Homo sapiens
  misc_feature (1)...(475): n = A,T,C or G
tgtggaaaatcgactcgtgtnccctagtccgtgtggtggaattccaggagagttgtataaggtcactggagggttctgggaaaccaccggtggccactccttctggaccccactctaacagaacccccagcctccaggaggtgaagattcaagtgagtctgtgtggccaacagctttgatgtctattgaacagtgactgggctgaggaagagggaaaagagatgggggatcaggaataggacagtgtgggtagactactgaacgcacatcttgatgtcacactggggtgctctctcccaccacagcgcatcggtatcctgcaacagctgttgagacaggaagtagaggggctggtagggggccagtgtgtccctcttaatggaggctcttctctggatatggttgaacttcagcccctgctgactgagatttctagaactctgaatgccacagagcataactctgggacttccca

SEQ ID NO: 28803 - DNA, 441 bp, Homo sapiens
  misc_feature (1)...(441): n = A,T,C or G
actgatnacctccgtttgcccttggaaagncnggnggaattcggctttgctgaggatggggatgccaggaagtcttgtccttcattttcagtggtttcggtggnggaccaggtgtgtcaatactaaggactgtgggcagtgtttgtgggcactgatgatagcctgtctgcgtgggccaatccctgggcctccaggtggctcctttggttgctggcagtggcagcactgggccaagtgggcaggtgcaccactgggctcctgggtggtgtgcgtggcaggctgatctctagttctccaggtgacatatgcaggttctggtggtgggtaggcaggcatttcctcaggcctctcagtagtaagtgtgagcactagctctggaggcagatgagtcaatctccaggcccccagatggtacattcaggcaccagcatattcctatgg

SEQ ID NO: 28804 - DNA, 466 bp, Homo sapiens
  misc_feature (1)...(466): n = A,T,C or G
aacagagaaaattcggatnaccttcggactggacggccgttngacgggaactgaagttgcggattaagcctgatcaagatgacaacctcccaaaagcacttagacttcgtggtttagcccatgggggagaagccagtggggagcctggctgggattggtgaagtcctgggcaagaagctggaggaaaggggttttgacaaggcctatgttgtccttggccagtttctggtgctaaagaaagatgaagacctcttccgggaatggctgaaagacacttgtggcgccaacgccaagcagtcccgggactgcttcggatgccttcgagagtggagcgacgccttcttgtgatgctctctgggaagctctcaatccccagccctcatccagagtttgcagccgagtagggactcctcccctgtcctctactaaggaaaagattgctattgacgaactcactctcttctat

SEQ ID NO: 28805 - DNA, 440 bp, Homo sapiens
  misc_feature (1)...(440): n = A,T,C or G
nggggnaattgatgacccttagaccagtttgatggccttcattttatcttcggagctaagatggtgttatttaagggtggtgatgggtgagcgctctggcccaggctgggccagactcccgcccaagcatgaacaggacttgaccatctttccaacccctgtggaagacatttgcaactgacttggggaggacacagattcagcacagcctctcctgcgggccagcccgctgcgaaccctccaccagctaccggagggaggagggaggatgcgctgtggtgttgcttttgccataagcgaactttgtgcctgtcctagaagtgaagactgctcagtccaagaaactgacggtacttgatctatttacaggctaaaatttgtttttttattctttgcacaattcgttcattgtttgacacttaatgcactcgtgatttgca

SEQ ID NO: 28806 - DNA, 470 bp, Homo sapiens
  misc_feature (1)...(470): n = A,T,C or G
gtagtcccccccccaattggaattgaataccttcgtaagnngcgcggaanttttccccagnctctccttgctggcccatcctgctccaactctcccatccacggtgctttttggtgggggggcggagagtagaggagacgactaggggtagggctgccggagcttgtgtttcagtctggctggtccagcagatgcttttggggaagcaagatcccgagaccttcagagtcacctcgcagtgtaacctgtagcctgtagagatgacttctacccggcctccccctcagtgagcagggccttccctttctcctggctggctccaggaaggcagaggtgggggtttccagaagcccctcacccccaccttacattgtttcccttcatctacaggagctcttggagtccaggctgagggtcttgaagaaggaactggaggactgtgaggtgttccggtccacggaaaagaaagg

SEQ ID NO: 28807 - DNA, 452 bp, Homo sapiens
  misc_feature (1)...(452): n = A,T,C or G
atcgagatcatagcaatcgcganggacctccggggtcttcctctagcccatgcagatcagtctgtcctcatgcctgagcgtcccactctggggacaggcagaggggccagtgtgggctgtgggccccagcgcccatatctggaagggggacaaagtgggggcccaccagatgagctgccctcttgcctgcttacaggccccaggatccccccaggctgggctggggccgagcttcagccaagcggggtcagcaggtgctggcgcggctgcgagagggagcagcctgagcccaacagtgggtttgcgtgaacaatgggccgcagcgccccacatcctcgggcccctggctggggacccccgtacaggccaaagccatggccgaggtgatgccaggtgggagcttgttctccaggcgctctcaggccctcccgtgtggcctggctgcctcaggt

SEQ ID NO: 28808 - DNA, 442 bp, Homo sapiens
  misc_feature (1)...(442): n = A,T,C or G
aatcgagacactagacagcgcggnggaattcgatgtatctgccttgtcctgaccagaaccccttccgagaccctgctcagctggcccagcccctgcccctgtgttacctgagaatctccaactggatgtgctccatctggtccagcacgccccagatgtccttcttgaggttctgggggccagaggagcccttcagggtttctcgctctctgctcctcgctggacagaaaagatcctggcagcctcgccctccaccctggatcccctccccactaccctctgcccctgggactgggtaaggtctctgggactgcactgagtgagcagaggagatggggcccaggcagggtcacactacaaatccctggcagtgctagtccaggcatcctccatggctgctggaggctgcggctgggggacactggggttgggcgtggccacc

SEQ ID NO: 28809 - DNA, 459 bp, Homo sapiens
  misc_feature (1)...(459): n = A,T,C or G
taggagacctttcgaagcggggatgatgcctctgcannncanangatacagactctatattgctatatctctgtatatactttcccagccctgtctgtctccaccccatcccctcttgtctctgagaaccattctcccaccccaagttccaccttctatgtttctactccctccctggtctctgaatgccttcgcctgtataaagagttggactctctcccctggtgtctgtactgtgtacacacatccctctgagaagcacaaggagacgacacgcgcattgtaacctttgcactgtctcagtggcgacaaaggaagctgtgaatcacaagctctgcctctttctggcctcaccctctcccccaacccgggcaccctcggccctccctgcagccttaacattctcttcccctgctcctcctatcccattgccctctgcccagctgacagtggcattcg

SEQ ID NO: 28810 - DNA, 454 bp, Homo sapiens
  misc_feature (1)...(454): n = A,T,C or G
atcgagatcatagcactcngcgnggccnncgncaaaaacagggactgggtggaccagttccgggtgaagttcctgggctcagtccaggttccctatcacaagggcaatgacgtcctctgtgctgctatgcaaaagattgccaccacccgccggctcaccgtgcactttaacccgccctccagctgtgtcctggagatcagcgtgcggggtgtgaagataggcgtcaaggccgatgactcccaggaggccaaggggaataaatgtagccactttttccagttaaaaaacatctctttctgcggatatcatccaaagaacaacaagtactttgggttcatcaccaagcaccccgccgaccaccggtttgcctgccacgtctttgtgtctgaagactccaccaaagccctggcagagtccgtggggagagcattccagcagttctacaagcagtttg

SEQ ID NO: 28811 - DNA, 408 bp, Homo sapiens
ctcttctcagaacccaccccctgcctcacaaagaggggtgcccatcatgggcctgccttgtggggctcacaggtgggattctggcccctcagccagatggaggagcctggcccggaacccccaccaccactccacccagactctctccacagggagaaaagacacactggggccccctagcccaggagggcatcacagcactcctcaacggatatttttggaaggctgctgatgtgcctgaggggcttcggaacacacccagctccagagaccgccccagggacccaggccgagaaacagcctcagcagcaaagcccgtggtcaagcccatgtgaactttggaatcagaagactatatgtgtagtgtggccctggcatgtcccaaaacttctcagggaattagtttcc

SEQ ID NO: 28812 - DNA, 475 bp, Homo sapiens
  misc_feature (1)...(475): n = A,T,C or G
tgtagagtnnnggggnaattgannnccttgagaactattagtccgngcggtggaattccctcggactcctgcgagcgcatgaaagacgaatttcagctactgcaagctcagtactcacagcctcaagctcgaatgtgacaagttgggcagtgagaagtcagagatgcagcgtcactatgtgatgtactacgagatgtcctacggcttgaacatcgagatgcacaaaccggctgagatcgtcaaaaggctgaacgggatttgtgcccaggtcctgccctacctctcccaagagcaccagcagcaggtcttgggagccattgagagggccaagcaggtcaccgctcccgagctgaactctatcatccgacagcaggtgcaagcccaccagctgttccagctgcaggccctggccctgcccttgaccccactacccgtggggctgcagcccgcttcgctgccggcggtcagcgcatgn

SEQ ID NO: 28813 - DNA, 460 bp, Homo sapiens
  misc_feature (1)...(460): n = A,T,C or G
ttcgatgactcccganancccnntactgaacatccgcaganncnccgnnnntngaggcggctctccagccccgcgccttatcctcggcgccgcatcaccgttttccaggcctccttccctccctctgccactgcccctccctttcccgctcttcttgcccacccggccggcagagagagcctggatacgaagcaggcgggcttcagagtgggttggaaaaatggaggtgccgcgcctggatcatgccctcaacagccccaccagcccctgtgaggaggtgatcaaaaacctcagcctggaggccattcagctgtgcgaccgggacgggaacaaatcacaagacagtggcatagcagagatggaagaacttcctgtaccacataacatcaaaataagcaatataacgcgtgactcattcaagatttcatgggaaatggaattataatcaaaggatcgcatn

SEQ ID NO: 28814 - DNA, 460 bp, Homo sapiens
  misc_feature (1)...(460): n = A,T,C or G
cattgagactgatngccntccgcacgngccgcggaanttgccttgtagtggggctggagcagagcctgccgcgaacccccggagcccacgatccctcgtgccatccctcgaatccaccagcacgagcgtcccacccgcgcctgggaccatggccactgactcatgggccctggcggtggacgagcaggaagctgcggctgagtcggtgctgttgtcaagaccaatgccaatgcagagaagacagatgaagaagagaaagaggacagagctgcccagtccttactcaacaagctgatcagaagcaaccttgttgataacacaaaccaagtggaagtcctgcagcgggatccaaactcccctctgtactcggtgaagtcttttgaagagcttcggctgaaaccacagcttctccaaggagtctatgccatgggtttcaatcgtccatccaagatacaagaga

SEQ ID NO: 28815 - DNA, 457 bp, Homo sapiens
  misc_feature (1)...(457): n = A,T,C or G
naatcgagttctctagcaagngccgnggaattcgngcacaccactacacccagataattttgtatttttagtagagacggggtttcaccatgttggtcaggatggtctcaatctgacctcgtgatccgcctgcctctgcctcccaaagggctgggattacaggcatgagccaccgcgcccagccttaatttttgtatttttaatggagatggggttttgccatgttggccaggctggtcttgaactcctgacctcaagtgatctgtccgcctcagcctcccaaagtactgagattacaggcatgagccaccgtgcccagcccatcttcatcttctttacttgaacttaattctttttcatgcatcttcccttctttcctcttttctcctccacccaaatgtcttaactgttaacattcccaggtgtttggtcctgggcctctggaggttgtgaagga

SEQ ID NO: 28816 - DNA, 456 bp, Homo sapiens
  misc_feature (1)...(456): n = A,T,C or G
ctcgatttgatagcatcggccgngccgnggaantccaaagaagatgttcacatctccaccagccaggtggctgagattgtagcaacactggaattagaggagaaggtggaggagaaggagaaggccaaagagaaggcagagaaggaggtcgcagaggtgaagagctagaaccactggcctgggcacctgtcctcctgctgtgccgtcaccctggcaagggccgtgagggcgattgctttgtggtgattctcagtggctcatctaatattttggctggaataaatcagagacttccataatcaagtaaattttaattttcatcattccatggagattcagtctgtctggaatcccggaacccctccacagaatcgtgtctggatccacactgtggtgtggctgccacggcctcctggctccagaggcagctgggccgggccaaggcaggaaggcgcc

SEQ ID NO: 28817 - DNA, 461 bp, Homo sapiens
  misc_feature (1)...(461): n = A,T,C or G
aggcgggccnncatgagatcatgatgatctcgcacagngcggtggaattctacagatgtaatcacaagtaatgcaagactcactgaggaatacaagccaagctgatgaggcagtacaggggagaggctggaaaacatattaagagcataaattggagagaatcaaagccttgtcacatggatcctctggtgcctgaagaaatgagattttattatccctctctattatgcaaatgaatttagttttttgacagcagccattctgattactggattggctggggtggggatggaggtatcaggagtctagctgctggaggatgggacagctgtgctgggtcttcagggcatttctgctgcgaatgcggctctccaggcccttcacttctattctggattttattccctccattaaggagagtttaaaaataaaagaaagcttctgagagtaaacattctgcn

SEQ ID NO: 28818 - DNA, 458 bp, Homo sapiens
  misc_feature (1)...(458): n = A,T,C or G
ttttaagacatcgaaaggcgggtattgaaagctgcgagancngnnnganagggagccgacgacctcttttctgcattttagctccagcaggcgctgcctttacccacggatctgcccaggctgaaggcacacgctcaatgctccacgtgccttctccaagaggaacgaagcagggtttgagggttgggtggatggagctcataaggaaaccccagccccaccacggatgacaccatccctcccgtcccatccccagcatgggcaaggccagcctttctggcagaaggagctgtcctcaactcagggccgctgtgagcaaagctgaccccatcccccacccccagataacactgctgcttctctgaatgcatgtcacgctgcaccccatgctccgggcccacaccctgcaggacaaggagctccagacaggacgtgcataagtcaccgaggcgtgccat

SEQ ID NO: 28819 - DNA, 474 bp, Homo sapiens
  misc_feature (1)...(474): n = A,T,C or G
tgtcgtttnanaggggnacttgagnntcctgatgaccattcggacagngcggnggaattcgngatatttccagtcatgtataaagatcaaatagggccattagcatattatatcctttactccaagcatgtatcatttctttgtgttggagacattccgtatcttctcactattggaaaattacaataaatggttgtaaattcagtcaccttatatagcactgcacctgtccctcctgtccatcgtcctcctgtgcctgttccccagcctgtggctgccccctccccagagaagccgatgcttgctggagcttggtcggtgctctgggtaaggagacgctggggctcacgccgtgctcaggctgctccctggtcatccaggcacttctcacctgcctttttcctccctgaccacctcccccctatgactgaagcgggtcacgggcgggttaactccaagaacagatgtgatgcc

SEQ ID NO: 28820 - DNA, 461 bp, Homo sapiens
  misc_feature (1)...(461): n = A,T,C or G
agggcgtggccnccaatgagacccctgatatctggggaaannccccggctcgagccggggttatgccgaagtctctgaaagaaagaaaccaaatggtgactctttaactaaggtaactattggaactatggagctgttatttttccattcattcaacaaatatttattgagcattcattagaagcagttcttatttctgctaataggcacatgctttagaaaaggtatgataacagtacattatcacaatcaataattgattacttctgccagtaaggaggacagaaagagaggtttgctgataatggggcagacagcttatccttgccatcggaaacaaggatgtgatcccaagtttgttacatttgttcataattctgagctttcatagttcagagtatgtatagtccaacgcacagaanatctgctgcttctggaaatacctgggtanatctatcctt

SEQ ID NO: 28821 - DNA, 541 bp, Homo sapiens
  misc_feature (1)...(541): n = A,T,C or G
ccacactactcactacacttcctttttgaaacactcccctacgtctaaagaatccaactaactacctacctcagccaggccgcccnnnnnttttgattcatacactngcgnggcanncggagaaaancactggccaagaggacgagaacaancctgcggaanatgaagcgggcacattattagaaagcaggacgataaatgtgtccaatctgtacgtcgggggaattccagagggagaggggacgtcactgctcacaatgagaagatcgttccatggctgtatcaaaaacctgatcttcaatttggaacttttggatttcaacagtgcagttggccatgagcaagtcgacctggacacctgctggctgtcagaaaggcctaagctggctcccgatgcagaggacagcaagctcttgccagagccccgggctttttcagaacagtgtgtggtggatgcagctctggagtacgttcccggcgctcaccagtttggtctcacacaaaacagctattccatcttgccttttaatcagacggctgc

SEQ ID NO: 28822 - DNA, 461 bp, Homo sapiens
  misc_feature (1)...(461): n = A,T,C or G
agtgcggtnccnnaaactgaganccttgngagtctgggaaannccccggctcgagccgggctggactgcgtcattttcccaggaactgcagtgcccagcccaggacgtggtacagagtaactgtacattaaactggcagagcttgttagtggtaaaggtggtgagtccttgggtgcgcagtggagctgctctggggcctctgagcaagcagcagcctctgtctcacctcttcctgtcactgggagggccccttgggtctcgctgtgcctggacgccaggctctctgctttattctttcatgcctgaggctccatcgctcagctcagtgctgactcagttcagaggattcttccctcaggaccgcagctcttgcagtgaataaagttttatgttccctgctcttaatgttaaaaacgaaattnagncnccncccanaanaaaaaccttaaccaaggcatcta

SEQ ID NO: 28823 - DNA, 476 bp, Homo sapiens
  misc_feature (1)...(476): n = A,T,C or G
tggtagtaggggggnnnggggnaattgtagactatagtacgtgcggtggaattcgtttgcagtgaagccaaagcgtgaccggcacatcatgctgaccttcagccttcggtcttttggctgtggcatctgcaacaagcgcttcaagctgaagcaccatctgacagagcacatgaagacccatgctggagccctgcatgcctgtccccactgtggccgtcggttccgagtccatgcctgttttctccgccaccgggacctatgcaagggccagggctgggccactgcccactggacttacaagtgactgctgaggctatacactagcttctagaacaagataaccactgctgctgatggatacttttccctcactgccatggcacaccagtcatggatcttgtaatcatgccaagagaatagatacattatggacctcttgttcttagatatgggcctctcagcctggcagatgtgga

SEQ ID NO: 28824 - DNA, 486 bp, Homo sapiens
  misc_feature (1)...(486): n = A,T,C or G
cgattcttaagganacagaggancnggggnattgaaaccttgtagacattagacagngcggtggaattcccagcagagccacaacccgatctccgtcctggacagcccctccagtgattgctttgcagaatggcctgagtgaggatgaagctctgcagcgggccctggaaatgtccctggcagaaaccaaaccccaggttccaagttgtcaggaggaagaagacctagctttagcacaagcactgtcagccagtgaggcagaataccagcggcagcaggcccagagccgcagctcgaagccgtccaactgcagcctgtgctagggccctgggcttggggagggaggttcacctgaggaggactgtggccctcacacctctagggtacacagggagaggaggcccggagcaccctggagggcagagacaagcgggaatgatgtggaggtcgccctgggagcctctggaaggccttgctagtgctcca

SEQ ID NO: 28825 - DNA, 466 bp, Homo sapiens
  misc_feature (1)...(466): n = A,T,C or G
agtgctggggccnccactgatanccttgagagacgagaacangccccggaacgagccgaggaggcacgggacatgcctctacaactactacgacgacgagaaggaaaagctgccaatcgtggagatgcccctggcccacaagctctgcaacctcatcatgctcatgccccatcacgtggagcctctcgagcgccttgaaaagctgctaaccaaagagcagctgaagatctggatggggaagatgcaaaagaaggctgttgccatctccttgcccaagggtggggtggaggtgaaccatgacctgcataaacacctggctgggcatgtcactgactgatgccattgacaagaacaaggcctactagtcacgcatgtcaggcaagaaggacctgtacctggccagcgtgttccacgccaccgcctttgagtttgacacagatggcaacccctttgaccaggacatcta

SEQ ID NO: 28826 - DNA, 473 bp, Homo sapiens
  misc_feature (1)...(473): n = A,T,C or G
gggtgtagaaggggnnnnnnaactgagacctgagtacgtgcggnggaattcggggaggaaggccaagatccgagtcaagaccagcagcaaggccaaggtggagtctgtagagcctcaggacaatgacttcctcagttgcatgtcccggtgggtggcaggaccttgggggtgggaggggggtgggactggaggtacgggtctccctggtcccggcctgggcagctgagtggtgcctgccgggcggggcaggcgctcgggtctgcctcgctggatcctggcctgctgcctcttcctctccgtgctggtgatgctgtggctgagctgctccaccctggtgaccgcgcctggccagcacctcaagttccagcctctgaccctggagcagcacaagggcttcatgatggagcccgattggcccctgtacccgccgccgtcccacgcctgtgaggacagcctaccaccctacaagctga

SEQ ID NO: 28827 - DNA, 459 bp, Homo sapiens
  misc_feature (1)...(459): n = A,T,C or G
gagcggtnccccaactgagaccatgangatctaggaaancagccggagaccgcgcggaggcggaggggacccagccgcgcgccgggagcgctccccggaatgagccgccccacccaccccaaggctggagccgctgcaccctgctgtccctctccaggccttggcaatgacgatcccccaaagagcccgtctgcaccccaaacccagggcctcaggcctccagctcctgggatccgggagtacatcccggcccaacacccccagcatccccgtgtatggcccccctgcacctgcttgtctcatccccgaagatccgtccccctggcccctcagtgtccatgtcttgagcttaatacatgtgcatttggttttttcctcaaaaaaaaaaaaaaaaaaaaaaaaaaaggcgcccccctgtcagagggcccntttaaccccgcttgaatacccttactgggg

SEQ ID NO: 28828 - DNA, 458 bp, Homo sapiens
  misc_feature (1)...(458): n = A,T,C or G
gatgcggntnnccncccccaaggangctagatgagcgtggcggaanncgccctacaacgccaccctctcggtccaccagctggtggaaaacacagatgaaacctactccattgataacgaggccctgtatgacatctgcttccgcaccctgaagctgaccacccccacctacggggacctcaaccacctggtgtcggccaccatgagcggggtcaccacctgcctgcgcttcccgggccagctgaacgcagacctgcgcaagctggcggtgaacatggtgcccttccctcgcctgcacttcttcatgcccggcttcgcgcccctgaccagccggggcagccagcagtaccgggcgctcacggtgcccgagctcacccagcagatgttcgactccaagaacatgatggccgcctgcgacccgcgccacggccgctacctgacggtggctgccatcttcn

SEQ ID NO: 28829 - DNA, 452 bp, Homo sapiens
  misc_feature (1)...(452): n = A,T,C or G
gagggggnnccnccaatgagaccactgagaccctggacannccgcggcaanccatggaaatgacgagctgtcccacatcatcgcgcggatgaacatgggcatgctatgctcctacgaccctcagcagagattcaagtgcaaagggacctttgtgggccaccagggccctgtgtggagtctctgcgtctactccatgggagacctgctcttcagcggcttctctgacaagaccatcaaggtgtgggacacatgtaccacctacaagtgtcagaagacactggagggccatgatggcatcgtgctggctctctgcatccaggggtgcaaactctacagcggctctgcagactgcaccatcattgtgcgggacatccagaacctgcagaaggtgaacaccatccgggcccatgacaacccggtgtgcacgctggtctcctcacacaacgtgctct

SEQ ID NO: 28830 - DNA, 461 bp, Homo sapiens
  misc_feature (1)...(461): n = A,T,C or G
nttgattgacgacccttagaccangcggtggaattcctcccctccctactcccggcccgtagtggaggtgactttcctgcgcagcgcggcttctgagggcggagaacccacagggagtgcgacccctttgcacgctgtgagtgggcaactgtccgagggactcgagccgatcgaaggctggacgccctatagggctcttggcagtccacgaaagacctggagtccgcctccccatttctccggtcggtgagtggcaggaggaaatcgccaaacatgttttcccgctttgcctccccaactcggaaacttgcaacttgccgtgtcctggaggttgagacaatttggggtctcttggctgccgtccaacagatttatctctgagggcagtgtccttggtgagaggtccaagtaggtgtgggcgacattttcctccatctcatgagggagcagccctgcacacn

SEQ ID NO: 28831 - DNA, 457 bp, Homo sapiens
  misc_feature (1)...(457): n = A,T,C or G
agagcggggnnccnccaactgatgatcatagacagcgtggnggaantccgcggcccagccaggagagctggagaggcagcgaagatcttccgttagagcccagcgagggggtgtggcccagccaggagggctggagaggcagcgaggatcttccctaagagcgtggcgagggggcgtggcccagccaggagagctggagaggcagcgaggatcttccctcagagcctggcgagggggcgcggcccagccaggagagctggagaggcagcgaagatcttccgttagagcccagcgagggggcgtggcccagccaggagggctggagtggcagccaggatcttccctcagagcctggcgagggggcggggcccagccaggagagctggagaggcagccaggatcttcccttaaagcccggcgagcgggcgcggccctgcctacaccccgacttcatccc

SEQ ID NO: 28832 - DNA, 480 bp, Homo sapiens
  misc_feature (1)...(480): n = A,T,C or G
natcgagattcgtggccgtgtggnggaattccactaattcgctggtagttcattcatgtgtgcattcatccactcaccacattcccagagctcggttctggtccaggccttttgctctaaaatgcctgacacccagggttgcagccaacctgggccctgccctggaaggcctccaagtctggtgggggagatgcacctacacccagatttacaattacaagacaggagcatcagtgccgggccttctgagtaactgttaagaactcagggtctgggtccaatcatttggctttgaatttggttctactactactactttttttttttttttttttggaaagggggccctatttttgtacccggggtgggagtggagggttccaaacaaaatttattgattgcggcctcaacctctggggttaaggggatcctcccacctcaccctccaaataaactgatggttaaaaagacagagcttac

SEQ ID NO: 28833 - DNA, 456 bp, Homo sapiens
  misc_feature (1)...(456): n = A,T,C or G
aagcggcgcccncccctgagantcctgangatcattagaccangcgcnggaaaacacaggggacccccccagcacccagcatgcccggctgtgcccctcttggtatgctcacatgcacatatatggacatacaggtccttagcacaacgtggctggccaagggctgcctatctgggcgagtagaccgcctggctcagcccacaggcctgcagcataccatagcaccccgcccttgccccatcaccctgtgggctacatgcaggacacggcatgggcctgctccccagaggcacctgtttggggtcttcttgaggcttgtgctttcacagctctctttgaagcagatgtcttggtgaactcggtagactcttttatacctgttgtcacaagaaagctttgtaaaaccagacagtgaagcaaaatgttgccaactgcttaacctatgctatgtgaacc

SEQ ID NO: 28834 - DNA, 471 bp, Homo sapiens
  misc_feature (1)...(471): n = A,T,C or G
cgcagatancnnnnnattganncctcgtagacctctagtccangcggtggaattcgtttgaaatcaaggtgtcaccaaggctgtgctctctgaagaatctaggggagaatctcttccatgctggtttaggataaggaatatcttatcttggttcccagtttctggcacaaagcttcaaacatctttggaatatcttcagtgataggagtctctttattatgctaatatggtgactcataatggggcgatagaaagcttgaggatgagggctggtcaccagaaaggacaaccatgtgacaaatgggttagaactttgagtcaccccaacttctggggaggggagaagtggagatcgagctcagtcctgtggccactgacttaatcaatcatgcatatgggatgagatctctggacattgaagctcagtagggctttccagttggtgagagcacattgatgtgctaggagggn

SEQ ID NO: 28835 - DNA, 451 bp, Homo sapiens
  misc_feature (1)...(451): n = A,T,C or G
aggaggngnccnccatgatgatcatgatacccgtgggaanncggctnnggaattcgncgacttaagggttggccacgatggtgtccttgatccacttccggtaatgcaccaccttggtgtacagggaaggcctttcgggcagggcacatggttcactgccccatgacgtgataccttgaagcacaccattacagacaagtggggccccagaatcacccgagcaggtgcttttgccccctgtccagcgtccagcacacagcatgaacttggtcaccttctgagggtgaacttgcgcacacacgtcattggaaataacatggaggtccacacactgaagtttctttggggtcaagaactcctctggttcaatgctgccccagcctgaggcgtagcaggtggtccccagtgctggctcctgggtgggcaggtccatgaccttcacagcatccgn

SEQ ID NO: 28836 - DNA, 462 bp, Homo sapiens
  misc_feature (1)...(462): n = A,T,C or G
gaggcggngcnnccnccaactgatgantcttganngatcntcggacanncnggcggaattcatgacattgnccaagacatcccatccatgatgaatgatgttaagtgcctgcttttgctggcaaaggtttacaagagccataaaaaagaagctgtgatagaaactttgaacaaggccttggacctccagtctcggatactgaagcgagttccactggagcaaccagaaatgattccctcccagaagcaactggcagcctctatctgcatccaatttgcagagcactacctggcagagaaagagtatgacaaggcggtacagtcttataaggatgtcttctcctacttgccaactgacaataaggtgatgctggagctggcgcagctctacctgctccaggggcacctggacctgtgtgagcagcactgtgccatcctcctgcagactgagcagaaccatgag

SEQ ID NO: 28837 - DNA, 452 bp, Homo sapiens
  misc_feature (1)...(452): n = A,T,C or G
taatgccaccntctantgagancatctgacagngcggnggaattcctggcagctggtctgaagataggcatctcaattgttcacggttagttacagattgaactactctttcccccttctcactactgcacttgactagtcttttttttttcccccacaaagaatggggcttcaaatagaactgaaaaataaaggtgtctggtggtaggcaatccaaagctggcatggtggctctgcaataaacaaggacttatgcttctttttgcttcaccatcctagcgggcagcttccatcctcatggtcatctcatggcctaatatggcttctagagcttaattcatctcatctacattccagatagcaaacagaaggaaggaaagatgattagggggagagagagcagcacaaaaggacgctttctagttaactctttaaagggccttcttggaagc

SEQ ID NO: 28838 - DNA, 464 bp, Homo sapiens
  misc_feature (1)...(464): n = A,T,C or G
nattgatngcgcatttgagatcctaggaagngcggnggaantcccaggagagccagacctgttgctcaggccgagctcctgggtgccatttagttaccattggaccagtcgcgtgtatggctgagactcattcccagtttccagggcccggtatttggacactaattgccaagtctggggcctggggattttatggaccagcggttgtgaccatcttttctgagcaccaagggctttcccttttgttgccaaaaaggtagttctcgcgcttgctaggctggcctctcttgcctccccttggccggggcaacaccagttactgtgagcatcaccctggtgtggtgagtcacctctagtcggccctcttgctgctgccaaccaaatcagtattagctttgagcactgcactgtttctccctcccttggacgacacaaagactagcatgaggcactctttgtggggg

SEQ ID NO: 28839 - DNA, 452 bp, Homo sapiens
  misc_feature (1)...(452): n = A,T,C or G
ngggaggggnccncccctgagnntcatgagaccctcgacanccggggaattccctggtgaaaaggcggctgataaaggaagcaggaagcgctatgaaccatcaaacaaggacaggcagagccctcctgcagccaagcggcccaacacatccccagaccgaggttctcgggaccggaagtcaggtgggagactgggctccccgaagccagagcggcagagaggccagaactccaaagcccctgcagccccggctgacaggaagcgccagctgtcaccccagtccaagagctccagcaaggtcacgagcgtgcccggcaaagcctcggatcccggcgccgccagcaccaaatcagggaaggccagcacgctgtctcggcgggaggagctgctgaaacagctgaaggccgtggaggatgctattgcacgcaagcgggccaagatccccgggaaag

SEQ ID NO: 28840 - DNA, 452 bp, Homo sapiens
  misc_feature (1)...(452): n = A,T,C or G
ggtcaggggcnccnccaatgaagcccactgatagcctgggaaanncgaanccttncccagccagtagatgattacttcgtggagcctccgcaggctgtagaggaagaggaaacggtcccacccccaagctgccatacactggcagtggtcggcaaagtcactcccaccccgaggcccacagacggtgtggatatttactttggcatgcctggggaaatcagtgagcacgaggggttcctgagggccaagatggacctggaggagcgtaggatgcgccagattaatgaggtgatgcgtgaatgggccatggcagacaaccagtccaagaacctgcctaaagccgacagacaggccctgaatgagcacttccagtccattctgcagactctggaggagcaggtgtctggagagcgacagcgcctggtggaaacccacgccacccgcgtcatcgc

SEQ ID NO: 28841 - DNA, 459 bp, Homo sapiens
  misc_feature (1)...(459): n = A,T,C or G
agggcacgggggccggcatagaaaaccaatgaagacctcagtacancnggnggaattcgatgcgggaccccaagttcttgtggtgtgcccagagctcctttggcttcatatatgagcgtgagcagctggaggcaacttgtccccagtgtcaccagaccttctgtgtgcgctgcaagcgccagtgggaggagcagcaccgaggtcggagctgtgaggacttccagaactggaaacgcatgaacgacccagaataccaggcccagggcctagcaatgtatcttcaggaaaacggcattgactgccccaaatgcaagttctcgtacgccctggcccgaggaggctgcatgcactttcactgtacccagtgccgccaccagttctgcagcggctgctacaatgccttttacgccaagaataaatgtccagagcctaactgcagggtgaaaaagtccctgcacg

SEQ ID NO: 28842 - DNA, 463 bp, Homo sapiens
  misc_feature (1)...(463): n = A,T,C or G
agtgcgcggccnnncattgagantcatgangatcatcagacagngcggnggaattcagacaggccaggccgctaaaggctgcctccttgatccagctctatgggaggcggcacccaagactgctgggtgctggcaatggggcttcttgcaaactgccccagaggggcccttatccctaccccttccccatagggtggctatgaatgtaattggggaacaccagaagagccagatgtcagaagccctgctgcttcctgtccctctctctcctcgaaattttgggaagaactaggcaggactgaggtgagggggagggaagacctagacatggccaggaagcctctgtcaactgcatttggtgcccggacaagtgaatttcgcagaggtgatctctacccacctgtcaggactttgcatgtgggggcagaggcatcaacccagcaagacacctagtagcctggca

SEQ ID NO: 28843 - DNA, 461 bp, Homo sapiens
  misc_feature (1)...(461): n = A,T,C or G
agtgcgagnnnnnaaactgatgaccttgataagcgtggcggaanncggccgctttttttgttttttctttttcactggctggcttgatcctcagtggcaaaaggacccctgagccccttctccgagccctggagcactcctcgggacaccgagtggcctcagggctgggttcagagctcctcccgcagggggagcctcagaagtggaggcagctgctgatgggtgagtttacaacttcttatcctgcctaaggcgagtaggcatttttattccgtttccagtccttgagctcagcagatcaaaataacagtgaccctgcaaccccacagagcccgggacacgctcgctttcttccccgccctgcccctttagtccccgctctggaaggccaggcagtttaggtgtaaataggtatcttttatggtttccaaatgaattatttgtgtgagagtaattaaatc

SEQ ID NO: 28844 - DNA, 465 bp, Homo sapiens
  misc_feature (1)...(465): n = A,T,C or G
tggcgggnnnnnnacctgagactgaagaccttgcggnggacnncggcgggcaagtcacggcaggagaaccgtcgtcgggccaaagaggaagcctctgtcatggaggaggagatggcgctggccgaggagcagctgcgagcccggcggcaggagcaggagaagcgcagccccctgggcagtgtcaggtctacgaagatctacactccaggccggaaagagcaaggggagcccatgacccctcgccgcacgccagcccgctttggtctgtgagctgaggctgtccccagagaggatggcagcaggtattgggtcctcagccttctggcgggagccctgaggctgcggacaaagccctttcatctgaggactttcatctgtgcatatcacggccccccagggcagttcctgctggaccagactctctggcagaggaggtggagttcttccatgcaggagcacggcatg

SEQ ID NO: 28845 - DNA, 470 bp, Homo sapiens
  misc_feature (1)...(470): n = A,T,C or G
tgatttctacccgcgncnnnnncaaatggagnccatcgacttgnncccttcgnacangcggnggaattcgncacatactggggggagaagatgggctatgtaaatgtaagttaacgcgctttttcagccacctttgcataatgcaacaggaacagcgacccgcgcgcacgaaccgggtagtgtgcgcgtgtgtgtgctcgcgtgtgtgagcgcgtgtgccagcgtgcgtctccgcgcgggcgtgcgtctgggtggatccttgcgtggcttgggaggcaaatcgggcgtttctccaagtcgacttaacatgatttaggctctcaaatacgtgaaagcggtagacacaacagggatgcgaaggaaataaaaaacaattggggaagtggtgccaagtcactcaggctttgaactgaggacgagtagtgcggtcgcgcctggggcgcgtacggaaatcatcctcagcctgtggc

SEQ ID NO: 28846 - DNA, 557 bp, Homo sapiens
  misc_feature (1)...(557): n = A,T,C or G
cattcgcattcgatncacagtccgcgnggnggaattacagctctgggaactgagaaaagtgcttcggaaggctgggctgtccgctggctatgtggacgctggtgcatatccaggccggagtcgaatgatcagccaggaagagtttgccaggcagctacagctctctgatcctcagacggtggctggtgcctttggctacttccagcaggataccaagggtttggtggacttccgagatgtggcccttgcactagcagctctggatgggggcaggagcctggaagagctaactcgtctggcctttgagctctttgctgaagagcaagcagagggtcccaaccgcctgctgtacaaagacggcttcagcaccatcctgcacctgctgctgggttcaccccaccctgctgccacagctttgcatgctgagctgtgccaggcaggatccagccaaggcctctccctctgcagttccagaacttctccctccatgacccactctatgggaaactcttnaggacctaactctgcgcccacacacctntcgagggcacctccan

SEQ ID NO: 28847 - DNA, 455 bp, Homo sapiens
  misc_feature (1)...(455): n = A,T,C or G
aggagttccccaggagggccncccctgatnantccctaaagatcatcgcaccgngcggnggaattcctcgcgtcttctgctttagaattcagccagctacaaatcctaactccctccccacctctcttttctcctgaaaacagaacatgaaaggctcccggagcagcgctgactcctccaggaaacactgaggcagacgtgtcggttccattccatttccatttctgcagcttagcttgtgtcctgccctccgcccgaggcaaaacgtatcctgaggacttcttccggagagggtggggtggagcagcgggggagccttggccgaagagaaccatgcttggcaccgtctgtgtcccctcggccgctggacaccagaaagccacgtgggtccctggcgccctgcctttagccgtggggcccccacctccaccctctgggtttcctatgaatagccc

SEQ ID NO: 28848 - DNA, 510 bp, Homo sapiens
  misc_feature (1)...(510): n = A,T,C or G
cggacgtcctcttagcaacttccgtgggtgccaggttgtgggctgggggcggcgctgaccttgagagagcggaggaggcgcaggcgcagcacagtttaaacttgattttgtgaggggacgaacagcgcgacaattaaaagaagatctgggaatcgaatacccatctcgagttctggatatgtgctctgagaaggtgcccatgtcaccgaccacactggaggccaatgcagatactgggggaaggttccatggtagctaagtgtggacaagctaatcactgaagttccctgatgcagagttgataatctctctagagttggatgaaagactgtgctgccttgaagctctgagagatgccatgccaattcaaggcagggtctttattgttgaaactcttgcgtaatgacatctttattcaggtgaaaatacaggatgaatttcaactatatgatattggttatgttcctcagacatgttatttgtctttacaaagattggtgtcgatanacg

SEQ ID NO: 28849 - DNA, 458 bp, Homo sapiens
  misc_feature (1)...(458): n = A,T,C or G
gaagctccaggaggcgcccnaatgaagnnccaagnnngatctagcanagngcggnggaattcccgtcgcgtgcgggaggcgggccgcgatcttgcgcaaggtcggtgtgggcgcaagctgcagcgccgcgactcgtgcgggtaggcgtctgcgctcggtttgagggctcggcgcggggtttcctgttccttcttctgcgcggctgcagctcgggacttcggcctgacccagcccccatggcttcagaagagctacagaaagatctagaagaggtaaaggtgttgctggaaaaggctactaggaaaagagtacgtgatgcccttacagctgaaaaatccaagattgagacagaaatcaagaacaagatgcaacagaaatcacagaagaaagcagaacttcttgatgatgaaaaaccagctgctgtggttgctcccattacaacgggctatacggtgaan

SEQ ID NO: 28850 - DNA, 548 bp, Homo sapiens
  misc_feature (1)...(548): n = A,T,C or G
nttgaaactcgatcgctattccagagnggngcaattcagatgatctccatcaccccgaggggaccccccctcaacgttgcgcctggagaaacaggctctatgctccgccctccgcagagcccctcatcagctgagagagaccagcctccagccaactccacacagcagggttgaggctagacccgcagcaggcggtatggtgggagtggccgggtgaggccctgccgctcagacacagctgaggccagcttcctggtcccacttctgctcccagggagggctggcaggagaggtaaccctcacacttggctttggggacacaaatgaggactctctttcccttggcagctgtcactggtgataacagcagcactgagctccagcggaagcactggctctgtgctcatacggttacgcacacgtggccagatgggtcccctgactccaaagcgcattccttcccccacaccacttggccagcttgttgaggggatattaagtggcggagcaggtgggactctgagcacctactgagtggcaagcccttn

SEQ ID NO: 28851 - DNA, 564 bp, Homo sapiens
  misc_feature (1)...(564): n = A,T,C or G
gggggtnccnnnnntttcggatcatagtccagcgtggtggaattcannaaaagaagttaacataattaaaatgcttggacaaaacatttgctttatatagattcttacaagtaatatttgattaggtatcaaaataggtttaggcaggtggaagttctgaatttcaaggcaaataaggcatgaagggtggaacattgcatctagggaaaataagagaaataagtgaaagtctgaccctacattgccaattctcagaccaagtacaaagtattaggaattttttatatcagctgacatcttgtgcttacagtaaagccatatagatgcacacatagtgactttattaaatcaaatgagttgtgcagagcagagcaaatctattaggctttctcttttagagttttctaattttactcttattagctccctcagttgtcatcaattacatattcctacatcagatattttacactatcagattctttgattaanaaatcatcttcagctttacattattaatctctgaggacatannatcaaataactttctagtccatgatcatn

SEQ ID NO: 28852 - DNA, 456 bp, Homo sapiens
  misc_feature (1)...(456): n = A,T,C or G
agcgcgcncctaatgatacgatggctccngcacggcgggaattctaatcgtccccttcccagatgcttcccaggtgcaccgcgacccctgtgtgctgtgtggtcttttgtagggagaaaggatcaatcaagaaagggaaacccctgctcccatggagcttgccttctggtggaataagaaaattagtaaacattaattaataaataggtacttctctatgcaagtttacagaaaaataaacaaatatgtacataagaaagaagatggttttggatagcgataagtgctggatgaaaatgaaaccaggtgataagccagcgatgactccactgagggaggttgtgagcgttacacaacatggtcagaaaagaccccgttggacccaagtcccagctggtaagaaagtgccagcttcatgacggtggggagaagcattccagtatcaccgttttaaaa

SEQ ID NO: 28853 - DNA, 551 bp, Homo sapiens
  misc_feature (1)...(551): n = A,T,C or G
ntttcgaacatccgtacactagtccagagnggtggaattcgtttagtagcacctagagtaacacgatcttctcttcccttctcctatcacctcctcagcactcacacttgctcacctggatcatgtgctgggtctctgtcagttcctccccccagctgtaatattcaggcaggtcgaccagttggccagtcatgtcaggctcctccaaagctcccagcctcttggtcagttcagccagggcctgttcatgggccttgggtgggagcaggggaagctgtgaaaggggagtctccaggcccaatctgtcacactccccaccctcaacacactggcctctggatgcctacctattcccagcctgtctttggccaacctcctgctccacacactggttaccccaggctccttaccttgctgtctttgcgggagggaaactcagagaagctcctcttcatcatgtcctccaccctgagggcatccactcgcagcaggttgaggatcatagtgtacgtgaggcggaactgggactgcagctgggacggtttcccttn

SEQ ID NO: 28854 - DNA, 460 bp, Homo sapiens
  misc_feature (1)...(460): n = A,T,C or G
agaggcagnnnttattgattctanggcatngcacagngcgnggaattcggcacctcggggactgatggcgtcgcctttatcaagttccagtatattctgggtattcagttgattgtcaccgcctcgaagcatgcctacgtgccaaactctgccccatggaagccaatccggttacctgtattttcctctctgagccttggcctgcttccagaacgctctgccactctaatggtatatgaagatgtcgtccaaatagtatcaggattccaaggtgcccggccacagcctcgcgttcatttccagagaagggctctgaggttgcctgagaacaccagctacagtgacctgaccgcgtttctcacggccgccagctccccttcggaggtggacagttttccttatttgcgaggattagacggaaatggaacaggaaacagcaccaggcatgacctgaccccag

SEQ ID NO: 28855 - DNA, 460 bp, Homo sapiens
  misc_feature (1)...(460): n = A,T,C or G
agcggtagnnnntattgaggactacagtcctngcggnggcannccngaccaaacctaaagagtcatcaagggaaacgacgcctgaaggaagaatggtttgccttatgggagctgaccgtgggccccatgtggtcctctggacgctgatctgcctgcctgtggttttcatcctttcttttgttgtctctttctactacggcactatcacctggtacaacatcttcctcgtgtataatgaggaaaggaccttctggcacaagatctcgtattgcccttgcctcgttctcttctatccagtgctcatcatggccatggcttcttccctcggcctctacgctgctgtggtccagctctcgtggtcctgggaagcatggtggcaagctgcccgggacatggagaaaggcttctgtggctggctctgcagcaagctgggtctggaggactgttctccctacagcat

SEQ ID NO: 28856 - DNA, 484 bp, Homo sapiens
ggcagcccccaattgagaccctatagagagccgtggaattccttcgggagaactagttaggaggatggcctgaggccaggagttcgagaccagcctgggcaacagagaccctgcctcgacaaaatctttagaaatcaaccaggtgtcatggcacgtgcctgtagccccagctacttgggaggctgaagcaggaggatagctagagcccaggagttcaaagctgcaacgacctatgacagcaccactgcactccagccaggaatgaggcagagacagagaccttacctcaaaaaaaagaagaaaaaggaaaaaatctgaaccaacctaaaacacataggtagaaccagtcatcaaaagcttcccaacaaaagaaaagcccaggaccagatggtgaattctaccaaatgctaaagaatggacataaatccccaaattctcccaaacattgtggaggagaaaacacttcctaattccccgtattcat

SEQ ID NO: 28857 - DNA, 487 bp, Homo sapiens
  misc_feature (1)...(487): n = A,T,C or G
aggcagcgcccgattgagccctnatagagaccctaggcagagcggnggaattcctttgggaggccgaggtgggtggatcatgaggtcagaaactcgagaccagcctggccaatatggtgaaaccctgtttttactaaaactacaaaaattagccgggtgtggtggcaggtgtctgtaatcccagctactccggaggctgaggcaggagaatcacttgaactcgggaggcggagtttgcagtgagctgaggtagcgccagtgcactccagcctggacgacagagcgagacttcatctcanaaaaaaaaaaaaaaaaaagggggaaaaaaaaaacttttcaggccccctttttttttttttttttggccttggccaccccccctttttgggggggaaaaaaattttttaggggggccccggcaaagaaaccctttttttgggggaacaattttttcccggccctaagaaaagggcttccccccgggggg

SEQ ID NO: 28858 - DNA, 232 bp, Homo sapiens
acggaacactattctgtgcacaaagcaagtctcagtaaattagagatcggaatcctgcaaaccaccttctccaatcacaatggaataaaaccagaaatccataccagaaggaaaatgaaaattcacacatacatagaaattgaacacactttttaacagccgaagggtcaaaggagaaatcacgagaaaaattaggaaatagagatggatgaaaacaacataccagaactta

SEQ ID NO: 28859 - DNA, 444 bp, Homo sapiens
  misc_feature (1)...(444): n = A,T,C or G
actggaggacatcctgatgacatctgaacagncnggnggaattcggaaaacattaaaatggagaaaaacccaaaaaggtgtacagcggttcagcaagttttcccagaaagtttaaaatctctctgggtcttcgagtggaacctggaagccccgggtggcagtggattgatgtccagttcttgtcagaggagccttgtgaaaaataactgcgcctttgcctgaataccacgtccccaagaatcagaggggccacagcccttctcctccatgggaggccctggagcctgatagaaatcagtggtgtggggcactgtagagactagccagctcccgacggaaggggtctgtgtcttgtattgatcccatcagtgcccggcactcccttcacccaggtgctgacgtgccggggttgagctggcaccccgggatgtgatgtaagaacgc

SEQ ID NO: 28860 - DNA, 461 bp, Homo sapiens
  misc_feature (1)...(461): n = A,T,C or G
gacgtgcnnttaagattccgtgagtcattgcggnggcattcaccccatctctactaaaaatacaaaaattagccaggcatggtggcacacgcctgttatcttagctactcgggaggctgaggcaaaagaatcactggaacctgggagatggaggctgcagtgagccggagattgcaccactgcacaccagcctgggtgacagagcgagactccatctcaaaaaacaaaaaagtggggtcccttgtactaacatactgagttagacttctgcaaagcactctagagcatgacaagggaagattctggacaattaattgatgggaagaaatgatgataatcataaactgctaataacctccattatttaaatattcagcccttgccctgcctcattctactcatcctccaatacagaaaagcccctcccttatttagttctgttntacgtcatataggaaact

SEQ ID NO: 28861 - DNA, 455 bp, Homo sapiens
accgttagacatctctggccagcggcggaattaatagaggtccctttgactatactagaatgagggtctcaaagacgttactaaatataatggatattgcactcccaggctgcagtgcagtggcgcgatcttggcccgccgcagcctccgcctcccggggtcaagtgagcctcccgcctcggcctcccgagtagctggtcatcatcagatttgaaatatttaaagtggatacaaaactatttcagcaatgcagacaattaagtgtgttgttgtgggcgatggtgctgttggtaaaacatgtctcctgatatcctacacaacaaacaaatttccatcggaatatgcaccgactgtttttgacaactatgcagtcacagttatgattggtggagaaccatatactcttggactttttgatactgcagggcaagaggattatgacagattacgaccgc

SEQ ID NO: 28862 - DNA, 461 bp, Homo sapiens
  misc_feature (1)...(461): n = A,T,C or G
cgccccccattgangccccttnnnttttgatgtcttttataccatgtggtggaattctctcaggcttctccccaaggaagaagcctcgccatcacggccgaattggacgctctccgaagtatcgaaagattccgcaggaagatttccagaccctcacgcccgatgtcgtgcaccagtccctcttcatgtcagccctgtcggcccaccctgaccgctcactctcagtgtgctgggagcagcactgcaagctcctgccaggagtagcgggcatctcagcctcgacagtcgccaagtggaccatcgatgaggtcttcggctttgttcagaccctgacaggttgtgaggaccaagcacgcctcttcaaagacgaggcaagaatagtcagagtgacccatgtatctgggaagactctagtctggactgtggcccagcttggggaccttgtgtgctcagatcatctn

SEQ ID NO: 28863 - DNA, 459 bp, Homo sapiens
  misc_feature (1)...(459): n = A,T,C or G
ntttactgacgaccctaggccagcgccgnggaattccagctactcgggaggctgaggcaggagaatggcttaaacctgggaggtggaggttgcagtgagccaagactgcgccactgcactccagcctgggcaacagagcaagactctgtctcaagaaaaaaaaaaaaacaggagttagttaatgcaaaaactcctattttctaaactgttaaaatttgatggggttgggccgaacacgggggctcacgcctgtaatcccagcactttgggaggccaaggcaggcggatcatgaggtcaggagatcgaaaccatcctggctaatatggggaaaccccgcctttactaaaagtacaaaaaattagccaggcgtgggggcacgcacctgtagtcccagctactcgggaggctgaggcagcaaaatcgcttgaacccaagaggcanaggttgcagtgagctga

SEQ ID NO: 28864 - DNA, 456 bp, Homo sapiens
  misc_feature (1)...(456): n = A,T,C or G
atcgttgacatcnctagngacgngcaattcggagcaactaggagtccactctgacccagccagagtccaggtttccacaggaagcagatggagctcctttcacaggggctctgagaaaaactggagctgatctcaagaagccccacatcttcctaaggggccccatggcctgtttgggggcagggtaggtcctggggcactgtgggccgcctgcctgctgatgtgggctctaggccagcttgttgtcacgtacgtggtgtgaaataaagcccaagcactgggtgcccgtttcctgtgtttcgaattataccaattcaaaacagaactatttaaaaatattggccaggcacggtggctcacacctgtaatcccagcactttgggaagccgaggcgggtggatcacttgagatcaggagttcaagatcagtctggacaacatggcaaaaccctgtctt

SEQ ID NO: 28865 - DNA, 456 bp, Homo sapiens
  misc_feature (1)...(456): n = A,T,C or G
cacctgggacatccccaggacgngcaancanagcagctcgcttctaactggactgcacgttggtgacagcgtcccaagctggtgacagacccactctgtaactttcagctagattcagccaccagagcccagaaacatgacccttgctgcctacaaagagaagatgaaggagctcccgctggtgtccttgttctgctcctgcttcctggccgatcccctgaataagtcgtcctacaaatatgaagcagacacggtggacctgaattggtgcgtcatttccgacatggaagtcatcgagctgaacaaatgcacctcgggccaatcctttgaagtcatcctgaagccaccctcctttgatggggttcccgagttcaacgcctccctgccaaggcggcgagacccatccctggaagagatccagaagaaactanaagcggctgaggagcgaaggaagta

SEQ ID NO: 28866 - DNA, 457 bp, Homo sapiens
  misc_feature (1)...(457): n = A,T,C or G
attactgacaccctaggccacgncgnggaattcccagagccaggctggtggggagggagggaccgctgaagccagaggccctggccaagtccctgcacatccaggagctcctgtgtcactgccttgtggcatcccctatttctgtggggatggggaggacaggccacttttggatacccttggcccatgaagtgtcagccagagtggcttaaggattgcagagtggcagaaaaagccctggccatgtgcccacaagccccctatcccactcttttctgcctgctctgtgaccttgggcaagtcactgtccctctctgggccacaattgcctctaaaattgggacagacagctgctccctgtggcttctttcgcctggggcatcagtgcctctcccagccctgagcaacccccatcccacccccttcagagtcttggcagaatctggcctctgtaggt

SEQ ID NO: 28867 - DNA, 569 bp, Homo sapiens
  misc_feature (1)...(569): n = A,T,C or G
cgacgcgnnaattgaaaccnctcgatgcactatnccgagnggngcaantccnctgagaagaagcagtgtctgccatcctggtgagcagaggagacagcaaatgcaagagctccttgcctgctcagggatgtcggggtggccgtgtgcccaggaagggaggacgggggcagaggggtcggtggtcttggagcgtgtggcagggccaggtctcaggagcgaggaggccttgatgaggaaagcatttgggtagcgtcgaggtgccagggagtctggatgtgtagatccacggtggggcctggtctctcccacgagtgagcgtggcgcctgcgttcctcacgatatatctgccacagaacggngacgattgccacagcttctccatttgcctgaaggcataggagggggcgtgtgggaggccacctgtgacacctgtggaccagagatgacaacatatggngtttggggatgccacggcacagcatcaagcagagagttccctcgaggtcccagagcttacaggtggattctgcctttncggatgcctnncgagccaccgtagctccccagcn

SEQ ID NO: 28868 - DNA, 435 bp, Homo sapiens
  misc_feature (1)...(435): n = A,T,C or G
nattgacgactcttagtccagtttggtggcattcgagcgggctctgtatttctggaacaatgagtatatcctaagcctcattgaggacaactgccacactgtgctgcctgctgtgtttgggaccctctaccaagtctccaaggagcactggaaccaaaccatcgtatcactgatctacaatgtgctcaagaccttcatggagatgaatgggaagctgtttgatgagctcacagcctcctacaagctggaaaagcagcaggagcagcagaaggcccaggagcgtcaggagttatggcaaggtctggaggagctgcggctacgccggctacaggggacccagggggccaaggaggcccccctccagcggcttacaccccaggtggccgccagtgggggtcagagctagacagcacctcagaaggggaaaagctaaac

SEQ ID NO: 28869 - DNA, 455 bp, Homo sapiens
  misc_feature (1)...(455): n = A,T,C or G
caatgggacatcgtcaggacggcaattcctggatccgcgccgcaagccagagcagcaccggctcgtggtccccaagaaaggcaagatctcggatctatgtgtggctctgtccaaacacacgggcatctcgccagagaggatgatggcggctgatgtcttcagtcaccgcttctataagctctatcagctagaggagcctctgagcagcatcttggaccgtgatgatatcttcgtctatgaggtgtcaggtcgcattgaggccattgagggctcaagagaggacatcgtggttcctgtctacctgcgggagcgcacccctgcccgtgactacaacaactcctactacggcctgatgctttttggacaccccctcctggtatcagtgccccgggaccgcttcacctgggagggcctgtataacgtcctgatgtaccggctctcacgctacgtgaccn

SEQ ID NO: 28870 - DNA, 494 bp, Homo sapiens
  misc_feature (1)...(494): n = A,T,C or G
ggngcncccnnccccctttgatcgcgtactttagcgngcgggtanttcagggcacttcccgcattgngaccccagacaccctgcatgtctcgaagccctggttgaaaacacaaaagccgatgcgatgtgattcccactgcagcctgcatgcgcgtccctgggagtgcgacagttctttggaaagaactatgtcttaaatctgtattgcacagagaacttgattattttaagtactgagcatgtttgaagctccttccctgaaagcttcaagcaatggcagcctcaggagacccaggctctccacgtccaggttctcttgcagcgctgcaggaaggatggccacgttcagctctgaggaacaaaatcccaaataagggaggggtctgcctctccaggaggacagcagtaagggacagcaggccttaccacttgctctctctgcactacccttgtcctcatggcctggggcaagatccaagcccatgaaggggtan

SEQ ID NO: 28871 - DNA, 457 bp, Homo sapiens
  misc_feature (1)...(457): n = A,T,C or G
cacctaagacaatcngtagngacgngcaannggnttcttaaagggtaagtagtaattttagattttcataccaaccagacaaacttaatttattatacatatataattatacatatctatgaaacaaacatatgcttaagtgtaggaccacgtacctaagattatagagagattgccagactttaaactactttgcttccaagtagtagatgtacaaaataatttaaggacgggaaaatgatcttttctttttttcttttttttttgagacggagtcttgctctgttgcccaggctggagtgcaggggcgcgatcttagttcactgcaacctccgtctcctgggttaaggctattttcctgcctcagcctcccgagtagctggtagcttgagccaaggagtttgagaccagcatgggcaacatagggagactgtctctcccaaaaaattagctagag

SEQ ID NO: 28872 - DNA, 511 bp, Homo sapiens
  misc_feature (1)...(511): n = A,T,C or G
gcnaaaggcganaacgggannannnnattgagnccttttgagacattaggccagngcggnggaattcagtaagtatgtgtagcatcactaaagagaaaattcaggattcctggattacagttattggctctctgcagtgttatttttgtaataaaaaacatatagcatatgtgaaatacctactgggtgatgcaggacacatagaaggctcgaaattaatgtgaatcattctcgtttttctgactgtcattaaaagtccccatttgtattatgtatgagtggtatatcaatatctaaactacactttattgtaggtcccaaccaacattagtttattgacaaatgtttaagagcagccaaaaattcatagaatacctatgattcttaaatcatgaacactcccataactggtatatgtttaggacatgaaaatttccaggctgacaaataatttcgctgtcatcggtcaagactccaggatgatattctgagccatatgttaattttgatg

SEQ ID NO: 28873 - DNA, 460 bp, Homo sapiens
  misc_feature (1)...(460): n = A,T,C or G
cattgattgacantcngcagngncgnggaattcgttctcatcgtgcagctcaagcgcttctcctttcgtagttttatctggcgtgacaagatcaatgacttggtggagttccctgttaggaacctggacctgagcaagttctgcattggtcagaaagaggagcagctgcccagctacgatctatatgctgtcatcaaccactatggaggcatgattggtggccactacactgcctgtgcacgcctgcccaatgatcgtagcagtcagcgcagtgacgtgggctggcgcttgtttgatgacagcacagtgacaacggtagacgagagccaggttgtgacgcgttatgcctatgtactcttctaccgccggcggaactctcctgtggagaggccccccagggcaggtcactctgagcaccacccagacctangccctgcagctgaggctgctgccagccagg

SEQ ID NO: 28874 - DNA, 459 bp, Homo sapiens
  misc_feature (1)...(459): n = A,T,C or G
nacttaagagcatcgtcgccacgngcgggaattcttgaaattatctgtaaataacattatagagatattggtgaaatctgaataaggtctatttattagctaatggtactgaactgcatggctacataagagaatgtcctttgttttgagaaatacacattgatgtatttagggctaaaggggcatcatgtcagcaactaaatttcatttgtggtctgaaagaaggaggtaaagcaaatgtgatacgatgttaacatttgggggatttcagaaaagggtatacagaaattttttgttctatttcaagttttctgtaattctgaaattaggtctcagatagatggaagaggaggaacaatagcaccataacccacacaagcaagccagaaacatagagctcagtctttgtcacccacacttcctccaacttggtctaaaccaattgccaagttgtcaata

SEQ ID NO: 28875 - DNA, 484 bp, Homo sapiens
  misc_feature (1)...(484): n = A,T,C or G
ctttgactgcagtcactaggccangncgnggaattcaggacatacctcctcgatgggtcctgtatggtggaagagtcggggaccctcgaatcccagcttgaagctaccaaacgcaagcaccaggaaatgcgagccatgagaagtcagctcaaaaagatcgaggacctgggggccgccatggaggaggccctcatcctggacaacaagtacacggagcacagcaccgtgggcctcgcccagcagtgggaccagctggaccagctgggcatgcgcatgcagcacaacctggagcagcagatccaggccaggaacacaacaggtgtgactgaggaggccctcaaagaattcagcatgatgtttaaacactttgacaaggacaagtctggcaggctgaaccatcaggagttcaaatcttgcctgcgctccctgngctatgacctgcccatggtggaggaaggggaacctgaccctgagttcgaggcaa

SEQ ID NO: 28876 - DNA, 482 bp, Homo sapiens
  misc_feature (1)...(482): n = A,T,C or G
natcgtagacctttggtccaccgcggnggaattcgncacgcacactggccaggtttatgatgataaagactacaggagaattcggtttgtaggtcgtcagaaagaggtgaatgaaaactttgccattgatttgatagcagagcagcccgtgagcgaggtggagactcgggtgatagcgtgcgatggcggcgggggagctcttggccacccaaaagtgtatataaacttggacaaagaaacaaaaaccggcacatgcggttactgtgggctccagttcagacagcaccaccactagagcgtgtggcacgccgggggtcccgcagcatcctgtgagcatttccgcggngaagctgagcacgtgaagctcgctggttctgtgcgaaaggtattcctggtgctgaataaagggtggtgctgcaaggccaaaaaannaaaattnaaannaaaaaaaaaaaaaaaataaaaaaggggcgcgcgtggtg

SEQ ID NO: 28877 - DNA, 483 bp, Homo sapiens
  misc_feature (1)...(483): n = A,T,C or G
attgagncctcgtagaccactagnccagngcggnggaattcggcaggtaggtctccctactctacccctagaatggaagcattaccacttctttccaccaccagctgagaaggtgatgtcattaggcagaaattggcaccgaccgtgtctgaggtgccagcgttgccacaagaccctgactgctgggagtcatgctgaggtgagcagggcaggaatgagtggttatgttgggaggaggctggagatgggaagagaaccaggctgagacagctctctttctctctgtgtctcagcatgatggagtcccctactgccacgtcccctgctacggctacctgtttggccccaaaggtgggcagccccatcccagacactgggatggcatgtacatgcctgaagtatggcatgtacatggtctgtggggatgtgtggacaacttcccctggtggtaagcataccctgggccccccaccaaggttcctg

SEQ ID NO: 28878 - DNA, 481 bp, Homo sapiens
  misc_feature (1)...(481): n = A,T,C or G
natcgtagtcatgagtcacngtggnggaattcgcgatctctggagctggatgactggccagttgagctcaggaaggttatgtcatctattgtcaatgacctagccaacagcatctgggaagggagcagccaggggcagacaaaaccctcagaaaagtccacgagggaagagaaggaacggtggatccgttccaaatatgaggagaagctctttctggccccactaccctgcactgagctgtccctgggccagcagctgctgcgggccaccgctgatgaggacctgcagacagccatcctgctgctggcacatggctcctgtgaggaggtgaacgagacctgtggggagggagacggctgcacggcgctccatctggcctgccgcaaggggaatgtggtcctggcgcagctcctgatctggtacggggtggacgtcatggcccgagatgcccacgggaacacagcgctgacctacgcccggg

SEQ ID NO: 28879 - DNA, 506 bp, Homo sapiens
  misc_feature (1)...(506): n = A,T,C or G
ggcgttcgagaagannncnnnnnattgaaaccctcgagaccatagcccagngcggnggaattcgctgccccaccatcctctgtgccccctgtaccaccctcagaggccctgtccccacctgcgtgcccctcagcccccgccccacggcgcagcatcatctctaggctgtttgggacgtcacctgccaccgaggcagcccctccacctccagagccagtcccggccgcacagggcccagcaacggtccagagtgtggaggactttgttcctgacgaccgcctggaccgcagcttcctggaagacacaacccccgccagggacgagaagaaggtgggggccaaggctgcccagcaggacagcgacagtgatggggaggccctgggcggcaacccgatggtggcagggttccaggacgatgtggacctcgaagaccagccacgtgggagtcccccgctgcctgcaggccccgtccccagtcaagacatcactctttcgagtgaggaggn

SEQ ID NO: 28880 - DNA, 471 bp, Homo sapiens
  misc_feature (1)...(471): n = A,T,C or G
gcgggannnnntttgctgacntccctaggcagnngcgtggaattcggactctattgtggacccacagaatcagaccatgactaccttcacctggaacatcaaccacgcccggctgatggtggtggaggaacgatgtgtttactgtgtgaactctgacaacagtggctggactgaaatccgccgggaagcctgggtctcctctagcttatttggtgtctccagagctgtccaggaatttggtcttgcccggttcaaaagcaacgtgaccaagactatgaagggttttgaatatatcttggctaagctgcaaggcgaggccccttccaaaacacttgttgagacagccaaggaagccaaggagaaggcaaaggagacggcactggcagctacagagaaggccaaggacctcgccagcaaggcggccaccaagaagcagcagcagcagcaacagtttgtgtagccagtctacca

SEQ ID NO: 28881 - DNA, 473 bp, Homo sapiens
  misc_feature (1)...(473): n = A,T,C or G
tgcgtaaccnnncctgatggccatcgttcangacggggaattcctggtcaccacggaggggagaagggagacacagaggcccaagtggctgttctgggaccatggaagcctgggtcacagaggcaggtaccagcagtcctgcccccacccccgtccctgctggcctccagccagtgccacttggagtcccctgcaccgtgccactttccatccccacaccattgcctgctcctcccatggggctttagcctcccctgaccatctgctcatgtagcctctgactgggcgcacagtggtgcaggaggaaggaccgggaaccctgtgtggctttgggcaagctgacaaacccgtctggaactcagtttccccagctgtgaaatggggccagtccccatgccctgctgtcctcctcacaggactgttgagaggctcgcagggggatggggtgaatccctctcacggggagaggtatg

SEQ ID NO: 28882 - DNA, 501 bp, Homo sapiens
  misc_feature (1)...(501): n = A,T,C or G
ccccccccccgnnnnnntttgaactgagtancctaggacagngccgnggaanttggnggaaatacagtcctgggccctggcctaggaaaggcttctacaaaagtttgctttaatgggatgttctctgctgtgtgcagaggggcacacattccaccagggtgaagctggtggggtgagctcaggaggtccaaattcagccccaccctgctcagcaagctgtgcggccataaaggtcgtgggagggacaggccttgcatggcagtgacccccttgcctcctgcaccaggattcagagcaactacatggcactgcagaggatcaaccaggagctggaggacaagctgtaccgcatgggccagcactatgaggaggagaagcgtgcgctgagccacgagattgttgccctcaacagccatctgctagaagccaaggtgaccatcgacaagctgtcagaggacaacgtgagtgccgcacacacttggcccatggaagactgccggt

SEQ ID NO: 28883 - DNA, 457 bp, Homo sapiens
  misc_feature (1)...(457): n = A,T,C or G
gagcgggccngnnnnnncccttgacatcacgacnctctgaccancnggnggaattcgntctcctggagcctatgaacgtgcccttccatgagccaaggaccacactgtgtgttgggtccatcaagaaaggaagtcactggtaagcatccttctcccaggagtgggccagaggccttgccaagcctcaccaccactgagacccagagtggtcgagaagaggcctcaccatgtcctgaagtgaagagaactccatctctgactggtttgaggcaacggaccggacctccgaatcctccagctttgctcctgctacagaaaggccaagataaatggagagcagggcccacccaactccacagtacaaaaatgaaaaccagcttggccacaggtggaaagccacatcccaagcctgcaagctcccctctcaccactcaacataccaaactcctcctctccn

SEQ ID NO: 28884 - DNA, 474 bp, Homo sapiens
  misc_feature (1)...(474): n = A,T,C or G
ggggtancnnnncctcgatagcactacttagtgtggtggaattcgggaaactgttcctccatatggagtaatagggactggatatgtcatgccaaatgaaagaacacgccaaaccagacaaaatatatggaatgcagagtattaaaaaactggctgtgggccagtgagggacagcgacgtgtgggagctgggaaacaaggtaagccatgcgactggcccagtgtcctgtgtggagtttcctggtggagcctggcagacacccggactttaggagttgaaactgattcagagcgtcccagcagctggagtttgcagggcggagaaccagagagaagagagctgcacagggaaagaaccctggatatccacagaggctcccgttccagtgtgcagcggactacgactactggtgagcacaggcgtgtgaggaagctacccaagaccagggaaggccatcaccccagcaggagagga

SEQ ID NO: 28885 - DNA, 498 bp, Homo sapiens
  misc_feature (1)...(498): n = A,T,C or G
aggggcagggngnnnnnaactgagaccccatcgagancgtaggcagngncgnggaattcgctaacctagcaatttgtcagtggggctttgatgatgaagcaaatcacttacttcttcataacaacttgcctgcggttcgctgggtaggaggacctgcaattgagctgattgccatcgcaacaggagggcggatcgtgcccatgttctcaaagctcacagacgagaagctgggctttgctggtcttgtacaggagatctcatttgggacaactaaggataaaatgctggtcatcgagcagtgtaagaactccagagctgtaaccatttttattagaggaggaaataagatgatcattgaggaggcgaaacgatcccttcacgatgctttgtgtgtcatccggaacctcatccgcgataatcgtgtggtgtatggaggaggggctgctgagatatcctgtgccctggcagttagccaagaggcggataagtgccccacct

SEQ ID NO: 28886 - DNA, 481 bp, Homo sapiens
  misc_feature (1)...(481): n = A,T,C or G
cttgactgcattcataggccangncgnggaattcctcagaaatgaagggggccagagcctcccctaaaccacactggactggggtttgcagatggagttctacattgtccgggctctaaagctctaggacctgctagaacctgctggggcacgaacactatccccctttacactgtcctcctcatggctggccacccggcaggcacaaaccttgctactcagggcttcaatcttgtcttggtccagccggtgctgccggctgcaggcctcggcagtcatggccaccctctccacctcccggttcaggacgcagacaatgttctcaaaagtggccgtcttcttctccaggctctcgcacctctgcaggagctctgaccccgcgtggctctggtctcccaagaggggctttgcctccagcaccgagctcagtagcatggccaggtgctcccgcagccactgcacctcgtgctcctgctgtttn

SEQ ID NO: 28887 - DNA, 473 bp, Homo sapiens
  misc_feature (1)...(473): n = A,T,C or G
tgggggcnnnnncccgatggcactacttagtngcggggaattccccggctcagagcccagtgacattatcatcccgctaaggactgcggacagcgtcttctgccctcactaccagaaggtcagcggggactacaggcacccggtgtacatcgctcaggagatgcccccgcatagcccggcgaacatttactacaaggtctgagagggaccctggtggtacctgtgctttcccagaggacacctaatgtcccgatgcctcccttgagggtttgagagcccgcgtgctggagaattgactgaagcacagcaccgggggagagggacactcctcctcggaagagcccgtcgcgctggacagcttacctagtcttgtagcattcgggcttggtgaacacacacgctccctggaagctggaagactgtgcacaagacgcccattcggactgctgtgccgcgtcccacgtctcctcatt

SEQ ID NO: 28888 - DNA, 477 bp, Homo sapiens
  misc_feature (1)...(477): n = A,T,C or G
tggganacnnnncctcgatagcactacttcgtgtggtggaattcgggaagggcaagaagaaggagcgaggctccggcaagaagccggagtccgcggcgggcagccagagcccagccttgcctccccaattgaaagagatgaaaagccaggaatcggctgcaggttccaaactagtccttcggtgtgaaaccagttctgaatactcctctctcagattcaagtggttcaagaatgggaatgaattgaatcgaaaaaacaaaccacaaaatatcaagatacaaaaaaagccagggaagtcagaacttcgcattaacaaagcatcactggctgattctggagagtatatgtgcaaagtgatcagcaaattaggaaatgacagtgcctctgccaatatcaccatcgtggaatcaaacgagatcatcactggtatgccagcctcaactgaaggagcatatgtgtcttcagctacatctacan

SEQ ID NO: 28889 - DNA, 463 bp, Homo sapiens
  misc_feature (1)...(463): n = A,T,C or G
taagatcattactcgataatgacggcgtagnacagggcggggggagtgtccagggactgtcggaggtgtggactctgcctgcctacctggtctgggaagatgttctaccatgtgagcaaggctcagggtggcggcaagggctgggtggaaaggaagagcaaggccaggcgccggcgcgagactccccttgtcgtccaataacctgccagcgcctggcctggtcgccatcccacttttctccgcagatctccctagagcacgaaatcctgctgcacccgcgctacttcggccccaacttgctcaacacggtgaagcagaagctcttcaccgaggtggaggggacctgcacagggaagtatggctttgtaattgctggcaccaccattgacaatattggtgctggtgtgatccagccaggccgaggctttgtcctttatccagttaagtacaaggccattggttt

SEQ ID NO: 28890 - DNA, 481 bp, Homo sapiens
  misc_feature (1)...(481): n = A,T,C or G
agtgttcnggggngnnnncctgagaccatttgaagngcgtggaanncgcttcatggaaatgaagaggaaggcctagagcctccttcctgccccactgtgggccatttccagaagtggcctagaaatgccaacttcacttacctttcaaaagaaaggtgattcctatcacttgtcaaggtagggagaggtcagatgcccaagcctttgaccacggttttgtagcctgttggaggaagctacttttagctggctacacatgaggccacttgttttagggtgagctccagggatttgcctggattttgaaatcatgtagaacattatccacgtggctgtggctgtggctgtggctgggccctggcaggtggaaaaccatctcccagaaacctgaaagcacctgccaatgacgcagataaccctggccctacagcctgcttgctccgcctataccacagagcacagcctggacattatggagggg

SEQ ID NO: 28891 - DNA, 458 bp, Homo sapiens
  misc_feature (1)...(458): n = A,T,C or G
tacagaagtcattcgaattggacggcgtattcgctaaccgangggagcacgctgagcatgcccgtccgctgggtcacagggctcctgaaggagctgcacgtccgactggagagacggccaaggctggtggttctgtcaaccgtcggggtgccaggcacgggcaagttcacactcctcaacaccatgtttgggctgcggtttgccacaaggaagagctgcggtcctcgaggggccttcatgcagctcatcacagtggctgagggcttcagccaggacctgggctgtgaccacatcctggtgatagactccgggggcttgataggtggggccttgacgtcagctggggacagatttgagctggaggcttccttggccactctgctcatgggactgagcaatgtcaccgtgatcagtctagctgaaaccaaggacattccagcagctattctgcatgcatt

SEQ ID NO: 28892 - DNA, 476 bp, Homo sapiens
  misc_feature (1)...(476): n = A,T,C or G
tgcgcggggnnnntttgctgacgtcactaggccanngcgtggaattctgcgctgatcatcttcaacagcaccaacaagctgttccagtatgccagcaccgacatggacaaagtgcttctcaagtacacggagtacaacgagccgcatgagagccggacaaactcagacatcgtggagacgttgagaaagaagggccttaatggctgtgacagcccagaccccgatgcggacgattccgtaggtcacagccctgagtctgaggacaagtacaggaaaattaacgaagatattgatctaatgatcagcaggcaaagattgtgtgctgttccacctcccaacttcgagatgccagtctccatcccagtgtccagccacaacagtttggtgtacagcaaccctgtcagctcactgggaaaccccaacctattgccactggctcacccttctctgcagaggaatagtatgtctcctggtgt

SEQ ID NO: 28893 - DNA, 481 bp, Homo sapiens
  misc_feature (1)...(481): n = A,T,C or G
tgagatcnnnnnnaatcgagnatcgtatgatcagtgcggcggagtgcaccaccctcaggtgcctccaattggtgcttcagccctggcccctgtggggaacaggtcttggggtcatgaagggctggaaacaagtgaccccagggcctgtctcccttcttgggtagggcagacatgccttggtgccggtcacactctacacggactgaggtgcctgctcaggtgctatgtcccaagagccataagggggtgggaattggggagggagaaagggtagttcaaagagtctgtcttgagatctgattttttccccctttacctagctgtgccccctctggttatttatttccttagtgccaggagggcacagcaggggagccctgatttttaataaatccggaattgtatttattaatttgcttccagcctgacttacctgggttggttaggtccctgggaggctcaaccaaactgaaggcaaagn

SEQ ID NO: 28894 - DNA, 460 bp, Homo sapiens
  misc_feature (1)...(460): n = A,T,C or G
gggcgaggccnccaatgagantcatgagatcctcgcacagngcggnggaattccttaggggttacagccggcgctgtctccgctttcctgtttcgtggcgggcatcttggccaaaacactctccctgccaccttattcctgtagggttgtgatttttttctttcaccaagaaatatcactcgctggtaatttgtcaaactgaagaaacccctgaagaagcagtggtgggcaggcgccgacgctgcggcttccagagcattttggcaaatcaaagccacggaccgttgctgggcctcatttccgcaacttttcggctccgaactgctgagcaactacagcgagccctagattttcgaaactcttcagctacttgcccttttttatctgaaaccatcataccttctgaaagacaaaagcatatcttcattgacataacagaagtgagatggcccagtcttga

SEQ ID NO: 28895 - DNA, 477 bp, Homo sapiens
gaacggactcggttcgtatccatgtggtggaattcgttgatgatggccttgaaatgtcctctgaacagtgtggctctgggggtgtgtaaaacccagggtgatgcctgctctgaaaggggcttccagatccctttgtgtctccagcacctgccgtgtgcctgccccaagctggggtctgtgagctgtgccttggggcccctgcctgtccccgctctgctctctgctgtggcttgctggctgcagggttctccagtgagtgagggatccctgctggccatgcctggagctgagggtggagggaggcccagcagggagccccacaggtaggccccagtgagggtgcattatctacaggaaagttgcctgggacactctagtgggccgtctaggaaatgcagcctttaaggacctgaaatggaggggaatatttttagtttttaaaatttatttctcattaaaattataacacagcctcgt

SEQ ID NO: 28896 - DNA, 470 bp, Homo sapiens
  misc_feature (1)...(470): n = A,T,C or G
nggagccggggnngnnaaactgagactgaagacatcngcgaagacttcggatcccttccagctatagcgcacggtgatttcatgtttatataggcctagatatttgttttaaagtcctcatatttgcaaaacacggggcaaaagtctttgactttttctcttctaacgcatctcccagtcttacaaagttggttgtactctctccatttgactgaggaggaaactgaggctcggtgaagttacttgcctttagccaatatgtggcagatccaggcctcaaatccaggtcttctggccctgagttccactgtttctccactgctccacacggcctctcaccccacaagccctcggcggctgcacataaatgatccttgacagattactgcctcactcaggcccctgtcagatgttactgctgacagttggggaggaggaggagcgagaacattgtgtgccaggatgccagg

SEQ ID NO: 28897 - DNA, 451 bp, Homo sapiens
  misc_feature (1)...(451): n = A,T,C or G
attgattgccgttccactagnccgngcggtggcaatcgaaggatggtgccctgtcccccataacagctacaggcataccttatcatctgcatcgtttcaaaaccaaaggtacagatgcattttgatgtcttggggaagttttaaagggaacatgcaatacttcagcttcttaggattcatcaagttcttgaacataattttcatcactggtctgttctatctggagatatcagttatttttggattaagattaagagcatttcaggaccttgctggaaaacctgaatttagaaaatatgatagtgactctgacagatgtttattttccaaaatggattatttctttaggatgtgatatcctgtgattttattccctaggatattttcatgatattgatagtcattttgaaaatagaggataatgcttgaacttgaacaaggtaggaagcag

SEQ ID NO: 28898 - DNA, 441 bp, Homo sapiens
  misc_feature (1)...(441): n = A,T,C or G
ttttgagacatntttngatcantcgaaagngcggnggaantccctgcctcctgccccagcaggtaccacgggcctcggcccatcttctttcaaggagtttctgcggttccccgaggtgcccgggctggccggtggtatcgtggacgcaagcctgaccatcctttgtatgtgccccgggtgctgcgcacgcaggaagaatgggggctgacctctacctcggggctcaagagagaggccccagttggcagggacccagaagagcctggagatgttggtgctggagaccccaactctgatcagggactccctgtgctgatgactcaaggaacagaggacctaaagggcccaggacaaaggtgagagaatgatccactgctggaccctgttggccctgagcctctggggcctgagagtcagtcagggaagggagacatggtggag

SEQ ID NO: 28899 - DNA, 444 bp, Homo sapiens
  misc_feature (1)...(444): n = A,T,C or G
aattgagaccctcggtagatcatcagaaagngcggnggaattccggtgttcttgcctgcccagctccacccgctggaaaatgtgctcctccaggatctttgtgtcttactccaaaccctcctgtgaatgtgtgggccaaagggatcaggaaacagagaggggctgagagtgaattacaaaaactgagaggaaagaatgaaggaaacccataaacacatggcaaagtagaggatgggtcgggattcgcagagacgggaagagcgaaagaaggatccaggcgcggtggctcacgcctgtaatcccagcactttgggaggccgaggcgggtggatcatttgaggtcaggagttcgagaccagcgtgcccaacatggtgaaacccccgtctctactaaaaattaaccggatgtggtgctgcacgcctgtaatctcagctactctgagg

SEQ ID NO: 28900 - DNA, 463 bp, Homo sapiens
  misc_feature (1)...(463): n = A,T,C or G
gttctcnnnaaggaggggcncgggtnccnccccctgaagacccatgagatcgtggcagaanncgccngcngaggagctgnctccctcctccccgatggatgcctggatcctgagccgccttgccctggctgcccaggagtgtgagcggggcttcctcacccgatagctctcgctcgtcactcatgccctgcaccacttctggcttcacaacctctgtgacgtctacctggaggctgagaagcccgtgctgtggcactcgccccgccccctggggccccctcaggtactgttctcctgcgctgacctcggcctccgcctgctggccccactgatgcccttcctggctgaagagctctggcagaggctgccccccaagcctggttgcccccctgcccccagcatctcggttgccccctaccccagcgcctgcagcttggagcactggcgccagccagagctggag

SEQ ID NO: 28901 - DNA, 442 bp, Homo sapiens
  misc_feature (1)...(442): n = A,T,C or G
nttgaaaccaacttgaggtctagtanagtgcggnggaannccccacctcctacctggtaaggagagacataaatcaatggaatagaatcgagagttttgatataaactcatacctcgatgatcaattgagtttcatcaacagtgccaagagcattcagtgggggaaagaatcatattttcaacaaatggtgccagataacgacatccaaaggagtgcaactgggcccctgtctcacaccatctacagaaattaagtcaaagtgcctcaaacactaagagctaagactataacattcttagaagaatacagggttacctctttatgatcttgatttggtaattgatttttagataacactaaaagcacaagcaacaataggaaaaaaaaaaagtaaatttaacctcatcaaaatttaaaatttttaggctgggtgcaggggct

SEQ ID NO: 28902 - DNA, 434 bp, Homo sapiens
  misc_feature (1)...(434): n = A,T,C or G
nttgagacccctgatagcgtgcgaantcccctcaaagaactgcgctgcctctgagcacctgggcaagctctgtgtgggatgcagatactcttcgaaataagggttctgcttcttttaggctgcaagagcagaactgggatgtgaattccagcccagggcattttgcaccctggatctggtttatgctcttacttgctgcaactatgatggtggctgtttccccggggtctcccagcccaagtctggtcctggagtggctcacagcaagtctcattgccccgaggcaggaaggctgcagagaaagttacccttggagtagggagagaggagaggaagccagtgctctcttcaagtggcctgctctgtgttcacaggcccgatgggctccccaaggctgtcctagccaggctggatctgtgccaggccttgacccn

SEQ ID NO: 28903 - DNA, 477 bp, Homo sapiens
  misc_feature (1)...(477): n = A,T,C or G
atgggccggggnnnnnnaaactggagaccatggtagccgccggaanncgccngnntcctttgccattgagcctgctcccctcaatggggggttcaatcaatgcttgtggggtttgtttgttttgagacagggtcttcctctgtcgcccaggctggagtgcagtggtgcaatcagagctcaccgcagccttgatcttcctggctccggccatcctcctgccttggcctcccgagtagctgggactacaggcgcacaccaccatgccaagctaatttttaaatttttttgtagagatggggtctcacttttgttgcccagggtgctttagaacccctgggctcaagtgatccttgacctcccacagtgctgggattacaggtgtgagccaccgtgcctggcctcatgggttttctttgttttggtttggttcgtttttgagacagagtctcactctgtcactcaggctggagtgcagtg

SEQ ID NO: 28904 - DNA, 440 bp, Homo sapiens
  misc_feature (1)...(440): n = A,T,C or G
ntttgagaccattgatagcgtgtggaannccagccatcaggnaagccaagatgggggcatacaagtacatccaggagctatggagaaagaagcagtctgatgtcatgcgctttcttctgagggtccgctgctggcagtaccgccagctgtctgctctccacagggctccccgccccacccggcctgataaagcgcgccgactgggctacaaggccaagcaagggtacgttatatataggattcgtgttcgccgtggtggccgaaaacgcccagttcctaagggtgcaacttacggcaagcctgtccatcatggtgttaaccagctaaagtttgctcgaagccttcagtccgttgcagaggagcgagctggacgccactgtggggctctgagagtcctgaattcttactgggttggtgaagattccacatacaaattgttg

SEQ ID NO: 28905 - DNA, 439 bp, Homo sapiens
  misc_feature (1)...(439): n = A,T,C or G
nttgaanaccttgatacccttagacagngcggggaattacaggccttagctgacctctgagccagaagagagtgaaacctgcttctccatgggactgacgcatgtctattctgcacagcgcagcctctgcagcccagcctcagtgcattgctccacctgagtattttcctggtgacctgggaaaacattggatccctcagtgcggccagaacccaactccaagccttgggacatcctagtgcctcagggctgtggcatgcagctctggagtaggtagccaagatctaaggccagcactcaagcagggaaggagcccccaacctgagagcactgagaagggcaagatgggtgagtccctgagtcagggcaggagtagggtgtgccttcctctgccaggctggtccagaaagggtgtggccactgtgtctgcctgaggtgg

SEQ ID NO: 28906 - DNA, 445 bp, Homo sapiens
  misc_feature (1)...(445): n = A,T,C or G
tactagcccttagtagatctttcgaaagngcggnggaattcccctctagtctttatagcccccatttcaccggggcccaagagctttttaaggctttttgtgttgaaggcaagcccgtgactgtcaccagaggccattggcacggaaggcgggcctggccaccctgtacagagtgtagcagtagggagtctctcaccgttgcatggtcctccccatagcatgccgaacccaggagtctgtctcactgtttatccaaacaccaggaaagggcctccctcaaaaaagcatatctccacttctctctagctgtatctaacccaccgtgtgaatgaactgggagaggggcatgctccccagctgtgtgtagtcctgacttctcaacaatctatcaccatgtgggacacgtttcccatccaccctcctagctctgctctcagagctaggn

SEQ ID NO: 28907 - DNA, 461 bp, Homo sapiens
  misc_feature (1)...(461): n = A,T,C or G
atttgaaaccctggctcgtagacattagtcagngcggtggaattcccggacttggcccctgggagctgacctcagcagtccggggaaggtccctcctcgattgtgggcccagccagggtctgccgtgggaaatgcccaggatgatacctaccggatcccagcggattgctctgggggagggagggagagagacgggaccatgtccgccacatgaaagaggagaggatgtactgggggaagccaagtcccacagagaggaaggccttgcccaaggccacgcagggaaaggggagcagggctggggggcacacccaccctcctgacctgtgtccctctcctgcctgtcccaccgcaggagccacactggtgctgggctctctacaggcatggaaatgctcgctttgcatatataatgctcattcccaaaagcccacaagtgacatgcaaggcaacggggattn

SEQ ID NO: 28908 - DNA, 454 bp, Homo sapiens
  misc_feature (1)...(454): n = A,T,C or G
actggtgaccctaggtagagcgccgttattcgngaaggaaggatggcggggaagtgaggaggcaggagcagaggccacagggaccgtccagagatgcggtggagacagaggagcttccttctcaggctgttgctgggaagcctgagaggcggccagcaccaccctccgctcactctcccctcagcctcttcgcttcccttctcaaccctttctctcctcctcgcctcttccctttcttgctgtcttgttagtccctgtcccaaaactcctggctcctttgttctgctgccgtggcccccacccaggaggaggtctcaggcaccattccccccacgagggatccacacaacaggttcatgctggggctgggggagccccgctgggttcctgatgccttgtgcacagggagttgctgcagtcanttttggactctcctgaatgtgtccacatgttc

SEQ ID NO: 28909 - DNA, 566 bp, Homo sapiens
  misc_feature (1)...(566): n = A,T,C or G
gcgggggggnattgaanccccatcgaaccctagtccgtgtggtggaattcgcagatggcgtccaggtacacagtggcgagtgtgattccgcagtcttgggctgtttggccaagcgcccgccggacatggtacgccgaagggtcatcggcgtggagtcctcgctttcagcgtccgcggctgggaaatcggccatcgctacggcgggaactgggactcgggctgcgtcccggcccttccacatcggtccaccgcactcgtgggcgcccgcattggtgctgacataatttcctgacctctgacccgtattgtctcgcgattaaaggtccagatttggaacaaatctctctagagattgaacagagctgcgcctggatccctcagcagtgaggagacctgaagaccagaggaaacacagcaagggctcaccagagaagacagggcaaggtgagggggatctcctagcagaggaaacaacatgcgccaatcaagcanagatatttttgtgcatttcagggacacagagaggaaagacagtggcagatggagacgtatanagcangggatct

SEQ ID NO: 28910 - DNA, 564 bp, Homo sapiens
  misc_feature (1)...(564): n = A,T,C or G
gaggcggggactggacaccactcggagagccgctatncggcgggaggatttcttgagccaggtgttcaagaccagtctgggcaacatagcaagacctcgtctctacaaaaaaatacaaaaattagctggacatggtggcctacgcctgtggtcccagctacaagggaggctggggtgggagatcacttgagcctgggcagttggggctgcagtgagccatgatctcgccactgtactccagcctgggcaacagagcaagaccccatctcaaaaatcagtgaatagaaagacagatgttaagagttcttgagcatctgcaatggtagtttttctttttaatgagtgtttccttaccctctccccaataaaaatcaacaaccagcatgatcagtgttaagtaggagggtaagggctttgcaagctcttcatggcaagcggccctgccttttgctttccaagttcctcagcaaatgcangagcaggcagaggtgggtacatgggcaggcctcctgagggctctgtacccactcttcaccactttgccgtagtgctgtggggacctgg

SEQ ID NO: 28911 - DNA, 482 bp, Homo sapiens
  misc_feature (1)...(482): n = A,T,C or G
ctcgacccccctnnnatcgtagaccactagtccangnggaggaattcgctgtcgatctccgggttgtccgactggtactccatgccgttgagcgcctctgtgatgaggctgtccagcttggcgtcatcctccatgtccagaagatcgtcggctacgctcactgtgctgcacctgacctttttttcatgtaacaacatatcctgtagataatcccacaacattccgtgaagaggtgtctcactctctgtccactcgtcctcgcatccaggctgcagagcacccagacctgtctggatggacactgggctgctgcctgcattcggaccttacaaacaatacagcaatggtcaccacatggcgacagcctgtgctccaaacgctgtgggcctagctgcatcaaagggcacctgcgtttgactntggaaggagattgaccaattgtcagtttccgtgatggttttaaatatggccacacattcttt

SEQ ID NO: 28912 - DNA, 460 bp, Homo sapiens
  misc_feature (1)...(460): n = A,T,C or G
gagccagncnagggcccatgaggctcttcgaatgatcgcgctcaganagccnggnggaattcgtttcctttgcaaactgacataaaaatgaagaagcaaaatgtgtctttagttatatccaagttccaaattcaagttaattactgctgctcctcactcttctaccttttccttcaaatttaaagatgggctttgcagagattaaagcttcaaaaaaaatatgggaaaatatgttaaaatgttgacctgaaaatgaagtggatgactataaaactcttgagagaattagactttttgtagcagtttattacatgataataccttaaaggagatcacattcagtgacctgcgttgacaggtaatatttaaaattaagtattaatgctgattaattcaggcagatgggtggtagcctaaagtatagacatttttccaatattaattttgatattaaataaag

SEQ ID NO: 28913 - DNA, 463 bp, Homo sapiens
  misc_feature (1)...(463): n = A,T,C or G
gcccgccactgaaaaccctcgnactagagatcctaggaagngcggaggaattcgaggcgtgcgcaggagtcaagagctccggcagtgggagggtgccggcccctctgcttcgccaccaccgagtccatgtccctacagtgtgttcgagggcgagctctccgataccatccccgtggtgcacgcgtctatcgccggctgccgcatcatcgggcgcatgtgtgtgggagacagaagaaattctggcagatgtgctcaaggtggaagtcttcagacagacagtggccgaccaggtgctagtaggaagctactgtgtcttcagcaatcagggagggctggtgcatcccaagacttcaattgaagaccaggatgagctgtcctctcttcttcaagtcccccttgtggcggggactgtgaaccgaggcagtgaggtgattgctgctgggatggtggtgaatgactggtg

SEQ ID NO: 28914 - DNA, 580 bp, Homo sapiens
  misc_feature (1)...(580): n = A,T,C or G
nggagtactgancactagtcagggtttcgaacaccactccgngnggngcaattccctgccacagaggaggaggccgaggtggatgagtttcccaccgatggggagatgtcagcgcaggaggaagaccgcaggaaggagctggaggcgcaggagaagcacaagaagctttttgagggcctgaagttcttcctgaaccgagaggtgccccgtgaggccctggccttcatcatcaggagttttggtggggaagtgtcctgggacaaatctttgtgcattggggccacctatgacgtcacagactcccgcatcacccatcagattgtcgaccggcctgggcagcagacctcagtcattggcaggtgctacgtgcagccccagtgggtgtttgactcagtgaacgccaggctccttctccccgtggcagagtacttctctggngtgcagctgcccccacacctttcaccctttgtgaccgagaaggaaggagattacgttccacctgagaagctgaagctgctggctctgcagcggngagaggacccanngaaacctgatgagtcagaagaggaggaggangagn

SEQ ID NO: 28915 - DNA, 495 bp, Homo sapiens
  misc_feature (1)...(495): n = A,T,C or G
ggggggttttccnnaggnnngnnnnnaaattgagncccctnnactcgagnaccactaggacagngcggnggaattcatcacacaggccctttccgtggattctgaaagtctcagtagaaatggagtgatgtgatatgcccaagaccccatttctactgagactttcagaatcacacgggcgctttccggggatttcatttggggcacagaaccaacggagttgtgcttttgttttcagcctatggaatgatttccttttgtctgtcttggtcaagtacagacgaagctactctggcatctgcacatttccgtgttacagcagctgcctgatgaattttatccacctacatttcagcatgtggctctgcgtggacaggtggactgacgctgcggccgcatggaaccttgagaacccagggacgagccagtgccgggaaggaactgccgggactcaccgagctgcacttaactgttctctttctggctattttttgg

SEQ ID NO: 28916 - DNA, 483 bp, Homo sapiens
  misc_feature (1)...(483): n = A,T,C or G
agaaagttgccnaggnnnnnnnaactgatnacactcgtagaagncgntgaaaaccatcgcagcaccaatgcccagggcagccattggaaacagaggcggaaattcctgcccgatgacattggccagtcacccattgtctccatgccggacggagacaaggtggacctggaagccttcagcgagtttaccaagatcatcaccccggccatcacccgtgtggtggactttgccaaaaaactgcccatgttctccgagctgccttgcgaagaccagatcatcctcctgaaggggtgctgcatggagatcatgtccctgcgggcggctgtccgctacgaccctgagagcgacaccctgacgctgagtggggagatggctgtcaagcgggagcagctcaagaatggcggcctgggcgtagtctccgacgccatctttgaactgggcaagtcactctctgcctttaacctggatgacacggaagtggcn

SEQ ID NO: 28917 - DNA, 461 bp, Homo sapiens
  misc_feature (1)...(461): n = A,T,C or G
nactgagactctagtcgaagncgntgaattcgctgcactccagcctgggcgacagagctagactccatctcaaaaaaacaaacaaacaaacaaacaaaaaccctgaaaccaaaaaccaaaacaatcctaaagactgctgtagcctaatgagaggttgatatagtttgggtctgtgtccctgcccaaatctcatgtggaaattaattcccactgttggagatggggcctgctgagagctgattggatcacaggggtggatttccctcttggtactgtcctgagttctcatgagatcttttgtttaaaagtgtgtagcacttacccaccgccaccccagaccccatcttggtcctgctcctgccatgtacgacacctgctcctgctttgccttccaccacgagtgaaagctcccttgaggcctccccagaagcagatgctgccatgcttcctatacagcctgn

SEQ ID NO: 28918 - DNA, 419 bp, Homo sapiens
cagagcttctccatgttgcccaggctagcctcaaactcctgggctccagtgaccctcccgccttagtgtctcaaagtgctgggattacaggtatgagccaccacgcccggtcagaagctgtgtttttaagtggacataccatcttgtcctgctgaagtatctccatgtaatcacaatatctatgtcacccaaatctcctccttcctcctccctcccccaaaacacccccacaggcatgcataccctcccatgcgctggaggcagaatctcccaaggggagctggccaggagaggtgtccctgagttcagatggaggtggaagccagagtggggctgggaccacccagtgacatgaggatggggcttgggataaagccctggggacactgacatttaaagtgtggacagaaggagctact

SEQ ID NO: 28919 - DNA, 463 bp, Homo sapiens
  misc_feature (1)...(463): n = A,T,C or G
agaggccccnccngcgccctaccgaggccctcgtangaacgctttcggacagccaggcgaatagngaaagagcaaaggattataatacttatttgcgggacttttcagaacccctttttcagcagaggaaagacgtgttgcagagccgcagagtggggttgcttgttcatgtatgtcggccaaggacacccgttctgtctgatgggcttacatttgagcagatacctacaagggaatgagccatgtggacacaggagggaaaggcattgccgacagtggggagtagctcctacagggcttggaggtggagctgttcctggggaggttcagggaccatcaagaaaaccagggagacgaatagcctggggcgaagggaaggtgagaagacaaaaggttatagcggtaagtgttgtctaaggactccagcttttcctccaagtgagatgggggtcattggaaaagt

SEQ ID NO: 28920 - DNA, 467 bp, Homo sapiens
  misc_feature (1)...(467): n = A,T,C or G
agaggccnngcnnncngcgccaatgaggncctccgtacngancacnctcggancagccaggnggaanncgaagcgagcagagcctccttcatgctttctgactgctctgtccagaaccccattgcagtaaatgagaaactgctgcagagcccaggaaggagatcctgccctgggctggcccccagctttctccaaccgccacccacaaaactggttgtgcctagatgctcccaggggttgtgaggtcattgcccacatgtgtgtcagccaggcctgtggtcgctagttggtaactgtccaaggggggtaactggaccatctcctgcaggagctgctgcactgtgcctggtcccaggtaggaattcaggccttgccagggcaccaagggacccactgtgggaccagcgacctggctgcctgcataggtggcagaagatttcagtagaaacagcaccaagcaatgccag

SEQ ID NO: 28921 - DNA, 453 bp, Homo sapiens
  misc_feature (1)...(453): n = A,T,C or G
gagccngccnagcgcccatgagnccatcngatgagcgcgtcagancngcgcactgatccttccgaagaataatcatgccactttaatttgcatccactttactggtctcttaaacttttcatacccttgatctcatttaatgctgcaaggtaggtaataagcatctggtaagaaactttgaaaatgagactggatttctaattctaatgcacataatccagggatttgctcatctatattggtagatctgcctgaaaataaaaggtaagtgagaaatggtcatggtgtatgtagcaatctggataatggaatggagtaggtgttctaatcaccccctcttctgggtttcttgtaatcaagcaagagagggagatttataaatggatggacataaggagcctacttgagtagacctttttgcccccacttcacaggatggcagctctactgatg

SEQ ID NO: 28922 - DNA, 462 bp, Homo sapiens
  misc_feature (1)...(462): n = A,T,C or G
nactgagactctagtcgaagccgttgaattcggaggaggcagggcagagaagccagctgcccgccccgcaaaacccgcccgaggctccgacagcgctggcctcaggccactcagccacttctgacccccaggtctcgcattcccttccccacaggtctttgggtccccggcctcggcctcatgtcctgcagaactgccgaggccagggaatcggacaggcatggggaaggggatgtgagatctgagggccagatgactgccccctttttcttcaattattttcactgtggtaaaatacacataaaataaatttaccatcttanaaaaaaaaaaaaaaaaaaaaaaaaaaaaaaaaaaaaaaaaaaaaaaaaaaaaaaannannnnaannnnnnnnnnnnnnnnnnaaaaaanaannnnnnnanaaannnaannnnnnnnnnnnnccccccccctcgcccccg

SEQ ID NO: 28923 - DNA, 561 bp, Homo sapiens
  misc_feature (1)...(561): n = A,T,C or G
gacgccccaattggggccactgatcactatccgagngggcaantcgaggtttgcggggccagtgttgcggcgacgcacctcacgtcgagaatcgggaggaggagactgcaaggataggcccaggtcagtgcgagggacggtggtggggagggggtcagaacatgaggaaagcccagtctgagaccccaatccgtgccttcacccccacacttagcaatcccccacccccaccccttcttcgtcctccattttggtgcctgcagaggcctggagatggatctgcagagaagatggtgggctttgcgggagagaagggcacagactggctcccctcgcccccccgagggtacatggggcctctctggtggaaaaaaaatgaaatttaaaaaaggcctttgaaatccagggctctgaattttgaaaggtgggtagtcgggcctctgtcctcggtgctgatcagttcaccaagaattgagtccattntctctctgtctcctaggagtaatggagtccaaagaggaancgagcgtanacaatctcatcgtggaaatgtcaaccgga

SEQ ID NO: 28924 - DNA, 454 bp, Homo sapiens
  misc_feature (1)...(454): n = A,T,C or G
gagccggccnagcgggcatgaggccttcgattatcgccctcggacgccngtgcaattcgcctacctgcattatatagtcagcccctcttggttgtaatccccttttactttaacccgttgctaacaagctctctgcgtgtcggcagtcctactccggacttgagaagctgagtgagtgacggcgactgaggcctcacagggcccttgggtgtttattctgaacagtgcatcctgcaggctgagaagggtaggtgtggaagagccggggaccacctcgggtacagaggcacaattactttccttcacttgaatgaaaccccaagaatcctttaattctgtggccatttgccaagttttcttaagagccgttcagctgttgtgtgattcattgaattatgattcatcgaggtttccatttaactcactcagccttggtgaatctagtgccggtggt

SEQ ID NO: 28925 - DNA, 474 bp, Homo sapiens
  misc_feature (1)...(474): n = A,T,C or G
gggnagtcncaattgagnnccntaactgatgattctaggacangcggtggaattctctatccagctgcttccttgtagccaagaatgagttcaatgaattgtgattcactgattttattgattttgttttaaaacagggagactggtatttttgaagctgctatcattttctatttctttattaatttctttgtaatcatcttattaaagttttcttatttagtgggagagggagctttgtttaagtttggaatttgcctaaggcagaagttataaggcttcataaccttttgtatgtattgccaatatttgaaacttgggagattacgtataaaaaatacctagttttctgggtggaggatggggcatgctgtcatctcaagtctgctgcggctcacccccaccacctttaccccctcccccgcccttcccatcccccactgcacttcactcatgtaagacgtctgcccggtg

SEQ ID NO: 28926 - DNA, 522 bp, Homo sapiens
  misc_feature (1)...(522): n = A,T,C or G
ngaagggaggnccccnnaggggnnnnnnnaattgaagaccactaattgagagccgctggaanncgcacnggacccacatgttgggtaggaaaacccacctggaggggccaagggccaggaaccatggtctcatataccttnnacttcccacctccagnnggaaaacccgatttttctcttctggctgcgtcctcctcctnctctcanncctcagtgtctcccttctcctaaggccacannggccttcaggaacccccactgtccagcacacctggtcagacataacanctacgagactgaggccgagagctgctgtcatagttgtaatagcggcctggagtcgaggaagagaaaaataaggctcctggtgtcctctcagctgccttaagactacttaggctccccgaactcaccattccacagcagtctctcataggcttcttggccccggctgaggatagaagaaaacttatcctggatgtcctgtgccccacacagagcagccatctggaccatcacagc

SEQ ID NO: 28927 - DNA, 487 bp, Homo sapiens
  misc_feature (1)...(487): n = A,T,C or G
aggagcagtncncnnagggggnncctttgagnaccttgcctgntatcctcgnaagngcgnggaanncaagaggngntggaaagcactatggtgtgtgtggacaacagngagtatatgcggaatggagacttcttacccaccaggctgcaggcccagcaggatgctgtcaacatagtttgtcattcaaagacccgcagcaaccctgagaacaacgtgggccttatcacactggctaatgactgtgaagtgctgaccacactcaccccagacactggccgtatcctgtccaagctacatactgtccaacccaagggcaagatcaccttctgcacgggcatccgcgtggcccatctggctctgaagcaccgacaaggcaagaatcacaagatgcgcatcattgcctttgtgggaagcccagtggaggacaatgagaaggatctggtgaaactggctaaacgcctcaagaaggagaaagtaaatgttgaca

SEQ ID NO: 28928 - DNA, 469 bp, Homo sapiens
  misc_feature (1)...(469): n = A,T,C or G
tggganannnnnnnnngnnatcgagatcactagtccagngttgtagaacccctagtccangcggnggaattcgggaaggactcgtgtgggaacattagtgcagctctgcctccgctgtcggcccaggttttcacagctccagaggctgaccctcatccactggaagtctcaggtacaccccgtgttgaaggtgagagctccaggctgtcctgcacatcagctgtgacactctgggactgttcagtactctatgaagtgggtcaggcaccttgggggcccaacgctgctccgtggggatgtctgcctgcctgcctggatctcttttcctgctgtttcctccagcagggaggtatcagaggcggggacacccaagtaggcctggcatgggcagaaaggaggtcacagctaacgcggtagagtggggttggcaccagccacttgtctgtttcccttgtggatcttagcctgt

SEQ ID NO: 28929 - DNA, 454 bp, Homo sapiens
  misc_feature (1)...(454): n = A,T,C or G
atagacgacattatagagngcggtggaattcggggaggcagggcaggatggcaagccccccggcgatgtcctagtgggccctacagcctccctggctctggcacctgggagcggagagtccatgatgggtgctggagattccggtcatgcatccccggacacaggtccatgtgtcaatcagaagcaggagccaggtcctgctcaagaggaagccgagttaggtggccagaacctcgaacgagacctcgaggggttccgtgtgtccccgcaagcctctgttgtgctggaacacagagaaatagcagacgaccctctccaggagcccggggctcagcagggcattccagacaccacctcagagctggcagggcagcgagaccacctgcctcattctgcagaccagggcacctgggcagactctttagctgtggaactcgacttcctgcttgacagc

SEQ ID NO: 28930 - DNA, 466 bp, Homo sapiens
  misc_feature (1)...(466): n = A,T,C or G
agaggccggccnaggcggcaatgagngccatccgaatgatcgccctcggacagacnggtgcaattcgcttacctgcattcacaagtctaaccctgagggtatttttcttcagccctctttaagcatttcctaacaaaacagtgtcagtaacacaactttattattcaattctcatctcatcaaagcatcatgacattattttattttgaaatgacatggttcgagggccctgacagccaaaaggatatgtctaccaggccttaaactttttttttttttaactaccccccccccagtaaaggaagaattatttattaaatgaatgaaccaatttatttatttatttatttattttggagacggcgtcttcctctgtctcccaggctggagtgcaagggcgtgatcttggctcactgcaacctctgccctccgggggcaggtgattctcttgcctcagcctcccgag

SEQ ID NO: 28931 - DNA, 559 bp, Homo sapiens
  misc_feature (1)...(559): n = A,T,C or G
tgctttgtccannnaggggnnnnnnnacctcgaatcnacacatcgaaagagccgctaanncgaanaacntaattaaccatgatggatgaatctatgttattggactaatttgcttcaagaaacaccagaattttgaaaatccttaatttttgacagcccctcaggcctggagagttatctacagatgttaggatatgtccacataagaaagcatctaaactgaactgagagcacagcgggctaccctggacaaagtaaaggtggaaactaggtgatgtggcctttgagtatgcagattccttgtatcacttgctcgctactttctagggtcttaatagtagtcaagaaaagggatctgagaaaagtactctttcaggagggactagaaagagaagggggtgatatgttacacaaattaaagaaggatgtcttaggcatttagtaaaaattcagagggtccccgctatcctcggaggatgtgtttttttgatttggtttggtttggttttttttgagaagaagtttcattctatcgcccaggctggagtgcaatggcacn

SEQ ID NO: 28932 - DNA, 460 bp, Homo sapiens
  misc_feature (1)...(460): n = A,T,C or G
cgtagaacnccntnatagangacccttagacagngcggaggaattcggtgttcgtacccttcagcgcggagctgcccatggtggcgcccaacgacctcgtgttcgatggctgggacatctcgtcgctgaacctggccgaggcgatgcgtcgcgcgaaggtgctggactgggtgctgcacgagcaactgtggccgcacatggaggccctgcggccccggccttctgtttacatccccgaattcatcgcggccaaccagagcgcgcgcgcggacaacctcatcccatgctcgcgtgcgcagcagctggagcagatacgcacggacatccgagacttccggtctagcgcggggctggacaaagttatagtgctgtggacggcgaacactgatcgcttctgtgaggtgattccaggcctcatcgacacagtcgagaacctgctgcgcatcattgagctcgggcg

SEQ ID NO: 28933 - DNA, 474 bp, Homo sapiens
  misc_feature (1)...(474): n = A,T,C or G
ggagtgccggggtnnngnngaactgaaatctcgaaaaactgatgtcatcgcacagncnggnggaannnggcacatcaaacctccccatgtaggaacttgctggctgtccacagagcagataggcagctccaaggaggggacattttcctggagctgttactttccaggggagctgccaagtgaaaagacagttgctggaatggaggccaaatccttcatgtgctggtccaccaggactggagcatggccacccaaggcatttgttatctgctaatgaggctaatcaatggctggagggtggaaagagtggtgcttactgctcagcaaccagagtcatgccaggcttttccagacaactgtgctgcatgtgtattattttctcacaaatggatgtggcattttacaagtaggtctctgtcacttgtgaatgcagacagcatgtgtggttaatacacatgctcgtttaaaaaaagg

SEQ ID NO: 28934 - DNA, 469 bp, Homo sapiens
  misc_feature (1)...(469): n = A,T,C or G
aggtagttttaactgatgactncttttgagggcctggaaanggcgcagggngtcgcggagcggctgggaaggaggggctgggaatcttggagccccttggcccgcggtgaaagcgggtgacccgccctgcaagtgggatgcccccttcggccttctggagcgcaggtgggggcgcgcgcccatcgggggctcgcactgcacggagggtcgcggtgccggggagctgaggttggaggatgcagggcggcggccctggtgcaccgtgggggagttcgcacgccgggcagcgatcttctgccgggacctggcgttcttcacacacggcttattcgtgacggatccacagagcaatgcactctgaagccggagggtagaaagtgctggaatgcgcgcccgggcccaggctgtcgcgagccttcagcaagccagtgcacacagagagggctgcccagagatcccggtcagcgct

SEQ ID NO: 28935 - DNA, 453 bp, Homo sapiens
  misc_feature (1)...(453): n = A,T,C or G
ggggagactgatgacactagaaagactgatggtctcgaacagncgagggagcagctctcctaacgagcagctggggtggggtggaggcattgctctggcaactgagcaggtccctctcaggcctctgctccaggcccctgaaggagggtggctgtctgcactgtggatacagctctcctgccacctgtgtcctggtgccaagagcctgaaaccagacctggccttccggccaaaagggactttctctgctttcacccagccggaactgagacaccactagaagttcctcctggctgcctccacctcaaggttcccaccaggctcctgcctttccgagaggaggctctgatggacagtcttcctggggagcaagggagggggctggagccctagaaggaacaaggaggtctggggcagctgctgcggcagtgatagactcgtgtgccatgggcc

SEQ ID NO: 28936 - DNA, 457 bp, Homo sapiens
  misc_feature (1)...(457): n = A,T,C or G
gagccagnnnnngccccctgaggccatccgannacatgatgcctccgagagcccgnngcaanggcaaggagaaagaactgcccctgtatgcgcgccttatcttcctgcgccttctgactgagctgcacgcaacaggaacctacaagttccagaacacagagctaccgaaggagggctttgacccggctattgagaacgacccgctgttctatctagatgcccagaagggccgcttcgtcccgctggaccaagaggcctacagtcgcatccaggcaggcgaggagaagctgtgattccccccatccctctgagggccggcggatgctggatccagagccccacgttccgccccagagcggtcctggacaaggccagaccaaagcaagcagggcctggcacctccatcctgaggtgctgcccctccatgcaaaactgccaagtgactcattgccttcct

SEQ ID NO: 28937 - DNA, 478 bp, Homo sapiens
  misc_feature (1)...(478): n = A,T,C or G
aggagtgccngnnnttnngnnngaactgataccctcgnaaaactgataccctctgaacagngcggnggaanncggcagngacacgattaagcccaacgtggatgacagcattgaatatttctccaaacacaattacgctgactaacggatagtgagctcgtgcccctgcctaggtgcctgtgctgggtgtccacctgtgcccccacctgggtgccctatgctgacccaggaaaggccagacctgcccctccaaactccacagtatgggaccctggagggctaggccaaggccttctcatgcctccacctaaaagctgaatagtgacgccctccgccaagcccacccagccgcacacaggcctagaggtaaccaataaagtattagggaaaggtgaaagaactgggatgccgacctaaaatgtaaacagaagttttggggaaactctgagggggtgatacactcccgggccatggggcg

SEQ ID NO: 28938 - DNA, 455 bp, Homo sapiens
  misc_feature (1)...(455): n = A,T,C or G
catagacgactattattgagngcggtggaattccctgcagccaggcttgccgggccgcccctctttcccctccctgggcttttgcttttactgggttgatttcactggagcctgctgggaacgtgacctctgacccctgatgctttcgtgatcacgtgaccatcctcttccccaacatgtcctcttcccaaaactgtgcctgtccccagcttctggggagggacacagcttccccttcccaggaattgagtgggcctagcccctccccccttttctccatttgagaggagagtgcttggggcttgaaccccttaccccactgctgctgactgggcagggccctggacccctttatttgcacgtcaggggagccggctccccccttgaatgtaccagaccctggggggggtcactgggccctagatttttggggggtcaccagccactccaggggc

SEQ ID NO: 28939 - DNA, 559 bp, Homo sapiens
  misc_feature (1)...(559): n = A,T,C or G
cggcccccaaatggagccccctatcgaagcactactccgngnggngcaattcgaagaaaggngaggaagaatagatagaaatagggattggagacagtaaccttgaagctcatgaaactgtcctggctgggctgagtcaggaccttgccaggacgggctgtacccctggcttctagaagactgcctagcacacagtaggcattcaatacttgttgaataaataaactggctttcacctaaggactcaaccctaaattcctgctgcctcatctgttaagaactgacactttccccttgctgggcaggtagtacacacctgtaatcccagcagtttgggaggctgaggtgggagaatcacttgagcccaaaagtttgaggctgcagtgagctgattgcaccactgatgcctcccaaccttgctctgggagaccaatgcctgaaccagggtttgtttaccttctgagctgcagagatggggcttctggaatttaaggtaacaggatgaggcaggggtatcttgatcatcccgatggngcanatactgctgtgtgcatggngg

SEQ ID NO: 28940 - DNA, 469 bp, Homo sapiens
  misc_feature (1)...(469): n = A,T,C or G
aggagtgccngnnntaggnnngactgagaccctcggaagctgattgccctctggagagccgcccctgctcactgagcctgcatgggccttgcccccgaccctgtggtctctgggattggggtcggcttaccctgtagcacagacagggactcctgctgccctgggagctgtctcaagcaaaatctcttgtcccagaggtgcccatgtgggtccgctgtgtcccctgtcatcatccttgttttttctcattttggccaagggcaggctccctgggacaggcagggaacaactgcggagatattagtgattcataggtttgtacagtgttttatactttgcaaagcactttattagctcacacctgtccactcacatgaaactcgtgttatgccctgggaggccgacggtaactctcaccgtgccctcagatgaagcacagagaggttgttacttgcccgggccatccagg

SEQ ID NO: 28941 - DNA, 500 bp, Homo sapiens
  misc_feature (1)...(500): n = A,T,C or G
cgggccgggngnnnnnnaactgagaccctactgatgatcctaggccangnggnggaattcgaggggaggagcatgcagccctgactcccacctcacaggcggccttaggcaagtcattttctgtcatcacaaggtcgcctctgcctagtcaggtcctggcgtccagagtaaggatgtgcggaccccaggcccccgcacacctccctcagcaccaagaccgggacccccccacccacgtgtctcattgtggctgcctatggactcccgggccttgtgtgcaggccaggcccttccactgattttttaaagtgaaccattgctggatctcagattctgtggcatctaaggcctagcaggggtgggcacacgggtcacccgaggcccataccaagactctgttcctgccctaggcccagtctcaaaggaagccacaaggcgcgggggccactgaggaaggaaatgttcattttcatttgtccaaaaccaccttaagttttaag

SEQ ID NO: 28942 - DNA, 565 bp, Homo sapiens
  misc_feature (1)...(565): n = A,T,C or G
cgggcacgcnnttaattgagcaccanctantgaagcatcactccgagnngggcaaancanacacagacagccaagagagaaactgcgggaacaagccaaaaggttgagagccacactttctagaagctttttgcctgtggtgcggcacaggtgggcgagtgcacacgcacaccccacacactgtgcgcacatatcacgggcggtcagacttgccagcgtactcgggggcccgtgtgttaagatcacacagcccccacacagtgtacacatctgtttcatgtgctgtgcctctgagcgccgcacgcaggtgtgtaagtgtcccacaggagtttgttcagtgcatagaacaggcatgcatacgcgactgttcacgtgtgtccgtgtttgggtgtgggtctatgtgtagtagtgtggctgtatgaggaccagttcctgcagagctgtgggaagttagcgacgttactgactctgtgcagacaaagcccccgagacatggagcaggtggccttactgccctcccgctggctgaccagactcctctctgcagggcctcccacccaggggg

SEQ ID NO: 28943 - DNA, 463 bp, Homo sapiens
  misc_feature (1)...(463): n = A,T,C or G
ggagccccctaccatgatcgtcgtcatngcggnggcannngncaacgnnaccttgatcgaccttcgaggatgcaagcagatcactcgaaaagtttgcgatcacttcatctcagacttgtccatcaacagcctctactgcctgtctgacgagaagctgatacagaagatcagctaagacacacccagcccagattcaacaggaaaccgatcttcccctgactccccaccgaggagagcctctcctcgaccctgcacgggctctgaggccagcgtcacactccctctctgctctcctgtcccttgagcccttcctatacaggtggggcagagagggtggcggacaccaggcttatctgcctgctcctcttccctctaaggaaaaggagtagtctattgatctgaggggaaagcacaggctgtgctggcgagggcgcctgttcaattactccccttgcaggaggcc

SEQ ID NO: 28944 - DNA, 450 bp, Homo sapiens
  misc_feature (1)...(450): n = A,T,C or G
gatgcggnnnnnnnnaaaaggatagcagacatcagcgggngcaattccctcagatggcctccaaagacttcatatgctccagatctcctacttccgcgacccctatcacgtgtggtaccagggcaacgcgtcgctggggggacacctaacgcacgtgctggaaggcccagacaccaacaccacgatcattcagctgcagcccttgcaggagcccgagagctgggcgcgcacgcagagtggcctgcagtcctacctgctccagttccacggcctcgtgcgcctggtgcaccaggagcggaccttggcctttcctctgaccatccgctgcttcctgggctgtgagctgcctcccgagggctctagagcccatgtcttcttcgaagtggctgtgaatgggagctcctttgtgagtttccggccggagagagccttgtggcaggcagacaccca

SEQ ID NO: 28945 - DNA, 552 bp, Homo sapiens
  misc_feature (1)...(552): n = A,T,C or G
ctaccgagccctctantggagccaatccgagaggngcaaanagcgtagcgcgagcgcagagagcggagccgggagcgagacaaggagcgagaacggcgacgctcccgctcccggtaccggcggaggcgctcacggagtcgcgacaaggaggagcggaggcgctccagggagcggagcaaggacaaggaccgggaccggaagcggcgaagcagccggagtcgggagcgggcccggcgggagcgggagcgcaaggaggagctgcgtggcggcggtggcgacatggcggagccctccgaggcgggtgacgcgccccctgatgatgggcctccaggggagctcgggcctgacggccctgacggtccagaggaaaagggccgggatcgtgaccgggagcgacggcggagccaccggagcgagcgcgagcggcgccgggaccgggatcgtgaccgtgaccgtgaccgcgagcacaaacggngggagcggtgcagtgagcggngcatggatgaggcccgaggtgggggcggtggccaggacaacgggctggagggtctg

SEQ ID NO: 28946 - DNA, 494 bp, Homo sapiens
  misc_feature (1)...(494): n = A,T,C or G
cgggcaggggnnnnncctgagaccatattgagtgncgtggaattccttggacatggtgaaccattttgacagtgacttttcccaccgcctccacctctgcgacatcaagccggaaaactttgccatccggagcgacttcacagtggtggctattgatgtggacatggccttttttgaacctaaaatgagggaaatccttgagcaaaactgcacaggagatgaagactgcaatttctttgactgtttttcaagatgtgatttacgagtcaacaaatgcggagcgcagcgcgtaaacaacaacctgcaggtcatctgtgacaaaatatttcgccattggttttccgcgcctctcaagagctctgcggtctctttccagcttcagctgcagttacaggaggcggtgcaagaatgtgcagaccctggggtccccagtgggaacacccggagagcagcctccaacgtgttctggaagcttctccaactcctccaagcca

SEQ ID NO: 28947 - DNA, 495 bp, Homo sapiens
  misc_feature (1)...(495): n = A,T,C or G
agggccggnnnnnnnncctgagaccatatcgagtgcctggaattcctcgagcggccgctttttggaataaatgatcaccttgtgcatttccaaatcaaaggacaagcggacaaaatgcatcccaagatcaaggaagggacagggcaggtttatccccacactcctacccggctggctttaggggcttctcctggggggcccaccccacccctgccagtctcctggagatgcttgaggatcggtcctccccagaaccaggccaggacgttgcccctggggcctggtgaccctgtgaggtcaggtcccccagattgaggtctgagtgtgggcaagtgtgtcaaaaggggctgccccccaggggagatgaggctgagagcacggagttgaggccgaagaagtcaaggcccctcccgcaaatgtgtacccctgcccgcgccactgcaccccgccgcacccccacctcccccgggggccctgctgcggatgccggagtgg

SEQ ID NO: 28948 - DNA, 504 bp, Homo sapiens
  misc_feature (1)...(504): n = A,T,C or G
ggggccaggnggggnnnnnaatcgagnaccntcctcgagaccactaggcagngncgnggaagtcacaggcgcagtgggaccacaccctaaccactgtcccaggaaactagtatcccaactgctgaagctgttttatgagtgaaggcgcgtgtgtgtgacataaggaaacacggactgggcctcctcagctgtcccacctatgtgcttctaacaacacaccgcacggctctgtcatatacttacacgatgtggcctcaacgacctaactgccacccaagcagacacccactagcgccttttctcccccaacagagatctccctagaggcagctgaagaggagaagtcccgcatcagcctcatcccaccagaagaacggtggtaagcggccaggctccgtgggagccagggcccacagcccttggccaggtggtggaaacagctgctgggatgggtatgccccttgtcactgtcacagctgccaccttccctactctctcatgtgc

SEQ ID NO: 28949 - DNA, 485 bp, Homo sapiens
  misc_feature (1)...(485): n = A,T,C or G
catcgaatagcactcacacagngncgnggaantcgcggaggcgcaagggccccactaagaccccagaaccggagtcctctgaggcccctcaggaccccctgaactggtttggaatcctagttcctcacagtctacgtcaggctcaagcaagcttccgggatggcctgcagctggccgcagacatagccagcctccagaaccgcattgactggggtcgaagccagctccggggactccaagagaaactcaagcagctggagcctggggctgcctgacatgcgcgcaaagaggcagggcagcgagcacagctgttctccgacatggctacgtgatctcaggccttcttccttcacaattagctcttgcccctaccccacgccagctaatgccccttctgtgtccctgctctgcatgtttccattttccttaagtgtgaagtttgaagaggcaaacagtaattttgaaagccactactttgaaaccan

SEQ ID NO: 28950 - DNA, 465 bp, Homo sapiens
  misc_feature (1)...(465): n = A,T,C or G
ggctttcnnnnnatccgagacactcgaagccggngttgatnccntcgcaggaacgctttggccaaatccatgagcggctccctctgttaagaatgaagcacagctgaagcatgattagggcagtagagtgtgtatgctccgccgcgtctccccacagtctgaccagaaggaaggggcctttcagccaggctcgcccaggctggggttggagtgtcagtatcaagccaatgtcttcttgcttaatgagtgagcccaggtgctcccgtgcagctgccaccgtagtgagggtgaaccggcaggaggctccacggcactttcaggctcaggctgcctggtgagatctactctgtgggctctgtaggctggtagaggcttccaggaggaggaggggatgcagccaccagtccccactcctgggagtcgtatttctgaaagcttgggtatacagtaaatattaagctgggg

SEQ ID NO: 28951 - DNA, 482 bp, Homo sapiens
  misc_feature (1)...(482): n = A,T,C or G
nactgagactgagtgcactgncgaggaactccccggttgcccatgccaactgccacagagtagcactgaacatctccttccaggagctgggctgggaacggtggatcgtgtaccctcccagtttcatcttccactactgtcatggtggttgtgggctgcacatcccaccaaacctgtcccttccagtccctggggctccccctaccccagcccagccctactccttgctgccaggggcccagccctgctgtgctgctctcccagggaccatgaggcccctacatgtccgcaccacctcggatggaggttactctttcaagtatgagacagtgcccaaccttctcacgcagcactgtgcttgtatctaagggtggggggtcttccttcttaatcccatggctggtggccacgcccccaccatcatcagctgggaggaaaggcagagttgggaaatagatggctcccactcctccctcctttca

SEQ ID NO: 28952 - DNA, 496 bp, Homo sapiens
  misc_feature (1)...(496): n = A,T,C or G
cgggcaggngnnnnncctgagnccctactgagaccactaggcagngnggnggaattcgttctgacaccccagggcccgtgagctacctgcttgagcccctgtttctggggcaccttcgaggaggcgttgtggagggcatcgccccctgtttattcacaacaccctcaggggcaaacaggcctgggacccgctgacaccattttgggtagctggatgcacccgacagcagtggggtccacacactgagctccagctggcactgcccactcaagggctgagtggaggggcccctccggccagctctgctccaccagccctgcaagctgatgcagggcgggggaagggctgggtgttgcactattgctgcgctgccttaaggcatctgtcctctggtggtgcacccgtgcacacaggtacagtgcatctgggcacagcttttggatccacacctctgcacaagtgtgaatacctctgcacatatgggggtatctgtgtg

SEQ ID NO: 28953 - DNA, 461 bp, Homo sapiens
  misc_feature (1)...(461): n = A,T,C or G
ntttgattgacattcgtcagngcggnggaattcgcggaaggcagacaggcgccagagcccagcactcccttttacagcagctgtggtgggggagggttcccctccagttcgtcaagagttgaaggaggctctgtggccaggtgacctggctgccttccactccttgtacctcagtctaaacatggagaggccgctgacaaggcgctccagccccagagccagcgtcttcatggggaagatgaatggacctgagtagctgaaggaaggcccctccctacccaaagactggaggcttctcagcctcaatttccctgtctgtacagctgagggctctgcctgtcccccactgctatcagtatggaaccccagctggggtcccctattgagtgccgactccccccaccgccagcagctgctcctccagccacacccctcctgctccccccacccctagcccttga

SEQ ID NO: 28954 - DNA, 492 bp, Homo sapiens
  misc_feature (1)...(492): n = A,T,C or G
agggcaggggnnnnaaatgagacccatgcgaggccntgaanacgccacgancacaccactgcactgcagcctgggtgacagagcgagaccctgtctctaaaacaaaaggaatgaaatgctgatacatactacaacatgaatgaaccttgaaagtatttggctaagtaaaagaagccacatacacacacacacaaaccccacatattgcgtgattttatttttatatgaaatgtccagaattggcaaatagagacagaaagtagattagtagattagacagaaagttgcataggctggggggaaaggagttggctgctacaggatgcagaatttctttatggggtgatcatctcaaattgactgtgatgatggatgggcaactctgtggatgtactaaaagccacagaatcagagccgggcgtggtggctcacgcctgtaatcccagcactttgggaagccgcggcgggtagatcacaaggtcaggagtttaa

SEQ ID NO: 28955 - DNA, 491 bp, Homo sapiens
  misc_feature (1)...(491): n = A,T,C or G
agatggtccgggggnnnnnnntttgtagaccntttcgatgatctagaaagngcggggaantcgaatatgaaagttggattcaaattttgggtatattactaagtaacaacatatggctgttctaagaattaaaaggaactgacatgtaaaagtgcttataacaggacctatgccctgtgcaatggctcacacctgtaattccaacactttgggaggcagaggcgggaggattgcttgaggccgagggttcaagactagcctgggcaacatagcgagactgcatctctacaaaaaatttaaaaattatccaggtgtaatggtgtgcacctgtgatcctagctacttgggaggctgaggtgggagaattgctcaagcccaggagtttgaagttgcaatgagctatgatttcaccactgcattctagcctgggcaacagagtgagatcctgactcaaataaataaataagaagagcagttgcctaccacatagt

SEQ ID NO: 28956 - DNA, 486 bp, Homo sapiens
  misc_feature (1)...(486): n = A,T,C or G
gcgtnccaggnnnnnnnngatcgagaccnaatcgagaccgtgganaancgcnccatagncttgaaagctctgaagaggccctgggttgccgcggcagcagtggtctgtttgatgctgccgtttgccgctgccggcccctcctcagactccgcctttgggagcacacctgctttgccttgctgcctgtgcaaatgttggacaagcagacacactcacactcgtccccagcttagcacagagctggagcgcccatttctggaattttccgtttgggaatctccacttctggggtttacctgttcggcctcctgtctatcagtgaggcatctctgactgtttcttctactgcttttcagttcccttccctgctgttctatttcctttgagtggaaagactcacaggtgacctgctatcgagatagccagagggtcaggagagaatgggggaggaggcggtcaagctgctgaggaaacaccacaggctgn

SEQ ID NO: 28957 - DNA, 473 bp, Homo sapiens
aagagaccctagatcgtgtggtgtaattcgccctatgtatgcaccgtatgagggaaggccttcagccaaagctcattccttagcatacacaggacaatttacacacgtgacaagccctatgagcgcaatcgagcgtgcattagtctttacagtgagctcccatcttgctcacctttcactgatacatacaggagagaagcctcactaatgtcttgagtgtccgaaagccttcactcaactctcacatctcattcagcaccagcggatccacacgggagaaaggccatatgtgtgtccgttgtgtgggaaagccttcaaccatagcactgttctgcggagccaccagagggtacacactggggagaagcctcacaggtgcaatgagtgtgggaaaaccttcagtgtgaagaggacactgctgcagcaccagaggatccacaccggggagaagccctacacgtgcagcgagtgtg

SEQ ID NO: 28958 - DNA, 488 bp, Homo sapiens
  misc_feature (1)...(488): n = A,T,C or G
ggggagttgcccaggnnnnnnnnnaactgataaccntcatcgagnacactaggacagnngcggggaattcaccacattctgtttgttcgccctaggaaagattgctgccttttcagcagaagggaaattcctaggattggctgtcccctgccaagcttggaggagcgtctgcaccttggctgcgccgcctgtgcatttgccagtttcctcccactgagaggatggaggtgtccgcacagctttgggcctcgtgagggatctgcctcctgagcaaagagctcttgatcccgatttcatgcacagccctgcagtaaggagcccagaaggaacatgtgtttcctgttaaaactcctcttgttctcttttcttacattatgacgtttgttttcaaggagagggtttaaaaatgggatcctgtaagcagacttgggcagtctccttttgaaataggttgtctgtacatgttctaatgttttgtagaacacgtg

SEQ ID NO: 28959 - DNA, 466 bp, Homo sapiens
  misc_feature (1)...(466): n = A,T,C or G
agggcgtgncccnacactgatnaccccatgagatcatcggacagngcggnggaattcgtggcatgcacctgtaaacccagctacttgggaggctgaggcaggagaatcacttgaaccccagaggcagaggctgaagtgagccaagattacgtcactgcattccagcctgggtgacagagcgagactccatctcaaaaaaaaaagaaaaccatagagagagagagagacagagagaggctctcagcctgcaggaaagggctctctccttgttggccaaaccagagggccctttaactgtgacgggtgtgccctgggcccatcaggacaggagcaaggtcaggagggctgctctgctctgcaaaacagaggctgatggatctgaagtttctgttactgggagaataaagggaggcgaaggagacacgtggtaggtcccctgggaaggtggtgggaatgcgtgtgaaat

SEQ ID NO: 28960 - DNA, 463 bp, Homo sapiens
  misc_feature (1)...(463): n = A,T,C or G
ntttttgaatgacattcagacnancccggngttnttattgacctcgcgaaancnanncccaagccagcagaccggcccagacagccaggctgtggctggtccagaccaactgttatggtggaaaatgcagcttccaggtcccactaccctgacatttccgtggaaggaagaacctggtggctcgtggaggaaaccagctttctatgagaaaggactgaaggattgcgcaccctgcacaagtacagattgaccaggaaaagacaagtgtcttctgtgtgtcacagggaaagccaggagtggccttctctgcaggccagcaagcctgcagcagcaggtgcccccacgtcaggtgctgactgtccgctgtccgctcctgtagaaggtagggagcacaatacctatggactaagggatgttcgccggttgtggtttgttttttttttttttctttggttaagaaacg

SEQ ID NO: 28961 - DNA, 464 bp, Homo sapiens
  misc_feature (1)...(464): n = A,T,C or G
ntttgatggccatccgaannncnnnnattggatgacctcagaacagcnggnggaattccttgctgcctcggatccccttcctaccactcggtccccactttattgccaaattccagctgcaccccttcctgggcacacgctgctctgccccagcttgggcagatctcccacatgccaggggcctttgggtgctgttttgccagcccatttgggcagagaggctgtggtttgggggagaagaagtaggggtggcccgaaagggtctccgaaatgctgtctttcttgctccctgactgggggcagacatggtggggtctcctcaggaccagggttggcaccttccccctcccccagccactccccagccagcctggctgggactgggaacagaactcggtgtccccaccatctgctgtcttttctttgccatctctgctccaaccgggatgggagccgcgcaaacg

SEQ ID NO: 28962 - DNA, 454 bp, Homo sapiens
  misc_feature (1)...(454): n = A,T,C or G
nttggagncccttcgaaggcggnggatgagtaccctcgaancagcaggaagaaaggccaaggatattataaatgcagctcgtttaagcctcgcgaagatgataggtgggaaacctcaagatataatcttcacttccgggggcactgagtcaaataatttagtaatccattctgtggtgaaacatttccacgcaaaccagacctcaaagggacacacaggtgggcaccacagcccagtgaagggggccaagccccatttcattacttcctcggtggaacacgactccatccggctgcccctggagcacctggtggaagaacaagtggcagcggtcacctttgtcccggtgtccaaggtgagcgggcaggcagaggtggacgacatcctcgcggcagtccgcccgaccacacgcctcgtgaccatcatgctggccaacaatgagactggcattgcg

SEQ ID NO: 28963 - DNA, 453 bp, Homo sapiens
  misc_feature (1)...(453): n = A,T,C or G
gtaggcnccaaggtgnccnccactgatnntcccctgggtatcctcgcanagngcggcnggaattcggggatctctggggtctgagcaaggcagatgaggggctccactggctttgattggatgtgttggatgatgctgcctcaccaggcacctcatccatttcctttcaggcagaatccattcctatactttccaagatagtgtgcagtttttaaagacccttacaggtttttgtttttaaacattgcacgttagtagcctcgtgccaaaaaacccttcacttcccctctaaaagtcctaccttcttacattctataactttttgggtgttttaggaggggcttcttattgcagttgaggtgtgtgcttatgtgcaggtgcacagaggtaaagggatcctaacatttaaaagtatgtcagctgggcacggtggctcacacctgtaatcccagn

SEQ ID NO: 28964 - DNA, 564 bp, Homo sapiens
  misc_feature (1)...(564): n = A,T,C or G
catcggacttctagtcaccgtggnggaattctttctttntattntttttttgagatggagtcttgctctgtcgcccaggctggagtgcagtggcgcgatctcatctctctcactggaagctccgcctcccaggttcacgccattctcctccctcagcctcccgagtagctgggactgcaggcgcctgccaccacgcccggttaattttttgtatttttagtaaagacgaggtttcgccgtgttagccaggatggtctcgatctcctgaccttgtgatccgcccaccttggcctcccaaagtgctgggattacaggcgtgagccaccgcgtccagcctgggctggatttctaaggatacttgctgctctaacatttcagaatactgccatccagtagaacttcatgcagtactggaaatgttcttcatgttgctatctaacggtagcttctagctccatgtagcttttgaacacttgcaggtatagctagaggaaggactgaagaactgagtttaaaatggtatgtaagtctgacgagttagatgtgggcagtggttggctgacg

SEQ ID NO: 28965 - DNA, 460 bp, Homo sapiens
  misc_feature (1)...(460): n = A,T,C or G
catagagncccctaggnatagatgaccattagtccangcggtggaattcgggattccctgtccccacaggaatttttaaaccaaaacaccccaacttggcagctttttctgtggaggacagacggccggccggacctctgagcacatagtgtcctgcccaccctaccagctcctccagccctgccgggcacatgcccgggggacgcctgccctgcccaggtggcctcctggcctgccctcacctctgatagactttgtgaatctgaactgctctactttgagaagatgaccggtttggagtaatcagaatgaaccctcctcctttttaagggttttttttttttcctttttttaaaaagctatgtatcgttcctattgaaagaccaaatccttaaagaagtttgtggtataaaaagaaaggggggacagattcgcagcacaaagtcgctggcatgtttca

SEQ ID NO: 28966 - DNA, 567 bp, Homo sapiens
  misc_feature (1)...(567): n = A,T,C or G
cttcggacatcgaatcactagtccagngnggnggaattcgcctgagccactgcaggaagtggcctggctgggaagttgggtgccggtcacctcccagcaggaaggcacagtggacagagatgggaagccctgggggacacagcccggtgctcccagccctccaacctctggctcccaacccagtctccccatcctagcgagcttggccctcctcagtttcgtttcaagccttggggctggagctggccctgctgccctggcaccccccggtggctggagctgggtccccgtggcccaagtgcagggtcccaagagggcagggcggggctccccaaaggagcaaagaatgcagggagggcggtccaggcccctgggaaggggagctcggcaccctccaggtccgtgtgggaccccagccgctgttggctgggaatcgaagttagaggtgacatttccagccccccgagccggagtgccccccaccacccccccagcgactctgcggggccagtgccttggtggcttttccggctacgcaccctgcagtcactgagctctcggtctgcg

SEQ ID NO: 28967 - DNA, 569 bp, Homo sapiens
  misc_feature (1)...(569): n = A,T,C or G
ntttcgaacttctagtccacngtggnggaattcgaagaaggggtgaaacttctaagagaagcaatgggaatttacatcagcaccctcaaaacagagttcacccagggcatgatcttacctacaatgaatggagagtcagtagacccagtggggcagccagcactgaaaactgaggagcgcaaggctaagcctgctccttcaaaaacccaggccagacctgttggagtcaaaatccccacttgtaagatcactcttaaggaaaccttcctgacgtcaccagaggagctctatagagtgtttaccacccaagagctggtgcaggcctttacccatgctcctgcaacattagaagcagacagaggtggaaagttccacatggtagatggcaacgtctctggggaatttactgatctggtccctgagaaacatattgtgatgaagtggaggtttaaatcttggccagagggacactttgccaccatcaccttgaccttcatcgacaagaacggagagacttgagctgtgcatgaaggtcgaggcatccctgctcctgaggaagagcggacacg

SEQ ID NO: 28968 - DNA, 443 bp, Homo sapiens
  misc_feature (1)...(443): n = A,T,C or G
ggatgtccagggtcgcccccctaaagacctagnaatctggaaaancacaaaggngaccttgtggagtctcctatgtgaagagtaccctccctctccacccccagaccccatatcctggctctggcccaaagaaaatgtccattctatgaccttctcttttcctctcctctcacttctgcagctattctcacacatctaacctctaggcaacatgcactaaattcaaaagcaaggagaagcccttgccccccatcagtccaccagccctagaacctcccttgcctcaacagtcacctaataaagcccacctccatggaaaacggctgaggctttagttttgttgctttttaaaaaaatcaatctaccaatctctagcagtatgagggaaagttagacctcagctggggaactttcctgtccatgtccacagatagagcagagga

SEQ ID NO: 28969 - DNA, 451 bp, Homo sapiens
  misc_feature (1)...(451): n = A,T,C or G
ggagtcccagagtccccccaactgaggancctaagttatcctagcacangcgnggaattcgccggcgcccgagctggggttgtgtccctgctgggctgccgttctagctggactgccgccatggaactcagcgccgaatacctccgcgagaagctgcagcgggacctggaggcggagcatgtggtgagttgagccgccggacaaggggaaaagagctcggggggcgggttcggcaccattcatattcttccgctcggtaggaggtggaggacacgaccctcaaccgttgctcctgtagcttccgagtcctggtggtgtcggccaagttcgaggggaaaccgctgcttcagagacacaggttctgtacagagtaatgagatgtgtgacggctgcaaaccaggtgtttttttctgaggctgtgttgacagctgctaatgagtgtgttggtgtt

SEQ ID NO: 28970 - DNA, 561 bp, Homo sapiens
  misc_feature (1)...(561): n = A,T,C or G
cttcgacaatcgatcccctagtccagngnggnggaattcgtgcagcctcagacccgaaccctgcgcccggngagaagacacgccttcaccacaaaagcacacggcccggaacctgccacgctgagtggtctgagtgggcgcgaggaaggagcccagcccagccgaaggggcccagaggggcctctgcgtcggggagagaggcctctgcgtcggggacagaggctcgggagggtgcttcaggaggagctggagaggaaggcccagagcctggggcaggctgagggacctgggcagttccctggagcattggaaaccccttgggggactgggtgggttgacatgagctgatctgcacagtgaggccatgccagctgcagctcggggagtgcgttagccaggagcaagcttccgatcatgcttggaaacctggcctgagtgctccctcccaggtagccccaccctagcctcactccctcactccttgtggcagcatctccccacaggcctggtggcctgtcatctcctcttccccagcttctgcctactcatgtgaagcaagtc

SEQ ID NO: 28971 - DNA, 569 bp, Homo sapiens
  misc_feature (1)...(569): n = A,T,C or G
nattcgaacctctagtccaccgtggnggaattcccttctgattctccacctcctcttcatcctccatcccccttttacttctctctcccccgtctctcctccctcccgcctcctttctccctctccccctccctctctcctctgaataagcaagcttttgcctctaaaagtcacaagtaatcctcgtgtgtgacagagagagagagagagagagagagagagagagagagagagagagagacacgcgctggcggagaggaacagaacgcgggaggggatatctggcacaacgggtgagagaggaaacttgatgcttgtgggccaccatttgccagggcctctctcgagccggcgcctcggtttctgcccagatggatttggggggcaacattgtctggcgcagggagatcaagtgagactgcanagacgcataatgtgaatacactctccccccacccaaaggagagtgctgtggagatgaagacacactctcttatggagacctaagagactgaagacatctggcgtggactactctgatggtaanagtggagcacatctatatgtgn

SEQ ID NO: 28972 - DNA, 464 bp, Homo sapiens
  misc_feature (1)...(464): n = A,T,C or G
tgtggcccaaaatcggaataccgtagaacctncnacagngcggnggaantcgngatacagagaagacagaaaaggaggaggagagagactgacaggtactctaatctttgaagtcccagagataacaaaaacacaaccacagagatagggagacgtaagccggagaaagacccagagattcgcatagaaagcaacgtggagactcagaagcaagcacagcatcaaggaatgatcaataaaaagaaaaaaaaatatttcctgaggacttccaagtacaaggccctgcaatctcaggccacttctgtcccatctttgccttcagagggggggacaggtagtccagacaattaaaatacagagggggctgtgtctgacggggccacgccggcattgaagaaacgcttgcagccccttccctatctggggcgggggatgttgggggccatcatttcactccatctggg

SEQ ID NO: 28973 - DNA, 491 bp, Homo sapiens
  misc_feature (1)...(491): n = A,T,C or G
aggagttgccnnnnnaggcccgccatagaagacatctgnaatagatgactattagnccagcgcggnggaattanaaacattttgagctcagcgtaaaatgtacaattgtcaaaacaatgaacattttaacagcaaggtcagctggcacacgataacctgactaccttgcgatgctctgggaagcaatacctgtttcaccaagttctctagctgggtgaggactgtggccaccagtatctggcacacgtaacatttatttttctgctggtcaaggatatccattacccccacccaagaaatgggagggccccccactggcagttctgctgtggagcctgatggccacaggcaggtaatgaaaggagaactcatgcagctggtgtgtctcctcgtcctctctgagggccacttttaaggtcacctggaaacccattagactaaaatgggatgctctgagcctagaaccagccatgtctttgtttttctgcgtg

SEQ ID NO: 28974 - DNA, 484 bp, Homo sapiens
  misc_feature (1)...(484): n = A,T,C or G
cgtggcacggggnnnnnnnaaattgaganccatcgatgaccttgcgaagngtcgnggaantctttctgttccctatgagataaaactttttttgtcttccatatgagtgggatcatgtagtatttgtttttctgtgtctggcttactttcctaaacataatgtcctccaggttcatccatgttgttgcatggtgttaatcttagcatgacagtatagccattatagggctcatacttaaatgccaaatcttgttatatatggaacccagctatttcaaggatcaatgttctcttataaagtcacattagcatttacacccagattttgctgactcagaattccatcacatgtgagatctcggtcgcctgaaaagtcctctccccaagtatttttggaagtctcaggggtttcctcactgattcacaaacaagttcacactcttgggtgcagcctactcgtgccaggcttctgttgggcctccan

SEQ ID NO: 28975 - DNA, 569 bp, Homo sapiens
ccatcgggacatcgaatcactagtccagcgaggcgcaattcgaaggactctgatcatcgaggggctcctcaacattgcctgggggctgatgcggcccatccggctgcagatgcaggatgaccgggagcaggtgcacctcccctgcacctcatggatgcccagactgcctagctgccctctaaaggagccatcgccccagaacgggaacatcacagcccaggggccaagcattcagccagtgcacaaggctgagagttccacagacagctcggggcccctggaggaggcagaggaggccccccagctgatgcggaccaacagcgaccccagttgcatgagccagaggaggcccaagtgccgcgccctcggtgaggcccagcgcatccggcgacaccggttctctatcaacggccacttctacaatcataagacctccgtgtttactccagcctatggatccgtgaccaatgtgagggtcaacagcaccatgacaaccctgcaggtgctcaccctgctgctgaacaaacttaaggtggatgaggccccagtgagtcgcactctacatcttg

SEQ ID NO: 28976 - DNA, 568 bp, Homo sapiens
  misc_feature (1)...(568): n = A,T,C or G
ccatcgacgatcgatcnccagtccgcgnggngcaattcgctattcttactagaattntgtgtttgtgtttcaaaaagtgtagatataagacaaaacaaaaaatatatatttatattttatagaacaaaaccttaaagaatcagtgtcattttatgttagaggagcatggccttgggttacagtcccctagaccctcctgatggtatcccttccctctcctttagctttatgtgtactttggtgaaaatttttaaaaatgcgtggttaaccaaaggactgcaataattggtgtggcatgactcataaagcctttgcaatttttgttttattatgcttttattttagcaatgtataaattcatttttgctaatactaaatacacatgctattaaggtgatgctcatcagatgatattttcagcagaaaggctatgagatgcaatggaaaacagaacacagtttgctatgagcagaagataaaaggcatacatgcatgctaagccaaagatagatcaaatgctcaatagacccataaaactttccctcatgggtctatgaaagagcacaan

SEQ ID NO: 28977 - DNA, 464 bp, Homo sapiens
  misc_feature (1)...(464): n = A,T,C or G
agcgcaaanaatacggaataccgtcgcanctacnanagngcgnnggaaatccggctcctctgatcctttagggttggcgagcatctctggaaatagctttttcagattagtggtgggaggaatagagggggacagtctgtcacctccctccccgccactttgtgtagatcctacctggagggaatggctttaggcacttttgtgccaaagcttgtgagggtgacagaagagggtccaggctggaaacctgaactttctgggtgggagaaccaggtggtgcctgccgaggtctgggcgtgtttgggccggtgctggagcctgtccagctggcccgggccctggcctggttctcaagggtttcctaaacagagaggcacctgggtcagtattagtctatttaatagagggggaaataagtcaaggataggctctcctcctttaaaatattttggaatttgatcaaa

SEQ ID NO: 28978 - DNA, 567 bp, Homo sapiens
  misc_feature (1)...(567): n = A,T,C or G
ggacctcgatcacagtcagtgtggtgctagtaggacantgagctggctcccctgagagccatgcagggcgtctgcagcccaggcctctggcagcagctctttgcccatctctttggacagtggccaccctgcacaatggggccgacgaggcctanggccctcctacctgcttacaatttggaaagtgtggccgggtgcggtggctcacgcctgtaatcccagcactttgggaggccaaggcaggaggatcgctggagcccagtaggtcaagaccagccagggcaacatgatgagaccctgtctctgccaaaaaattttttaaactattagcctggcgtggtagcgcacgcctgtggtcccagctgctggggaggctgaagtangaggatcatttatgcttgggaggtccaggctgcagtgagtcatgaatgtatgactgcactccagcctgggtgacagagcaagaccctgtttcaaaaagaaaaccctgggaaaagtgagtatggctgtaagtctcatggttcagtcctagcaagaagcgagaattcttgagatcttcagaaagcg

SEQ ID NO: 28979 - DNA, 478 bp, Homo sapiens
  misc_feature (1)...(478): n = A,T,C or G
ntcgagaccatagtccttgtggtgcaattcgcagcccaccgtagcaaaagtcacccagccctgcttctagcccctcaagagtcacccagtggtcccctagagccctgtcccagcatctctgcccctgggcctctgggatccagcgaggggtccaggccctctgcatctcctcaggctccaaccctgcttcctcagcaatgagctctcctccagctttggcttttgggaagccagactccagggactgaaaaggagcaacaaggagagggtctgcttgagaaatgccagatgcttggtccccaggaactaaggcgacagagtgcagggtgggggcaagactgggctgtaggggagctggactactttagtcttcctaaaggacaaaataaacagtattttatgcaggannnannnnnnnnnnnnnnnnnnnnnnaaaaaaaannnngggcccccttaaattaaaagggccccttaaacc

SEQ ID NO: 28980 - DNA, 455 bp, Homo sapiens
  misc_feature (1)...(455): n = A,T,C or G
gggccacaaatcgtttacgttgaacctagcgaaaccgnggaantncttcccggagctttactttaacgtggacaatggctacttggagggactgttgcgcttcctgaaggccggggtgctcagccaggccgactacctcaacctggtgcagtgcgagacgctagaggacttgaaactgcatctgcagagcactgattatggtaacttcctggccaacgaggcatcacctctgacggtgtcagtcatcgatgaccggctcaaggagaagatggtggtggagttccgccacatgaggaaccatgcctatgaaccactcgccagcttcctagacttcattaccggcttttttccaggactgcatttcaaagcaggaccttgacgagatgaacatcgagatcatccgcaacaccctttacaaggcctaacttgagtccttctacaaggtctgcacctaa

SEQ ID NO: 28981 - DNA, 455 bp, Homo sapiens
  misc_feature (1)...(455): n = A,T,C or G
gggaggtgccccaggattcnccccnccagggtantcattganagtcctgtggaannnccctggaagatgtgaccgaggtcagcgagcagagcaatcaggccaccgccctggccttcctgggctcccagagcctggctgcccccactgactgcgtgtcctccttcaaccaggatccctccagctgtggggaggggagggtcatcttcaccaaaccagtccgaggggtcgaagccagacacgagaggaagagggtcctggggaaggtgggagagccaggcaggggcggccttgggaatcctgccacagacaggggcgagggccctgtggagctggcccatctggccgggcccgggagcccagaggctgaggagtggggcagcccccatggaggcctgcaggaggtggaggcactgtcagggtctgtccacagtgggtctgtgccaggtctcccgccg

SEQ ID NO: 28982 - DNA, 548 bp, Homo sapiens
  misc_feature (1)...(548): n = A,T,C or G
aggaaggcttgaacacagtccaagtggtgcaattccggaatggaggaggtgcctcacgactgtccaggggccgacagcgcccangcgggcagaggggcttcatgtcaaggatgccccaaccagcggctgtgcgcttctggagcgggggccactccggacacggctatagaggaaatcaaagagaaaatgaagactgtaaaacacaaaatcttggtattgtctgggaaaggcggtgttgggaaaagcacattcagcgcccaccttgcccatggcctatcagaggatgaaaacacacagattgctcttctagacatcgatatatgtgggccatcgattcccaagataatgggattggaaggagagcaggttcaccagagtggctcaagctggtctccagtgtacgtggaagacanacctgggggtgatgtcagtgggcttcctgctcagcagtcctgatgatgctgttattttgaaggggacccaagaaaaacggcgttgatcaagcagttccttcgagatgtggactgggngagagtcgactacctcat

SEQ ID NO: 28983 - DNA, 452 bp, Homo sapiens
  misc_feature (1)...(452): n = A,T,C or G
aggagttnccnaggaggccccccctgatanntcctgggtatcctagacangcggcggaattctgcaacatgcagcccccgcccccgggcccgctgggcgactgcctgcgggactgggaggatctacagcaggacttccagaacatccaggagacccatcggctctaccgcctgaagctggaggagctgaccaaacttcaaaacaattgcaccagctccatcacgcggcagaagaagcggctccaggagctggccctcgccctgaagaaatgcaaaccctccctcccaccacaggccgagggggccgcacaggagctggagaaccagatgaaagagcgccaaggcctcttctttgacatggaggcctatttgcctaaaaagaaaggattgtacctgagcctggatctggggaacgtcaacgtcacgctcctgagcaagcaggctaagtttgcn

SEQ ID NO: 28984 - DNA, 460 bp, Homo sapiens
  misc_feature (1)...(460): n = A,T,C or G
tggccaggggnccccaaatgaatacgtcagcacagncnggnggaattccttgaaaccaaaagttcctgggcggtggaaagcgacagttcctgcacttgcagctctttgccaagcccgattgtccaggatgtgttgagcaaagactcctgtgacccaaacgctggcagccagttgacatttgaccctgagcagcctcccacccctctaaggcccaccacacccaagccccagagccctcagagcccccagagccccggggcaggaagtgccagctgtcacagcaatcacagtgccctgtccgcgaattcagaggaaagtgaaggaagggcagaagagcctgctcagagagagccagggcctgtgtccttgcaggatcccctggaagccacacatggtgatgagggcagcaaggaccttctggtgaacattggtgtggcagccggcccagaagaaaaggagn

SEQ ID NO: 28985 - DNA, 452 bp, Homo sapiens
  misc_feature (1)...(452): n = A,T,C or G
gcagggccccagcagcnccncccctgatnantcccttggtatctagcacangcggnggaattcccacacacacacagattaaacgcagcccgtttaatgatggggcccagactgcagtggctcaagacaggacactgcggaaagccgccatgtgccgccgcacactgtctgagatctgctcagccgatctgctccggccgtagtaatccatgaagaggccgtccgggttgagcaggtagatggcaatggagtggtccacgatgtagtcctggtcctcatccttggggccggcattgtagtacacgcggtaactgtgactagcctgggcaacctgtttggtggagccggtcagacccaacagtcttgggtggaagtcctggacgtagcgggccatggcttcaacgtcgtcccgctcggggtccacagtgatgaagacaggctgcactggaggn

SEQ ID NO: 28986 - DNA, 452 bp, Homo sapiens
  misc_feature (1)...(452): n = A,T,C or G
ntttgagacatagaacacgcggggaattcgcttttttaattgcagtcttgcttgggaaccacaggatagacaaaagaggagcaacttggttgactaagctgtggggctttgaccccacttatttaatcccctcagtggcagctccaataaatcctgaccagatccagagattggggaccactttacatttctaaattaatgttttacaataatcctcgtagttatgacctttcatagaacagggctgaggtttgtaacatgctggagttcaaccaggatctgtgactcaaagcacactccttttactactagtaagtcagcctcctaagcttgtttaaccagaggttaaataatggccacagaaagcattgtggcatatgttaagtgctagatgcccctccaatctcgctccaaggacaggagtcctgagtgtccactataggcatccatta

SEQ ID NO: 28987 - DNA, 460 bp, Homo sapiens
  misc_feature (1)...(460): n = A,T,C or G
nnaaggcccgggttctnnacccagctagcgnacatcaggcggnggaattncactcactgggtttaggggtccccaatacactgtgacctcatcttaactaattatatcatcaaaacccgtgtttccaaataaggtcacattctgaggtctgggtgcacatgaatttgagggacccctcgtctgctgcagggagccctgctgtaccccagccttcccaggacgtggtctccagcttcttcatcctgccagagtttccaaatggagcccggggctctgcagcattccagtcccctttgcagatccatagctgctctgcagggcggaagacacctggggcgggaaagcacccctgagttccatcttcctgacatgtcgcctgggatgtgacgggcctgacatctccccagggccggggcccagggctgcctttgctcctggccccttagtgtctggaatgtgn

SEQ ID NO: 28988 - DNA, 465 bp, Homo sapiens
  misc_feature (1)...(465): n = A,T,C or G
agggccggcaattgatnaccctcgnnatgatgaccattagtccangcggtggaattcgaggcactcaagcggggctgtgaacaggtcctctggctgtatgggcccgaccaccagctcaccgaggtgggaaccatgaacatctttgtctactggacccaccaagatggggtgctggagctggtgacgcccccgctgaatggtgttatcctgcctggagtggtcagacagagtctactggacatggctcagacctggggtgagttccgggtggtggagcgcacgatcaccatgaagcagttgctgcgggccctggaggagggccgcgtgcgggaagtctttggctcgggcaccgcttgccaggtctgcccagtgcaccgaatcctgtacaaagacaggaacctccacattcccaccatggaaaatgggcctgagctgatcctccgcttccagaaggagctgaaggag

SEQ ID NO: 28989 - DNA, 436 bp, Homo sapiens
  misc_feature (1)...(436): n = A,T,C or G
nattgacgacccttagtccagtttggtggcattcaatcaagtcacctgacacatttgtgagaactatttatgcaggaaatgctctatgtacagtgaagtgtgatgagaaagtgaaagtgttttctgtccgtggaacatcctttgatgctgcagcaacaagtggcggtagtgccagatcagaaaaggcatcaagtacttcaccagtggaaatatcagagtggcttgaccagaaattaacaaaaagtgatcgaccagagctaacaggtgccaaagtggtggtatctggtggtcgaggcttgaagagtggagagaactttaagttgttatatgacttggcagatcaactacatgctgcagttggtgcttcccgtgctgctgttgatgctggctttgttcccaatgacatgcaagttggacagacgggaaaaatagtagc

SEQ ID NO: 28990 - DNA, 444 bp, Homo sapiens
  misc_feature (1)...(444): n = A,T,C or G
ggatcagacctccgaaggctgagatctcagaaaancncnaagctcctaccctataacactgatgcattctgtttgcattttattccatgatttacacaataattatatattgtatccttatgatatgtcagatactgtgttggcactttacatatatctcacttaatccttaataccatctggaaataataaacattttatggatggtgaaacagagacacagagaaatcgaatagcctgctcagtgtttccagaatagcaaaattaaaggcctagggtttagttttccactaaagattctcatggctggcttcttcacgtcattcaggtctctgctcaaatgtgatcttagagaagctacattaatccatctgaaatagacacctcactgtgcatccaattgtcctgccttatttttctttggaacattattatattatttat

SEQ ID NO: 28991 - DNA, 478 bp, Homo sapiens
  misc_feature (1)...(478): n = A,T,C or G
gaggggcgnngnnncnnnnattgannccaactganaacctatgcagngncgnggaattcgtgctccgcctccggtcttacgtttcgcccccggcagcgccgacagcggacccaagatggcgaccgagttggagtacgagtctgtgctgtgtgtgaagccagacgtcagcgtctaccggattccgccccgggcctccaaccgcggttacagggcctctgactggaaattagaccagcctgattggactggtcgcctccgaatcacttcaaaagggaagactgcctatatcaaactcgaggataaagtttcaggggagctctttgctcaggcaccagtagaacaatatcctggtattgctgtggagacggtgacagattctagccgctactttgtaatccggatccaggatggtactggtaagagaactgggattttgagtggaacgaagttaggaaaacaggtgaatgcacagccatga

SEQ ID NO: 28992 - DNA, 472 bp, Homo sapiens
  misc_feature (1)...(472): n = A,T,C or G
agtgncgngnnnnnaatggagacctcctaagcccttggannngcncagnaagtcgcatccggagctgcagactccaaaagacagctctggcaaatcgtgtgcggaggcgcttaccccagaagacagccccaacagggctggtgcggaggcaaagacccaaaaagacagccctagcaagtcaggttcggaggcgcagaccacaaaagatgtccctaataagtagggtgcggacggccagaccccaaaagacggctccagcaagtcgggtgcggaggatcataccccaaaagacgtccctaacaagtcgggtgcggagaagcagactccaaaagacggctctaacaagtccggtgcagaggagcagggcccaatagacgggcccagcaagtcgggtgcggaggagcagacctcaaaagacagccctaacaaggtggttccagagcagccttcctggaaagaccattccaagccn

SEQ ID NO: 28993 - DNA, 454 bp, Homo sapiens
  misc_feature (1)...(454): n = A,T,C or G
ngggagggcncctnctnnaaaagacatcaaacacctgcgngcaattaattgactgacgagcacagcagccttactaatctacgggcctggatgctgaaacatgtactcaacagccgaggcctaagcagcactctgaatgtgggtgtcaacaagaagaggggccttcgaactccacccaaaagtcacaaagggttgcctgtctcctgctccgaaaacaccttgagtcgggcacgaagttttagcaccggcacaagtgccggtggtagcagcagcagccaacaaaattctccacagatgaagaattcccccagctttccttttcatggcagtcggcctgcagggctgccaggcctgggctctaatacccaaaaggtcacccaccgggtgctgggccccgtcagagagccccgaagccaggacaggagacggcagcagcagccccttgaccatcgtg

SEQ ID NO: 28994 - DNA, 472 bp, Homo sapiens
  misc_feature (1)...(472): n = A,T,C or G
aggncgnnnnnnnnaatgataccatttgaaggccttggaannctctaangagntattctgtctttttattactgaattgtaatagttccttatgtattctatatacaaatcccttctgttcatcagggttgcaggatacaagatgaatatacaaaaatcaatggtatttgacacactttaactgaatactacatacttaaaatgagcaatcaaaatgaaattaagaaagcaacttcatttataatagcatcaaaaagaataaaatacttagaaataaatttaagaagtgtaaaacttgtactctgaaaactataaaatgttgttgaaagaaatgagaggagatctgaataaatggaaaagtatcccatgatcatgatttgaaggcttaacattgttaagatggcagtcctccctaaactgatttacagatttaacttgatccctatcagaatcccagatgagttctttgtga

SEQ ID NO: 28995 - DNA, 455 bp, Homo sapiens
  misc_feature (1)...(455): n = A,T,C or G
ggaggtccccaggagttccnccaactggtantgcatgangatcatcgaccangcggnggaattcacccattataagtgaaagcaaacagcccaccttctcaaccccctacatggcagacagggggctgctgtggaaatgctgggagaccttgttagatcagtgtcttctgtgatggctgtttattatctcttcccgtttttctctgagttaatgggatcctctgaatgggagcccttagaaagactcctgatcacttctatgttcaactcaccctcagctccagacaactgtgataggacctgcattttgagaagagcatatattatgaaatgcaggtaacaattctcacttggggcatccctgcccctcaaagatgcaggaagaacttggcctgaaccccaatgcttggcatcataagctcgttatgggccctcaccctgccctggcactcctt

SEQ ID NO: 28996 - DNA, 542 bp, Homo sapiens
  misc_feature (1)...(542): n = A,T,C or G
nttgaaccctatcagagnggcgtagaacccctgttgcccaggctggagtgcagtggcacaatctcggctcactgcaacctccacctcaggttcaagcaattgtcgtgcctcagcctccctagtagctgggattacaggcaccatgcccagctaacttttgtatttttagtagagacagggtttctccatgttggccaggctggtcttgaacacctggcctcaagtgatctgcctgtcttggcctcccaaagtgctgggattacaggcatgagccaccatgcccagcaggtcaactgtttttgcaagcatttagccagagtcatgctgtgctgttaatcagtgtcctggagaatgggttgcttggaaatcttggcgccccctcagtagtaacagccttggtttaagggcgcagagtggagagtaaatgcaagggctataacaagggcattcatgctgtgggttaagatccacaaatcgctaggaatgtgtatactctgggtagtaagtttgtagtattagaagggttaatgacangtatttga

SEQ ID NO: 28997 - DNA, 551 bp, Homo sapiens
  misc_feature (1)...(551): n = A,T,C or G
nttacgancatctagtccagcgtggtggaattcgtagaggtgaggggcagccagttaggaggctacaggagtagcccagaccagacaggagggtggctcggccctcagagatcttggtggggcagattagagagtgatcaagttagagctaacaggacttttttttttagactgggtctcgcttgttgcccaggctgtggtgcactggtgcaatcatggctcactgcagccttgacctcctggatcaaggtatcctcccgcctctcggcctcccaggcagctgggactatgggtgcatgccaccacacccagctaatttttgtgtttatggagatatgggtctcaccatgttgcccaggctggtcttgaacttctgggctcaggccttctgcctgccctggccttccaaagcattgggattacaggcctgagccactgtgctaggccagagccaacaggacttactgagaaattatctgagagagaggggtcaaggaagactccccctggtcaccaagcancganngtgntggtgctgctgcttcctgnan

SEQ ID NO: 28998 - DNA, 589 bp, Homo sapiens
  misc_feature (1)...(589): n = A,T,C or G
cgcgatcgatcccantcagattggagcaactntctntacgggtgtcgggctgggggacggtcaggtctttcccttcccacgaggccatatttcagactatcttatggggagaaaccttggacaatacctggctttcctaggcagaggtccctgcggccttccgcaggttttgtgtccctgggtacttgagattagggagtggtgatgactcttaaggagcatgctgccttcaagcatctgtttaacaaagcacatcctgcaccgcccttaatccattcaactctgagttgacacagcacatgtttcagagagcacggngttgggggtaaggtcacagaatctcaaggcagaagaatttttcttagtacataacaaaatggagtctcctatgtctacttctttctacacagacacagtaacaatctgatctctcttgcttttccccacagcaaagcaatttgcatgctcagccttggcactggttggaaggagggactgccagtgagaattngaaccataaaccagtacacatgtaggcttggtatctgaattcacacannatgtatcatcctanagagctcaagcagaa

SEQ ID NO: 28999 - DNA, 449 bp, Homo sapiens
  misc_feature (1)...(449): n = A,T,C or G
ggctgagagcctangaagnactgatgaatctcggacttncggcgaaaggcagccgcgactgctccgtgtgcttcgagagcgaagtgattgccgcgctggtgccctgtggccacaacctcttctgcatggagtgcgccaatcgcatctgtgagaagagcgagcccgagtgcccggtctgccacaccgcggtcactcaggccatccgcatcttttcttaaaggcagcgggcgctgctagtgcgcaccgtgctgggggaagggggaacccctccccatcctctttccccagcgctcgcctgcctccctgggtgccccccctctcccttctccttcccggccccaccaacactctgagatccgagaggagcttggaaagctgtagtatccgctcatttttaaaatttaatttttaagtaaaggaatttgccaggatatctgcatcaagagtac

SEQ ID NO: 29000 - DNA, 477 bp, Homo sapiens
  misc_feature (1)...(477): n = A,T,C or G
gagtccngnnnnnnnnaatcgagaccaatgtgaagncnctnggaattctgacggnggtcgccatgatccgctttatcctcatccagaaccgggcaggcaagacgcgcctggccaagtggtacatgcagtttgatgatgatgagaaacagaagctgatcgaggaggtgcatgccgtggtcaccgtccgagacgccaaacacaccaactttgtggagttccggaactttaagatcatttaccgccgctatgctggcctctacttctgcatctgtgtggatgtcaatgacaacaacctggcttacctggaggccattcacaacttcgtggaggtcttaaacgaatatttccacaatgtctgtgaactggacctggtgttcaacttctacaaggtttacacggtcgtggacgagatgttcctggctggcgaaatccgagagaccagccagacgaaggtgctgaaacagctgctgatgctan

SEQ ID NO: 29001 - DNA, 476 bp, Homo sapiens
  misc_feature (1)...(476): n = A,T,C or G
agggcgnngnnnnnactgataccactgataaactaggaagngtcgcggaantcttgctgagtaccttgttatttaatcctcacatccctacccagagaacaggtgcaattatttgttttacaggtgaggaaaatgagggtcaacataattaatcaatgggaatataatgatggtactaataataacaaaaataggcctggcaaggtggctcacacctgtaatcccaacactttgggaggctgaagctggcggatcacctgaggtcaggagttcaagaccagcctggccaacatgaaaccctgtctctactaaaaatacaaaattagcagggcgtggtggtgtgcgcctgtaatcccagctacttgggaggctgaggcatgagaatctcttgaacccgggaggcagaggctataataataataataaaagtacagtaatctactatgtagtgagcattcactgtgtgctgagcgctg

SEQ ID NO: 29002 - DNA, 475 bp, Homo sapiens
  misc_feature (1)...(475): n = A,T,C or G
taggccgnnnnnnnnatcgagaccatcgaagncgctggganncctcttattcccccacttcaccctcctactcccctacctctccatcctattctccaaccagtcccaactatagtcccacatcacccagctattcgccaacgtcacccagctactcaccgacctctcccagctactcacccacctctcccagctactcgcccacctctcccagctactcgcccacctctcccagctactcacccacttcccctagctactcgcccacttcccctagctactcgccaacgtctcccagctactcgccgacatctcccagctactcgccaacttcacccagctattctcccacttctcccagctactcacctacctctccaacctactcgcccacctcccccaaaggctcaacctactctcccacttcccctggttactcgcccaccagccccacctacagtctcacaagcccggc

SEQ ID NO: 29003 - DNA, 472 bp, Homo sapiens
  misc_feature (1)...(472): n = A,T,C or G
acgccgccnnnnnataagagacctnttagagactgcgcaggtcgcggaancttaagaaagctgacgaagcgatataagtgacggctcgggttctggagttagactgagtccggggtcaggaggccctgaggctgaaactgctggccctgtgacccctgcttccatctctggaaggatacagtcgatgtcggaagccatgaaggagaaggaagtgcgtccgaagcacgtgaaggctttactgcagatggtgcgtgacgagagccaccacatcctggcgctgtcagaaggccttgcacccccaagcggcgagccacacccaccccggaaggaagacgagatacaggacatctcgctccatgggggaaagacgcatgaagtgcccaccgcgtgccccgattggagaggggaccttctgcaggttgtgcaagaggcctttgaaaaagagcacgagatgcagggggttgagctgcac

SEQ ID NO: 29004 - DNA, 470 bp, Homo sapiens
  misc_feature (1)...(470): n = A,T,C or G
gggccgggnncnnaactgagaccactgaagccctggaagnatccgacagntgagctgcctgaatccctgtcccagcaggtgcatcccggccccacgccctaggcacccctgcaggccgagtccgcccggaactcaagaccaagcagcagatcctgaagcagcggcgccgggcccagaagctgcacttcctgcagcgtggtggcctcaagcagctctctgcccgcaaccgccgccgcgtccaggagctgcagcagggtgccttcggccggggtgcccgctccaagaagggcaagatgcggaagaggatgtgaggaccaggacccagccccgtggctccttgattggccttagggtgggcatcagcagacgttcccgtgcaccactgtgtgcctggccctgtgctgggcactgggggcactccctgcaggagccatcatctgtgaaaaggagcactgtatggccacagaagg

SEQ ID NO: 29005 - DNA, 490 bp, Homo sapiens
  misc_feature (1)...(490): n = A,T,C or G
gcggccggggnnnnnnaatcgaagaatctaggcaccgtgcnggaattcgttggctcgctgtgggcacacacctggttgaatgcatccctgaagttctgaggcacccaattcagcatgtggggtcggctctctctcagcctgggactgacggctcccagggagccatcacccctggcagacagagcctcctttggacaccatccctgggacctagaagccaggaagccatccttgctcaactccaccgactgtgaggaaaatcccatggcagaggggagaggggagacctgttctagacctccccgatgataagcactccttggcatctcagcagccccatctgtgtcttccgcagatcatcttttccacaaacaatagaagagccccatctgggattaactgaggagggttcagccctggtcccatccaagggaggcctcacctaccacatctgctgctgcatactcatggctgccttcagaactcagag

SEQ ID NO: 29006 - DNA, 486 bp, Homo sapiens
  misc_feature (1)...(486): n = A,T,C or G
gagtttccgggnngnnnnaactgaaaccccttcgagaccataggacagngcggnggaattcctcggggctctggggtcgtcgagcacgtggcgaggggagagacgttgctcttccgtgcctcttttccctccttgcttttctgccagttcctacctggcacggagaagtgcagggtggagagatctccgagaagcgccagccttctggggcttcctgttccttacagcggtaaggggaatgctaggctgccgcactaagggggctgccgccgcccagcggtccaggtgtgtgttgcgcgcctgctgggagggagagggtgctagatgtatgctcttgatgctctctccccccagggaagcttggtagatggacgtattattgacacctccctgaccagagaccctctggttatagaacttggccaaaagcaggtgattccaggtctggagcagagtcttctcgacatgtgtgtgggattcaggggg

SEQ ID NO: 29007 - DNA, 487 bp, Homo sapiens
  misc_feature (1)...(487): n = A,T,C or G
gcggatcnnnnnnaattgagnaatcgaganctactatcagtgtggtggaattctgcgtgacttcggcctccggggcgctggcgggcggggcggggtctgtagttagcggcgagagtgacaggaggacaggggttgtttcggcagtgacgcctggggagtgacgcaattgcacccctgtgcagtgatgtcacggcaggtgcggccagcgttccgagtcgaggacagttggcgacactgaaaattcagcgtctccgggagtctctctctttgtagtctttgcccagggccttgccaggcaaagggtagcccgacgaccagcagcctccgctacttctgggcgctcgctagaaatacagattctcgggccccaccccgacctacttggtcggtatctgtgatctgtgaacaggacctttaggtgatttgcatgcactgtaaactgtgaaagccatcagtgtagtggaaggagcatcgaatttagagtaan

SEQ ID NO: 29008 - DNA, 482 bp, Homo sapiens
  misc_feature (1)...(482): n = A,T,C or G
ggtggtggggnnnnnnnaatgagaacttagcacgggcggaatcggtctacaatgtcctcttccatcaaaacggtgtacttcgtgctttttgacagcgagagtataggcatctatgtgcaggaaatggccaagctggacgccaactaggctgagcaatgacagaaccagctgcaccatgtaccccaccttcagtttaaaagaaaaaaaaaaatccccttcactcctactgggaggggggacccctttcattttcagttttgctcatctagggaaaataaggctttggtttccagtttaattgtttttgaccttctaaaatgtttttatgttagcactgatagttggcattactgttgttaagcactgtgttccagaccgtgtctgacttagtgtaacctaggagattttatagttttattttaatgaaaccctgattgacgcacagcagtggggagaacagcgtcttttacctgtcaccgaag

SEQ ID NO: 29009 - DNA, 446 bp, Homo sapiens
  misc_feature (1)...(446): n = A,T,C or G
nattgaagatcgtagacaattacncagngcggnggaattccacgcctctcatgagaaacaagtgaggacccagtgcatagtaactacagttacacactgcttaacaatggggatacattccaagaaatgcactgttggacaatttcatcactgtgcaaacaccatagagtacacttaaacacacctagaaggtacagcctactacacacctaggctgtagggcagagcctactgctgctaggttacacactgtacagtgctcctaggttatacccctgtacagcagtgactgtattgaacactgtaggcaactgtaacacaatggtaagcatttgtgtatctaaacataggaaaggtaaaaatacagtatataatcttatgggaccactgttgatattcagtctgtcgttcactgagccatcattatatgatgtatgactgtattt

SEQ ID NO: 29010 - DNA, 491 bp, Homo sapiens
  misc_feature (1)...(491): n = A,T,C or G
tggggatcnngnnnaatcgagnnactcgagaccactagccagngnggnggaattcagttcagtgaccccatctcggctcactgcaacctccgcctccaaggttcaagcgattcttctgcttcagcttcccgagtacctgggactacaggcgcgcgccaccacgcccggctaatttttgtatttttggtggagacggggtttcaccatgtgggccaggctggtctcgaactcccagcatgttgggaggcagaggtggacgatcgcctgagcccaggcgttcgagaccagcctgggcaacatggcaggaccccccatatctactaaggatgaaaaatgagccggatgtgatggcgcgcagtgcctgtggtcccagctactccggaggctgaggtaggaggacaaatattatccaatattagttttgttatcttccacttactatgtgcaggaacccggtaagcaggatctcagtaagtggagctaataaagtg

SEQ ID NO: 29011 - DNA, 490 bp, Homo sapiens
  misc_feature (1)...(490): n = A,T,C or G
ccccccccccccnnngnnnaatcgaganactgaggcacngtgcnggaattcgttntttattatttctccaggttttgtgtctgtgataccaaccagagttagagagccactggtctagaacatttctcattttaaaaaaatgacattgaattttgagtagcccagaaatgttgttggctatgtgtttagatttctttctttatagtgtcatttagccttgttcttggttgtattttctttacaagggaaagtaagtccagaggctttcttaggtctagattaaacgttttggggaagaatactttgtaggttatttctatgtcatattgtactgtcagaaaacatttaagtacaggtccttgcattagtgaaactaaggatgatcatttgggtaagctggtaaccgccgtaagtccattgtaaagatttagtttgtagtgggtaagtaatctatggagagacgttgtcatctctgaaaagttatagtcan

SEQ ID NO: 29012 - DNA, 594 bp, Homo sapiens
  misc_feature (1)...(594): n = A,T,C or G
ccagcatcgaccctntnngataggaacacctatcagagnggagcaattcangggacagtgaggcttcgggaaggggcggagctgcccatgggctggaagcatgtcaggaaccccctctcacagcagggagctgacaaggggacccacggccttgcccataagtcaggaagttaaccgacttgtcacgtacttctccttgggctgcctgaagtggaattcccccttttggctcacttattttcatcttttctataaaaataaaattgaaacaatggaaatcattcacacacctaattaccgtattgtttatgaacttatttggctcaaaactttggttcttaccgaagtgggaatcccttgagaggggtgggtgagggccaggccagggagacagacctgtgcacgtgccaggacctcagagcctgctctccggctgccctctctgggcaggccaggaacttcccagaaggaacagcccagagacagggttctaagtgagggaggccggcccgagtgggttctgggactctggctggcaggcctggtggtggatggctccatggntgtnnctcccacttgggctcagtcatcatn

SEQ ID NO: 29013 - DNA, 494 bp, Homo sapiens
  misc_feature (1)...(494): n = A,T,C or G
agagttccnaggnagnnnnnnaattgagnactnnattgacgngctgtggaannccgccagccccggccccggccccggcaccatgtcggagaaaagcgtggaggcagcggccgagttgagcgccaaggacctgaaggagaagaaggagaaggtggaggagaaggcaagccggaaagagcgaaagaaagaagtggtggaggaggaggagaacggggctgaggaggaagaagaagaaactgccgaggatggagaggaggaagatgaaggggaagaagaagatgaggaagaagaagaagaggatgatgaagggcccgcgctgaagagagctgccgaagaggaggatgaagcggatcccaaacggcagaagacagaaaatggggcatcggcgtgagcccctgccaacaggctggggttgggaggcctctctgggcctggaggtgggggtgggggcagccaagtccagccactcttcacctggcttcctgctctgggcc

SEQ ID NO: 29014 - DNA, 488 bp, Homo sapiens
  misc_feature (1)...(488): n = A,T,C or G
agagttccaggnngnnccnaattgagnccntttgagancctaggaagngcgtggaattcctttactgatataattgacacgccataaaattcaccgctttagggtaaaatgtgtgctgcgcaggtgagggaatattatttagcaatgaaaaagaaaaatttgaatcccagcactggaaggctgaggcgggaggatcgctggagcccaggagttcgagacccgcttgggcaccacaatgagactccatctttattagccaggtgtggtggtgggcgactgtggtcccagttactcgggaggctggggtgggaggatccctcgaacccaggaggtggaggccgcagtggagctgtttgcaccaccgcactcccgtgtgggtgagagagggagacactgtctcaaagataattcgactctgatacgcactgccacacgatgagccttgagaacatttagttaaagcagccccagggcctgtatatcgttcg

SEQ ID NO: 29015 - DNA, 583 bp, Homo sapiens
  misc_feature (1)...(583): n = A,T,C or G
ccagcatggacactgtcagatgnagcaactctcaggctctggcgtccggctgtgggcggcttctccgtgggctactagcgggcccggcagcgaccagctgttctcggcttccagctcgcgggttcagggaagtggtggagacccaagaagggaagacaactataattgaaggccgtatcacagcgactcccaaggagagtccaaatcctcctaacccctctggccagtgccccatctgccgttggaacctgaagcacaagtataactatgacgatgttctgctgcttagccagttcatccggcctcatggaggcatggctgccccgaaagatcacaggcctatgccaggaagaacaccgcaagatcgaggagtgtgtgaagatggcccaccgagcaggtacctgacgcgctgggctcctggctccgtcaagcccatctacaaaaaaggcccccgctgaacagggtgcgcatgcccgtgggtcaccccttctggggacaatgtctgtactcaagacaccttggagctgatcactgacagagagagtgcttcagagnntctctgcactgtgctgggagaagaagg

SEQ ID NO: 29016 - DNA, 449 bp, Homo sapiens
  misc_feature (1)...(449): n = A,T,C or G
ctaatgcacctccgatgancggcatgaaaacgacagangncctgncccagctttcgtttgcattctaagcaccccctccccaccatgcctggaggcctttaaggtgggaggggtggggttagtaaatgggctgccattccagttaaagtaataacagttctttttaacctaaggatgactgggttgccgtaaatatttattttatctgaatggaggtttaaaatgtctgtatataaagtgcgtgtgtgtgtgtgtgtgtatatatataggtgtatatataggtatgtgtgtctatatatgtatctatatatatctaatggcttcttaaaatcaggtaacatcatttctttctttctatgtctttcttttaaactatagatgaattcccttggtttccctagacagactatcaccatggaaccagtggctggcattttaaccttgttttt

SEQ ID NO: 29017 - DNA, 614 bp, Homo sapiens
  misc_feature (1)...(614): n = A,T,C or G
cgacgcgattcgatncnccnntncgngnataggaatcactagtccagagnggngcaattcgcaccatccgtctcangaatcgccaactttgcccgagtcttcagctaccgattctgactactacagccctacggggggagccccgcacggctactgctctcctacctcggcttcctatggcaaagctctcaacccctaccagtatcagtatcacggcgtgaacggctccgccgggagctacccagccaaagcttatgccgactatagctacgctagctcctaccaccagtacggcggcgcctacaaccgcgtcccaagcgccaccaaccagccagagaaagaagtgaccgagcccgaggtgagaatggtgaatggcaaaccaaagaaagttcgtaaacccaggactatttattccagctttcagctggccgcattacagagaagggttcagaagactcagtacctcgccttgccggaacgcgccgagctggccgcctcgctgggattgacacaaacacaggtgaaaatctggtttcagaacaaaagaatccagatcaagaagatcatgannaacggnngagatgccctcgagcacagtcccagcttcagcgacn

SEQ ID NO: 29018 - DNA, 465 bp, Homo sapiens
  misc_feature (1)...(465): n = A,T,C or G
aaaataagacaccagtaagaagcgncgnggaattcgcattttaacaatcccaggtgatgtgtgtgcatgtgaaaatttaagtaccattggtctatatcctacactctttaggatatcaccatctgtgggtagaatatttaaagcataataggtatgactgatagattattttatccaaagttcttttttttttttttggaaagggagttttgttttgtgccccaaatggaagggagggggcgaaatctcggctcacggaagctttggcctctggggttaacccatttttctggttttaccctccaaggaggggggggttccgggcccccacccccccccggggctaattttttggttttttaagaaaaaggggggttccaccgggtaacccaggagggcccgaatttcttaccctaagaacccgccggcctggccccccaaaggggctagaataccgggcggacc

SEQ ID NO: 29019 - DNA, 454 bp, Homo sapiens
  misc_feature (1)...(454): n = A,T,C or G
gggcggtncnccaatgagaccattgagatcgtggaaanncgcnnnngaacatatgtacactgtactgagcccaagagttctcatattctttctttgctcattatagaggatggtactaatactggagaatagtagattttcaaagatacctttatttagaatgttagagtatacagatatatactttgtacataggtatcataatgggtgtaacctttttatttaaagcaggctgatttgcgtaaaggtttcagaatgattttgttaataagttattagaaactttcctatttgtacaagatggtaaatgtagattccaatttgtatgcctcagtaaattcataatcttatttctctgatgtgagccactgtgcctggccttctgtgatgctcttaatgaatcatgcagttttattagattgtcattgagaacctcataaatgattgctatgac

SEQ ID NO: 29020 - DNA, 462 bp, Homo sapiens
  misc_feature (1)...(462): n = A,T,C or G
ntttgaatgacctcgaaagnccggnttagtagaacctagcacacaccaggacccccagataacaccctacaagaaactgggacctttccctcatcctaggcccaggacccattatggggacaggagctgaagggctcccagggccccaggggcggggaaggcatggcttgctggccaggatattcagaggtaggcagccaaagggcacagaaccctgtgccccaccaggattggcctgctgctaggggccaggggccctgaccaggaagacaggtgggttcctgtagcctgttgcccatccccagggcctttgtggactagccaaggctgtgagggccagaataaacaactgctctncanataaaaaaaatataaaaaataaaaaaaaaataaaaaaataaataataaaaaattattatataatatttttttttattaatatattaaaaaaagcgcggccct

SEQ ID NO: 29021 - DNA, 598 bp, Homo sapiens
  misc_feature (1)...(598): n = A,T,C or G
caagcatcgatcactatccgagtggaggaactcctgaaatgaacaactcctttanacgtgcagccttttgaatttttcctcacaaccaagaagttgacctctgagctgtcaggtgaccactgtgtgcaaaggggatggattctcttgtcagtagacggtcttctccatgaagcgagagtaggaagtgtactggaatggccaagtgggactgcttcagctgaccaggttcttttaaaccgtagtcatgctttcccactaactcttaaatccttatgcttagaaaattgaggataaggctgggcacagtggctcaggcctgtaatcccagcactttgggagaccaaggggggtggatcacaaggtcaggagatcgagaccatcctggctaacatggcgaaaccccgtctctactaaaaatacaaaaaaatagctgggcgtggtggcgggcgcctgtagtcccagctactcaggaggctgaggcaggaggatcacttgaacatgggagcgcagggtgcagtgagccaagatggcgccacttgcactccagcctgggtgatggcgtgagactccatgtcaaanaaaaaaaaaaaagtttggg

SEQ ID NO: 29022 - DNA, 549 bp, Homo sapiens
  misc_feature (1)...(549): n = A,T,C or G
caagcctatcaagacagaggtgcagggcgaggacggacaggtggtgctcatcaagcaggagaaagaccgagaagccaaattggcagagaatgcttgtaccctggctgacctgacagagggtcaggttggcaagctactcatccgcaagtctggaagggtgcaactcctcttgggcaaggtgactctggacgtgaccatgggaactgcctgctccttcctgcaggagctggtgtccgtgggccttggagacagtangacaggggagatgacagtcctgggacacgtgaagcacaaacttgtatgttcccctgattttgaatccctcttggatcacaaacaccggtaaaatgagcaggtggaggaggacggcgcctgtgcccacggctgctgcctgctccagacattntgttcttgaatctgtgagacccagaaggagcccactgagcccactcacttcagcctttaggcaccatttagtcangtcccccanggctttctcccacagcagctgtgaatgcacagtgaccttctgcgacgtgagaggcacat

SEQ ID NO: 29023 - DNA, 448 bp, Homo sapiens
  misc_feature (1)...(448): n = A,T,C or G
ggaggcccccagagnncccccctattanntcctagtgatctcgcacangcggggaattcctgggagggtggcatctcctggagggtgatgacaatccccaacacatgcattcatgtggtgctactctgtgtgcaaagccagaccccaagtatgttttctctctttgtcccatccctctttttctgggactttggaccctaactacttccctcctgaaccttgcagtgacatcagtccaggagagctctcgttcagtgtgcggaagaacactctgacctctagagctgtcctagataaggagtgggagctttagaggcaaggcctctagaccctggaaggctcagtgaggctcttcccacagcatgcttctcactggtgccctgtaaggctcgagccaccgctgactctgagccttttggagtctttcctccttcgtctccattgttcc

SEQ ID NO: 29024 - DNA, 467 bp, Homo sapiens
  misc_feature (1)...(467): n = A,T,C or G
cccccccccggggnnnnnnntttgtagaccttagtcagtgatggcgtattccagccctccacgaccttctctccaggattgactgctgtgcttatctgagtgctgttatgtttccccatgaaagatgaacggtcctgtgttcgctgctggctccctggtgccctcacagttttgcgataagcatttgttgaatgactgagtgagtgaatgaatgaagcctctgactttccagcctctccgccattgctcaactatccctgcaacctagaatgcctcaaccacaacagcccttcaaggaccagctcaaaatgcctcctccaagaagccttccctggtctccactagaaaccatcactccctcccctccacggccactccagagctgccctgctcagcaacacagtgtccctgaggactcaaggtctgggcctgtgcccactgcgggacccagttctgagccagcccan

SEQ ID NO: 29025 - DNA, 454 bp, Homo sapiens
  misc_feature (1)...(454): n = A,T,C or G
attgaactcgatagcatcggcaagngccgcggaanttcaatctcttggtttctcatcctctggccagccactgaatgtttagttcttcttctcctgtgtgcattctctccttaggctgtctcatacactctgacttcagtaaccaatgacatgccagggaatcccactgtatgttcctagcccatggctctcctttgccacccacacagctgcctatttagtgtctgtgattatatttcccacaggtatttaacttgccatctttctcttccaaactctttttcctccagttttccatatcagtaaattctaccactatccctactagctcaagctagaaacccaggaatcattttttttctccctacatttaatgcattgtgaagtcctgtccattctacctcctaaagactttctctatctacctattactatgcatcccaagaaaccatca

SEQ ID NO: 29026 - DNA, 452 bp, Homo sapiens
  misc_feature (1)...(452): n = A,T,C or G
atcgagatcgatgcctcngcanggacnttgaagnttctaaaatgctgggcgaatccttccaagaatgtgaatttaggttgcctgagatgctgttattgtatttgatgatggaagtcccctggctatttatataaatgtttgaggaccccactgcagtgtttccagggatatggcgaccctgaactatttgatcagtaaatctcaatccacctgtaaatcaccaagctctacctgatgtctctcccagaagagaattaggagatgggcctttcccactactcagttcagggactccactctccacactccatccattctgagtgagtgtaaaacttcgagaaagggagaaccctaccaatgggttggggccccgacctggattcttatgaagggactaccagaacccctttccctcccgttccctattctgttagtctctctgatgactcctn

SEQ ID NO: 29027 - DNA, 468 bp, Homo sapiens
  misc_feature (1)...(468): n = A,T,C or G
agaaaaaaatttgatnacattnnttagatgaccatagtacangcggtggaattcgttttaaaagagaggagtctggaaggcagagatctccaccacctaaccgtgagaaatttggaactaaggacttgcactggtccccaagttaacagtggatatacttcctgcattttctctgttctttcttgcatttgggcaaaatgtatgaacggcacaagaggcgctacagcctctgtgacatctccaaggtggacaggactgtggacgtggtattgctgaagataaaccgagaaaactggtgtacaatagagccatgccctgatgcagcatctcttctggcttccaagcagagcccagaatgtgagaacttcctggatgttggactgggcagagagtgtacctcaaaacaaggtgtacttaaaagaaaatctgggagtgattctgacctctttcactcacccagtgatgaca

SEQ ID NO: 29028 - DNA, 451 bp, Homo sapiens
  misc_feature (1)...(451): n = A,T,C or G
atcaaccccctnnnnnattgangtctcttagaccagctggnggaattcgttctgccgatgatgagaggatcttgaggttcttggaattggcaggcctggtaagtggggagagggaccctcaggacccgagcccacctgggagcaccagctacaggtaggcaggtgctggccctgctatgcttgggcccaggactggaagtctgaacctggggtggagaatgggagtatcagttgacagtgtgtgctgttggccaggtttaggcacgaagggggtagtgctctcattggagaattttaaaacaagaataggattgatgaaggcggnttgctttttactgtcatcatgctccagcaagtctaaacagtgtcattggtagaatattcctctctgcctggggcagactgtcccacagtcccccgccttggtatgccactggggcatatatttgtn

SEQ ID NO: 29029 - DNA, 446 bp, Homo sapiens
  misc_feature (1)...(446): n = A,T,C or G
attagaagaccactagatgagcgtggnggaagtccagaaagtttactgagcatcttctaggctaagcactttagaaagtatgaaagaagtttaattcacaatacttatcctaaaagatcacaatcttgctgatggcacttagacagtacagcaatcccttgatatccacaggggtttggtaccaggactcctacagataccaacatctaggtatgtttaagtcctttatataacatggcgtggtgtttgcacataacctaggcacatcctctcacatactttaaatcatctctatattacttataatacctaatacaatgtaaatactatgtaaatagctgccacactttattattttgattgttatgttgttaattttatttttaatattttcaatctgcagttgtgaatctgcaaacgtagaacccacagatacagaggggcag

SEQ ID NO: 29030 - DNA, 472 bp, Homo sapiens
  misc_feature (1)...(472): n = A,T,C or G
agacgaagaaannnttcgtagatcactagtctagtgcggcggaattcagggagaactacaagaggcagggactgctagttcatgggtctgtggtgcagtagtgtgagctgccgtgacagcatgagctctccagcaatggtggaggccaaattaaagctagtaagagcttgctgaggatgctgcaaagaggatggagaagacggtgggaaattagagggctctttacaggtctaggacttcatttgtgtgtcttatagatgtctggctggtcagcaagtgggtgtgggccagacaatgtgaggtgctgattttcactctcatacccactccaggaggcctacttcaagaagcacaagttcaacacggttccaggtgtccagctcaggaatgtggacaggttggggctggcagcagggcaaggggtggatatctaggagatttggaggccagtccctgaaagtcccttccaatg

SEQ ID NO: 29031 - DNA, 473 bp, Homo sapiens
  misc_feature (1)...(473): n = A,T,C or G
aggggagaaaaaatttgagcccctnnntttgtagatcactagtcagtgcggtggaattctgtacttccatgtgctttaaagagatagtagtgaatttatgatgtgcaggcgtccctcccagcactcggcatgaccgcgcttagcttccatcccccacccccccgtgcaggcatccctcccagcactcagcgtgactgtgctcagcctcaggactctagctttgcaggcgtccctcccagctcagtgagaccagccctgtgctttcctgttgcaggtgctagtcctgacagtctctgtgacccgctctgcactttgctgttgcaggtgtacctccttatactgagtgtgaccacgctcagcctcttgctcgccccggtgctgtggagagctgcaatcacgaggtgtgtgcccagaccggagagacggtccagcctctgatggctcggagatgatggaccgtggaagggaagcgn

SEQ ID NO: 29032 - DNA, 459 bp, Homo sapiens
  misc_feature (1)...(459): n = A,T,C or G
ctagatnaccctnnctcgtagaccctagtcagtgcggtggaattctcggcatgggcctgtcgcccgacaacaggtacctgtacgtgaacagccgcgcctggcccaacggtgcggtggtggccgaccccatgcagccgccaccaatcgcggaggagattgacctgctggtgttcgacctcaagaccatgcgggaggtgaggcgggctctgcgtgcgcaccgcgcctacacgcccaacgacgagtgcttcttcatcttcctggacgtcagcagggacttcgtggccagcggggcggaggaccggcacggctacatctgggaccgccactacaacatctgtctggccaggctgcggcacgaggatgtggtcaactcagtggtcttcagtccccaggagcatgagctgctgctcacggccagcgacgacgccaccatcaaagcctggcgctccccacgcacca

SEQ ID NO: 29033 - DNA, 447 bp, Homo sapiens
tttgtgtcctctgacttggctggcgtattcgcgctacaatctctgaaataacagaagtgtagaatttgggttccacagacaacctggctttttcccggagtgcacttgccaatctgctgctgtggaagggaaatagagcccagacggaaagagagtcgctagactgagaagacggaggttggagtttggggctgccagaatgtctggaagatgagagttaaaatcctggaatggatgggaccacagaaaagggagttcccaacctgcaaacaaatctccctcaagtcattggcaagctctacatgcacagggtgagagtccaagaaacttggaagagaaaaatagcaactgggaagctacaaaagcgaacaaggcttccagcagacatgtgatgctggggacacaggttgccaagctgaagaggccttggccgggctgtcacctatt

SEQ ID NO: 29034 - DNA, 568 bp, Homo sapiens
  misc_feature (1)...(568): n = A,T,C or G
gaggagttgancccctnnnnnnnnttcgatcacctatcagtgtggtgcaattcgnggaggcagggcaggatggcaagccccccggcgatgtcctagtgggccctacagcctccctggctctggtacccgggagcggagagtccatgatgggtgctggagattccggtcatgcatccccggacacaggtccatgtgtcaatcataagcaggagccaggtcctgctcaagaggaagccgagttaggtggccagaacctcgaacgagacctcgaggggttccgtgtgtccccgcaagcctctgttgtgctggaacacagagaaatagcagacgaccctctccaggagcccggtgctcagcggggcattccagacaccacctcagagctggcagggcagcgagaccacctgcctcattctgcagaccagggcacctgggcagactctttagctgtggaactcgacttcctgctggacagccagatacaggatgccctggacgcctctgacttcgaagccccacctgagcagctctttccttcgngaacaagccnnggccttgctgccngncn

SEQ ID NO: 29035 - DNA, 492 bp, Homo sapiens
  misc_feature (1)...(492): n = A,T,C or G
agcccggcattcgaagaccctagnnattggagggcatttcccgggaacagcataccctcaacctcccagcagtcaacagcatcacctacgtcctccgcttcctggagaaactctgccacaaccttcgtagagacaatctgtttggcaacacagccctttacacagactcacttgtcactcactgccatagagtacagccacagccacgacaggtacctaccaggtgaaacctttgtcctggggaatagtctggcccgctccttggaaccacactcagactcaatggactctgcctcaaatcccaccaaccttgtcagcacctcccaaaggcaccggcccttgctttcatcctgtggcctcccaccaagcactgcctcagctgcgcgcaggctatgctccaggggagtgttaaaaggatcaaatgaaagaagggatatggaatcattttggaaactaaatcgttccccatggtcggaccgatacctggagagn

SEQ ID NO: 29036 - DNA, 467 bp, Homo sapiens
  misc_feature (1)...(467): n = A,T,C or G
aagggaaaaaatttgagacctctgtttcgtagtcactagtccgtgcggtggaattcccagagggttagatggttatgtcctcaaaacctattccagtcaatttatgtctcagtctcagtattggcttatgtgttatttatctttttaaaaattcatatatgtttaatgagtacaaagccaagcacaggacagtcgtgaattcagtagaaatattctctgttattcctggccgcgtgcagtggctcacgcctgtaataccagcactttgtgaagccgaggcgggcggatcatgaggtcaggagtttgagaccagcctgaccaacgtggtgaaaccccgtctctactaaaaatactaaaattagccgggcgtggtggcgcgcccctgtaatgcccgttgctcaggaggctgaggcaggaaaatcacttgaacccgggaggcggaagttgcagtgagctgagatcgcacn

SEQ ID NO: 29037 - DNA, 447 bp, Homo sapiens
  misc_feature (1)...(447): n = A,T,C or G
ctttgattgacgaccactagtccangcggtggaattcgaaaggccacccagacacgggtgtgtgctggcattagtccaggtaaaatgaccaatgtttactctgggaagatcagacgtgccccccgaagcaatgcaaggcccaaactgtcagtggcggttcactgaacgagcctcaaacctttagtccaagaggcagctcatgataaaagatgggagatggagagggaaagaaagatgagggctgggtacagcacaggcactgatttcagaaactggaaaaacagctgaacatcacagacactggggtgatgccaggagacagccttttggttagcaaatacaaagaaacagaattcaccagattcctttgccgctcctctggaagttcctgagtatgctgagacaggagctgaggaatccatgaagggagaagcttcctctgtactt

SEQ ID NO: 29038 - DNA, 462 bp, Homo sapiens
  misc_feature (1)...(462): n = A,T,C or G
aagggaaanntttgagaccctagtttgtgtggcggaattccgcagccgaacccgccctccgaatccagagaggcgctgctgacaccgccgccacaccgccgccacaccgccgctgcctcagtcatgccgaagcacgagttctctgtggacatgacctgtggaggctgtgctgaagctgtctctcgggtcctcaataagcttggaggagttaagtatgacattgacctgcccaacaagaaggtctgcattgaatctgagcacagcatggacactctgcttgcaaccctgaagaaaacaggaaagactgtttcctaccttggccttgagtagcaggggcctggtccccacagcccacaggatggaccaaagggggcaggatgctgatcctcccgctggcttccagacagacctgggacttggcagtcatgccgggtgatggtgttcctgcggagaccctcagtt

SEQ ID NO: 29039 - DNA, 474 bp, Homo sapiens
  misc_feature (1)...(474): n = A,T,C or G
atgggaaaaannttttgaagaccattagnncggtatgacccttagtccagtgcggaggaattcctcaggtcctgccagatgaacctggtggctgacctggtacattaggttcagcaggcccgtgacctccagaacaggagtggggccatgtccccgatgtcatggaactcagacgcatctacctccgaagcgtcctgatgggccgctgctttgcgctggtggaccacaggcatctacacagcctggactttggttctctccaggaaggtagcccagcactgtgaagacccagcaggaagccaggctgagtgagccacagaccacctgcttctgaactcaagctgcgtttattaatgcctctcccgcaccaggccgggcttgggccctgcacagatatttccatttcttcctcactatgacactgagcaagatcttgtctccactaaatgagctcctgcgggagtagttggaaag

SEQ ID NO: 29040 - DNA, 445 bp, Homo sapiens
  misc_feature (1)...(445): n = A,T,C or G
nattgatgacattcgtccgtgcggnggaattccaagaagttccaacttggctgtgctataggccacaatgaaacagcaatggagagtgaagctctcgtgggactccccagccaaggactcaacagcagctgtgaggcccagatgttcacaggtgactcacagatgtcctacacagtgcccattatggcttttgcttttgtctgccaccctgaggtgctgcccatctatacggagctctgccggccctccaagcgcaggatgcaggccgtggccaacgtgtccattggggccatgttctgcatgtatgggctcacagcaacctttggatacctcaccttctacagcagtgtgaaggcggagatgctgcacatgtacagccagaaggacccgctcatcctctgtgtgcgcctggccgtgctgctcgcggtgaccctcactgtgccag

SEQ ID NO: 29041 - DNA, 465 bp, Homo sapiens
  misc_feature (1)...(465): n = A,T,C or G
gtgggaaaaanttttgagatcactagtctgtgtggcggaattcggatcagaaccagaacccagtcaagtaccactattatgacagcctcaagtatggctacacctcccaggccagcccgcataccatgcccttggagtttaaggccctcaagagcctacatgagcagggggctttgaaactgactgtcggccagtgcgatggggccacgtagggtgggcaccccatgggactcagtggctcacatttcctgccagctacaccacaggcagatgggagtcggggtggcacaaacaatagaacaagcaggctagtggttttctttgttaaagtgtaaaacagtgaccagaatatatatatctatacctgcatatatatattgacctgagtatttataactgtgtggtgttcatctagcattatgcagataggccacaggaagaaggtgtggagaacccacctgaacc

SEQ ID NO: 29042 - DNA, 354 bp, Homo sapiens
tggctacagaggcatgtgaacttacatgtgggacagggatccctaaaacctcactctgtttttgtgctgaaagggcaaacaggttaacacagggaagctcaaatttgccatgtgcccgtttgaatatgtgagagtaaaaacggcatttcatccaaggcttatcgtagactagaacagtgcacagtgtgggaaaaaggaaacaagggctctttctggccctgccaaccccctgcagagctggaatccagctgtttgggctgactaaaatcaccttttcaacttgacagtgagtgagaccaagttgaacttggacagaaacgctgggctgggccagatgactttatgttactcctt

SEQ ID NO: 29043 - DNA, 447 bp, Homo sapiens
  misc_feature (1)...(447): n = A,T,C or G
cattgatcgacgttcactagnccangcggtggaattcctggtcagctgtgacctgggcttcgtgcgagcagaccggcctccctctcctgtgaatgtgacggtcactcacctcagagccaactcggccactgtgtcctgggacgtcccagaaggcaacatcgtcattggctactccatttcccagcaagtatgaatcacccttctgctcccccaacctgtgtccttggatttcggcacatttcttcacttaagtgggggggatctggaagctggcgtatcctggctcaggctgcccttttcacgctactcccccggagtgcttggatgttgaagagtctctggttgagccttgtggcctggcactggggtgaggctgtcctcctctcccctcatctccctgcagcggcagaatggccccgggcagcgtgtgattcgggaggtgaacct

SEQ ID NO: 29044 - DNA, 445 bp, Homo sapiens
  misc_feature (1)...(445): n = A,T,C or G
nattgattgcattcgtccgngcggnggaattcggcgacacatgattatgaatttccccattattggtgatgtcacttagttgtgttgtctgccgggttctgccactgtaaagttaataagtattttgtagggaagtgctttgagactaaatatcctgttcctcatcaaacttctaccccctagtttcagtatctattgctgctttttggctgaataactatgatagttgccaaatagtggtttctgatgcttccattccttctacactgattggttggtattttgtacagaaaagctttctcatatctgatttacttgtctcaatatggacccatgggtatttgagtttcttgtggggttatttgttgttgtttttgagacaggctcacccaggctggaatgcagcagcacgatcactgctcgctgcagcctcgacctcccaggg

SEQ ID NO: 29045 - DNA, 465 bp, Homo sapiens
  misc_feature (1)...(465): n = A,T,C or G
gtgggaaannntttgatgacactagtctagtgcggcggaattctggcaacaggggtagggggtgaagccccagtccctgtgctgccaacaccccctgaggctcctaggccccctgccacagtgcaccctgaaggagtccctcctgctgacagtgaaagcaaggaggtgggcagcactgaaacaagccaagatggagatgccagctccagtgaaggcgagatgcgggtcatggacgaggacatcatggtagaatcaggtgatgactcatgggatctgatcacatgttactgtcgaaagccctttgcagggcggcccatgattgagtgcagcctgtgtgggacgtggatccacctctcctgtgctaagattaagaagaccaacgtccccgacttcttttattgccagaaatgcaaggaactgaggccagaggcccggcggttaggggggcctcccaaatctggagag

SEQ ID NO: 29046 - DNA, 469 bp, Homo sapiens
  misc_feature (1)...(469): n = A,T,C or G
gagggaaaaaaactgaagaccnttngattttgagacctctgtacangcggnggaattcgagcggagtcaccacctccttgcgcttcccgggccagctcaacgctgacctgcgcatgctggccgtcaacatggtgcccttcccgcgcctgcacttcttcatgcccggcttcgcccccctcacagcccggggcagccagcagtaccgggccctgaccgtgcccgagctcacccagcagatgttcgatgccaagaacatgatggccgcctgcgacccgcgccacggccgctacctgacggtggccaccgtgttccggggccgcatgtccatgaaggaggtggacgagcagatgctggccatccagagcaagaacagcagctacttcgtggagtggatccccaacaacgtgaaggtggccgtgtgtgacatcccgccccgcggcctcaagatgtcctccaccttcatcgggaa

SEQ ID NO: 29047 - DNA, 448 bp, Homo sapiens
  misc_feature (1)...(448): n = A,T,C or G
nattgattgcattcgtccgngcggnggaattctggcttacccgaggatggcacagttagggccgacactccatagtacgtgaaggccccattctcaaacttcagaccctctttcccgatctccacttcaaccctgccctgggaggagtggcaaggagagaaacagatgcggccagattacctttcccgtcagaagacagcggaaggagaaacccaccacctcaattgtttggggtgggagggtgcatatccgcatgcccctgctcccctcttctcctagacccttccctggcctgaggaagcaggagggactccaggcctgggacccacagctacctgcaggatgagaatgaagtaatccaccggctggctgcgctggtacaggtagtggtgtgtggccagccggttgctctcgtcaaacctcacttcctggttgacactgggatgct

SEQ ID NO: 29048 - DNA, 471 bp, Homo sapiens
  misc_feature (1)...(471): n = A,T,C or G
agggggaaaaaaattgaagcccttngnnctcgatgatcattagtaaagtgcggnggaattcggatatcctgtttaccctgatgtgattattacaaattgcatgtctgtaccaaaatatctcatgtacccgataaatatatatacctactatataccgacaaagttaaaaatagaaactggaagacaaaaaataaataaaaatcaaataaagcttctcattttgttgtctgcctttggtagatttccagccctgaagtggctgtttttgaaaactgttttcccccagttttatttttgtttatccctctctggagggatttgagtccttctttatacctccacaactccaagtccctcctctcattatcgttttagatgaggaaagtgaagctcagaagagatgaatcaatttgccctagaccatgcagctaggaagcctgggagccagcactaaactcaagtgttcttttt

SEQ ID NO: 29049 - DNA, 467 bp, Homo sapiens
  misc_feature (1)...(467): n = A,T,C or G
taggtaaaannnctcgatgtcactagtctagtgtggcggaattcgccacattcagagtatagcaagtagatcctcagacacctaaccaaggctcaaaggaaaaagcatccaaatctgttggtaatatatactctgagtgtttccctcgggacccccactgggcgcgctcacacacacacacacacacgcgcacgcgcgcgcacacacacacacccctgccaggaaggcgtgcacacacacacacacacacacacacacacacacacacacacctctctcacaggaaggtgtgacagagagaagaattcttttgtattttgtgtcagtggggcaattaccattttttccacatttaagaaaccaacatcaagttgactcccacaggtccttgtaaagaaatacagtggcttcccgaggcctgttttggattctgtggaacagcctgggaagacaggcttttacacact

SEQ ID NO: 29050 - DNA, 485 bp, Homo sapiens
aaaacggacttgattcgataacctagtcagtgtggtggaattccctagccctggcccaggtggtgagcggtttgcagtgtccgttctcatccacctgatgggcccagataaaggcccccgctgtccagcctccctggacggccctcgcggtccctgcagcccaagatgggactcagaccctgtgccccagagctcccctgccgcagaatggggccccagccggccccgaccgggtccaggagcactgctcgcctgtacatactgttgccctagcccacctggtgccgtgggagccacccccaggtgctgggggcacagcccctccccactccggccacgcccccacccaccccgcgtgtttctgccctgtgactcctggaacctgcgtcctccccaaagccatgggaggggtgtcctcctcagaccatgcccccagatgatttttttaaataaagaaacaaatgcacctgccttgagcgcaaaaa

SEQ ID NO: 29051 - DNA, 483 bp, Homo sapiens
agaatgtacttgagtcgtagtccgtgtggtggaattcacggcagcggcatgagaccaccacccaactccctcggccccgccatgcccgggattaacatgggcccgggagctggcagaccctggcccaatcctaacagtgctaactcaattccatactcctcctcatcacctggtacctatgtgggaccccctggtggtggcggtcctccaggaacacccattatgcccagtcccgcagattcaacaaattccagtgacaacatctacacaatgattaatccagtgccgcctggaggcagccggtccaacttcccgatgggtcccggctcggacggtccgatgggcggcatgggtggcatggagccacaccacatgaatggatcattagggtcaggcgacatagacggacttccaaaaaattctcctaacaacataagtggcattagcaatcctccaggcacccctcgagatgacggcgagcta

SEQ ID NO: 29052 - DNA, 434 bp, Homo sapiens
cacagcagcggtctctctgccggggcctgggcaggtccaggagcgtggaggctgaggacccaaggggtcctgctgagcctcagtttccacatctgaagcctggagtccttggtccagccccagccagtccacgtctctcctggggacagatttggaggaggtgggagggggtgctcagtgagctgcaggcggtgttattagtgacagctgcgtcacaaataataacatttgtgaagtgttttacaagttggaagatttttcccatggatcacctcattgggtccttacagtgaccctgcagctcctacttcacaggagacccagagtcctactgccagtgactccgagaaccagcgctcccaccttggtccaaggaccccgagacctgtgttctgtcttccgtcccgcactttctggggtgtgaatgtcaaact

SEQ ID NO: 29053 - DNA, 452 bp, Homo sapiens
  misc_feature (1)...(452): n = A,T,C or G
gtnaaaatgagaccctccgaaaactggaccctccgnanagncnggnggaattcctcgatcgaaggcgagatggcggacgtgctagatctttttgaggctgggggcgttgatttcgccatggatgaggatggggacgagagcattcacaaactgaaagaaaaagcgaagaaacggaagggtcgcggctttggctccggtgagtgtggggaaaatggggtagagtggcctagtagggcaggagctacgggttttggagtccccacccacctcataggaacaatgggagaaaggaggagttttcggtgatctcgtgtatgtcccttatagaagaggggtcccgagcgcggatgcgtgaggattatgacagcgtggagcaggatggcgatgaacccggaccacaacgctctgttgaaggctggattctctttgtaactggagtccatgaggaagcc

SEQ ID NO: 29054 - DNA, 468 bp, Homo sapiens
  misc_feature (1)...(468): n = A,T,C or G
cggggtaaaganactgatgaccctnganctgatgtcactagaccangcggnggaattcacaaactaaagctcagaagcgataagtgagtcgcctgaaatttcacacaatgaatgtgggcggagctcatttgcggacctatgctaccaaactcttactctttgcactatattatattgcctttgtgagaaaagaaacagttgcctacaagtgatatttgggtcctgaaggcctggggtgagcaacatgcggtgagtgatagtgacttcattgccagcagcggtcacagagatctcaccatcatcaaggaccaactgaacgtgtccaacattgaccaggtggccagacacctgaggggccttctggaggaggagtgtcacaccttggagagggagatcctcatcctgcagcgctgcctggaagaggagtatttgaggccttgccacccctctgaggcaaccctggagccg

SEQ ID NO: 29055 - DNA, 467 bp, Homo sapiens
  misc_feature (1)...(467): n = A,T,C or G
atgggtaaaannntttgatgatcactagtctagtgcggcggaattccatgcttcttccctgatgtctgctgctggtgcctttgctccagccacttggaagagattagagtccccaaaccccacagagtcacatctgcagctctgggaatgaagtcaaaacactcctggcttcacaggctgagcttgtggcccacaggatagaagagtggaaggagtagagaggcagacaggaagggacatagaggaaagggagtctcagccccagactaagtcagctcagggagagggcagaagggcctcaggatgggagccctcaccctgtctgggctgcagtggccaaggcaggttgggacaccacttcctggagcctgtcctggccctggccctggccctggccttggccctgcctctgtgggaggaggaggaagtgcatcatcctgggtgggaggagaatcacctggcttgtg

SEQ ID NO: 29056 - DNA, 450 bp, Homo sapiens
  misc_feature (1)...(450): n = A,T,C or G
cattgattgacgtcgactagnccgngcggtggaattccacccatggaaatgttgctgaacactgctgagatggagggggagctgggcaaatcagtttttattttggagatgattacaactaagccaaatcatttcctgtcttctcttcagcccaccacttctctgatttttcattcaaataattcaattccttcgagcagctacatagtggttacctggtactctcagtactggctgtgtggctttgaatgtgtctttaaaacccaataacccatttcatgtctctctgcattgtctggaaaatggagggaataacgggacctgcctcacagggtcacaaggtcatgtgaggggtaaagccctcaacagggctggctcatagcaggcagtcaacaaatgcatgggcattcacatgggccactgggtgtgctggcgccctcaggttctctn

SEQ ID NO: 29057 - DNA, 491 bp, Homo sapiens
  misc_feature (1)...(491): n = A,T,C or G
agaatgtaatttggctcagtaccctagtcagtgtggtggaattcgccagtgccggggcttcatccctgtgaaggcacagggcctgctagtgggcacaggggtggctagttggggcctggggcagaggagggctgcaccaggcgtcctggggaatgtgctcagtgaagacgacactgggctttgcacagcctggtgtcgctgtacagaaactgtcaagggaataaagtgttctttgttttttaaaaaaaaaaaaaaaaaaaggaacaaaaaaaaaaaaaaaaaaaaaaaattactgttgtagaaaaaaaaaaaaaaaaagaaaaaaaaaataggganctttcagagaccctgaataatgtagtttaagaggagaccgtgtgtttactgggggtgtctgtgaaaaacatcgggcttttctttctcccccgataacaattaattgtgttttgtctgtacgaacttttttgtttgttatttcccataacaaaaat

SEQ ID NO: 29058 - DNA, 485 bp, Homo sapiens
  misc_feature (1)...(485): n = A,T,C or G
agaacgtgactcgagttcctagtccgtgtggtggaattctgggcaacgacagccgagacatgtacatggagtctgagggcggcgacggctacctggctccggagaatgggtatttgatggaggctgcgccggagtgaagaggtcgtcctctccatctgctgtgtttggacgcgttcctgcccagccccttgctgtcatcccctcccccaaccttggccacttgagtttgtcctccaagggtaggtgtctcatttgttctggccccttggatttaaaaataaaattaatttcctgttgaaaaaaaaaaaaaaaaaaaaaaaaaaaaaaaanngggggccccttaaatttaaggggccctttaaaaccccgtgaaaaaccctgggggggccttttaagggcccacccttttgtggttgccccccccccgggcctttttttgcccgggggggggccccccccccttgttttttaaaaaaaaagggaga

SEQ ID NO: 29059 - DNA, 463 bp, Homo sapiens
  misc_feature (1)...(463): n = A,T,C or G
cgaaaaaaaatgagnacatnnanctgatgtcattagtccatgcggnggaattcctttactgttcacctgcatctttcagcagctcccctcctgccctcacctggtcttttccctctttatcccaagcctttatgcttgagtcccttccccaggggctgcccacccgacagttccaggcattccctacctgagcttcttgtctgcttttccttctcccactgcaagcggctgcttgtggggcctgggatgagccctctctgtccccaccggccctccttgccaagccattcctgggtgagttcaggcctgcgggagccacacattcatctccacctggacacttgagccgcatggccagacccctcccacctgatgcggtggtgcgtgtgatttgtcaaaagaaagccttctggatgctgttaagatgtacccttcaggtgaacctggtatcagacccacagtt

SEQ ID NO: 29060 - DNA, 444 bp, Homo sapiens
  misc_feature (1)...(444): n = A,T,C or G
aattgtagaccactagatcagcgcggnggaanncacaccacatccatgggagcagaagacacctgctgatggcaattaaaagtaaccacctctgagtcaggaatgtgatataagctgctcgcttccagaatgcatcactcctgccagggatgagtgacagtgcatgacaggagaaaaggctttaaggccaacctgagctgggtataattggcaagtctcaacttctttgagccacaatgctgtcatctgtaaaaagggaataatgacacttactctgcagaattggcccgaaccagacagctttgactattgactacgttgttagtgttaatatagaaggccccactgctgtgtgaaccatgttggcagcggattttcctgttaactcagaacaggtcaagcaccctctgattttccttaaatcagtttttaaaaatttctatg

SEQ ID NO: 29061 - DNA, 447 bp, Homo sapiens
  misc_feature (1)...(447): n = A,T,C or G
gggagaactggacctcccganactgaggagtctctgaagagccngacacaagggtgatggttccctgtcctctgccagtcatgacaggggtggtctcagcatggttcctcggagagcccttctgcagtgggaccctctccccactcagagctgggctggggttgggagggggaggtctggagtgtgcttcctttccaccctgccctgagcagctccagccagctcacttgggatcccgccccagctgggttggaaagccctgcattgtcctctcagctgtgccatcccatggaacttcctgcgagcgtgaaagggttctatttctgcattgttccccacaatagccacactctacatgggagcacttgagaagcggctgacacagcaggcagtgaattgttcctggaaatgtagttagtggtccctggatgggcagcaccctgctgg

SEQ ID NO: 29062 - DNA, 453 bp, Homo sapiens
  misc_feature (1)...(453): n = A,T,C or G
nggagaatgagacctcngaaaatgaganctacgganagnctggnggaattcctcggcggaggctccaacttccagtggcccggtcgggatatatcagagcctcctaagaaatatccagaagtcaagccatggatccacctgcacgtaaagaaaaaaccaaagttaaagaatctgtcagcagagttgagaaggccaaacagaaatcagcccagcaggagctgaagcagagacaaagagcagaggtgaataaaagcacaagtggaaagaagcagctgacacatagatgatggccaggatcccactcagaagtccatccacgcctaggagcagagcggaggccaagccgaaggtggtgaagacggcaaagtcattcagctcggctcctgccccagacggcccaagatcctgacaacctcaggagatggtgctagaattctcccctattttatgaag

SEQ ID NO: 29063 - DNA, 478 bp, Homo sapiens
  misc_feature (1)...(478): n = A,T,C or G
gaggattgattgaaaacctagtcagtgtggtggaattcgaagccgatcctactgcagggccatgagcggtccattacgcagattaagtataaccgcgaaggagacctcctctttactgtggccaaggaccctatcgtcaatgtatggtactctgtgaatggtgagaggctgggcacctacatgggccataccggagctgtgtggtgtgtggacgctgactgggacaccaagcatgtcctcactggctcagctgacaacagctgtcgtctctgggactgtgaaacaggaaagcagctggcccttctcaagaccaattcggctgtccggacctgcggttttgactttgggggcaacatcatcatgttctccacggacaagcagatgggctaccagtgctttgtgagcttttttgacctgcgggatccgagccagattgacaacaatgagccctacatgaagatcccttgcaatgactctn

SEQ ID NO: 29064 - DNA, 477 bp, Homo sapiens
cgggttcgagtcatagtccgtgtggtggaattcgacagaagtaatgaaagcatcaagcacaacatccagccagcctcgtccaaatggagacataaccagacgctctctctgaggatcaggaagcagattttaaagttcttggatgctgaaaaggacatttctgtcctaaagggaaccctgaagcctggagatattattcattacatcttcgatcgagacagcaccatgaatgtgtcccagaacctctacgagctcctccccaggacttcgccactgaagaataagcactttgggacttgtgccatcgtgggcaactcgggggtcttgctgaacagcggctgtgggcaggagattgacgcccacagcttcgtcatcaggtgcaacctggccccagtacaggagtatgcccgggatgtggggctcaagacagacctggtaaccatgaacccctcggtcatccagcgggcctttgaggac

SEQ ID NO: 29065 - DNA, 478 bp, Homo sapiens
  misc_feature (1)...(478): n = A,T,C or G
cggattcgattcagtacactagtccgtgtggtggaattcattctggaggtcaaggcagggcccagggacacacaggtttaataggcccatgggggttctgtgcagtgcctcgggtcacacctggagaaccgttgctctgattggtatttctccacccgggctgtgcgttagaatcaagaagaagcgttgagatattgggatgcctgggtcctgctcccatgctgggcttctggtttacttgggatgagattgcatccagacagagttttaaaagtttcccggttgagtttaatgtacagttgaagttgagacatgaatctctgcatgtaggggaaattttgtgtctggttagtcaagaaactatggaaaccaattcttgatattttgaaccattcacgaagatagtttgagtcatgagcatgctgttgtctagagtgggcggngatgactcattggagtgggtgcgctgctctgtacn

SEQ ID NO: 29066 - DNA, 473 bp, Homo sapiens
  misc_feature (1)...(473): n = A,T,C or G
cgaggatcnnnnnnnattgannncttgtagaccattagtccagngcggtggaattcggctgaagggatcgccaacggacgcctcgtccagcaccatggtgccgagcccagcagcttggacaagaggaaagagatatttagcaaagacacactgttcaaacctcttcacagcaccttgtctgtaaacagctatcacaagtcgagcctgtccctcctcaaatctcacccgaagacacctgctgacacattgccaggccgatgtgagaaactggaaccgtccctggggacctcggcggcacaagccatgcctgcttcccagcgtcagcaggagtcaggagggaaccaggaagcctcttttgactattacaacgtctctgatgatgacgactctgaggaaggggcaaacaagaacacagaggaggagaaaaatagagaggacgtaggcaccatgcagtggctcctcgagcgggagaa

SEQ ID NO: 29067 - DNA, 476 bp, Homo sapiens
  misc_feature (1)...(476): n = A,T,C or G
ngggttttgagtcatatccgtgtggtggaattcgttataggcagttattatcactgattagaacctgagtccatgacatatgcattaatcactgggttaatgctaatggaatgcttatggtatttatagtagatataaataagatatagaaaaagaatatctttgctgaccaaactgcatgcttaattcaacatggaaagttctggtgaggttaatctaggacgctttgagactccgttgctcataattggacctgatttactactcatttaaaaaatctcttttaatttgcgcagaattcgctggctttttgggggtggacacacttgttcttaagaacaatagcaacaagatctttgtttaacataatatctaatgctccatgtaacttagtggtataacaaattattccatttgtaatgaaaaaagtaaatgctgtgttaataagttaatagcaaagtaaataatgcatattt

SEQ ID NO: 29068 - DNA, 478 bp, Homo sapiens
  misc_feature (1)...(478): n = A,T,C or G
cgatgatagaggggannngnnaattgtagacctgagtaccgtgcggtggaattcccatttgaggccgggtaggagagacgtgcagggcctggccccccaagagaccagcagacaaactgaggcggcagagagagagattccagtgtcaccaggaagactgcagatcataacaacaatggttgctgatttggcatcaaagaggtggcactgtcaaagccgtaattgctgaaaatggcaccaacatgctgcagctggagagagtgggtgaccaacatttgtttgaagaacagatgatgctctttgaatggctcagccaacagcccaaagttttaagggaagacctctctgccagcttctcttggacagtgtctcatgtaaaacctccaaggcacttacatagcatatttttgtgtccactctcttgctagtctgttgtacctggaataaaaaagcagaggaagtgacaccctcacttgaa

SEQ ID NO: 29069 - DNA, 525 bp, Homo sapiens
  misc_feature (1)...(525): n = A,T,C or G
catacataacaccagctcacatataacgtgatagacgtacaacccctacgcgcgccaaataagacaacccccccnnnnaaaaaatattgaaacatcgtagatgcccnccaatnnnannngcanaggaagaaaaanaaacacaacaaaacgcnccgggnaaggaacaatttcattcgntctcagtaagtctttcgntaagaaagtgagcatgcgcatggtgagtaggctggaccgaagtttgaaccggacagaagcgctggtcggcgtctggcggttattgttcaaaactacaactccattttgacactttctcacttgtaccgatcttcagacgccctccttcttcatgagaatgatgccatccataagatctgtgcaaaactgatgaatatcaagcagatctcctttagtgatatcaatcaagtcctcgcacatcagctgggaagtgcgttccagcctacttattctgcagaaagctcatttcactacagaccaaaacccactagagggaaataaaagacccag

SEQ ID NO: 29070 - DNA, 442 bp, Homo sapiens
  misc_feature (1)...(442): n = A,T,C or G
nattgaagaccactagaccagcgcggnggaattcccttactgctgtataacttgcataagcctccctggtgactcttgcaggaaccactccattgccctccagctccccagccttctcagttataaacatgctggccagatctcttagcctgcaaagagaactttccccagtcaccatagaccattctccttcctgaaggcttggggcagaccattcgtttatttagagaagagctatacattcttctttctggtcccatcttaaacgtcttctgttgtgctgcaccccagatggtgtctcagatgctttggggaatctttaacagctgaatttgagtcagtcctcttaggctgcacctccagcctctgcagatcccccctcatttaccatggatggtgggaccccattattctctcatctcggcattcagggaacactttc

SEQ ID NO: 29071 - DNA, 551 bp, Homo sapiens
  misc_feature (1)...(551): n = A,T,C or G
ngatagaaaaccctnngnnnnncnatgaganccctggcagngnggcggaattccgcatcacggcggagctcaacaagtacaagtacaagtccggcggccacgacagcgcgcggcaccacgacaacgccaagaccgaggccctgcaggaggagctgaaggcggcgcgcctgcaaatcaacgagctcagcggcaaggtcatgcagctgcagtacgagaaccgcgtgcttatgtccaacatgcagcgctacgacctggcctcgcacctgggcatccgcggcagcccccgcgacagcgacgccgagagcgacgcgggcaagaaggagagcgacgacgactcgcggcctccgcaccgcaagcgcgaagggcccatcggcggcgagagcgactcggaggaggtgcgcaacatccgctggctcacgcccactcgctccttctaaccggcgcccgggccctgtgccaagagcttttccgatcggagcagatgaggacatccgctcgaggccgacgcctgggaagaccatcgaccggctcatcgcgcacgagcaccatan

SEQ ID NO: 29072 - DNA, 550 bp, Homo sapiens
  misc_feature (1)...(550): n = A,T,C or G
natggtacccatcgcaanggcatagatcgacatactatacatccatattnctatactagacatcgatatttctctgtctctgtctaataaaccatgagttcacacagataccttgaggaggctcttttaagagtccaggctagagacagtaaaaggctcacaggaggagtggaagatggcaaggaggaggggatggattctagagctatttaggaatcagaaccaacagcttaaacctacttcagaactggaagagatcatattttacaaaccaaaaaaagtgagacacaaagtcagtgtcagcccagttgatccacaaaacatgaatggggtgcgtgtggttttgagcccagacgagccttccagtcactgctctgcaccaactccatgtcagaccctgtctcccgggtggatgggtgaggccaagccagcccccagcctggagtgagtttcctgatgcatcccaattcttaagtccccagcgtctagactccggttggtccccagcaagacccatggcttggggaacanacccatttccttgatgccn

SEQ ID NO: 29073 - DNA, 560 bp, Homo sapiens
  misc_feature (1)...(560): n = A,T,C or G
nattgattncccatnncannnnncnattgagtnccntttgcagagnggcggaattcgagctaccgccaccgccgccgccgattccggagccggggtagtcgccgccgccgccgccgctgcagccactgcaggcaccgctgccgccgcctgagtagtgggcttaggaaggaagaggtcatctcgctcggagcttcgctcggaagggtctttgttccctgcagccctcccacgggaatgacaatggataaaagtgagctggtacagaaagccaaactcgctgagcaggctgagcgatatgatgatatggctgcagccatgaaggcagtcacagaacaggggcatgaactctccaacgaagagagaaatctgctctctgttgcctacaagaatgtggtaggcgcccgccgctcttcctggcgtgtcatctccagcattgagcagaaaacagagaggaatgagaagaacagcagatgggcaaagagtaccgtgagaagatagaggcagaactgcaggacatnctgcatgatgttctggagctgttggacaaatatcttattccn

SEQ ID NO: 29074 - DNA, 482 bp, Homo sapiens
  misc_feature (1)...(482): n = A,T,C or G
ggtagcccccgatagagaccctattgagngccgtggaattctagcttcttggcaaacatgctaggccggatggagcagaggtttctgttacatgctgtagtctcttattaatgaatcaatccaagaacacgttagagaatctgaagtcaacacatacagatttcatatattttaactttataatttatatttcttgtcagagtgctcccaacttgctgtaaatattttcgcttttgaaagttccaacaaagactgtgaagtaagacagattcaaaatcatatcttcattccttgtatttaacaggtactaccaaactttacttttaatactatcacaaattggaaagcaaatccttgcatatcgtagggcttaattttttattggaggaataataacatgcagactgatgcagtttgaaacattttcttcccatgtgtgtgtctatgtttgtgtcagtccctgtgtctacatgtgtgtacgt

SEQ ID NO: 29075 - DNA, 474 bp, Homo sapiens
  misc_feature (1)...(474): n = A,T,C or G
ggtgttaggggggnnngnnaaactgatgactgagtaccgtgcggaggaaccctgtagctgttttgggccctcctgggtttggcttcctgtataactgacagcacctatcaatcatcactttaagatgacagaaataccaaagtacctaaaacatgctaatatcttattttaatacagaggtcactctgcatgtgtctaattcatccattctgattctttcatttagaacagcaagtcttagtgtcttttattatttctctttctagaagactcactccatagttcatggccccgtgatccagagtccctgctggcgccttcgagtggggcaggctgagaactcaagctgtaactaatgtctcctccgaagaaaactaaaccgagggctgagctgatgtgaagttttccgtggctgcattcatacaaatggtgaaaatgtagcatacctcccctcaaaagcctgaaagtaaagac

SEQ ID NO: 29076 - DNA, 433 bp, Homo sapiens
cagttcacccacgccctggaccgccaaacagctactcagctgcttatgctggcccacatgtacagactcagagacaaagcatgagaagaagcagagactgttggcccgggccgaaaataaggctgctggcaaaggggacgtcctaactaatagaccacctgtccttcgagcaggtgagtaagccccaccttatggtaacactgggggcgggctgttgcagtgatgtaaaatttcttggcctgaaattactgtgaagagtaaaaccgagctttttaacactgagtcagcagctgagcccagcagcttcttgtgactagagcaggccctgtgagtgctcacaaagtggttgtgtgttctaggagttaacaccgtcaccaccttggtggagaacaagaaagctcagctggtggtgattgcacacgacgtggatccc

SEQ ID NO: 29077 - DNA, 478 bp, Homo sapiens
  misc_feature (1)...(478): n = A,T,C or G
tgtagtagagggggcngnnttcctgaaaaatcgacattctngnacagngcggnggaattcgngatgctcaggctggtcactcgatctgcccacctgggcctcgcacatttctggttttacaggtatgagccaccacgcccagcccactggtttcctttacacccgctttgttccccagcagtccttatgagggctcctgaaataaggaacctcctacccgacttgagagcagcaaagccttcagagggaactaagttattaaaacccaccccacacaaaatgcttctaaacgccttggctgacttaatccttgcagtgtgctgaggttaagtatgattatccatctcctgtgaacaggaagactgaggctcatagcttaagtgatttgcccacggttcactgcaggggataaaactcgggtgtgcctggcaggtgccaaagtcacggccttcaggctaccacaccatgctgcctcctg

SEQ ID NO: 29078 - DNA, 488 bp, Homo sapiens
  misc_feature (1)...(488): n = A,T,C or G
aggcagtcccnaatagagncccctatagtagacactaggcagtgcggtggaattcaaagggagggcgcaggcggcgcccggatctcttccgccgccattttaaatccagctccatacaacgctccgccgccgctgctgccgcgacccggactgcgcgccagcacccccctgccgacagctccgtcactatggaggatatgaacgagtacagcaatatagaggaattcgcagagggatccaagatcaacgcgagcaagaatcagcaggatgacggtaaaatgtttattggaggcttgagctgggatacaagcaaaaaagatctgacagagtacttgtctcgatttggggaagttgtagactgcacaattaaaacagatccagtcactgggagatcaagaggatttggatttgtgcttttcaaagatgctgctagtgttgataaggttttggaactgaaagaacacaaactggatggcaaattgatagat

SEQ ID NO: 29079 - DNA, 471 bp, Homo sapiens
  misc_feature (1)...(471): n = A,T,C or G
catcgaccctctatagagngcggtggaacacagcggtaggagtttgagaagcgctgtagttgattatggacgaaatgcctaatttaaggagcagaggcggagtggaaaatgaaaaaagcttcaccgcagtggagacttgttaacagccctggggagaaaggggcttaacagagtctggaaatcgtgaaagagcttgaccgatgaaatgggcctggctgtcgtatcggtaatttggtgaatgttgcttaagatcagcctggaaaggtagttagtcagatccgaagtgacatatttgcactgccaaaggaggctctggaggttaaagtatgtgttttaatttcgttgttgaggccatataatgcagagttgacggaccgaccttatgagtcaccttggagcggagtagtggagacttaaagacagactaccctggagctggcttcaaactagttcttaatattgtgactcgaa

SEQ ID NO: 29080 - DNA, 495 bp, Homo sapiens
  misc_feature (1)...(495): n = A,T,C or G
agcgtncnnnnnaatcgagaatatagtnccntggggaagtgctgaactcctaggaccagaggaagataagatttctcgtaggaacaccgtgaccacatctttaaaatgacccatttcgtggctcccacaagatttacacctccacactgaggccggaagtggttttgcccctataaaacatggcgaaaagctttcttgtctccaaggaaacgccacgtaatgagtcaaagctgtggcgcacgcgcagaagtacaagctaccggaagtgatggcgcccctactaaagccttggggttagtacgcgtgcgcagcagtctcttccgacagttgtgttgtgccaatggtggagaagaaaacttcggttcgctcccaggaccccgggcagcggcgggtgctggaccgggctgcccggcagcgtcgcatcaaccggcagctggaggccctggagaatgacaacttccaggatgacccccacgcgggactccctcagctcgg

SEQ ID NO: 29081 - DNA, 437 bp, Homo sapiens
atgaaggaagaacaggagagaaggaagaaaaaggagatggaagagagaatgtcattagaggagaccaaggaacaaattctgaagttggaggagaagcttttggctctacaggaagagaagcaccagcttttcctgcagctcaagaaagttttacatgaggaagaaaaacggaggcgaaaggaacagagtgacctgaccaccctaacatcagctgcataccagcagagcctgactgttcacacaggaactcatctcctcagcatgcaggggagccctggaggacacaatcgcccaggcaccctcatggcagctgacagagccaaacaaatgtttggaccccaagtgcttacgacccggcactacgtgggctcagcagctgcttttgcagggacaccagagcatggacaattccaaggcagtcctagtggtgcctatgg

SEQ ID NO: 29082 - DNA, 406 bp, Homo sapiens
agttacctggctgggaggtggcggaagaacctgacttcccactgcctggcgccggcgagatgcgggggcaggtctgaggccccgggtcgccgctgtctctgcggttgggggaagtcacccagctagcgtgggacagggtcggcacccccagcaggaaacagcagcgacgagccagagcggagtcgcctgcagctgcgcgcaggacgtgcacaggtgcgcggtacgcacaggccctagggacccggtggggatcttaagcaccaacgaacagtcagacctaactcataaacaaacatcatcacggcctgccctgtcagaagcgcagccaagcaacaacaacaacaaaaaaaggcgaggaggtagacccacttgagatggttctgttgcggagagtctctgaaatcag

SEQ ID NO: 29083 - DNA, 493 bp, Homo sapiens
  misc_feature (1)...(493): n = A,T,C or G
tgatgcaggaaannnnnaattgagaccttgataactgtcgnggaanncccgntcgaaatacccccagcactgacaccatgccagcctcttcgtctcaaacatgctgtactgattaccaggaccctgaaggtgctaccagctcctcttacttggccagctcccaagaggaagattcaggccagagtcttcccactgcccatgttcgcccttcccacccattgaagagcttcgccgtgccagcaatcccgcctccaggacctcccacctatgatcctgcattgccaagcacaccattactgtcccagcaagctctgaaccatcacattcactcagtgaagacagcctccatcgggactctaggaaggagccggcctcctatgccagtggttgttcccagtgcccctgaagtgcaagagaccacaaggatgttggaagactccgagagtagctatgaaccagatgagctgaccaaagagatggcccacctggaagg

SEQ ID NO: 29084 - DNA, 482 bp, Homo sapiens
  misc_feature (1)...(482): n = A,T,C or G
gggttccaaggaggaaggggggnnnnnnaactgagacctgagtacgctgcggaggaaccggacagtattattatagtacttatttattttattttagatttaaagttatcttctctttttcttttttcttctgctgcttttagggacaattaaaactgggaaactatgaaacatggaacattttatcctacctgaaagtaaacgagtaattgtgaagcataagacactgaggctaatacaactctgtcttcatgtgttgactgcctggcacatagtattcattctcttccctttaacatagaagtgtccagctgcgtacagtctagtaaccagcaactgtaaacgaacctgtgcctctaacaagcgattctaaaccacctatgagtatttcttttagggctcacttaaatacatgtttgtatatactgtattctagccagaataattttagatctgatcaggtagtagctaaaattagaaaa

SEQ ID NO: 29085 - DNA, 489 bp, Homo sapiens
  misc_feature (1)...(489): n = A,T,C or G
gtttttaccaggagggagcgggggnnnnnnntttgatgncctcgagatcattcgtccangcggnggaattcaaaaggaattggcactgatggtggtacatggatgtgtggaagctaccatctctggagaagggaattgtttaggtaaaaacagattcctggagatggagagttctgagccaaatttggaaggagatcaccaaggagagaacattactgtgcaagctgtgaagggtggagtttttggatagctggtttgggatacatccaggaggaagtgggctacaagctaaaattgatctgtgccctctgccttggttctctgatgctttgccttcaattagctttcaaatgaaagagatgtctttttatccctagatgatgaacaatggcctcctccaacagccctctgccttgatgttgctcccctgccgcccagttcttacttctgtggcccttaatgccaactttgtgtcctggaagagtcgtn

SEQ ID NO: 29086 - DNA, 446 bp, Homo sapiens
  misc_feature (1)...(446): n = A,T,C or G
nttcgagatcgtngaccattcgacagngcggnggaattcgcatggaggtggttacacacagctgtttccgcgagggtgaccgtgtctgcagcacgcttacgtctccgcatgcacggctgcctctccagccacctatgatacttctctcttggggccatcagagcctcccttgggctgtcacctaccagctcacacacactcttcagtgggctcctctcttcattctcttatagggcgtgggccttcttatttatctaaagggctgaatttaggagactttttacccaggggcaaaaggctcttatggtaatgagatggatggaggcccaggtgcattttccagggcctgggttctccatatcccgtgggttctgctgagtggaggcaactttgctctgtgtgaacctcgcccctgtccctctgtcgggcacccctggcaggaagca

SEQ ID NO: 29087 - DNA, 579 bp, Homo sapiens
  misc_feature (1)...(579): n = A,T,C or G
cgccatcgaccccctnnnnatagatctctatccagaggggcaantcccgccggcttatgcacgactctaccccgtgctgctggtgaagcaggatggctccaccatccacatccgctacagggagccacggcgcatgctggcgatgcccatagatctggacaccctgtctcctgaggagcgccgggccaggctgcggaagcgtgaggctcagctccagtcgaggaaggagtacgagcaggagctcagtgatgacttgcatgtggagcgctaccgacagttctggaccaggaccaagaagtgaccgtggctccagccaccccgggacattgctaagatgggagggctgttcttaaatcactcgttcttgaagctgccacctggagtctgtgtctgtctccccacttggtgtgtgccccagactggcagctcatcccctgaaaggcatcagctcaagcacagagggagctcagtggactagcagggtgagggttggtgtagatcaaaccttgtgggtttagacactggctctgngctgtggtgcacgtggacaaccatgtgggcagtacccaacaccaccaa

SEQ ID NO: 29088 - DNA, 473 bp, Homo sapiens
gaaggaaaatcggctcgattacatagtccgtgtggtggaattcgaacaattttcttaattacatcttaatcctataaaaacctgctttcttcattttagaggtaagaaaatttaagcagagagagagagactaagaagttgtctgtggcatagccaaggtggttgctacttaacacatgatgaggccttttgttaacagtttgaactttcaggaacttaactacaaggcaaactgcagttaagtgatattgtgctcaggaaaactagaaatggttttggctaaggactagcagtttttgacacaattgcccttctgcatgccaaatactgatttgcacactttcctgaacaagtagaatgccttcaggtccctctgcaaagaagacaatatagagtatctcaagtccagatgtgctgggtgatatgcagtcatctccatcatcacctggtcacttaggaaccaaaacacaaat

SEQ ID NO: 29089 - DNA, 471 bp, Homo sapiens
tgatgtaatttggttcgtatccgtgtggcggaattccgggacagaggcccctcaggcctgagattgtgccggccgccccctgccctcctcaccctgccctgctcctcttctctgctccctccccccatattcgcaggtctgcacaacccccggacctgttcacacccgcatggggacagctgtctgtgggctgcagagcatgcactgctaaatctgccccacaccgacggcccttgactcacacccaggtggcccacccaagatgcctgatgcgctatgtactgttccttctagattcttctgatgtatagcgaccggacagattcttctactcagaagatgaagactttgaaatcctgtccctttgaaaatcctggggtcgggggtggcacctgtgagagcctggggctcctggtgccgctgcgtttcatccatcccgcccgctcgcctgccgagggctgcgccccgtgc

SEQ ID NO: 29090 - DNA, 576 bp, Homo sapiens
  misc_feature (1)...(576): n = A,T,C or G
agagcaatgatctcattcgaatagacaacccttcncagacaancngaaccaaatctgccttcctaaccgtcagcatgtggtatatggtccctggaacctaccacagtccagctactcccacctcactcgccagggtgagaccctcaatttcctggagattggatattcccgctgctgccactgccgcagccacacaaaccgcctagagtgtgccaaacttgtggtaaggttgggttcttgatgccggggggtgtcctttaaccccagacagtatgtgtgttttaaggattagagcactaggcctgggtctggaggaacctcaggtcccgttcactggccctaccctgggcctccccaatgtgccaggggagcagaggacaaccactgtctcttctttatctgcctgcccagtgtcctttcctggagcctgggaggaaggcaggaatgtggaaagtgggctgatcctcccctcttgctctagtgggaggaagcaatgagccgattctgtgaggccgagttctcggtcaagacccgacctcactggtgctgcacgcggcangnggaggctcggttctc

SEQ ID NO: 29091 - DNA, 586 bp, Homo sapiens
  misc_feature (1)...(586): n = A,T,C or G
agagaatcgacnccnctcggtanagtaggatcattccagagaggngcaantccatcccacctcagcctctgagtagctggaactgctggtgcaccaccatgcctgtttaattttttgtgataaaggtcttgccatgttgcccagggtggttttgacctcctggactcaagtgatccacatacttaggcctcgcaaaatgctgggattataggcatgagccatcacaccaggcctgaggctgctgtgatacagagttttagctgttgaagaaatagccaggtaaaaatggtccagaggcctctgaaaatggggagatctagaaccctttgggtgtgaatttgggagcctttcctacagacatgataattaaggaattattgaggtatagaagaaaagagtataagcacaggatctagagaatgccagagataaaagacagccgcagagaagaccaagaggccgaagaaaatgacaatagtgcaatgctatgctattcaaggaagagggtgcttatcgcanaacgggatgagtgatcagggttgtcatatccttaaacaggttggagaggggattctgattttatcan

SEQ ID NO: 29092 - DNA, 473 bp, Homo sapiens
agaggaaactcgagtcgtagtccgtgtggtggaattccgaaccacacgctcctagcgagcgcgtggccgcacgcacacatacacgcatactgcaaaactggggcccagaggatccgaagtctgagagattgggtggtataggtggggcaggatcctgccccgggcctgtcccatagactctcccgtagtccagcagatttgggggcagaggtgtgctgatttgcgtcctgaagctgcagcctaaactcctgagtcatcgccgggcctgtggtcttcttgaagtgaggcccctaagcctcacttgtagtcccgggggttcctttctctccacccaggttctgatcactcccaaccccgcggagacagtcttcaggggcctccctctcacagaccttcagccaccgctttctagagagcatgagcaggttctctgcgacctctctaattagctaccaggtatccagttacaccag

SEQ ID NO: 29093 - DNA, 474 bp, Homo sapiens
gatggaaacttggctcgagtacctagtcagtgtggtggaattccgctgctggggctgcctgccgccgagtactggaacagccagaaggacatcctggagaggaaacgggcggcggtggacagggtgtgcagacacaactaccagttggagctccgcacgaccttgcagcggcgagtggagcccacagtgaccatctccccatccaggacagaggccctcaaccaccacaacctgctggtctgctcggtgacagatttctatccagcccagatcaaagtccggtggtttcggaatggccaggaggagacagctggcgttgtgtccaccccccttattaggaatggtgactggaccttccagatcctggtgatgctggaaatgactccccagcgtggagacgtctacacctgccacgtggagcaccccagcctccagagccccatcaccgtggagtggcgggctcaatctgaatct

SEQ ID NO: 29094 - DNA, 550 bp, Homo sapiens
  misc_feature (1)...(550): n = A,T,C or G
catcgatattgatcacatccgcggggcaanccccgtccttatatgaagaatggggatgtgcgccttctcccgaaccttgccctggagctctgtgctgtgtgtctgggacatgttcttctgtgaaggggtcaagatcatcttccgggtggggctggtgctgctgaagcacgcgctgggctcccctgagaaggtcaaagcctgccagggccagtacgagaccatcgagcgactgcggagcctcagccccaagatcatgcaggaggcctttctggtccaggaggtggtggagttgcccgtgacagagcgccagattgagcgcgaacacctcattcagctgcggcgctggcaggagacccggggtgagctgcagtgccgctccccgcccaggctgcatggtgccaaagctatcttggatgcagaacctggtccccggcctgccctacaaccttcaccatccatccgcctgcccctagatgcccccctccctggctgcaaagccaagcccaagccacccaagcaggcccagatagagcagcggatacagatgaag

SEQ ID NO: 29095 - DNA, 453 bp, Homo sapiens
  misc_feature (1)...(453): n = A,T,C or G
ggaggcncccagcaggccgngactgatnccncctgngtatcatcagtacagngcggnggaattccccggctcgagcccagccaggaccacggcaagaactcaaagatcactgaggacttccgggccctgaggaagacggctgaggacatgaacctgttcaagaccaaccacgtgttcttcctcctcctcctggcccacatcatcgccctggagagcattgcatggttcactgtcttttactttggcaatggctggattcctaccctcatcacggcctttgtccttgctacctctcaggcccaagctggatggctgcaacatgattatggccacctgtctgtctacagaaaacccaagtggaaccaccttgtccacaaattcgtcattggccacttaaagggtgcctctgccaactggtggaatcatcgccacttccagcaccacgccaagcct

SEQ ID NO: 29096 - DNA, 475 bp, Homo sapiens
agacgtaactcgagatcgtagtccatgtggtggaattcccagaagccagtaaagagaccaggagccacctcaatcagcaggacagcctcactgcccctcttgcagagtcccctttgcccatcctgaatgcacagtctccctgctcatgcccttcagtcccctgcttggctgtatgcactgtctatattgcactgagagaggaagggacagcaggagtgaggtgaatagggcggagagagggggcaggctcggcaccggccctcccagcccggccagcctgagcttgctgccctccagtagagacagaggggcagtgtttgcaagggaggtgtttctgcctgtccctgcctgatgtccctggtggagcaggtacctccgggcgggcaggcctatgatttgcacacctgaaaatcgcggaattgagtttcgatagattgatttttaaaacttttttggagtatggggtataggggaa

SEQ ID NO: 29097 - DNA, 466 bp, Homo sapiens
  misc_feature (1)...(466): n = A,T,C or G
tggaaattaaaannccccgccccntagganagctccgattganggcnttaaacnaccctgaaccccaaggccgaggtggcccgagcgcaggcggcgctggcggacaatatcagcgcagtgcggggactgcaggacgtgctaaggaccaacctggggcccaagggcaccatgaagatgctcgtttctggcgctggagacatcaaacttactaaagacggcaatgtgctgcttcacgaaatgcagattcaacacccaacagcttccttaatagcaaaggtagcaacagcccaggatgatataactggtgatggtacgacttctaatgtcctaatcattggagagctgctgaaacaggcggatctctacatttctgaaggccttcatcctagaataatcactgaaggatttgaagctgccaaggaaaaggcccttcagtttttggaagaagtccaagtacgcagagagn

SEQ ID NO: 29098 - DNA, 476 bp, Homo sapiens
  misc_feature (1)...(476): n = A,T,C or G
gggcccggggnnnnnnnaatgganccctgataacctgcgcagngncgnggaantttgaagcatcgcgtcagtacttatggcgcctgccgggttgtggtgacgaaagcagttgccatggagttgctctgagtaaccctgaggcagtgggacgccaagactggagaggaagcgactgcggggagtatttccattttaaccggaaacaatccctgaacccacaggaatgaatgcctaatggtggagtttcagccatcagtgacaggctgaacccagactcccagggcacctgcttgcacctttgaatgatggcctgaactatgaacaaacgggactatatgaacacttcggtacaggagccccctcttgactactccttcagaagcatccacgtcattcaagatctggtaaatgaggagccaaggacaggactacgaccactgaagcgttcaaagtcggggaaatcactgacccagtcc

SEQ ID NO: 29099 - DNA, 468 bp, Homo sapiens
  misc_feature (1)...(468): n = A,T,C or G
tgttatataaccccgcncggggatgagnccntnaactgagaccatcagaacangcggnggaattcgccatattcccctaacattacttccactgctaacaacaggactgcctttccctggtgggaaaatgctccctttatgcccattcctgtatcccctccaacacccacatctgcattaaacacccgtgcctttctcttggagagggtttagatgcagatcccggccctggagctttaaaatgcttgcccttccttcttcaaggatcaaatgtttattggggttcagctttgttttctcaaaaggccatggtatcgtgcccctgaggaacatgtttatctaagaagctttgaggtagtagagcgataatttttgaaaccttcctcctgcaatctttaaaaaagaaaaaaaagattgcccaaacaaatcatttgggagaagacatcattatactcctacttggcactg

SEQ ID NO: 29100 - DNA, 464 bp, Homo sapiens
  misc_feature (1)...(464): n = A,T,C or G
cgataaaagggggcgggcngggactgagaccatagatggtgnccntgaanncngctggccctgtgactcacgaccagctctggagtctccagcccaccctgcgcaccgtcccatgctgagcagcactcggcgccagcagcctctgccagagtggaagccagagccctgcaggtgtacggcgcagccgtgggagctgaggatctggcacttgagaggcagcagctccttgaaggacctctggctccagctgtggccctgcatccagatacctgcctcgtccgaggcagacacccccacccctgcctcctacagacccccctccccgctgactgcaccgcctggagcagaatgggggacagacccctgctccagggacacttgagttgtgggcccaggagccctgcggctgccggcaggtgaactgagtgcccgacagctgagaccggcgctcacccgtactgagc

SEQ ID NO: 29101 - DNA, 468 bp, Homo sapiens
  misc_feature (1)...(468): n = A,T,C or G
tgtaatttggggggggggggggattgagnccttnaacttgagactttagtcagngcggnggaattccgcacagcaggcgtgacaccaagtgccagccccagggctcctcaggggaggagaaggggaccccgaccacactcagggggtgcgtgctgcgggccgggcatcaggagggggtacctggggggtgtcttcctggaaccactgctccgtttctcttcccaaatgttctcatgcattcattgtggattttctctattttccttttagtggagaagcatctgaaagaaaaaggccggactcgggctgttcaacttcaaaagacaccaagtaccagtcggtgtacgtcatatccgaggagaaggatgagtgcgtcatagcaactgaggtgtaaaatggaagtgagatggcaagactcccgtttctcttaaaataagtaaaattccaaggatatatgccccaacgaat

SEQ ID NO: 29102 - DNA, 573 bp, Homo sapiens
  misc_feature (1)...(573): n = A,T,C or G
agagacgaactcgacactgtccgtgtggnggaattcttacattatctatcttttgtaacctgttcatgtctatgtctgttacttgcatcaggcagtgactcaaacaattctcaaaaaacagaaagtatatttctcttaaagttggcttattaagggactatgaggtgatccaattcaataagaaccaaactagacctactaagattagtcaggactatcagagaatttttcaaatacattcaccattaatccagagataattgtgaatcccaacttttaccctaagaaaaattattgcaatgtagtaaagttgattctgtccttaaaaagaaagaggagcacaatgagatttcctgtggccagttgaagttcatgaagtttgtcaaagaatttcacatacatagtaaatcttctgatagcatttagttccaatcacaataaattatacttggctctgtcttctataattaatctcttctctctttaaaaactctgtattttctgtataaaaatagtgattattggctgtgcacggtggctcacgccctgtatcccagcactttggcagggccn

SEQ ID NO: 29103 - DNA, 467 bp, Homo sapiens
  misc_feature (1)...(467): n = A,T,C or G
tggataaaaaggggggggggggactgagacttctgatagtgngcttgaanncgagaagggcaggcacgtggtgctgggtgccatcgagaacaaggtggagagcaaaggcaattcacctccgagctcacgagaggcctgtcgcgaggagaagggcctggctgccgaggatagtggtggggacagcaaggacctcagcgaggtcagcgagaccacagagagcacagatgtcaaggacagctcagaggcctccgactcagcctcctagagcctgccccatcccctcctcacccgacgagctttcacaataaattcgctccgtggcacagaagaccaagcctatgactacaaatccaaaaaaaaagaaaagtccccctttaatttgaggggcgcataaaaaaaccgagaaaaccatacatgctgtttttttaaaaacaaacaattttgtgggacccccccccccccccccc

SEQ ID NO: 29104 - DNA, 472 bp, Homo sapiens
  misc_feature (1)...(472): n = A,T,C or G
ntttgagacctgatgaccntcggaggaanccgngggngaagcgggagcgcgaggtcgatgaggactcggagcctgagcgggaggtgctagcaaataatggccgagtggattctgaggaccggaggagccgccactgcccgtacctggacaccattaacaggagtgtgctggactttgactttgagaaactgtgttctatctccctctcacacatcaatgcttatgcctgtctggtgtgtggcaagtactttcaaggccggggtttgaagtctcacgcctacattcacagtgtccagtttagccaccatgttttcctcaacctccacaccctcaagttttactgccttccagacaactatgagatcatcgattcctcattggaggatatcacgtatgtgttgaagcccactttcacaaagcagcaaattgcaaacttggacaagcaagccaaattgtcccgggcatatgatgg

SEQ ID NO: 29105 - DNA, 476 bp, Homo sapiens
  misc_feature (1)...(476): n = A,T,C or G
nattgagnccctgagnacactcggaagngcggnggaattcgctgttacttttttaactcctgcgccaaggacagtgggttctgtgtccacctttgtgctttgcgaggccgagcccaggcatctgctcgcctgccacggctgaccagagaaggtgcttcacgagctctgccttagacgacgtgttacagtatgaacacacagcagaggcaccctcgtatgttttgaaagttgccttctgaaagggcacagttttaaggaaaagaaaaagaatgtaaaactatactgacccgttttcagttttaaagggtcgtgagaaactggctggtccaatgggatttacagcaacattttccattgctgaagtgaggtagcagctctcttctgtcagctgaatgttaaggatggggaaaaagaatgcctttaagtttgctcttaatcgtatggaagcttgagctatgtgttggaagtgccctggt

SEQ ID NO: 29106 - DNA, 568 bp, Homo sapiens
  misc_feature (1)...(568): n = A,T,C or G
cgcggggnttttgaaacccactcgaatcacctactcagagnggtgcaattcgtttcccggggctgccataatgaatcaccctanaccaggggcctcaaaacaacacacactgactctcccacagttctggagacgtccaaagtcaaggtgtcggcaggacgcgttccttgtggaggccctggcggaggatctgttccagccttcctcccagctgctggcggtgccggccatgcttggcaaggaggcttggcactccttgccgtgtagacgcgtcactccaggctctgcctccatcatcatgcagccttctatgggtccacgtctccttctctgtttcttagaacggcactcctccctaggtttagggcccaccctaatctaggatgagctcatctcaggagccttaagttaatcacatctgcaaagcccctgcctccaaataaggtcgcctgcccaggtgcggagggtgagggtatggacagatctttctggagagccgtaactcaaacctctgggtgccaggntctgtgcaggcaccttatgttctgtttcctccctcgtanatggn

SEQ ID NO: 29107 - DNA, 474 bp, Homo sapiens
  misc_feature (1)...(474): n = A,T,C or G
ntttgagacctgaggaccngtcggggaanccgngaagtccagcaggctgagactggcaggacagggagcagataaagccaagagccacaacgctcgtggaagaatgtgagagacaaaaaaaggcagagtggcaaaccgtttttcttgggtcccctccagataacagcatcatcaggactgctgagcaggaagcccactgacatcacccccaggttgtcttccacgtactgcagagggaacagggtgagggcaagacacgctttactcaaaaccacacagtgaggccctcccccaggtcttctgtttgagctctgactgaaaaaaacattttcaggacaaaactaccatgtgacctatgagcatattcactctttgctcctaaatcatttttggaaaaaaaaaaaaagggtaccatgttgggggatttgaaaaaggcactgtatgtccatggcctgcagggacggcaatgacagg

SEQ ID NO: 29108 - DNA, 503 bp, Homo sapiens
  misc_feature (1)...(503): n = A,T,C or G
ggcnaatttcagcagcgtgnnggggnaattgatgnccatgatgaccctcggacagngcggnggaantcgtagaggcttacctagaggcggtcgcggcgcaggtagtgtaaccagtataactttgtgtacccgcgggttttccaatctctgtgtagctagcagttctcttcgtgttagtgtggcagccgtgccagttccacatttgtgattgctttatttccctggtaattaaaccttgtgccattctattcctgttaaatccgtagaaaatgagaaaatactcgacattttgggggaaacttgtaaatctgagccagtaaaagaagaaagttccgagctggagcagccatttgcacaggacacaagtagcgtggggccagacagaaagcttgcggaggaagaggacctatttgacagcgcccatccggaagagggtgatttagatttggccagcgagtcaacagcacacgctcagtcgagcaaggcagacagcctgttagcgg

SEQ ID NO: 29109 - DNA, 476 bp, Homo sapiens
  misc_feature (1)...(476): n = A,T,C or G
nactgagacctgaggaaccgtcgnggaanccggacagaaaaaggctgggagacggagctgggacagcgccctagaaggagggaggtgggtgaaggcggcgaccgaaagtggggagggcggacccaacgacggcgaaccttcgcgctctgttcagcaccaggagcaacgctcacgtcctcaataaagatggcggccccatcnaaaaaaaaaaaaaaaaaaaaaaaaaaaaaaaaaaaaaaaaaaaaaaaaaaaaaaaaaaaaatatnngaacccccccccataaaaaaaagggcccaaaaaaaccccggaaaaccccccggggggttttttaaaaccccccccttttgggggcccccccccccccctcttttttttggggcggggggggccccccccctcagtttttttaaaaaaaaaagagaggaccgcccatccattgggggaaggtgtcttatcttttgccggnnagttaccgc

SEQ ID NO: 29110 - DNA, 567 bp, Homo sapiens
  misc_feature (1)...(567): n = A,T,C or G
cgcggtgtnnnaattgaaaacccaatcgaatcacctactcagagnngggcaattcggcaagctgcagcagttcgagggcagccgttggcatactgtggccccctcagagcagcataagctgagcaagttggacgggcaagtgtggatcgccctgtacaacctgctgctaagccctgaggctcaggcgcgctactgcctcacaagttttgccaagggacggctactcaagcttcgggccttcctcacagacacactgctggaccagctgcccaacctggcccacttgcagagtttcctggcccatctgaccctaactgaaacccagcctcctaagaaggacctggtgttggaacagatcccagaaatctgggagcggctggagcgagaaaaacagaggcaagtggcaggcaattgccaagcaccagctccagcatgtgttcagcccctcaaagcangacctgcggctgcaggcgcgaaggtgggctgagacctacaggctggatgtgctagaggcagtggctccagagcggccccgctgtgcttactgcagtgcagaggcttctaacn

SEQ ID NO: 29111 - DNA, 540 bp, Homo sapiens
  misc_feature (1)...(540): n = A,T,C or G
nttgaaccctttccganggggttagaccacgttgctagttaattctctcccctcgtgcctgcaccctgctgccctagctagcctggccacctcactgccgtgtcctgcatcaggccagccacagagtcctacaggtccggggcttgcttgtgggaacggcttgttcttctagactctgggggcgggggcttgggtgtgtttccttacttgtaaaaggtcctgttgtttttgggagcagggagtaatggcggatgagacgctgtgtggaggcggcagctcctggtatggggtaacgccctgtcccctcattggcaagtggtttgcatgaagcatcaggccagagggtgtgagtgccaagccctcaccccacatgctgctcctgttaaaagcaaactccactgacccccccgggaagtcaggatttgggatttacttcctggaatgcttgcctctggctgctgggaattggggcctttccccanagcctgaaccaggcctcacagtggccatcangcacagaatggatgggcacagctgagt

SEQ ID NO: 29112 - DNA, 551 bp, Homo sapiens
  misc_feature (1)...(551): n = A,T,C or G
gctttgatncccctcccnnnnnncatggantntcctctcagagnggcggaattcggcttccaggagagacccatggaaactgagaatgaccaacagcaggtctacttctcccatctcacactcactcctaggtatatgcttgtgagggtgaatttcagagacattaagtcctctgctcagtgtcaccaagtgacagatggcaatacaccactgacttaacttgagtgtgtagtggttaaaatacatcatatgggaggaattgtggctcttccacttattagtgactattggcaaatacttacgactgagaaatgatactagcaatagcaaaatagctaatgtttattgagaatgtaccatggtcagatagaaatgccaaaggtagattatcttatttaatcttcataacaactttgttaggtaggtagtattataatcaccgttgtacaccattgaacatggtgatggtgctagcccatagtcacatggttggtgggcccaggatttgaattcanacattnttggctttatagccttagctctaagcattc

SEQ ID NO: 29113 - DNA, 584 bp, Homo sapiens
  misc_feature (1)...(584): n = A,T,C or G
cgcgcatcgaaccccctnnnnattggatcacctatccgagaggngcaattcgtctgatttaactcagcgacactgtgctttctgcttcattactggactagagggttgagccacccacttgccatttgctcctgtccttccaggaaatcacaattttcatcagagcccaagagattatttgagactcaggattcagatcagaggttcgactgtggctgggacaggagttgtgtgtagaaattcaccaggtggcctgagcgcagggggacctccagggctgcgttgagcagcctctcccactgacctctttctcgtttgtggacaaagcagcacgtatcacctcattcatcacttggacacatcgcctttgcattgtcttgtcacacctccctcacagtcttatagcacaatatacccaaatcagcccccccagtccgagggctgggcccaaggtatggtcggaggaggagctcctagcctgcggtntgtgtatgtgtgtatgtgtgtgcgtggttgtgtgcgtgtttacctccacaggggacactctacactcagtgtaagatctgctgggaacaggccaccag

SEQ ID NO: 29114 - DNA, 502 bp, Homo sapiens
  misc_feature (1)...(502): n = A,T,C or G
agttnatcnaaggcggggnnggggnattganncaactgatgacctcggccagngcggnggaattcttctgttactgaaaagaggttatcatctggccaaaataaagcttcaggcaagaggcaaagatccagtggaatatgggagaatggtggaggaccaacacctgctaccccagagagcttttctaaaaaaagcaagaaagcagtcatgagtggtattcaccctgcagaagacacggaaggtactgagtttgagccagagggacttccagaagttgtaaagaaagggtttgctgacatcccgacaggaaagactagcccatatatcctgcgaagaacaaccatggcaactcggaccagcccccgcctggctgcacagaagttagcgctatccccactgagtctcggcaaagaaaatcttgcagagtcctccaaaccaacagctggtggcagcagatcacaaaaggtcaaagttgctcagcggagcccagtagattcaggca

SEQ ID NO: 29115 - DNA, 487 bp, Homo sapiens
  misc_feature (1)...(487): n = A,T,C or G
cgcgcgccccngnnnattcgagaccttgatcaccttggnggaanccggacagccggagcggccaccggcacctggatggcgacagagccttccaccgcaacagcctggacatcttccggatcgccaccccgcacagcctgggtagcgtgtggaagatccgagtgtggcacgacaaagggctcagccctgcctggttcctgcagcacgtcatcgtcagggacctgcagacggcacacagcaccttcttcctggtcaatgactggctttcggtggagacggaggccaacgggggcctggtggagaaggaggtgctggccgcgagtcacgcagccctgttgcgcttccggcgcctgctggtggctgagctgcagtgcggcttctttgacaagcacatctggctctccatatgggaccggccgcctcgtagctgtttcactcgcatccagagggccacctgctgcgttctcctcatctgcctcttcctggg

SEQ ID NO: 29116 - DNA, 457 bp, Homo sapiens
  misc_feature (1)...(457): n = A,T,C or G
catgaccccattgcccaatgatgtccattctggagccncaggctattttccgttgcagagaagctttatgggccaattcgttcggcatccccgggggcatttgcgcggtgcgcggggaagaacaggatttgactgcggttctccacccccggcgcccaacctccaccccggtgcgcgcgctcttccaggctcctgctggtcccacttgccaggagttaggtctcaggtcagcctgagctcctgagacgcccaggcccggaaagacacgtaggggaaaccatctgctcacttctgtcctgtccggaagggatccctttctgacgggaaagaaaggcggtgagtcctgtcctgttgagtangcggaagagagatcaaagggaagacaagaaaaatcctgtgagttttcaggatctaaagttaccatgaggtcgacctaacctcctctggaggtcctcct

SEQ ID NO: 29117 - DNA, 587 bp, Homo sapiens
  misc_feature (1)...(587): n = A,T,C or G
cgcccatcgacccccctnnnnattagaaccactatccagagtggtggaattcanacggggattttaatcattttaagtgtcttagaatgatattttgggaaaaagcactccttttcctaaggactgcgactcggtgaacagaaaggaggctatgcggtgtggccagccaactcaaggaggacgaagcaacctttgcctctaaactgcctggaaccaaatgtcgatttttctgacccctcccagggagtgctgagtagtgatggtgtctggagggtcaaatccattcccaatggcaaaggtgagacttctccagatactgatggatgggggcttgggtagagcagaaacatggagaaaggtacatttcctctgcttgtcttcaggttcctcaccactccccaccgctacaactccaaaaccacttatccctacagaggccagcatcagggtctggtcagacttcctcagagtccatctccatccccggagcatctgtatgattcagaagtacaaccacgatgggtatggngaccccagaggctttgaggcaagaaacatgggtccccaccaatgcaggatgaggctcg

SEQ ID NO: 29118 - DNA, 465 bp, Homo sapiens
  misc_feature (1)...(465): n = A,T,C or G
ccccccattggagactattanccattgagtgccattcggntctcaaannngaggaacatagtcctaaaagtttacaagtatgcttagttgtaattgaaattctaacctgcataacataatgtaacttaaaatgttagtctctccaaaaaaaataaaacccaggacctctttataaaaaatcatcaagtttattacaatatctagtttcatttttaaactgtagctgctggacaatttttgtaatttaaaattcattatcggggtacagaaaacactaataagctgacagtgaattagatactaacagtgaataaaattactggaccatgcatttataaaagccatgtttaatagtaaaacatcccagttatacttcttaactgaaagaaacatcctttagctccttccaattacagcacattcttattttgagatcatttatcctttttcacccaattactactn

SEQ ID NO: 29119 - DNA, 574 bp, Homo sapiens
  misc_feature (1)...(574): n = A,T,C or G
tggagagtgnnnnnnnncatgatccctnatcgannnnnatagattantcntcngcagagnggcggaattctgagattacaggcatgagccactgcacctggccgtcctttcacaatgaatttaaatcccttgatgttcccatttaacagataggaaaacgggggcagggagaagaggaactgtaactcccagtttccttccccttgcacccagaaacaggttctctgagcccctctccccatcccatggagggtggggatgggtcttacgcacccagaccgtgttcctccagggagaatgtgctacgaaacctagcggataaggcctttgaccggcccatctgcgaggccctcctggaccagaggttcttcaatggcattggcaactatctgcgggcagagatcctgtaccggtcagcaagctaggcatgggcatggggactgcggtgggccaagtgtgcccacattccccactgcctagcatggcttgccttggccccactacaggctgaagatccccccctttgagaaagcccggctcggtcttgaagccctgcagcagcacaggccgagcn

SEQ ID NO: 29120 - DNA, 529 bp, Homo sapiens
  misc_feature (1)...(529): n = A,T,C or G
agagaagactccattctggaccaaaaggttgccctgctgaaggcataatggggccacccgtgggcatccacagtttgcagggtgttccggaaggttcttgtcactgtgattggatgctggatgccgcctgatagacatgctggcctggctgagaaacccctgagcaggtaacccagggaagagaaggaagccaggcctggaggtccacggcagtgggagtggggctcactggcttcctgtgggatgactggaaaatgacctcgctgctgttccctggcatgaccctctttggaagagtggtttggagagagccttctagaatgacagactgtgcgaggaagcaggggcaggggtttccagcccgggctgtgcgaggcatcctggngctggcagcacctttccggctcaccagtgccaccttgcggggagggacggggcangcaggagtctgggagggggtcccgctctcttgtctgggcatctgtgctcttcgagagaaaccanggtgtgcanatgacgtcaagctctt

SEQ ID NO: 29121 - DNA, 475 bp, Homo sapiens
  misc_feature (1)...(475): n = A,T,C or G
gcgcggcgnnnngctaggacctcngtagngacgngcaanncgccaggtttagcggcaaacctttcccccttagcaccttcagggctgagttctgggtttctagaggtcaggacggctcctcagagcgccaggaagccagagccccaagcaggacgaaaaagaggcatacacacagcagtgtgaatagcctggccaccagccatcctccctccacctcaagacccccatttgtcccagactaaaggatacagagagcagctgcctttctcaagagcttgggcagagccccacggagtccagggtttctctgcagatgtgcggagcgggaggcggtggtagagagagataaaaggtggagtttctctgttgtttggttcagggattttatttttaattttatgagacagggtcttgctctgtcccccaggctggagtgcagtggcatgatcatagctcactgcagcctcatactccn

SEQ ID NO: 29122 - DNA, 442 bp, Homo sapiens
  misc_feature (1)...(442): n = A,T,C or G
actgatgaccnctgagnccctggaaanancncngaaggctctgcgcggacttgtggagacagccgctcaccttggctattcttttgttgctatttatcatatcgctgactttaaggaaaagaaacaggaaattgaaaaaccagtagctgtttctgaactcttcacaactttgccaattgtacagggaaaatcaagaccaattaaaattttaactagattaacaattattgtctcggatccatctcactgcaatgttttgagagcaacttcttcaagggcccggctctatgatgttgttgcagtttttccaaagacagaaaagctttttcatattgcttgcacacatttagatgtggatttagtctgcataactgtaacagagaaactaccattttacttcaaaagacctcctattaatgtgtagagatggggttttaccatg

SEQ ID NO: 29123 - DNA, 480 bp, Homo sapiens
  misc_feature (1)...(480): n = A,T,C or G
agcgggggngnnnttttgtcgacctcatctagtccgngtcgtggaattcggaggttcctggaagaaacagagttgaaagcagttatcttgctgagtgggggactcagggcatgggcaggagactgctgagttttgttttacgtcttactacatttgatttataaaagacagatgtgcatatatcacttcaaaaaaacaaaactggatgtggctgatgccaaagtgacctgccccagaagagctgctaacagaacagcatcccaggaggctgcagaaggctgaagagcagagcccacacctgctatgggccacaagaggccctggatgccatggaggccgcaagggcccaggcgggacttgcagaatgagagtcctaggcccaagtatagagtccctggtgggcacagaggagagaccaggtcagtgggaggggttgtcagaccctgtggagtgccccacctgtgtgccaggcccagaact

SEQ ID NO: 29124 - DNA, 481 bp, Homo sapiens
  misc_feature (1)...(481): n = A,T,C or G
cgcgcggggcgnnnngctgaggcactcgttcagngcggnggaattcacctggctcatcacacttgcaggcctgttccctaaggggccccagccaaggagctgagcgaggctgtctggcttgggggagatctgacagcccagacctttctacggctggcagcagagaaacaaagtctggacccactccatgctctgccctcagacctggccaggtgatgctctgggggcagcatctccccaccgagagaagcgggctcctaatgaggtgggaaagccacggcaggcagcgagcagcccaggccagctttctgcatggatggtcagtctcttgccctcaaacactacagcaaacaagctacccctgccagtcctagacaacttgggtacatctggggacctagcagttaggcttgactttgaggagaggctgtgatgtttatgatccctgaataaagctactccttggagaaaaaaaaaaaan

SEQ ID NO: 29125 - DNA, 576 bp, Homo sapiens
  misc_feature (1)...(576): n = A,T,C or G
gcgcgatagacactatcgagtggggaacccttcacaagcaagattcanaagctgacgtcccccagaaggcggacctggaagaggagcccctacttcacaacagcaagctggacaaggttcctggggtacaagggcaggccagaaaggagaaagcagaggcctctaacgcaggagctgcctgtatggggaacagccagcaccagggcaggcagatgggggcggcggcacaccccccaatgatcctgccccttcccctgcgaaagcccaccacacttaggcagtgcgaagtgctcatccgcgagctgtggaataccaacctcctgcagacccaagagctgcagcacctcaagtccctcctggaagggagccagaggccccaggcagccccggaggaagctagctttcccagggaccaagaagccacgcatttccccaaggtctccaccaagagcctctccaagaaatgcctgcttctgagcccacctgtggcggagcatgccatcctgcccgcactgaagcagaccccgaagacaactttgccgagaggcagaagaggctgaggcaatgcagaaacgg

SEQ ID NO: 29126 - DNA, 446 bp, Homo sapiens
  misc_feature (1)...(446): n = A,T,C or G
nattgaaaactgangtccttagacagnctggnggaattcctcaggctggtctccaactcccgacctcctgtgatgcgcccacctcttcctctttaagtgctgggatgacgggcgtgagccaccgtgcccggcctgttgactcatttcgcttttttatttctttcgtttccacgcgtttacttatatgtattaatgtaaacgtttctgtacgcttatatgcaaacaacgacaacgtgtatctctgcattgaatactcttgcgtatggtaaatacgtatcggttgtatggaaatagacttctgtatgatagatgtaggtgtctgtgttatacaaataaatacacatcgctctataaagaagggatcgtcgataaagacgtttattttacgtatgaaaagcgtcgtatttatgtgtgtaaatgaacgagcgtacgtagttatctctgtt

SEQ ID NO: 29127 - DNA, 450 bp, Homo sapiens
  misc_feature (1)...(450): n = A,T,C or G
agggagtaccgaaaccctcgaaatacacgangtcangtacaggcggnggaanngngaggcgctgcagcagaaaggaaatgcgctggcggttataccgggatgcttgtttcagtgatgcacaacctttcacagttagctggaagccacagccctgcctcttgatgcagcctggatccagccggtgtgaagaggagaccccttccctcttgtggggtttggatcctgtgtttctagcctttgcaaaactctacatcagggatatcctggacatgaaggagtcccgccaggtgccaggtgtatttttgtacaatggacatccaataaaacaggtagatgtcttgggaactgtcattggagtgagagaaagagatgctttctacagttatggagtggatgacagcactggagttataaactgcatctgctggaaaaagatgaatactgagtctg

SEQ ID NO: 29128 - DNA, 475 bp, Homo sapiens
  misc_feature (1)...(475): n = A,T,C or G
gcgtgggcnnnttcgatgtcactcgtccgtgtggtggaattccaagaactggtccccgcacaggcttcagagtccttccttccctctccatcacctcacccggggcgtgaactccccctttcctggcttctcccttctgccccctcgtgggtggaagaactcaggagtgtgtgggatgcccagcctcgttcccgagcgcagccgcccaatccgcgtttcttttcttccttctgccctttctaaagccctaaaaactggtcctgcattgccctccacaccccaatcccctccccctgctcaagcttctggtgccagagatcagtgccctctccccacttctctctagcccctcatcctcatcctctctggatctctacgacgcttaacaccgcagtgcccatttttctgtccctgttttccttcccatcaccagcccagtgtgcaatccagagagagagagagtgatactgtaaaa

SEQ ID NO: 29129 - DNA, 444 bp, Homo sapiens
  misc_feature (1)...(444): n = A,T,C or G
gggggtctgagacatccgaatccgagggcatccggacngcacctgagggtcctgagctgataagcacagtctcagcacaggggagccccatacaccagctcattgtcatcgtccagctgaaatctgtgaggacagaacgaggcactggctggagacatcaaggggatgggctcctcagggcttgctcaccgataggaggaggagcacacagcatcctctctgggtctcgcatccgggtgcccggaagggcggaactctatcccacaggagaggtgctggtttaggatgaagagcgcaggccaggccttcctgagcccacgctgcagtggtcatcagggtcctgttcagagcagcaggaggtgtgtgcccaaacctccagggaggtctctccaaggaacctgcctgggagaggcaggggcgcctctgtctgtcctttggcacctg

SEQ ID NO: 29130 - DNA, 476 bp, Homo sapiens
  misc_feature (1)...(476): n = A,T,C or G
gcgagaaaannnnttgctcgacatcctctaggcaggcggaggaattacaggctggtcttgaactcctgacctcttgtgatctgcccacctcgacctcccaaagtgctaggattacaggcgtgagccactgcacccggcataattttggactttttgatgaatctgcagcttcaggacctatcccaatgacagtttgtcccacaaaaccttttcgccttggcccagttttcaaatcaatgattgaccaaaaattgcttgaagtagttggtctttatttatttattttttgagatggagccttgctctgtcgcccagactggaatgcagtggcgtgatcttggctcgctgcaacctctgcctcccgggtttaagcaattctcctgcctcagcctcccgagtagctgggatacaggtgcccaccaccacacccagctaatttttctatttttagtaaagatggggtttcaccatcttgg

SEQ ID NO: 29131 - DNA, 454 bp, Homo sapiens
  misc_feature (1)...(454): n = A,T,C or G
ggggcgtaccgagnccctcgnantaccgatgatcttcggacagncnggnggaattccaccggccctgggncggcgggagacatttggcggtggtgtgtgtgtccacaatatgagagcctgccttaatcgtagcaccagtcaactttctacatgggaaaactgaagctcatagggctaaacaaatgtgccctggaaggccccacagcccaggattgaacccaggcagtctgtctctggaagccagctcctaccaagccattcctactgccctttggagtggcgtaacctggcctgggacaaactggctgcatgcaggtgatgctcacaggctcaggccaggattttgcatccagctttcctgggccctggtggacggactctggagaaaggagccctgggtatgcagagaggaccctttgaggctggaaccccatgggagctgcgcaggcctcac

SEQ ID NO: 29132 - DNA, 451 bp, Homo sapiens
  misc_feature (1)...(451): n = A,T,C or G
ggggnacactgatgacatcacgaaaactcgaggccattcgacngnccctgggggtgcgggagacatttggcggtggggggtgtgtgcacaataggagagcctgccttaatcatagcaccaggcaactttctacatgggaaaactgaggctcagagggctcaagaaatgtgccctcgaaggccccacagcccaggtttgaacccaggcagtctgtctctggaagccagctcctaccaagccattcctactgccctttggagtggcgtcacctggcctgggacaaactggctgcatgcatgtgatgctcacaggctcaggccaggattttgcatccagctttcctgggccctggtgggcggactctggagaaaggagccctgggtatgcagcgatgaccctttgaggctggaaccccctgggagctgtgcaggcctcacaccataactgacaa

SEQ ID NO: 29133 - DNA, 476 bp, Homo sapiens
  misc_feature (1)...(476): n = A,T,C or G
tgcgtggcnnnnnatcgtggcactacttagtgaggtggaattcgcggggatgagctctgggcaggacggcgggccgaggagcccggggagggacccggagctccaggttaccaccaaagaatatgattttggtctaggggctccagtttctgaagctgaaaactaccagaatactctccagctagaacaagaagtgagaaaccaagatagattcatctcgacactgaaattacagattgaagatctcaaacagacaaatcatggcttggaagaatatgttaggaaactcttggatagtaaggaggtggtaagcagtcaagtagatgatttaaccagccacaatgagcatctttgtaaagaattgattaaaattgaccaactagcagagcaactcgaaaaagagaaaaattttgtggtggattccgccaacaaggaacttgaagaagccaagattgatctcatttgccagcaaaatn

SEQ ID NO: 29134 - DNA, 475 bp, Homo sapiens
  misc_feature (1)...(475): n = A,T,C or G
aggtgnnaatcgatagcatactcagtgtggtggaattcgcttgactaagccgccagcgcacagcgcggcaggacgcgcccgggtctcagcggacttgtgcatgttagctgtgtagatttatgtgagggcttgtaaaactctggtcttgtaaactagtcttaagcgcttttaatatggagacagatgagagcccctctccgctcccgtgtgggcccgcaggagaagcggtgatggagagccgagctcgccccttccaagcgctgccccgtgagcagtctccaccacctcccctgcaaacgtccagtggtgcagaggtaatggacgttggctctggtggtgatggacagtccgaactccctgctgaggaccccttcaacttctacggagcttctcttctctccaaaggatccttctctaagggccgcctcctcatagacccgaactgtagtggccacagnccgcgcaccgccggcac

SEQ ID NO: 29135 - DNA, 487 bp, Homo sapiens
  misc_feature (1)...(487): n = A,T,C or G
gagtatcncaggnngnnnnnaactgagacccnctcgagaccctaggaagngcggtggaattcactaggcggcggcggctggcgtggggctgcttagatgcgccacggtttcggtagcgacggtagctctagccgggcctgagctgtgctagcacctcccccaggagaccgttgcagtcggccagcccccttctccacggtgagaaactcgggggccagggggtgtcctcgctgccttatttcgccccactccggacttagccctccgcgtagcccgcgcttcctgagaagtggggtggggggcgtcgtcccgtggtggcgccggccggggtgggggcagttagtgcctggggggcgcggcccaactcaaccccttaccccaggccttgcccactaggtaaccatgtgcgaccgaaaggccgtgatcaaaaatgcggacatgtcggaagagatgcaacaggactcggtggagtgcgctactcaggcgc

SEQ ID NO: 29136 - DNA, 456 bp, Homo sapiens
  misc_feature (1)...(456): n = A,T,C or G
agggcgtaagagnccctcgnantacngttgagcatnagnacagncnggnggaattcaaactacgctaaattgattgaaatgaatggaggaggatccggctgtaatcatgaattagaaatgatcagacagaagcttcaatgtgtagcttcaaaactacaggttctaccccagaaagcctctgagagactacagtttgaaacagcagatgatgaagatttcatttgggttcaggaaaatattgatgaaattattttacaactacagaaattaactggccagcaaggtgaagagcccagcttggtgtccccaagtacttcttgtggctcattgactgaaagactactgatacaaaatgctgagctgacagggcatatcagtcaactgactgaagagaagaatgacttaaggaacatggttatgaagctggaagagcagatcaggtggtatcgacagacg

SEQ ID NO: 29137 - DNA, 475 bp, Homo sapiens
  misc_feature (1)...(475): n = A,T,C or G
cgcggggtnnnnttttgctgacgtcactagtgcgnngcgtggaattcagttccctgctgaagatggccagatccccttgtctggtgtgcctgcacaggagacagcaccagccaagctgattgtgtatctacagcgtttccggcctcaagactatcagcgcctgctagaagtgaacagctccagagagaggccacaggagactgaagatcctgaccactgcctgggctaggggtgtcacttcctagaaggggaagggaactctgggtctaacggagtccactcctgggcccactgtgcctctcccctcagtgtcccttctgacagtgactcctctctctccagcgctgcctgtttcttccccctcctctaagctactcttccttgagccctccctggctgcttcctctcgctcatccgtcagatgcaatctgtgggccgcccctctcccctggccgctaagcagcctccattgatt

SEQ ID NO: 29138 - DNA, 488 bp, Homo sapiens
  misc_feature (1)...(488): n = A,T,C or G
agaaaaaaanctcgaaacccctgnnctcgtagtccactatccgtgtggtggaattcttcctttctgcgacgagcccattgctatggaaaccaaagcgttatgccagcggggattgaggctgcgggatcatgacgggtctctctcccgaagaaccttgcctaaggcttccccaagcggctacttcctgagcgaacccgcccacccgcctgaaggagagaggtggtctttgcgactccctaggctccgacctggaagaaatcttttttacacttgcctttcacagagccctgcattgtaacttccctatcagaagcgagaaaaatagttatcattttgagagggcttactctatgccaagccctgagaaaactctttacgtggattatctcgtttaatttcacaacatccttttaagttttccatggacacagcctagcagaagacgcagccttcgtgcttcgctgactgctgaccactgacccaccgcn

SEQ ID NO: 29139 - DNA, 487 bp, Homo sapiens
  misc_feature (1)...(487): n = A,T,C or G
agacaccaaatcgagatccatagtcattgaggtgcaattccctttactctcgccggccgcgcgaacccgtttgagctcggtatcctagtgcacacgccttgcaagcgacggcgccatgagtctgacttccagttccagcgtacgagttgaatggatcgcagcagttaccattgctgctgggacagctgcaattggttatctagcttacaaaagattttatgttaaagatcatcgaaataaagctatgataaaccttcacatccagaaagacaaccccaagatagtacatgcttttgacatggaggatttgggagataaagctgtgtactgccgttgttggaggtccaaaaagttcccattctgtgatggggctcacacaaaacataacgaagagactggagacaatgtgggccctctgatcatcaagaaaaaagaaacttanatggacacttttgatgctgcaaatcagcttgtcgtgaagttaccn

SEQ ID NO: 29140 - DNA, 487 bp, Homo sapiens
  misc_feature (1)...(487): n = A,T,C or G
cgaccaagaatcgagacccctaggcttttgaggngcatttcacgacacccagnccacatctaccatatagcaagtttagtaagggaaggcagcatacgtcccatggacagtgggtttggatctgtctagaacagcggtttgtggctgtggcccagctccgagagtgatatttgctctggtaggtgagggcctgagggtacatttctccacctgtgccccctcatgttcacagaggatttcagcagctgcaactgcgcacgccaggtggggaagggtgggggtgggcctggttgccccatgttaggaaatcactaccagtcatgcggggctgtggctgggtggacaggatcaggattcccttgctagcccaggcagggtgagcagtcccagtggtcctagtgccgcatcagatccacgtgggtgagggcaggaggcccctgcggaggcagcgtggatctgcccacacataggctactggaatagttat

SEQ ID NO: 29141 - DNA, 452 bp, Homo sapiens
  misc_feature (1)...(452): n = A,T,C or G
ggggnaaatcgatgacactagnacaactgagtgtcatccgaanggacaagcggnggtcaccccaggcacccctctctgcctgcctcctcctggggagcctgaggctcagatgaaggccagtgtttaggggcatcaaatgaaggccagtgcctcaggaggccagggcaacacagcctcccggactgctctcccgggcagaccctccccagggcttctggcactgtgtcccccttgtggtggcttggggggtgcagtgagccccgctctgcccagtctcagtagagcccttcagaccccagcaccctgtcttccggtgggggtggggacaataggaacagtcccctgacctgaaggcagccaaggggccgcctgccagcctgggccctgtagggcaggccacacactcattctttcaaggccagatagtaaacctttgccagccacgtgtgctg

SEQ ID NO: 29142 - DNA, 455 bp, Homo sapiens
  misc_feature (1)...(455): n = A,T,C or G
gggagtanaagnnagggnagaaananntttgangacattgatgacctttagtcagtgtggtggaattcaacagtcctagtttctgtacctccttgctctccctggatctgattgagcctctcttacagctgttgccagtatctaacgtggcgagcgtaatggtatgtattggggttacttgaatccaagatctggtagttggattgtatgggacagcatgtcctgagccctcagatgttcccttatttgagagccaccaggtggtggtgtgtggcctcagggcccaaccaatctaggtgtgtgtcccttaaactggattatttatccttggacaaatcaactaaccaccttaagcttcagtctcctcacttataactgaggataatcttgcatcatagggtagctgcatgagtatgagaacatgtatgtagaatagcttggcatggtgcctgggc

SEQ ID NO: 29143 - DNA, 471 bp, Homo sapiens
  misc_feature (1)...(471): n = A,T,C or G
gggggannnnttttgctgcgtccctagtccgngcggtggaattcgtttactcacacacagctgcgcacatctggcatggtattatgtcagccctgttccctccacctcatggaaccacctgggctggtgacatcggaactgaggcccttggacctcactacccatataaggggacagagatctgggagccatccactcctccctctcgcatgccctgtctcttcagcctgtggccacagcccctcttgaccccacctcctgtcaccctctcctgacccacaagttactactacatgctgcccatgaaggtgcgggcgctgggtctcaaagtggcactgaccgtcaagctggcccaggacgacctgcacatcatggactccctagagctgcccaccggagacccacagtacctgacagagctggcgcactaccgccgctggggggactccgtactcctcgtggacttgtgag

SEQ ID NO: 29144 - DNA, 472 bp, Homo sapiens
  misc_feature (1)...(472): n = A,T,C or G
gggatancnnncctggttgcactacttagtgcggtggaattcccgccaccctgccccaaacccgccccaacctgctcctccagcagagccctgtgttcttcctggctgaggagtggttccagcaaagcgggctcttccacgtccttcagctcccccagtggcgccggatctaggaaaggttgtgccttttgctgaaactctggggttgacaggagctcatctaacaggctggaggtgagtgcagaggagagccccggctcctggagcggttgggaggtgcccggttggctggcatctgtgcttgacgcggaggcctccggggtcacgagctccggaggtgaaggtgccccgtcttcgggttcccatgccgccctggcgacctgcggctccaggcccaccacggactccggtgggacgtgggtggcgcaagcacacctttcccctgtgactcagcttgaggggccccaaggtg

SEQ ID NO: 29145 - DNA, 445 bp, Homo sapiens
  misc_feature (1)...(445): n = A,T,C or G
natgagattttaagacatctcgccgngcggtggaattcatctaattccctgcacataatgaaaatttctaagttgttgcaaaaaagtcttttttacagttagatttttaaaataatgttccaaataagtaccacatattaaactttgttaaatctataattcttccttgaggacagttctcctcttttattaatgtcatttacttgttgcagaaagtaggtcagttgtcatatagagtgttccataatctgtatttgtctccttgtggtgtcatttaacttgtttctctatctagtatctctatcctagaactataaattagctttcgaggtttgattaaattcaggttccatagtctatccatccatctacctacctaattatctacttatatgcctaatttttaggatgttaacattgatcagtgggttcaagtggtgacagc

SEQ ID NO: 29146 - DNA, 479 bp, Homo sapiens
  misc_feature (1)...(479): n = A,T,C or G
gaacccaatcgagaccctagatagagnggcggaagncgnggagaggggatgttgagacaggggcaggagactgcctgtgagagagggatgatcttaagaagagacctggcacaggaaaccaaaaggaggcaactgtagggaatgaaacttaggggtctgggaaagcgctgtaaaaggagagaggacctggagatccgctttatcctcatccagaaccgggcaggcaagacgcgcctggccaagtggtacatgcagtttgatgatgatgagaaacagaagctgatcgaggaggtgcatgccgtggtcaccgtccgagacgccaaacacaccaactttgtggagttccggaactttaagatcatttaccgccgctatgctggcctctacttctgcatctgtgtggatgtcaatgacaacaacctggcttacctggaggccattcacaacttcgtggaggtcttaaacgaatatatccacan

SEQ ID NO: 29147 - DNA, 470 bp, Homo sapiens
  misc_feature (1)...(470): n = A,T,C or G
ggaccccaaagagcccctnaattgagcacactagtccangtggnggaattcccgggaccctctccatttctacccctgggtcctgcggaaccgcttcttcgccaccgcttccaggccagcgactgccccagacggtgtttgccgggccttcgccgccggcccgaggtaacgccgggcttcttgccctcgccgatggtgcggctggagcgcgccttcgagaagaaccactacgtggtgggcgccgagcggaagcagctggccggcagtctcagcctctccgagacgcaggtgaaggtgtggttccagaaccggaggacaaagtacaaacggcagaagctggaggaggaagggcctgagtccgagcagaagaagaagggctcccatcacatcaaccggtggcgcattgccacgaagcaggccaatggggaggacatcgatgtcacctccaatgactagggtgggcaaccaca

SEQ ID NO: 29148 - DNA, 455 bp, Homo sapiens
  misc_feature (1)...(455): n = A,T,C or G
gggcgtactagaccctcggannactggagagcttcgnanagncnggnggaattcngaagcactatggcctgactttccgcaggccccgtggtctgttcatcaccattcatgacaaaggtcatcttgcaacaatgctgaatgcttggccagaagacaatattaaggccgtggtggtgactgatggggagcgcatcctgtgcctgggagacctgggctgttactgcatgggcatccctgtgggcaagctggccctgtacacggcatgcggaggggtgaacccgcagcagtgcctccctgtgctgctggacgtcggcaccaacaatgaggagctgctcaaagaccctctgtacatcggcctgaaacaccagcgcgtgcacgggaaggcatacgatgacttgctggatgagttcatgcaggctgtgacagacaagattggaataaattgcctcatccat

SEQ ID NO: 29149 - DNA, 476 bp, Homo sapiens
  misc_feature (1)...(476): n = A,T,C or G
nctcgtagtccctagtccttgtggtgcaattcgtcaaagccaacaagttagaccacgtggtgaccatcatcaaggggaaggtggaggaggtggagctcccagtggagaaggtggacatcatcatcagcgagtggatgggctactgcctcttctacgagtccatgctcaacaccgtgctctatgcccgggacaagtggctggcgcccgatggcctcatcttcccagaccgggccacgctgtatgtgacggccatcgaggaccggcagtacaaagactacaagatccactggtgggagaacgtgtatggcttcgacatgtcttgcatcaaagatgtggccattaaggagcccctagtggatgtcgtggaccccaaacagctggtcaccaacgcctgcctcataaaggaggtggacatctataccgtcaaggggaagacctgaccttcacctccccgttctgcctgcaagtgaagcgga

SEQ ID NO: 29150 - DNA, 456 bp, Homo sapiens
  misc_feature (1)...(456): n = A,T,C or G
agggggaactgagaccctcgaaaaactgagtccttcgtacagncnggnggaattctggacatagacgagtgccgctaccgctactgccagcaccgctgcgtgaacctgcttggctccttccgctgccagagcgagccgggcttccagctggggcctaacaaccgctcctgtgttgatgtgaacgagtgtgacatgggggccccatgcgagcagcgctgcttcaactcctatgggaccttcctgtgtcgctgccaccagggctatgagctgcatcgggatggcttctcctgcagtggacaagtcactcctctctgagcctgtttcttcttctataaaatgggttgtcttgaggattaggtgagagtgtgatagatgggctccagcaagtctcaagctgcagtgctttaaagtgaatgaactgccacttaatgagaacctgccctcgtagtgtattcc

SEQ ID NO: 29151 - DNA, 465 bp, Homo sapiens
  misc_feature (1)...(465): n = A,T,C or G
nactgagnccntcactgatgaccnctaggaagngcggnggaantcccttgagcagccgacggtgggacaaaggatttggagaaacccagggctaaagtcacgtttttcctcctttaagacttacctcaacacttcactccatggcaggtcccgagacccgccctaaccacactatttatatcaacaacctcaatgagaagatcaagaaggatgagctaaaaaagtccctgtacgccatcttctcccagtttggccagatcctggatatcctggtatcacggagcctgaagatgaggggccaggcctttgtcatcttcaaggaggtcagcagcgccaccaacgccctgcgctccatgcagggtttccctttctatgacaaacctatgcgtatccagtatgccaagaccgactcagatatcattgccaagatgaaaggcaccttcgtggagcgggaccgcaagcggg

SEQ ID NO: 29152 - DNA, 485 bp, Homo sapiens
  misc_feature (1)...(485): n = A,T,C or G
agaacgaactcgagttcgattccactgntccgngnggtggaattccaacacagctcagagattagaacgactccgaaaagagagacaaaaccagatcaaatgcaaaaatattcagtggaaagaaagaaattctaagcaatcagcccaggagttaaagtcactgtttgaaaaaaaatctctcaaagagaagcctccaatttctgggaagcagtcgatattatctgtacgcctagaacagtgccctctgcagctgaataacccttttaacgagtattccaaatttgatggcaagggtcatgtaggtacaacagcaaccaagaagatcgatgtctacctccctctgcactcgagccaggacagactgctgccaatgaccgtggtgacaatggccagcgccagggtgcaggacctgatcgggctcatctgctggcagtatacaagcgaaggacgggagccgaagctcaatgacaatgtcagtgcctact

SEQ ID NO: 29153 - DNA, 556 bp, Homo sapiens
  misc_feature (1)...(556): n = A,T,C or G
catagatccccctccgngnggngcnnnnnnatcgattcaccagctcagagtggagcaattcacttcatctggttcctgctgctggctgtggacggtgggaagctgacggtgttcactgtgctgtgtgagcagtaccagccatccctccggcgggaccccatgtacaacgagtacctcgaccgcataggacagctgttcttcggcgtcccgcccaagcagacgtcttcctacgggggcctgctcgggaaccttctgaccagcctcatgggctcctcagagcaggaggatggggaggagagccccagcgacggcagccccatcgagctggactgaactggccaggccacgtggagacaccacggtcgacgacggctggagggacgtttcagaggcgagtcctgggtggctcctcgccttgggggctcctggccctgaggctggcggtggccgcatgccggcgcgtgtctgtttctgtgcggcggctcaaggtggcgcggctgctgctcactgtgctgctgggacccaagaagtgggcgtcgcccctgctgagccgcgc

SEQ ID NO: 29154 - DNA, 483 bp, Homo sapiens
  misc_feature (1)...(483): n = A,T,C or G
actcgaganccntannnctcgtagaccactantccatgtggtggaattcgccgagcgtctgcggnggccgcttccaccctcagcggatgataatctcaagacaccttccgagcgtcagctcactccccttccaccctcagctccaccctcagcagatgataatatcaagacacctgccgagcgtctgcgggggccgcttccaccctcagcggatgataatctcaagacaccttccgagcgtcagctcactccctttccaccctcagctccaccctcagcagatgataatatcaagacacctgccgagcgtctgcggggagcgtctgcgggggccgcttccaccctcagcggatgataatctcaagacaccttccgagcgtcagctcactccccttccaccctcagctccaccctcagcagatgataatatcaagaacctgccgagcgtctgcgggggccgcttccaccctcagcggatgatan

SEQ ID NO: 29155 - DNA, 555 bp, Homo sapiens
  misc_feature (1)...(555): n = A,T,C or G
catcgaaatcagtaacagtggngcaanncccgaaggnngacagngataactcattggggntttaatatgcatttccctaatagcaaatggagttgagctttttcccatggtttctttggcatctgtgcatgttcttgggtgaaatgtctgttcatgtcttttgcatattttctaaggggatttttttttaaacttgagtgttccttgtattatattgtacagatactagttccatggatggaaccatatggcttgcaaatatattcccccattgtgtagcttgttatttcattccttaacagggtcaaataaattttaacgcaaattgcactacatttgaacttcaaaataaagtagaattacctattcagtgagtttttaattttttatttttatttatttatttatttttgagacggagtctcactcttttgcccaggctggagtgcagtggagtgatttcggctcactgcaagctccgcctcctgggttcacgccattctcctgctttagcctcccgagtagctgggactacaggcgcctgccatcacgccn

SEQ ID NO: 29156 - DNA, 562 bp, Homo sapiens
  misc_feature (1)...(562): n = A,T,C or G
catcgacattcgatcactagtccgcgnggngcaattccagaatttcttgcagctaccggaagctgaaagagaccgaatataccacgacgaaagggaaaggagcttgaatgctgcctcggccatgggtcctgccccactcatcagcacaccacccagccgtcctccccaggtgaaaacagctactattgccactgaaaggaatgggaaaccagagaacaataccatgaacattaatgcttccatttatgatgagattcagcaggaaatgaagcgtgctaaagtgtctcaagcactgtttgcaaaggttgcagcaaccaaaagccagggatggttgtgcgagctgttacgctggaaagaagatccttctccagaaaacagaaccctgtgggagaacctctccatgatccgaaggttcctcagtcttcctcagccagaacgtgatgccatttatgaacaggagagcaacgcggtgcatcaccatggcgacaggccgccccacattatccatgttccagcagagcagattcagcaacagcagcagcaacagcaacagcagcagcag

SEQ ID NO: 29157 - DNA, 490 bp, Homo sapiens
  misc_feature (1)...(490): n = A,T,C or G
aggagacattcgagaccctannnatcgtagtccatgtccangnggnggaattccatcgagacaagcaccatcaagccttaccaccgagggttttactgcaatgatgagagcatcaagtacccactgaaaactggtgagacaataaatgacgctgtgctctgtgccgtggggatcgtcattgccatcctcgcgatcatcacgggggaattctaccggatctattacctgaagaagtcgcggtcgacgattcagaacccctacgtggcagcactctataagcaagtgggctgcttcctctttggctgtgccatcagccagtctttcacagacattgccaaagtgtccatagggcgcctgcgtcctcacttcttgagtgtctgcaaccctgatttcagccagatcaactgctctgaaagctacattcagaactacagatgcagaggtgatgacagcaaagtccaggaagccaggaagtccttcttctctggcg

SEQ ID NO: 29158 - DNA, 437 bp, Homo sapiens
catcgagacaagcaccatcaagccttaccaccgagggttttactgcaatgatgagagcatcaagtacccactgaaaactggtgagacaataaatgacgctgtgctctgtgccgtggggatcgtcattgccatcctcgcgatcatcacgggggaattctaccggatctattacctgaagaagtcgcgggcgacgattcagaacccctacggggcagcactctataagcaagtgggctgcttcctctttggctgtgccatcagccagtctttcacagacattgccaaagtgtgcataaggcgcctgcgtcctcacttcttgagtgtctgcaaccctgatttcagccagatcaactgctctgaaggctacattcagaactacagatgcagaggtgatgacagcaaagtccaggaagccaggaagtccttcttctctggcc

SEQ ID NO: 29159 - DNA, 490 bp, Homo sapiens
  misc_feature (1)...(490): n = A,T,C or G
tggaattanctcgagaccctagtnctctgagaccactatccatgccgtggaattccagaggttgcagtgagccgatatcgtgccactgcactccagcctgtgtgacagagcaagacactgttttaaaaaataataataaaataaaattaaaattaaaagtgagggttaaagtcacagttaaaggaggttaatgttttatttccacagagattttaagacctgagatctcctggtaagagtctttattaaattgtaaatgcctgagagggtggtcctaggccttacatttaaaatggcagcttttttcatctttcaggggcattaagcacttgaccagaagtgccctttaatgagaggaaagtacttaatggcatttttctcacacggatcttgtctagtccaggttgatgttaatggaacttgaaggggcagacacaggagaacaagatggaaacagaagctccaggtttcaataccaggttgcgccttc

SEQ ID NO: 29160 - DNA, 484 bp, Homo sapiens
  misc_feature (1)...(484): n = A,T,C or G
gancggnttcgagaccatatttgggaggtgcatttccagagccaggccctcaatgcaatgctcattataggatgcagagataaacagaaggagaatgacaaattacgagagtccctctccaggaagaccgtgagcctggagcaccttcagcgggagtatgccagcgtgaaggaagaaaatgaaaggctgcagaaagaaggcagcgagaaggagagacacaaccagcagctgatccaggaggtccgctgcagcggccaggagctgagcagggtgcaggaggagctgaagttgaggcagcagctgctctcacagaatgacaagctattgcagtctctccgagtggagctgaaggcgtatgagaagctggatgaagagcacaggagactgagagaggcgtcgggagaaggctggaaggggcaggatcctttcagggaccgcacagcctcctgatggagatccaggctctgcgcttgcaactagaaag

SEQ ID NO: 29161 - DNA, 491 bp, Homo sapiens
  misc_feature (1)...(491): n = A,T,C or G
agcagccattgagaccctannatttgagagcactagncagngnggtggaattccgttcgaacgcccgctaggagagagaaaggattcccctgtgcttggagcccgcactcgggcgcggagggagcggcggcaggctctcgctttcggcaccatgggctgcacgctgagcgccgaggacaaggcggcggtggagcggagtaagatgatcgaccgcaacctccgtgaggacggcgagaaggcggcgcgcgaggtcaagctgctgctgctcggtgctggtgaatctggtaaaagtacaattgtgaagcagatgaaaattatccatgaagctggttattcagaagaggagtgtaaacaatacaaagcagtggtctacagtaacaccatccagtcaattattgctatcattagggctatggggaggttgaagatagactttggtgactcagcccgggcggaggatgcacgccaactctttgtgctagctggagctg

SEQ ID NO: 29162 - DNA, 488 bp, Homo sapiens
  misc_feature (1)...(488): n = A,T,C or G
aggccgccaatcgagaccatancattgagggcatttccggnttcggtagcgacggtagctctagccgggcctgagctgtgctagcacctcccccaggagaccgttgcagtcggccagcccccttctccacggtaaccatgtgcgaccgaaaggccgcgatcaaaaatgcggacatgtcggaagagatgcaacaggactcggtggagtgcgctactcaggcgctggagaaatacaacatagagaaggacattgcggctcatatcaagaaggaatttgacaagaagtacaatcccacctggcattgcatcggggggaggaacttcggtagttatgtgacacatgaaaccaaacacttcatctacttctacctgggccaagtggccattcttctgttcaaatctggttaaaagcatggactgtgccacacacccagtgatccatccaaaaacaaggactgcagcctaaattccaaataccagagactgaag

SEQ ID NO: 29163 - DNA, 483 bp, Homo sapiens
  misc_feature (1)...(483): n = A,T,C or G
nttcgagaccctagnncttgagaccactattccgtgtggtggaattccctcccaggtcttgcattctgtccccgggagcaccatgtctttgctgcctcagggccttttctattgctttaccttttggtgaggtcctctgaccccacctccgccagacctgagatgagatcagagtcgcgttagacttttggctgcagaatctgcccttccctcagaaggggaaatccaaggccatggttcctcctcactggcgtgcactggcgtgcacagtcgtgcttcccactaagctgcagatttctctataaggactcagattccttggttgtcagctcagcgtgtttggtggaggggagagcaaagcacagcgtgaaggtgctgggaggcctgcctcaaagttggcaaaacccacagcgtctcagagctgcgttcatgtttagttcctgcctctgtgccagtgagaccagaaaaccaggccactcaaat

SEQ ID NO: 29164 - DNA, 447 bp, Homo sapiens
  misc_feature (1)...(447): n = A,T,C or G
attgagaccatttgatgacgtctggacagngcggaggaattcccgctcgagccgggtcgcgggacctcgaccaggcacacctgctgattcgcctggtctacaatcccaacagggagtttttcctgaatgtgccatttgattccatcatggagcggctgactctgagaagaattgatccagtcactggggaaaggtaccacctcatgtacaagccacctcccaccatggagatccaggctcgcctcctgcagaacccaaaggatgctgaagagcaggtcaagctgaaaatggacctgttctacaggaactcagctgacttggagcagttgtatgggtcggccatcaccctcaatggggaccaggacccatacacagtcttctaatacatcgagagtgggatcattaatcccctgcccaagaaaatcccctgatgggttcagagccagg

SEQ ID NO: 29165 - DNA, 450 bp, Homo sapiens
  misc_feature (1)...(450): n = A,T,C or G
attgaatgatagcatcgcgnggcancagctgggattacaggctcatgccaccatgcccagctaattttgtattttcagtacagacagagtttcaccatgtccactaggctggtctcgaaatcctgacctcaggtgatctgcctgcctcagcctcccaaagtgttgggattacaggtgtgagccaccaccccggctctaaccaccttttaaattgggcctagtttcctactaaatgatgggctttgcggngaagcctttttggatctctcattccctacactcaggtgtcctaaggacttgaccttgtgcaaggttttaaacaaagtaagtaggtaaggtaaagaaaatgagtgccttgtcagctctttgaagaagctgaagaaatgtcaacatcagcttcaacattattttaagattgtgtcattgaaacagtgagaccttacttgctcn

SEQ ID NO: 29166 - DNA, 448 bp, Homo sapiens
  misc_feature (1)...(448): n = A,T,C or G
nattgatgatcgttagcacagncnggnggaattcatcaaatggtgaccttggtggagtctcctatgtgaagagtaccctccctctccacccccagtccccatatcctggttctggcccaaggaaaatgtccattctatgaccttctcttttcctctcctctcacttctgcagctattctcacacatctaacctctaggcaacatgcactaaattcaaaagcaaggagaagcccttgccccccatcagtccaccagccctagaacctcccttgcctcaacagtcacctaataaagcccacctccatggaaaacggctgtggctttagttttgttgctttttaaaaaaatcaatctaccaatctctagcagtaagagggaaagttagacctcagctggggaactttcctgtccatgtccacagatagagcagaggacaaagccataggtt

SEQ ID NO: 29167 - DNA, 446 bp, Homo sapiens
  misc_feature (1)...(446): n = A,T,C or G
nattgtagacactagaagagcgtggnggaattcacgtgacagtggctgagggtggggtggctgagatcacctgccgtctgcaccagtatgatgggtccatagttgtcatccagaacccagcccggcagaccctcttcttcaatggcacccgtgccttgaaggatgagcgtttccagcttgaggagttctccccacgccgggtgcggatccggctctcagatgcccgcctggaggacgaggggggctatttctgccagctctacacagaagacacccaccaccagattgccacgctcacggtactagtggccccagagaatcctgtggtggaggtccgggagcaggcggtagagggcggcgaggtggagctcagctgcctcgttccgcggtcccgtccggctgccaccctgcgctggtaccgggaccgcaaggagctgaaaggagtg

SEQ ID NO: 29168 - DNA, 444 bp, Homo sapiens
  misc_feature (1)...(444): n = A,T,C or G
natgatgactgacagcactncaggnggcattcgaaggaaaagattgatcgccgttctggtaaaaagctggaagatggccctaaattcttgatttctggtgatgctgccattgttgatatggttcctggcaagcccatgtgtgttgagagcttctcagactatccacctttgggtcgctttgctgttcgtgatatgagacagacagttgcggtgggtgtcatcaaagcagtggacaagaaggctgctggagctggcaaggtcaccaagtctgcccagaaagctcagaaggctaaatgaatattatccctaatacctgccaccccactcttaatcagtggtggaagaacggtctcagaactgtttgtttcaattggccatttaagtttagtagtaaaagactggttaatgataacaatgcatcgtaaaaccttcagaaggaaaggg

SEQ ID NO: 29169 - DNA, 445 bp, Homo sapiens
  misc_feature (1)...(445): n = A,T,C or G
nttgagaccattgtagaccttggccangcggnggaattgcagaaggctgtggagaagcagcagcctgtggaaagcagtgaagactgcagtgatgagtctgattcaagttctgaagaagagaagaaacccccaactaaggcagtagtctgtaaagcaaccactaaaccacctccagcaaagaaagcagcagagagctcttcagacagctcagactctgacagctctgaggatgatgaagctccttctaagccagctggtaccaccaagaattcttcaaataagccagctgtcaccaccaagtcacctgcagtgaagccagctgcagcccccaagcaacctgtgggcggtggccagaagcttctgacgagaaaggctgacagcagctccagtgaggaagagagcagctccagtgaggaggagaagacaaagaagatggtggccacca

SEQ ID NO: 29170 - DNA, 448 bp, Homo sapiens
  misc_feature (1)...(448): n = A,T,C or G
nattgatgaccactagaacagcgcggtggaattcgctgatccgggcagccgtgaagtttctggacaccgacaccatctgctacagggtggaggagcccgagacattagtggaacttcaaaggaatgagtgggatccaatcatcgaatgggctgagaaaagatacggcgtggagatcagctcctccaccagtataatgggacccagcatccctgccaaaactcgggaggtgctcgtcagccacctggcatcttacaacacatgggctttacaagggattgagtttgtagctgcccagctcaagtccatggtgctaaccttgggcctgattgacctgcgcctgacagtggagcaggccgtgctgctgtcacgcctggaggaggagtaccagatccagaagtggggcaacattgagtgggcccatgactatgagctgcaggagctgcgggc

SEQ ID NO: 29171 - DNA, 447 bp, Homo sapiens
  misc_feature (1)...(447): n = A,T,C or G
naactgatgactanagcactgncnggnggcattcnggagatgcgcgagcagaagcgctttgacggctgcagtcctgccacagaggagtttttattacaacctgacccactgatctttcagggcccaggcccagaccaggagggcagtagccacgcctgggagaaacggcgctcttcatacgactcaaggcctggatcctggaagcccccaccaccgacccaaagcaccaaaccaagcttcagcgccatgcgcagagcagaggccacatggcacatagctgaagagagtgcccccaaccacagctgccagagtcccagcccagcctcccaagatggggaagaggagaaggaggggaccctcttcccagagaggacacttccagctaggaatgccaagctacaggaccccgctctagctccatggcctcccaagccagtggctgtgccc

SEQ ID NO: 29172 - DNA, 440 bp, Homo sapiens
  misc_feature (1)...(440): n = A,T,C or G
nactgagactaccgcactncnggnggcattcccagcactgngctgggttgggagtagggtgtcccactggggttggggtgagcttgctgttttgatcccatggcctgagcacagcatgtgggaactgttcagtggcctgtgaactgtcttccttgttctagccaggctgttcaagactgctctccatagcaaggttctagggctcttcgccttcagtggtgtggccctagctatgggcctaaattgggctctaggtctctgtccctggcgcttgaggctcaaaagagcctctgtccagcccctcagtattaccatgtctccctctcaggggtagcagagacagggttgcttataggaagctggcaccactcaactcttcctgctactccagtttcctcagcctctgcaaggcactcagggtgggggacagcaggatcaaa

SEQ ID NO: 29173 - DNA, 449 bp, Homo sapiens
  misc_feature (1)...(449): n = A,T,C or G
nttcgtagacactagacagcgcggtggaattcctcacacccagtggacagtgctgagcacggggtcagggctggagggcacaggcagagggcagctcccaggctggctggcaccccaagggaagagctggtctccctcagaagccccttcctccacagacttctgatcatctccctcttctcccctcctttcacaccgaggctcctgctctcctgtgcctccgaggcccccagctggaagtgccttgttgcctctgccctttgaagtcggaacaattcctagcacctgtcggaaggtcaaggccaaaggcaaattcaaggccagactgtgacaaacccagggctgaggcctgccccatgaagaggctgagccccctgaaacccctgccccttgttggtacattccagaggcgcaggggcctgggggatatgaagctagggaagcccctg

SEQ ID NO: 29174 - DNA, 465 bp, Homo sapiens
  misc_feature (1)...(465): n = A,T,C or G
acgggaaaaatttgagcccttgttttgtagtctctgtccangcggnggaattctctggaccctgttggtccggagaacaggctgggggcgaggcggttttaagccaggagggatgagatccagtctgaagtgtagtgtcacttggtcctatttcgtataccttctctgtgggagtatccagctctctcagaggccatgaagacccgggtataggagacagaaggaagggaacgcaggaagggcctgggcacggggaagtgggaagagctcagggctgcggccagcaggagccagtgtgcacaccctccaggcggcagctgccagcgagggcccctgtgctggccacaagcggggccaaagcctgcctctgctttcctctaacaattgtattttctgttttttaattggtttttccctgttctctaaaatgagtgtcttattagactaaactggatatagccctac

SEQ ID NO: 29175 - DNA, 459 bp, Homo sapiens
  misc_feature (1)...(459): n = A,T,C or G
agcagggccncnncaactgagactgacgtcctctacacagncnggnggaattcgcgctacaatctctgaaataacagaagtgtagaatttgggttccacatacaacctggctttttcccggagtgcacttgccaatctgctgctgtggaagggaaatagagcccagacggaaagagagtcgctagactgagaagacggaggttggagtttggggctgccagaatgtctggaagatgagagttaaaatcctggaatggatgggaccacagaaaagggagttcccaacctgcaaacaaatctccctcaagtcattggcaagctctacatgcacagggtgagagtccaagaaacttggaagagaaaaatagcaactgggaagctacaaaagcgaacaaggcttccagcagacatgtgatgctggggacacaggttgccaagctgaagaggccttggccgggc

SEQ ID NO: 29176 - DNA, 576 bp, Homo sapiens
  misc_feature (1)...(576): n = A,T,C or G
gaagaagctcgatcactgtcagngnggngcttcgaaccactatccgtngggcggaatacttacctgcatccactatgcagggttccctaatgaggcactgtccagcatggggctggggcctgctgtgcttttccctgaggagcctttacctgcccgacccagggcctctcaccctctcttgccctttctctctttctagcactttccacatccggatctgaggacactgccgaggctgtaggggcctagaagtccaccatcctgccctgcagtcacatgggtgtggcctccaagctccccaggaaagcagtggcagcctctggggtttacaccacaaatatatcctgtggccctttcagcaaaaaaaaaaccttaaccaggaagggggcctgtgaaggttaggacccttcccacagccccgctgtggtccagccccgggacccatggcctcttccaggccctccgcaccccgccccatgccccagtcctttcctactccagaaatgctccccacccccccaagagggaaaagcagataacccaacaggaggtggtggggtctgacgtgtccaaggn

SEQ ID NO: 29177 - DNA, 584 bp, Homo sapiens
  misc_feature (1)...(584): n = A,T,C or G
tgtggganannnnggttgatcacantnannannnnnattcggtccactatccgtgtggtggaattccaagttttcaactaaaacaaaagcaaaactaatctgcagtcttgaaggtgggctcattcattcccctgcccccactttttaaaacattttttttcttaaatgaaacagtttcttttatcttttggcttctcgtgtactcagaaccatagagctcaaagcttctcagctcaacggagaactcagcacttcttggactgataaatagagcagctttaaaatgcttagaactgaagacagaccaactgtggcgagagaaagtaaacacatccatgcaccagtcaaccctagcaagctcctcgctgagattacaaactgcagttcctgcctgagccggagaggatgctggagcaggctgggggaccagaaccacaaaccagccctggcttagctctggcttagctagctgtgccccagaagagctgggtcctcagggagtcttcttgcggcccggnttggatgttcctaagcatagaagactctgccagtgtgtccctcatttcgttcacatttggaaatgt

SEQ ID NO: 29178 - DNA, 443 bp, Homo sapiens
  misc_feature (1)...(443): n = A,T,C or G
nattgatgatcgtatgcactngcggnggaattccacgggtgatctacagtcagtctttgatccttgcgtgtcctctctgttgtagcgtgttcctgccatccagtaggatcagctgtccttcctgccaactcagtgaccttctgcgaccccagcaatggtgactgcccttgcaagcctggggtggcagggcgacgttgtgacaggtgcatggtgggatactggggcttcggagactatggctgtcgaccatgtgactgtgcggggagctgtgaccctatcaccggagactgcatcagcaggtgaatgtgcaaggctcttgctctcagctgcatgtatttcaggctcttttgaaaacctatagtgatttggaaaatcttgcattctgttaatggagcaaagatgtatttgcacatctcttttaaagaatttttgtcaggctgggn

SEQ ID NO: 29179 - DNA, 445 bp, Homo sapiens
  misc_feature (1)...(445): n = A,T,C or G
natgatcatatcgccaatgatggcatcgaagnngcncccgctggctcagtgacctccactctaatttaatcgcagcagcattatttaccaagtgctgttgtatgcattagctcttgcggctgcaaaaatgctacaagtgggtgttaaattgttcttaccattttccttctgtgatgtggaatctgaggcacgtggcttgccccaggccactcaggcagtaagtggcagagccaagactagaacccaggactgcaggcccaggagcccagcatttgcgtcctggcgctgagtctgtggctgccatccctctcccagaagggccacaaagtacccgcatgccaccacacccagctaattttttgtatttttcgtagacgcagggtttcaccatgttggccaggctggtctcaaactcctgacccaggtgatccgcccgccttggcct

SEQ ID NO: 29180 - DNA, 558 bp, Homo sapiens
  misc_feature (1)...(558): n = A,T,C or G
ctgatcacantccgngggtggaattacactggccagcatccatttgaatggttggatcatgagttatgtccatttctcagttaaataaatattaccaagctgtcttctaaaactgcctaaccaaaattatactctcaccaaaagataagcactcctatgtcctcacattcttgcattattttaaaaaccttggccaatctgatgaacatattatttttaatataataatgtcagcagtttgttattccctacatacagactcattatcaccagctgcccagagtggctgacccctgtgaaatgcagccagttgactggtacttatagctttagttttatttctacaggaatagagcctcaacctgcattctcagctcttcagagcatttccttgcttgggtaactcatgtcattgggttcttccactctgctgcagtcatatanttttgctcattctagacatagacatttgttttctcttgatggatactnctgctcattcattcataacttctttttgagcactatatatgtagagacggccggcatggtgctcaa

SEQ ID NO: 29181 - DNA, 462 bp, Homo sapiens
  misc_feature (1)...(462): n = A,T,C or G
natcgaagaccctagttgatgccggtaagacaggaaccccgcacagccacaccaaaccctacgtccgctccaagggccggaagttcgagcgtgccagaggccgacgggccagccgaggctacaaaaactaaccctggatcctactctcttattaaaaagatttttgctgacagtgaaaaaaaaaaaaaaaaaaaaaaaaaaaaaaaaaaaaaaaaaaaaanggggccccctttaaaaaaaaagggccctaaaaaaccccgaaaaaaccccgggggggccttttaaatgcccaccctttttgtggtccccccccccccggctttttttttaacgggggggggccccccccccctttttttttaaaaaaaaaaaaaaaaaatccccccctttgggaaaaagggggtttttttttatggggnnnnnnnnnnnnannnnnnnnnnanaaaannaaaaaaaanaaaa

SEQ ID NO: 29182 - DNA, 478 bp, Homo sapiens
  misc_feature (1)...(478): n = A,T,C or G
agancgtncnaattgannccccttaactgatnacactaggacangcggtggaattcgttatttattctgtacttgtggtttggggctctgaggaaaatcctaatcttgtgcctctccccctttgctaggagttgggtgggaagagagggtggcctctgtgccccaggttgtcagtggaggggaaggggtgtcactgcccctctgtgggactgtcatgccagtgtgcccacctgcctggtctacatcctaaagagatgtaccgtcccccctccatgcgggcaccaccactcccaggagccaagctggaggaccgcgacctgggctgggagcagagctgactgacatgggtggaggtgaccctgagccaagttctctggcacttgctggacatgtcccctaccctcttcccaagaggagccatcccacatttgggtagttagtacccaggactggttggactgatcgggttagggaccct

SEQ ID NO: 29183 - DNA, 459 bp, Homo sapiens
  misc_feature (1)...(459): n = A,T,C or G
tccgagaccatctcatgatgccctcgaacnagcnagaannntcttccacagtgatgatcaactgtgaaagtcagagatggctgttcagggaagacttgcattttttccgccttatgtcttaaagaatttgtttttttcttcctgggatagaaggagtaattaattgtttgggctttccttcagggttctcatctgaatggagaagctagcagcatttaagatgtgaattcaccatcagttatgaagagttgggcttaaatgtctcagtccgcactttaggggagtaattaagaagccctgagacatgttcagtgtgtacaaggtgaccatacagtgtagttgtttatgcctgttgtccttgtgtcattattaacagcattctctttccttcccacaagtgtcttaattaggacagtaagttatatggttacccttaataggatctgtgtaagcccatcg

SEQ ID NO: 29184 - DNA, 479 bp, Homo sapiens
  misc_feature (1)...(479): n = A,T,C or G
cggtcgtnccttttgaaaccctcgactgatnatcctccggaagngcggnggaantccatcctatttgtgatacttccctgactttacatctctctttatatattatgagctcatttttgcccccctcttgctcatctaccttctggtgaggatgttcttttccgcatatggcttttttatccccttggaacagtcctttgctagttaatggaatatttaatgagacatttgggagggaaagatagcccttgcctagtccagccttaggcaatttgggggatgggtgattacagaaatgtcaggctcttgggcagtttttcctttatctctgtcacaatcagtagagtaatttttcttctctctcttctacagccatcaggagttggtatcctctttgcagattctggtggaactggatacacacatcactgcctttgggtctaatcctttcatgtccctcaaacctgaacaggtctatt

SEQ ID NO: 29185 - DNA, 473 bp, Homo sapiens
  misc_feature (1)...(473): n = A,T,C or G
ggtagtgccaactgatgacaccgttagangccntgagnancngcaangnggntactaaccaaagccagagtttctttacccatacttgccttgtctctgaagagctgggttggtgactttacttgaaggaattgattgcagtgtatcatgtccttggcctcacatattagtgagggatgaatcagggaaggaaaaaagtgcttttccaggatcccagtgttggaccatctattcctgataacgtttgtgcagaaagagggctcctagcctcagcctggaagttggccgctgtaggtggaatgagccagggtgcaggagtgagaagttgttgggttaaatctggcctctgccactgttagctgtagaatttaggcaaggtttcctcatctatcagagaagactcacagctacttcacagattttggggaatttgatgaaatcatatatgtacaggccagcacaacggctggcct

SEQ ID NO: 29186 - DNA, 459 bp, Homo sapiens
actagaaaacttcgtagaccctagtccatgtggtggaattctggccttctaaatgtgggccgctcactcaccaccgtcttcaacgtgctgctctcctacctgctgctcaagcagaccacctccttctatgccctgctcacctgcggtatcatcatcgggggcttctggcttggtgtggaccaggagggggcagaaggcaccctgtcgtggctgggcaccgtcttcggcgtgctggctagcctctgtgtctcgctcaacgccatctacaccacgaaggtgctcccggcggtggacggcagcatctggcgcctgactttctacaacaacgtcaacgcctgcatcctcttcctgcccctgctcctgctgctcggggagcttcaggccctgcgtgactttgcccagctgggcagtgcccacttctgggggatgatgacgctgggcggcctgtttggctttgcc

SEQ ID NO: 29187 - DNA, 458 bp, Homo sapiens
  misc_feature (1)...(458): n = A,T,C or G
ntttgagaccctagaacagcgcggnggaattccccgggtccgcgctgggggagcctcgcccccgcccccaccgggtgaaagtgtcgtctccgcttctctcggtgtggcgggacggtaaccccatactctccttttgactccttttggaacccccacttttacgttgtgtccctccgcctcccccatggcgcaacaggagtcagtctctttctgtacaagggagaaaagctgtacgcgtttgtctcgtggttggaagcctccccttggcggggagaagctttttttcttgctagtattcgctgtgttcatgatctagaaatgcggtctggtctcgcctcgcctaccaatctctgctctctatgtatgtagcgtacgggttgttttgggtgaatcttgaggaataaatgcctttatatttcacaggctagaaattgaacttcccacacgattagctttat

SEQ ID NO: 29188 - DNA, 454 bp, Homo sapiens
  misc_feature (1)...(454): n = A,T,C or G
natggagacctctgnttgagcggcggaattccgngaatccgggaggcggagcttgcagggagccgagatagtgtcactgcactccagcctgggtgacagagcgagactccgtctcaaaaaacaaaaagcccgtggcaattaatggtaaaggaaacccggcatttcagtgtaaagaggtaacataaacggatactgcctcattgcactccccaaaagagagtcaggagagcagcaggagaggcgcacagaaggcccagttctcaggggtttttattcttgctgcagttggttaccaaggaagaccccaaagcactggctgttgccttgaactgggacataaagaagacggagactgttcaggaggcctgtgagcgggagctcgccctgcgcctgcagcagacgcagagcttgcattctctccggagcatctcagcaagcaaggcctcaccacctg

SEQ ID NO: 29189 - DNA, 458 bp, Homo sapiens
  misc_feature (1)...(458): n = A,T,C or G
gagccggcnnnnggcgattatgccctcgnannactagngtcttcgcannnccggaggcagtgacggncggagagataggaagtggcggcggcggcattcggcagaggggagtttaaggttatgcgtctcagagatcccgcggaaacgctatgggtctaataacacggatcagggtgtctacctgggtctctcagagacacaggtcctgtcccctgcgactgctggcagaaacaacaacgacatcgcccctctgccccccccagagaccctcgtccctccccctcccgacaccatgtcctgccgggatcggacccaggagtttctgtctgcctgcaagtcgctgcagacccgtcagaatggaatgcagacaaataagccagctttgcgtgctgtccgacaacgcagtgaattcactctcatagccaagcgcattgggaaagaccttagcaacacatttg

SEQ ID NO: 29190 - DNA, 488 bp, Homo sapiens
  misc_feature (1)...(488): n = A,T,C or G
agggnagtnnccnagggggnnccaactgagaccntnactgagaccatcgnaagngcgnggaantctagaactcctgatctcaagtgaccctcccacctcagccttccaaagttctgggattacaggcgtgagccaccgcgcctggcctgtgctcccagctaaaagctagaaaaagggcagataatagtgctggagtttaacagtctcctggccaggggtactggctatattctttgtgttaggatagatcctctagggtcagtgtctagtgacaatggctccgatctccctaggcctgattttcacggcccctttgtggccctgaagcagatggtgtcattctcgtgcatcagacacaaatgctaggtgtgggggaggctgagtctgagaggagaaccaagaagggggaaataagcacaaactcatttcatgctgattcaggctttcttccaccccttactcctaaggagtgcctgggaagtgtggat

SEQ ID NO: 29191 - DNA, 461 bp, Homo sapiens
  misc_feature (1)...(461): n = A,T,C or G
ntttactgacacctctacgaagcgncgnggaantccgacaagggtcgggcgacatgcagaagcaaggctgcgactgtgagtgtctgggcggtgtgcgcatctcccaccagagtcaggacaagaagattcacgtgtacggctattccatggtgagccgcagccccgtcccgccctgccggaggccccagtaccagcttcgaggcccacctgagcctgctgccctgacccgtggccccagctgagcacgcaggcttcctggggttctcccagggtcggcggcagagccctccctccagggcccattgtgttcctgcattcccccatggagcacacgccagacctgaggggtgggacggacacccccaggcatggccggctgtctcctctccctgccttgggaggccttgctgggctctagctgtcctccagcactttgggccctgggcccccagaggcagtcn

SEQ ID NO: 29192 - DNA, 554 bp, Homo sapiens
  misc_feature (1)...(554): n = A,T,C or G
ggatgggggcccccncattgaacccatgcagngnattgagtncccttgcaganggacgngagcaagctaaatgacattgctctacctccaacccctgctcccacacagtgacagaccggaaagtgaagagtcagaactaactttggtctcagcgggagccagtggtgatgtaaaaatgcttccactgcaagtctgtggccccacaacgtgggcttaaagcagaagccccacagcctggcacgaaggccccgcctgggttaggtgactaaaagggcttcggccacaggcaggtcacagaaaggcaggtttcatttcttatcacataagagagatgagaaagcttttattcctttgaatattttttgaaggtttcagatgaggtcaacacaggtagcacagattttgaatctgggtgcatatttgttactttacttttgctggttatacttgagaccaacttttcaatgtgattcttctaaagcactgggttcaagaatatggaggctggaaggaaataaacattacggtacagacatggagatngtaaatgagtn

SEQ ID NO: 29193 - DNA, 487 bp, Homo sapiens
  misc_feature (1)...(487): n = A,T,C or G
gggagttccnnaggggngnnnnaactgaaaccntcactgatggcactcggaacngcagncccagctactcaggaggctgaggcaggagaatcacttgagctcttatatattgtggaaattatccccttatctgataatatagtttgtataagcttttaaaaaataaattgtatatatttaaggtatacgacatgatgttaatgacatacacacacatattaaaatggttattatagccaggcactgtggctcacacctgtaatcccagcactttgggaggccaaggtgggcggatcacctgaggtcaggtgttcgagaccagcctggccaacatggtgaactcccatctctactaaaagtacaaaaattagctaggcgtggtgtcaggcacctgtaatcccagctgctcaggaggctgaggcaggagaatcgcttgaaccanggaggtggaggttgcagtgagctgagatggccccatggcactcct

SEQ ID NO: 29194 - DNA, 558 bp, Homo sapiens
  misc_feature (1)...(558): n = A,T,C or G
cccccgcccccncccaatgatactcatngcaaggattgagacccttatcagagggcggaattcctatgacgcctagcactgtccccaaagcagcagtgaatccgcaagcaggtgtagggctgtcctagcaggtctgcactgaggacatcccccacagtgggcatcctgagggatggcacccacggggcatgggccacatagctgagcggctgcagaattctgtccctcacagctcttgctataactgcagttgccggcctaaaccaccaacagtgggcatagttaaatatacccagaatactggtattggctgtcaccttatagtcatctgggtaggggagcctctcgtgtaccttctgacacttccaggtagcctcaaggtcactcaggtggggccatcctcccacgcactccagaagtcacagcatatacagtgtgggaggagaggtgaggtgccagcgcanggcactcctggccatgaggcgtctggtgtcccagcctctgcacctgccaacagagtgaacgaacaagctagcgaggcagtcagtgcacacctgg

SEQ ID NO: 29195 - DNA, 494 bp, Homo sapiens
  misc_feature (1)...(494): n = A,T,C or G
gggaggttccnggnnngnnnnaactgataccctcacttgatgacactaggacagngcggnggaantcccaagttagatattccgaaacagagcatccaacgcaacatgtctgtcatggaacgctttcgcaacatggacaagagagccacaactgaggaccgcaacacggccttggagacgctgcaccagaatagcatcactcaagtctctatttatgaggtggacaagcaagattgtcgcaaattttgcactactggcatcgatggagccatgacaatttgggatttcaagaccctcgagtcttccatccagggcctccggataatgtgaagctgagtgagcctccgccatccagcatgacaaactgtggccgaccgcagctgtgccgtggcacgatggcgaggaagccagccccaaggaaacactgaaaacacatatcacgccaatgccgtgtggttttgtttgaatataaaattggtgaaagtgttggtttt

SEQ ID NO: 29196 - DNA, 459 bp, Homo sapiens
  misc_feature (1)...(459): n = A,T,C or G
caatgaagacctggtcangncgngcaattcacttttggggggtctcttacacacacctgaatagcatactctcaataaaggataggcacacccctgtttgtcctcccccaatttccagactagcattttaccctgggtctagaattggtggtgataagccgacttagatggagtatttgagaaaaggggaggtgaccctttgcctgaatgggggagggggcgctctccactcaccgcctgagtccctggaacgaggagggccaggacatcctggatttcttcaggccgggccggtggccggtctccaccgcgtaggaggtgcggtccatggcgcgacagtacagcagggagaatgcccaatgtttcctcttgaagatcttcctccaacttggcctcgggagtggtcctcgctggaaatcaaggcgagtcgtccttagttgcagagccatggctgagcct

SEQ ID NO: 29197 - DNA, 479 bp, Homo sapiens
  misc_feature (1)...(479): n = A,T,C or G
agggccagnnnnnnnncggcgatagatgtctatcagnaagactgattgccattcggancancccgcaggaataccgcagagaaccggaagaagagcatggataagatcattaggggcaagctggcactgttcccctacctcaccctagatgcccgggaccttgtcaaaaagtttctgaaacggaatcccagccagcggattgggggtggcccaagggatgctgctgatgtgcacagacatccctttttccggcacatgaattgggacgaccttctggcctggcgtgtggacccccctttcaggccctgtctgcagtcagaggaggacgtgagccagtttgatacccgcttcacacggtagacgccggtggacagtcctgatgacacagccctcagcgagagtgccaaccaggccttcctgggcttcacatacgtggcgccgtctgtcctggacagcatcaaggagggcttctccttccn

SEQ ID NO: 29198 - DNA, 463 bp, Homo sapiens
  misc_feature (1)...(463): n = A,T,C or G
agaggccggggcaggcgccaatgaggccctccgnatgatcgcctccagancggcnggcggaattcgagagctcagtaatggaagtgacagctgctctaaggccattatagcagctggttcctgaaaggggatgaggggacaggaaggaaccagttcctgtggtgagttaggccatgtggggccacttaccctggctggaatggtttgaatgtgggtttgaaagggttttgacccctgtccggtgatggaaggggcaagtccactctcaccaggagaggagggcatggaaaaggctgtagagcagtggcctctcactgaccacttctcactgatgtcaaagctcagcaaggtcatgagcttatagcaggtgggggtggagggttgggtaaggcaaggctaggaacagctgctcangcagtggaggcgtgaggcggactgtggtgacacggggtgctccctggtt

SEQ ID NO: 29199 - DNA, 461 bp, Homo sapiens
  misc_feature (1)...(461): n = A,T,C or G
aaatttagacaccactacgcagcgncgnggaattcgttgctgctggccgagagcatgccaccggccgagagcgtgccgctcatcgggaagtactacatggccactatgaccatggtcacattctcaacagcactcaccatccttatcatgaacctgcattactgtggtcccagtgtccgcccagtgccagcctgggctagggccctcctgctgggacacctggcacggggcctgtgcgtgcgggaaagaggggagccctgtgggcagtccaggccacctgagttatctcctagcccccagtcgcctgaaggaggggctggccccccagcgggcccttgccacgagccacgatgtctgtgccgccaggaagccctactgcaccacgtagccaccattgccaataccttccgcagccaccgagctgcccagcgctgccatgaggactggaagcgcctggcccg

SEQ ID NO: 29200 - DNA, 473 bp, Homo sapiens
  misc_feature (1)...(473): n = A,T,C or G
agggccggnnnnngccccactgaggcccatcgnannactgatggtcatcgnagagcccggnggaattngnagaagtctgaccctcaagagcagaggagcttggttctagccagttcggttttaggcctacagtggcatttggtatttcgagctcacctctctttttctcttggagtgactgcttcctgcatctgctgcatctccgtgggctcccctcataccctcttctgaaggcctggggcgtctctcctgccaccatgcctgtgtctgcaggtgcctgccaccagccccagtctgctgcacgggccctggcaagtagaaagcacttgccttctgaccacacggggagctgagggtcagagacggaaccagggctcgaccctccaccttgaaaccttgagatggggatgctcctcattctagccagttcctcctcagctctcaaaacaaggaacagatgctcaggagaccag

SEQ ID NO: 29201 - DNA, 460 bp, Homo sapiens
  misc_feature (1)...(460): n = A,T,C or G
catcgttgacantcngtagngncgngcaanncaaangacagattttcttataatgatagtatttaaatgtttataacatagtttaattttatatttattccagatagtatttaatttagtgctttttacccattttgagttgagttgtagtactttatatattctgactttaaatcctttgtcagacacacatattctttctcccaatccatgccttccctattcattctctgtccagagttttttgctaaagatagaattattaatgatacatcaagtagtggaagtgttttgaaaattctttgaagaatgtgagagctacaccttctaccatgaggcttccaaggtaaagatccttcaaataactgtaatggaaactagggagaatgaattatttacaaataagacaaaattaatagctttgggattatttattttttgagacaaaatctcgctcttg

SEQ ID NO: 29202 - DNA, 540 bp, Homo sapiens
  misc_feature (1)...(540): n = A,T,C or G
catcgacccccctccccccnncattgaganccctggcagngnggcggaattcgttcgccacgcaagtctgggtccttcggcgattgaccggggtccttgctgttcgggagcctctcctaagctgcctgttcgcgcgagagtttggaggggcgggtttggggtcggtgtctgattggggctcgcaccgcagcacgctggagtcccgcttaggtaccagttagcgtcaggggagctgggtcaggcggtcgccgggacaccccgtgtgtggcaggcggcgaagcgctctggagaatcccggacagccctgctccctgcagccaggtgtagtttcgggagccactggggccaaagtggagcgaccccattacgctaaagatgaaaggctggggttggctggccctgcttctgggggccctgctgggaaccgcctgggctcggaggagccaggatctccactgtggagcatgcagggctctggtggatgaactagaatgggaaattgcccaggtggaccccaagagaccattcagatgggatctt

SEQ ID NO: 29203 - DNA, 540 bp, Homo sapiens
  misc_feature (1)...(540): n = A,T,C or G
ggggatcgtaccctttccagngggcatagatcgaccataccctgggngcaatagggactgtcccttcctaatcacgtcccagcctgacaccatttcagccttgggcctttgggaagtctaatttatacagctgacctatccacctgaaaagatagtctctcccagttttgccccctctgccttcttttacccaactgatgggaggtttgaggggaggaggcttccctgtaaatgaaacgtttctgtaaatcaaattacatttccttgcatcaggaaccttgctatctaaagcagtgctgtctaacaggaatattatataagccaaataggtagttttaaatctcctagtaaccacattaaaaaacaaaaagaagccagacattgtggcacacacctgtagacccttgagaggtaaggggatcacttgagcccatcaagaccagcctgggcaacatagcaagatcctgtctctgaaaaacaaanaaccaaacaaacaacggaatagaaaattaananaagcaggtgtgatgaattntaatn

SEQ ID NO: 29204 - DNA, 461 bp, Homo sapiens
  misc_feature (1)...(461): n = A,T,C or G
aaatttagagcatcgtaagccacgncgnggaattctgcaacactcggcagtttggaaaaaaacatcttttcgaccaggatgaggagacatgttgtaactcagaccagggcccctcccagtgggtgacgctggagtttccccagctcatccgtgtctcccagctgcagatccagtttcagggtggcttctccagtcgccggggctgcctggaaggttcacagggcactcaggctctccacaagattgtagatttctaccctgaggacaacaactcgcttcagactttccccataccagctgctgaagtggaccggctgaaggtgacgtttgaggatgccactgacttttttggccgtgtggtcatctaccacctgcgggtgcttggggagaaggtgtgagacctctaggggctgtctcctccaggaagccctccgggaagcacagcaaagtccctcattctg

SEQ ID NO: 29205 - DNA, 459 bp, Homo sapiens
  misc_feature (1)...(459): n = A,T,C or G
caatgaggacctcggtcagngncgngcaanncgtanaccactccaggagtaagttgatcttgtttttctcgctgggttatgcgcagaacctgtgccacctccttctgaaacccacatctttctgtgggttcagcgacaggattggcccagccgggccggaaaaggccgccatgccaaaagcggctgacaccaactccacggggcgctcccggaaacgcccaattttttgtatttttaatacaaacagggtttcgccgtgttgcccaggcaggtctagaactcctggactcgagcgatctgcctgccctgactcccaaattgctgtgattaatagcgcgagccaccgcactcanccttgactttgaaatatatgttgtgggactggcgcggtggctcacactcttancacctggtttttgcgagacgccctcggtgaatcaatcagagttgctattattg

SEQ ID NO: 29206 - DNA, 545 bp, Homo sapiens
  misc_feature (1)...(545): n = A,T,C or G
atagaaccccctnnnnnnnnncnatagagatcccttntgagngnggcggaattccataccagtgcatcaagtgccagatgaccttcgagaacgagagagagatccaaatccacgttgccaaccacatgattgaggaaggcatcaaccacgagtgtaagctgtgcaaccagatgttcgactccccggccaagctcctctgtcacctcattgagcacagcttcgagggcatgggcggcaccttcaaatgccccgtgtgtttcacagtcttcgtccaggccaacaagttgcagcagcacatctttgccgtgcacgggcaggaggacaagatctacgactgctcacagcgccctcagaagttcttcttccagaccgagctgcagaaccacacgatgagccagcacgcacagtgagggatcgctcaacaggacacctctccgcagaaagcttgccggagaacgccgagggaagggccattgaacattacatccaatcaaagtgtcatttgcaacccagatgtanaactctaatgatttggcatgaggcgt

SEQ ID NO: 29207 - DNA, 557 bp, Homo sapiens
  misc_feature (1)...(557): n = A,T,C or G
ngttcgaccactgttcgngnggngtttcgatcccctatcagcgtggcgcaattcgacaggttcattntgttggcctgtgatgggctcttcaaggtctttaccccataagaagccgtgaacttcatcttgtcctgtctcgaggatgaaaagatccagacccgggaagggaagtccgcagccgaagcccgctacgaagcagcctgcaacaggctggccaacaaggcggtgcagcggggctcggccgacaacgtcactgtgatggtggtgcggatagggcactgaggggtggcgcgcggccaggagcacgcatggtattgacttaaaaggttcattttgtgtgtgtgcacattgtgtgttttgtgtactcctgtgggactcccatggttgtaaataaaggtttctctttttttttcctataaaaaaaaaaaaaaaaaaaaaanannnnnnnnnnannnnnnaannnnnnnnnnnnnnnnnnnnnnnnnnnnnnnnnnnnnnnnnnnnnnnnnnnnnnnnccccnnnnnnnannagccctttctttttttttgtttttttt

SEQ ID NO: 29208 - DNA, 482 bp, Homo sapiens
  misc_feature (1)...(482): n = A,T,C or G
agagttnccaggttgnnnnaaactgaaacccctcgaagngcgtggaanncgccaaccgcagcaggtcctgcagcggaacctggagcaggagcaacagcaacgagggatgggggggtagtggttaccccgggctgggcccctccaggagtcacagatgaggcccccgcagagactggtgagtggtgaccctgtcatgtacaggagggaccctggggcatgtggggggggtggggttgggaaagaagcagggcgaccttggccttggggagagcagagcagagggagaggcagcagtcccagcggtcctaggctgtcgggaaactgcagcccagcctcagggccatgggaggtggtatccaggcctgggtggggccaggcctctgctcacagggatgtggggtcagtgcttgggagcctgtggccagcagcccccactgcacccctgcccccaggtgacacgcttctgagcaggggcccctggg

SEQ ID NO: 29209 - DNA, 556 bp, Homo sapiens
  misc_feature (1)...(556): n = A,T,C or G
cattgatcgcactctgtccagngcggggaattcggcggaataagacagagagagaaggaaaggagagaaggcaggaagaaggcaagggacgagacaaccatgctgtgctgtatgagaagaaccaaacaggttgaaaaaaatgatgacgaccaaaagattgaacaagatggtatcaaaccagaagataaagctcataaggccgcaaccaaaattcaggctagcttccgtggacacataacaaggaaaaagctcaaaggagagaagaaggatgatgtccaagctgctgaggctgaagctaataagaaggatgaagcccctgttgccgatggggtggagaagaaaggagaaggcaccactactgccgaagcagccccagccactggctccaagcctgatgagcccggcaaagcaggagaaactccttccgaggagaagaatggggagggtgatgctgccacatagcangcagccccccaggctcctgcatcctcagaggagaaggccggctatctgagacagacagtgcactaaagcttcactgataactcgccgcccn

SEQ ID NO: 29210 - DNA, 492 bp, Homo sapiens
  misc_feature (1)...(492): n = A,T,C or G
agagtttcccagggggnnnnnaaactggagaccacatcgacgncccgtggaannncctagnccaagagtaaacctcgcctgccacagggcccgtggcctaggtatggggagttgagctttcaaccccaaactaacaactgattctggagactggacttaggtctatcacgattcactccggtagaagacacgatgactctatctcccttgaccgacagaatgatcgaagccacagggcatggcgtgtgtcaccctttggcaggtctgtttgaaatctgggataagggatgcctcctgtcacaacttgaatcgctactcttgccatttcattaggcaacttccaaacacaaattcatagagagaagttatcttcctctctaccacactagcaggngatggtctttcctgttctatctttttggctttagctccagcccctctttatttatttttctggtattttacgcatgccacacgaattcatctaaacgn

SEQ ID NO: 29211 - DNA, 556 bp, Homo sapiens
  misc_feature (1)...(556): n = A,T,C or G
ccattcgatcgctgtcagtgcggnggaattcgganaggtcccggagagctgagcagtcgagatgtgtgacttcaccgaagaccagaccgcagagttcaaggaggcctttcagctgtttgaccgaacaggtgatggcaagatcctgtacagccagtgtggggatgtgatgagggccctgggccagaaccctaccaacgccgaggtgctcaaggtcctggggaaccccaagagtgatgagatgaatgtgaaggtgctggactttgagcactttctgcccatgctgcagacagtggccaagaacaaggaccagggcacctatgaggattatgtcgaaggacttcgggtgtttgacaaggaaggaaatggcaccgtcatgggtgctgaaatccggcatgttcttgtcacactgggtgagaagatgacagaggaagaagtanagatgctggtggcagggcatgaggacagcaatggttgtatcaactatgaagcgtttgtgaggcatatcctgtcggggtgacgggcccatggggcggagctcgtccgcatggtgctgatn

SEQ ID NO: 29212 - DNA, 490 bp, Homo sapiens
  misc_feature (1)...(490): n = A,T,C or G
agatgtccgggggnnccacctgaaaacccatgatgatcntccggaagngcggnggaantcctccagagctgagacagatgacgaagacgatgaggagagtgatgaggaagaggaggatgaggaggaagaagaagaggaggaggccacagattctgaagaggaggaggatctggaacagatgcaggagggtcaggaggatgatgaagaggaggacgaagaggaagaagcagcagcaggtaaagatggagacaagagccccatgtcctcactacagatctccaatgaaaagaacctggaacctggcaaacagatcagcagatcttcaggggagcagcaaaacaaaggacgcatagtgtcaccatcgttactgtcagaagaacccctggccccctccagcatagatgctgaaagcaatggagaacagcctgaggagctgaccctggaggaagaaagccctgtgtctcagctctttgagctagagattgaagct

SEQ ID NO: 29213 - DNA, 555 bp, Homo sapiens
  misc_feature (1)...(555): n = A,T,C or G
ccctcgatcgctcactatccgngnnggggaattcatcccagttctgatacatatgaggaagattctgagttgttgctccagatacgaaatgatgtgcttgactcactgggtattagtcctgacctgcttcctgaggactttgtcaggtactgcttctccgagatggccccagtgtgtgcggtggttggagggattttggcacaggaaattgtgaaggccctgtctcagcgggaccctcctcacaacaacttcttcttcttcgatggcatgaaggggaatgggattgtggagtgccttggccccaagtgaactcaagatttggcagccccagagatgccaactgcagcatgcccacctgtattccctgtccccttccttcatgaaggcatctccaggcaaggaaaactgaagtcattggcccgatacaaaacatttcctgcaacgaaggaggtggtgccgacgtgctgcttcccatcaccagcagctgctcgacaaggggcgcagggtggctgtctttgttccagcactgttcaggcttgctgtcatcccgggcct

SEQ ID NO: 29214 - DNA, 558 bp, Homo sapiens
  misc_feature (1)...(558): n = A,T,C or G
naattggaaacccttcgaatcacctagtcagagnggnggaattccgctaatgtctccagctgcctggaaggcagcatggggctgcggtcactctggggcagtcttctggcctcactgactcctccaccattgcctcccccagacccccctgcccctcccactcttcttcataactgccacctttgccagaagctccagagagactccccaacctgccatgcctgcctccaccccaaccgtacagtccccactgcgctgtccagcccctggtaccatacctatggcctggctcccccctggccttggagcccggtgcccctttcacttcctcagcctcagcaatgttcccttttcagtgtcatggagctggctcgcctcaagtctttcgttttcccaggctaggtagggctgtgaggaatgcattaagagggtttgggagtttctgagaacctggaggagcaaagcttgattcagatcctgtctgcctcgctgggtccttggcaggtcccctgtcctcctgggtgggaagctatggggtggggggcagaaggactgaag

SEQ ID NO: 29215 - DNA, 560 bp, Homo sapiens
  misc_feature (1)...(560): n = A,T,C or G
nnttcgaagcacttgggagngacggtgaanacctnccaataattggcatgctgctggcctgctgtctgtcccggttcatcacggccaatcagtatgagatggtgtaaggagtagtctttcaagaatgacggaataagagacctgttttaaaaaggaactgcagcaatctttgaaagacttccaaagaatgttagagcacagtacataatacacttgccctgctccctctaccccttaccccacaacgtgcaactgacactcccacccagtctctgctccacctttcagcccacgtcacgtgtagtgtccattttgtgaagccctgttgtgccacagagtgtagccaggtccccctgcagctagtcctagtgaacctcaccccgaggccctgcatgggccagcccctccatctgtactttggccaactgcaactcatcatcggtgactggttatcacaccatcgctggcccctttgggccctgcatgtagtgtgggaggctcctgttagctcctcactggggtaaatgccacacacctttaagtagataagcagacgatag

SEQ ID NO: 29216 - DNA, 425 bp, Homo sapiens
gtgggccataatttctcagccatgctttctgtactagaaaacaggagagatttatgcataggagtgggataagtggtttaatagattgttaataaaatacatatctgtttgttgtttttgttgttggtccttagggttcaattcaaacttgaatattccacttgtctgggtggtacagttgttagcttcagggagaaggtctgtgacaagtagaatttcacataaatgccaccacagtaacttttgaaatacttggcattagatttgggtcagttagtaggatttttagctaggctgttcactttcactttggaaggcaaatgccagatgtatgttattttctaggcaggtgctgaatttgagtcagctaactttgccagaatccccttaaagataaaatagcaagtaaagtcaggctgtttcca

SEQ ID NO: 29217 - DNA, 474 bp, Homo sapiens
  misc_feature (1)...(474): n = A,T,C or G
gggcgannnnnnttttgtcgacgtccatagtccgtgcggtggaattcggctggggtggagtgaacaaaagagggtgagaggaggtgagtgcagagatgatggggcaggttcacataggcccttgtgggccatggctgagagccttggcttctacctggagtgaggtgcagcaggcagacccctctgagggaaagagggctccaaagtgacaggtgttcatgggtccctgtggctgcatgttggaggaggacggggacagcaggtaagaggctgctgccgtagtgctggtggcagaagaagaaggatggaccaagatgagggcccagggtagcggtggggagagtgagatcctggaaatcttttggagatggagctactggacctgtgcattagaaggatgaggtgttcaaggctgtcacccagccccatccaggctgggatgatttgaggcagagcangctacagctccaggtg

SEQ ID NO: 29218 - DNA, 556 bp, Homo sapiens
  misc_feature (1)...(556): n = A,T,C or G
nttgtttgaaccatcagtcagcgcggnggaanncctgggtgcgggaagagggctcggagctgccttcctgctgccttgnggccgcccagatgagggaacagcccgatttgcctggttctgattctccaggctgtcgtggttgtggaatgcagacgccagcacataatggaaacaggacctgaagacccttccagcatgccagaggaaagttcccccaggcggaccccgcagagcattccctaccaggacctccctcacctggtcaatgcagacggacagtacctcttctgcaggtactggaaacccacaggcacacccaaggccctcatctttgtgtcccatggagccggagagcacagtggccgctatgaagagctggctcggatgctgatggggctggacctgctggtgttcgcccacgaccatgttggccacggacagagcgaaggggagaggatggtagtgtctgacttccacgttttcgtcagggatgtgttgcagcatgtggattccatgcagaaagactaccctgggcttcctgtcttccttctgggcc

SEQ ID NO: 29219 - DNA, 558 bp, Homo sapiens
  misc_feature (1)...(558): n = A,T,C or G
nttcgaccatcgatccactagtccgagnggnggaattccnctacatggatgagaacttcatctccagagcctttgccaccatgggggagaccgtaatgagcgtcaaaattatccgaaaccgcctcactgggatcccagctggctactgctttgtagaatttgcagatttggccacagctgagaagtgtttgcataaaattaatgggaaaccccttccaggagccacacctgcccaggaaactgaagctcagggaattgaaataacttgtccaaggcaacacagttacttagcttacagctgcaccagctggcacacctgggctcatagaaccatggagctggcagtgcccttagcggtcatccgtgcaaccccctcattttatacaggagaaaaagctgaggcttagagagggggagatgttttggccaaggcgaaacgttttaaactgaactatgccacttacgggaaacaaccagataacagccctgagtattccctctttgtgggggacctgaccccngacgtggatgatggcnatgctgtatgaatcttcgtca

SEQ ID NO: 29220 - DNA, 496 bp, Homo sapiens
  misc_feature (1)...(496): n = A,T,C or G
agggagcnagnnnncnnaggggngnnnnnaattgagnacccttgactgagnaccactaggccagngcggnggaattcctggcaccagttaactgtcttgtacttttttgctgaatttagcttcttgtagatttaacttattgctatgttaactatttattctcctcgttgccctgtaaggacatccgtgtatatttctgttacttcatccggtttgcaagttaaaggaacgacaatgttctctttgtttctttaagttttgccgagacatggttatgcctaatttatttataaaaggggaagtggaatcattaaagtaataataattattaataacagtaatggtagccgagtggcacgcgggggcgtgtgctctgcgggacagtccccacggccagcgacgtccaggtcaccaatgggattctttttgctcttgtcttgagaattttttcagtcctatttagctggtgaaatccctagcttgttcttgatacacg

SEQ ID NO: 29221 - DNA, 487 bp, Homo sapiens
  misc_feature (1)...(487): n = A,T,C or G
ggagggagannncnnaggggnnnnnaatcgagnacactactcgagngccgtgaanncgnccnggagagagcctgccctcgtttccaggctgcagccgtaacgcactttctcccaggctgagggcgggtgttctggggtgtctgccctctgtcggccctgcttcctgccaggacgtggcctcttccgatccttttctctcagacactggaggtctcttctgccattgtgctggtcccatcccaagaattgtaggacagagaccacactgggtcggcggacacaaagtccatccaggacccaggccgcagagggagcaggaagagatgctgatagtttgatctagaaaccagcagctactggctcaaattcaggttctggcgtcaaatagcgacatttccagtttctcttaaaaaccgtgtttggtttcagttgggataggcttgttttgtctgttgaaaatgtttctagttttttttctttcattttn

SEQ ID NO: 29222 - DNA, 557 bp, Homo sapiens
  misc_feature (1)...(557): n = A,T,C or G
ntattgancncttcggtccccagtccgngnggngcaattcgccacgctgcgccggcttcgggaggcgccgcggcacttactggtttgcgagaaatccaacttcggcaaccacaagtcgcgccaccggcatcttgtgcagacgcactactataactacagggtttcatttctcattcctgaatgtgggatactatcggaagaactgaaaaacctggtcatgaacactggaccctattactttgtgaagaatttacctcttcatgaattaattacacctgaattcatcagtacctttataaagaaaggttcttgctatgcactaacatacaatacacatattgatgaagataatactgttgccctgctaccaaatgggaaattaattttgtcactggataaagacacttatgaagaaactggacttcagggtcatccatctcagttttctggcagaaaaattatgaaatttattgtttccattgatttgatggaattatccttaaacttggattctaagaagtatgaaagaatatcttggtctttcaaagaaaagaagc

SEQ ID NO: 29223 - DNA, 556 bp, Homo sapiens
  misc_feature (1)...(556): n = A,T,C or G
ntttcggaccactagtcagtgcggtggaattcggaaactataaagcagagcagtggtgtctttagaggaaactcattcaagtcagggcactgattttcctctcagtttattatttggggggatagggtcaggtgggtatagtagtactttaccagggtgcttttaagttactttaaaaaaagcctacaaaatattttttttcttttatttgctcgagttcacattaatgatggtcacaaggctgccttgttgggcaggcgtattgcccccagttcctcttctgctggcctgtatgacctccacagccaggccctgggcccaagccccttgtcccttctccactgcccctctttccagacagtaaaggccatggtcagtgtgtttttctcttgtaaacaaaccccagcttgtttaacagaaatgctaataacctactgggaaagatggaggtctaaattacctccagggttttttctggggtttatcaccagtgtgggtcccttctgataccaccaggttcactccangcagagtgnggcggaggctgctgangata

SEQ ID NO: 29224 - DNA, 556 bp, Homo sapiens
  misc_feature (1)...(556): n = A,T,C or G
nttagaaactcgtaccactgtccgagnnggggaattcgtgcagagacgaggggcccagggaagtcttggattctctcgccatcttcaatgtcggagcccagacggggcaaggcgaggaggagcccggggcgaagacgccacccacattcctccttcccgcaggcttcttctccttctagcccttccaggagagaaaccatcccacaagtccagagtagtggcgtccccggggccatgtctcctgagcaaacactgttttctaggagtccgaggggcctcagccatctaggtcaatccctttgcagaacggtgaaggaatctgaagcccagagagggaaaacaatgcctcctgggtcacacagcccatcangggcagggcagggacgaacggcgagaaaaggaccagcgcgagaggagatccccagcagtgattcctcagccaagcccagcgtctacccacatccacacctcacagccacccgatggggaaggcaccattgccccttttcaaggtgagaaaacagaggctcagagaggtcagcaacttctcccacan

SEQ ID NO: 29225 - DNA, 561 bp, Homo sapiens
  misc_feature (1)...(561): n = A,T,C or G
atttgaaaaattcgaaccactagtccagagtggngcaattccagcacattccctaccgggaaaacaagaacctgaccggcacggcccgctacgcttccatcaacacgcacctgggcattgagcaaagccgtcgagatgacctggagagcctgggctacgtgctcatgtacttcaacctgggctccctgccctggcaggggctcaaagcagccaccaagcgccagaagtatgaacggatcagcgagaagaagatgtcaacgcccatcgaggtcctctgcaaaggctatccctccgaattctcaacatacctcaacttctgccgctccctgcggtttgacgacaagcccgactactcttacctacgtcagctcttccgcaacctcttccaccggcagggcttctcctatgactacgtctttgactggaacatgctgaaattcggtgcagcccggaatcccgaggatgtggaccgggagcggcgagaacacgaacgcgaggagaggatggggcagctacgggggtccgcgacccgagccctgccccctggcccacccacggngg

SEQ ID NO: 29226 - DNA, 518 bp, Homo sapiens
  misc_feature (1)...(518): n = A,T,C or G
ctttgttttggtttcttaggttaagatgctctcgagcgttgagcaggcacagctctgtcgaggtccctgtcccccacctgtggttctggcctctgaggttgggggactacttgtttcccaccccaggttcctccaggccaagtcatggggtgatgaggagttggggccctgtctgtcctatgcctggagagtgcctgtctgggaaaaggtcactggacctggaagggtccccagggtcccctgactcccgtctccatctgtcacgtggttcaccatcatcaggcaccaggcgcaaactgcttcccgctgttggccatcccttccccagccacaggtgtccctgcccccaggacagtccagggccaggggcttctgtgagaggcagagggggaccctcaccaaatcttggtggaagagccaggggctggtcccagaacaggcagtctcacaagcacgcagcacacttgagtggacgcctgtgcccacccgagcctgggagcatggcagagccagcttgn

SEQ ID NO: 29227 - DNA, 460 bp, Homo sapiens
  misc_feature (1)...(460): n = A,T,C or G
nattgatcccctcgnnnnnnncnnnattgatgacttttaatcagtgtggtggaattcctcactttcccaatctgcaaaacgggcagtcgtcctaccaggcagagtaggtgtgaggatgagatgatatctcagctgggaaggtgcccgaggtggtacctggccctccaggacgtggggaaggagctctctctaaagagggaagccacaggccctggaaccaatccaggaggctttctggaggtggtggctaggaaggttgaaagacttggaaaagggagaggcacctggggccagggcttggggagcacaagtcctcagggcgggccctccagcttggtccacgctccctttcctgcagggcggaagcaggggcttcctttccacctgttgttttcagctaataaatttggaatgtgccattccctccctccccggcacaagctgttccccaggtgaatgg

SEQ ID NO: 29228 - DNA, 453 bp, Homo sapiens
  misc_feature (1)...(453): n = A,T,C or G
attcgaagactattagnccagcgcggttggattcacctgctgtgaagtccctggaagtgattgtccgggccaacatcacagtgaagtcctccataaagaacttgatgctccgagatgcctccacagtgatcccagtgatggtatacttggaccccatggctgtggtggcagaaggagtgccctggtgggtcatcctcctggctgtactggctgggctgctggtgctagcactgctggtgctgctcctgtggaagatgggattcttcaaacgggcgaagcaccccgaggccaccgtgccccagtaccatgcggtgaagattcctcgggaagaccgacagcagttcaaggaggagaagacgggcaccatcctgaggaacaactggggcagcccccggcgggagggcccggatgcacaccccatcctggctgctgacgggcatcccgagctgggcn

SEQ ID NO: 29229 - DNA, 450 bp, Homo sapiens
  misc_feature (1)...(450): n = A,T,C or G
nggggaactgataccatcgaaactgatgccctacgganagncnggnggaattccttcaagaagtcactgccaaatccaacatcgtggcagttttccctgtgtttccttatgagaggtttaggtctcacatttaggtctttgatgtactttgcactgatttttgtcagctgtaaagtaggggccaatttcattcctttgcgtgtggatgtcctgtttcccagcaccatcggtggaagcggctgtcttttcccattgaggagtcctgccatcctggcacctgtgccaaagcccattcgaccttgagtttgagggtttatttctgggtcctcgcctctgttcccttggtccatacaccacctttatatcaggacggtgatgctttcattcctgtggcttggcagtaaaattttgaatcaggaaatgtgagtctccagcttcgttctttttagg

SEQ ID NO: 29230 - DNA, 549 bp, Homo sapiens
  misc_feature (1)...(549): n = A,T,C or G
agggntgcnnnnnatttgaanaccaattggaacaccagctccgngtggnggaattcgcctgacccctgagtccgccaagaccgacctgatgtttcttaagccctgcagcccttcgcggagtacggacactgagcacaacccctgcggggccatcgtcaccggttacacccaccancagcctgatatcatctgcaacggaagcattttgtccaacgagactaaacaccagcgagcagagctcagctatctagttgacaagacctcgccgagttaacagttctgcattccaggaagccgacatagtaagctttaaggaccgggggcatggagacagtgaacagggagatagtgatcatgatgccaccaaccgtgcccagtcagctggtatggatctcttctccaattgcactgaggaatgtaaagctctgggccactcagatcggtgctggatgccttcttttgtcccttctgatggacgccaggctgctgattatcgcagcaatctgcatgttcctggcatggactctgttccagacactgaggtgtttg

SEQ ID NO: 29231 - DNA, 509 bp, Homo sapiens
  misc_feature (1)...(509): n = A,T,C or G
atagaacaccttcgatccactatccagtgtggaggaattcgagacagggaatcactatactcagatgagattaccccattgtcacacaatgagtgcaaacaccgtcaagttcttatcctcattcagaatgaagatccttgacaattaagtaagcagaaaaaaccaacaaactaaccaacaccaacatagtaaaattgcatgtgacttgttttcaaaactaatctcagtttctcactttatatcgtcaacccagggccatgtctcactctggattaatgagatagttttcattttacctataaacttagaagtgaaggtaattaacacaatttccttgctcccttaaaaaatgtcacagatacaaattttaaaagtatacatgagatcatttaagtggatctagcaatcagaggagcagagctgtcattcacagcatcttgggcttgataggctaacttatttatagagtcgagctaatgaatactcgaanattgaagacttgcagagaa

SEQ ID NO: 29232 - DNA, 557 bp, Homo sapiens
  misc_feature (1)...(557): n = A,T,C or G
cgtnnnnnnnaaggggccnnnnnttggannncaattgaaccactatccatgtggtggaattcgagggcccagggactcatgggacacctttcccacagcctcctcgattgctgtgagcagaggccactcggagttaggggcatgggcaatagcaagctggcggcagagtccagcccagcatatgacttgccctgaatgggaagctgctgaaacgggtgcctttgggtggtggtcggcttgcctctgaggccaccacggcaccagcagaatacgtatttcttctccttggctgcattggtttgtcgatctagttcagttcaactcagtggatgttctctgaatgcttactgggtgccaggaccacagagagatgttagtcactgcccagttcttagagccccaacacagataccctcatcccagggcccccagacacacccctccgctggactcacaactgtctggagtttctgtctgatggatggtgtgctttcatatgccactggcttccttggacatagatcagacaaaagccccgggaatctgttggtagcagg

SEQ ID NO: 29233 - DNA, 555 bp, Homo sapiens
  misc_feature (1)...(555): n = A,T,C or G
tgggtgcnnnaggnnnnnnntttcgaaccacattgagtgtgctggaattcaggaagagtccaagcctgaataataacaccccacagcctctctgtgcacttgctgtctgcggagccagtgtgccattctctgcacatgggcagccagcctgagctgcctcctccatggctttcctggtttgttcctctcttccactgaagctgacttagccggccccttttcagtgtagaccaccagctcccctccccatctccttgagtcagcagactgtccaatgtgctcagccaggctggaggcggcaggcggcaggcagcaggctgtggaggaggcccctcggtcagggagcggcctgcctcacccctgaatagctccttcggccccatctccatcctcagcagatgacactgattggcctcacggggacttgtgtaagcaacaggcggcattcaggactcttctcaaccctgctgttcagacttgataagatctcagagtccacaggaaagaagtcactgttgcaataaaagcacccgtagtagcaaaaacataaaacan

SEQ ID NO: 29234 - DNA, 556 bp, Homo sapiens
  misc_feature (1)...(556): n = A,T,C or G
tgtcctacnnnaggnnccnnnnnattgannncccctcgatccactatccgtgtggtggaattctctgcagtgacccagcccaggacgaagtttacaaacacctcctgganacgaagctcccgcctgcatgtcaccttgatgggggctgtgagtggggcagtgtgatacccagtgactagacgcactctgcgttttcccgtgtttggggctgaggcctgctggacagatggctggccaagtgggagcagaccctagggagtttgcacctcggctgggccggattcggaccggctctgtgttcactacactcagaatagcctggctgcttctctgtctccgagaccggaggtagtgggaaccaacagctgggctggagagttggtgctggcaaaacagtccttcccctggggccggttcttacccaggtccagagaaaccaacgcgggatgtcagacttcaccaaaaggactttctggttgcccctggctggcttcctggaggcgttcgcctctagtttctcagggatggagcgagagcccagccagagaacagtaag

SEQ ID NO: 29235 - DNA, 536 bp, Homo sapiens
  misc_feature (1)...(536): n = A,T,C or G
aggaagcctgtgaggcgtgcaattcgattacatcctgaagggaaagttaccaagagaaaacacgataatgaaggttctggaagcaaaaggcccaaggtggagtattcagaagaggagctgaagacccacatcagcaagggtacgctgggcaagttcactgtgcccatgctgaaagaggcctgccgggcttacgggctgaagagtggtctgaagaagcaggagctgctggaagccctcaccaagcacttccaggactgaccagaggccgcgcgtgcagctgcccttccgcagtgtggccaggctgcctggccttgtcctcagccagttaaaatgtgtttctcctgagctaggaagagtctacccgacataaggcgagggactttatgtttttgaggctttctgctgccatggtgatggtgcaccctcccactttgctggcctttacttactagctgaataaagagccctatgtttgtctttgngccctgngcntnccctcggtgaccgcacattgtttgatatgaacagcggccgcc

SEQ ID NO: 29236 - DNA, 471 bp, Homo sapiens
  misc_feature (1)...(471): n = A,T,C or G
tgggtncnnattgatcgacgtccactagtaccgtgcggtggaattcgtatccagctcagagcagctgcagtcctgccaggcggagatcatcgagctgagacgcacagtcaacgccctggagatcgagctgcaggcccagcacaacctgcgagactctctggaaaacacgctgacggagagcgaggcccactacagctcccagctgtcccaggtgcagagcctgatcaccaacgtggagtctcagctggcagagatccgctgtgacctggagcggcagaaccaggagtaccaggtgctgctggacgtgcgtgcccggctggagtgtgagatcaacacgtaccggagcctcctggagagtgaggactgcaagctcccctgcaacccatgcgccaccaccaatgctagtggcaactcctgtggaccctgtggcacctctcaaaagggttgctgtaattgaaaagcttgtatctt

SEQ ID NO: 29237 - DNA, 455 bp, Homo sapiens
  misc_feature (1)...(455): n = A,T,C or G
gcagatcccagcagcncccccactgatacccacttangaccctcgcacangcggnggaantcccgccacatgagcttttctgccgggaatccctggggagaacgcatgttttatgggcgtttccaagagcgcgcgtgcacctccagacggggagctggcgggcgggggtggcagcagcagctctagccttggggggacaagcctctctcagctacgccaggggaaaagagagttaaggacactcacccccacccacgcacacacacaaggcagcgtcgggtgggagagagaaggccgtttctccttctgtagcctgggtctcccacgggccttccccgctgctgagcgagacaccagtagccaggtgaagggccacagcgggccaggccccgaccctgttgtgacccacctgggcaccttcccggaccagctccgcctcccctgccctcctctct

SEQ ID NO: 29238 - DNA, 462 bp, Homo sapiens
  misc_feature (1)...(462): n = A,T,C or G
cggccgcaattgacncccctnnnnnatttgatgtcccttataccgtgtggtggaattcgcgctctccggaaaggaggcagatgcagaggcaaaccacagggaagctggaaaagaagcggccctggcagaagtggctgacgagaagatgcttagcgggctcacgaaggacctgcagaggagcctgccccctgtcatggctcagaacctctccatacctctggcttttgcctgtctcctacatttagccaatgaaaagaatctaaaactggaaggaacagaggacctctctgatgttcttgtgaggcaaggagattgagttcactatggagaagtcagcagcaggaggcccatcccttactcagttgccgggacatccccagtctcgggggaagaagatgccatgggcttatacccaggctgtagccaactaccaacgtgcctgtttgtttgttgctctttccn

SEQ ID NO: 29239 - DNA, 457 bp, Homo sapiens
  misc_feature (1)...(457): n = A,T,C or G
aggcgcgcnnnnnnnaaaaggatagcngacntctgaccagncnggnggaattncacatgggctgtctggaggtgcaccctcactcttcctgaggactgcggttccttctccatcactggttcattctgcatggtgtgacccaccacggctctggagtcggatttccacccaggtcattcagctgagacctgcgcttcccaggcctacccgtgacatgtgctcagttacctgagctgctggtggtcactcatgtggctatagcctgctgcctggaggccaggcctcccgctttccctgcctccccctctcctcaccacagcctgttgggatggaacaggacaggggtgagaccgtggtgctttcacactcagcctccatggacatcctgtcattcccacccagggaggtctggtccccaccctgggtgtcccagcctagctccgctacgagtgtgagg

SEQ ID NO: 29240 - DNA, 453 bp, Homo sapiens
  misc_feature (1)...(453): n = A,T,C or G
aatgatgaccatctgnccattgaggngcaattcaaggagaaaccctgtctctactaaaaatacaaaaaattagccgggcgtggtggctcatgcctgtaatcccggctactcaggaggctgaggcaggagaaaggcttgaacccgggaggcagagattgcggtgagcggggatcatgccattgcactccagcctgggcaacaagagtgaaactctctcaaaaataaataagtgaaataaaatttttcttaaaatatattttaaatgtcaaattgctacactaaaaaagacaccaaggtagagatttttataggtgaaatctatgaaatgtcttaggaaactcttctaggacatagactgagatagcaaattatctatttttaaaatttgtcataatcctgatgttacaacctactagaacccaaaacaatttgtccagaatcagttatgaaaat

SEQ ID NO: 29241 - DNA, 439 bp, Homo sapiens
  misc_feature (1)...(439): n = A,T,C or G
agaggccagcttccncncctttangcatagataccttgcaatccaaataggatggattaataggtctgcctcaaatgagaatcaatccttttagaaaacctttatactaagcctcctcttcaaaattcacagtggcgattagcggactggagtctggtggcgattancggactggagtctggggacatccgtggcaaagacaccagctcaactttagtgcttcccaactttatttagaatgacatggggtgggtgtctggtgtgtgtgttttccctacgcacctcccatagctattaacaactgaggaaggccactgcagaatatttttggagaacgattttttttttaaataatatatcattcctatggggggaaagccttttttttctttttggctgagttattccctccctcccctcaataccctcagtactgacn

SEQ ID NO: 29242 - DNA, 476 bp, Homo sapiens
  misc_feature (1)...(476): n = A,T,C or G
gccgccagccnngnnnnncctagatattcgtttgcagtgtgcaggaattcggagcccggcccttgggcactggtgagcgttggaaccttgtcgtctggctccgagcctctgctgtgcgcaacagcctctgtcccatgtgctgccgtgagcccgacctggtggacgatgagggcttcggtgatggcttcacccgagaggagcccgccacggtggatgtatgtgcgctcacctgagcttgcttgggcccagtgtgggggtggcaggcaggtgagggctccgttgccttggtctgggggcagaaataaaatccccgcagcctactgcacttcttggctcaacggtgtgccagcttctgggtcattctatgggcaaagatgctgccttagttcaggtttgtcagaagcagggtctggaatggggcttcagcgagggagtcagggaagcaggggaggggagggagcagctgggcaagggag

SEQ ID NO: 29243 - DNA, 459 bp, Homo sapiens
  misc_feature (1)...(459): n = A,T,C or G
gggagtcnccaaggagnnccnccaactgatantcattgagtgatctagcacangcggnggaattcgtggggttccgcggaaggttctggaggggtcttggtatgcctgcattgaaccgttctgaggatggagtggggtcccatggtgcaggtctctgagcaaggcggaggtgtggaggagaggccggcttggggtggggcctcgcgccctagtgccggccggcctcagcccggctctgcctggagctccctgcagagccttctccatggccccgccctccccgcgtgtgcgccatgcttggggtccccgggagagcagagcttgcgcctcgggcataaggacgtggggtgcaggcgccaacatcagtggcagcagccagggccgtggtccagtcccactctgggatggagtgggccggcggccaaaccagtcactcggggaggaatgcggaggagcgct

SEQ ID NO: 29244 - DNA, 462 bp, Homo sapiens
  misc_feature (1)...(462): n = A,T,C or G
ggcgggnnnnnnnnagcctgaatccctccgaagnactgagacatccgaagnncgctcatnacatagaggtgcaggtgaggtgtattttcatcacggtggaaaattctggctgcttcatctccatctctagagccaatattggagcttttcaataaaagctatggcctcaaccaccagcaccaagaagatgatggaggaagccacctgctccatctgcctgagcctgatgacgaacccagtaagcatcaactgtggacacagctactgccacttgtgtataacagacttctttaaaaacccaagccaaaagcaactgaggcaggagacattctgctgtccccagtgtcgggctccatttcatatggatagcctccgacccaacaagcagctgggaagcctcattgaagccctcaaagagacggatcaagaaatgtcatgtgaggaacacggagagcagttcca

SEQ ID NO: 29245 - DNA, 447 bp, Homo sapiens
  misc_feature (1)...(447): n = A,T,C or G
gaagagccngttttganncccacatgagtccctagtanagagcggnggaattcccaccacaacagtgtggagaggtatgagccagagcgggatgagtggcacttggtggccccaatgctgacacgaaggatcggggtgggcgtggctgtcctcaatcgtctgctttatgccgtggggggctttgacgggacaaaccgccttaattcagctgagtgttactacccagagaggaacgagtggcgaatgatcacagcaatgaacaccatccgaagcggggcaggcgtctgcgtcctgcacaactgtatctatgctgctgggggctatgatggtcaggaccagctgaacagcgtggagcgctacgatgtggaaacagagacgtggactttcgtagcccccatgaagcaccggcgaagtgccctggggatcactgtccaccaggggagaatc

SEQ ID NO: 29246 - DNA, 444 bp, Homo sapiens
  misc_feature (1)...(444): n = A,T,C or G
tatgtcttatcgacatgagagcattcgnncgccancaggctttgaagaaaggggacattgtggcccgagacgaggtggagagcctgatgtgtgagaagcggatattggcggcagtgaccagtgcgggacaccccttcctggagaacctcttcggctgtttccagacaccggagcacgtgtgcttcgtgatggagtactcggccggtggggacctgatgctgcacatccacagcgacgtgttctctgagccccgtgccatcttttattccgcctgcgtggtgctgggcctacagtttcttcacgaacacaagatcgtctacagggacctgaagttggacaatttgctcctggacaccgagggctacgtcaagatcgcagactttggcctctgcaaggaggggatgggctatggggaccggaccagcacattctgtgggaccccgn

SEQ ID NO: 29247 - DNA, 454 bp, Homo sapiens
  misc_feature (1)...(454): n = A,T,C or G
cttgaccccctcnnnnatgangtcctctgnccacgcggnggaattcgtangagcttggggtggaagagggacagccggctgggccacctgagcagaaggtggtaatgaaacacctcagctgggctcttgggagaccttatgaagcaggagaggcaacacctctggctactgatggtgtggcaagttcagaaaaggtggtggtggggtaggcgtgatgtcagcagaagccctgcaggctgggtgggcaggacacgtggtgggggccactgaaaccaggcctaggagggagaacaagttccaaaggtgccgactggaagaagggggtaaaagtttgctttggggagtgagaaaaggctggggcgtgtgatccatcccctcacgtttcagaacttccaggctttctacctcgactctcaccacagccagcacatacacctaggctggttttccttcn

SEQ ID NO: 29248 - DNA, 455 bp, Homo sapiens
  misc_feature (1)...(455): n = A,T,C or G
gaaatgatacatccgannnaatgaggaccttagtacagngcggtggaattaccaggtgcctgcgctggggcctgagccgagccggagtctggctgctcccaccgcccgcacggtgcccacgccgggcgctgcacaagcagaaagacggcactgagttcaagagcatctacagcctggacaagctctaccccgaatctcagggctcggacaccgcctggagggtcccgaatggtgcaaagcaagccgacagtgacatccctctagatcgcttgacaatatcttattgtcggagtagtggtcctggggggcagaatgtgaacaaagtgaattccaaggcagaagtcaggttccatttggcaactgccgagtggatcgcggagcccgtgcggcagaagatagccatcacgcataaaaacaagatcaacaggttaggagagttgatccttacctctgag

SEQ ID NO: 29249 - DNA, 447 bp, Homo sapiens
  misc_feature (1)...(447): n = A,T,C or G
gcagtgcccnctttgaacccccttttgatcatagtanagngcggcggaantctggaatttttatagacagcacctcagtttctgactccagccgcacacctcctgcctctaccagcaggggttgccgccagaccagagcgagggccaggtccctgcgtccatcccccccggtaggatggacgtgagccatccttctaggggacttttttcagtgtgcgactcgtctctgttaggtggtaggagccagtttgtgtggcctgtgccacgctccacagagcgtggctgggctctgtgtgtggcctgtgtcccctgtccctgcaggacccagcaggcatcgtggcgtgacagctgtgtccaagccactgcccgggcatcccatcacccaccagggtgcacggtctctcctgctgggggctttctgtcgcatgtgtgtctcctgtcgactct

SEQ ID NO: 29250 - DNA, 448 bp, Homo sapiens
  misc_feature (1)...(448): n = A,T,C or G
gggcggcnnnnnnnaaagactgcagacatctgcggncnnttncgcatgctgctgctcagcggagccctggtcagtgggccctacacactcatcaccaccgccgtctccgccgacctggggactcataaaagtctgaaaggcaacgcgcacgccctctccaccgtgacggccatcattgacgggacgggctctgtaggagcagccctgggccccctgctggctgggctcctctccccgtccggctggagcaatgtgttttacatgctgatgtttgcagatgcctgtgccttactgttcctgatccgcctcatacacaaggagctgagctgcccagggtcagctacgggggaccaagttccatttaaggaacagtgacaccccaccccagtcccgtggagggggtctgggcccacccttcacaactgcctttcaaggacagttcagacaa

SEQ ID NO: 29251 - DNA, 457 bp, Homo sapiens
  misc_feature (1)...(457): n = A,T,C or G
tggagtcccccaagcagggccccnccagggangcattgagaacctgtggaanncaccatacttatgaaaagccaaggagcacctaaaatccccttatgtaaccccagagatatgtatgtcccactgacatttgggacacaccaacttgcagcatctattctggagtggagaatcatctaattattccgtcctcccatccctatcctcccagaccaaagacctaaaaatcatgagagcagtaagactgcatagtggaaaccacattagaaacttattgcatttgtcacctctgaaccacaaagtagatttttttctttcctagttagaggcatggagctttacatatgacaagtgttctctcatttgttaccctgcccactaagttcaataagtctctacatgattggattctctttacaaagcaacttaaacgaattgcagttatgatatcaaggaa

SEQ ID NO: 29252 - DNA, 542 bp, Homo sapiens
  misc_feature (1)...(542): n = A,T,C or G
aatggtanatattcaganggcgttgtatggccctctggccaggagatccgcccccaggactgccccatcagcagagtggacacgtttccccagcccctggccgcccctcagtgccacaccctgctggcccctgaggtctggaaatgtgactctcagcctgccttgaccccttccccgtgtgcctttttctgacccaaatctcatggtttctggggccaaaattccctttcctgcctcccaatagctataaaaaattggtaaagccaagcataatgaatggaaaagtttcgccaaatatgtgagtcacttttctttttcttgggtagatggaagacaatgaaatgagttgttcaccttaacccattacggtgttgttctaggtttggagatagagcagggagcaaaacagaaatatcttggctctcacagtacttccagtttggaaaagaggcaacaatcaaaacagtctctggcaaactgatacaactcagaaactgctcaatgtcaggaaaaccggaactttgtgatgaacttgtttcana

SEQ ID NO: 29253 - DNA, 471 bp, Homo sapiens
  misc_feature (1)...(471): n = A,T,C or G
agggcggggnnnnnnnggaactgagagcttcgnaannacttgagatcctgnacagncggnggaannnntngaggaccggggtcggcacaaccatggcgggcgcgttggtgcggaaagcggttgactatgtccgaagcaaggatttcccgcactagctcatgagtacgcacttctggggcccagtacccaactggggtcttcccattgctgccatcaatgatatgaaaaagtctccagagattatgagtgggcggatgacatttgccctctgttgctattctttgacattcatgagatttgcctacgaggtacagcctcggaactggcttctgtttgcatgccacgcaacaaatgaagtagcccagctcatccagggagggcggcttatcaaacacgagatgactaaaacggcatctgcataacaatggaaaaggaagaacaaggtcttgaagggacagcattgccagctgg

SEQ ID NO: 29254 - DNA, 474 bp, Homo sapiens
  misc_feature (1)...(474): n = A,T,C or G
agttagtagaagggnnggggnaactgatgacctgagtacgtgcggnggaattcgatcctcccacctatgcctcctaagtagctgggaccacagacacacagacgtgcaccaccatgcctggcgaagttttgtatttttggtagagatggggtttcaccatgttgctcaggctgttctcaaactcctgagttcaagcgatctacctgccacagcctcctagagtgctgggatgacaggcatgagccaccgcacccagcctctgcgtggggtttcgtcagggctgggtctgtgccctgaaggggagctcattccagcccagctccccactgctgcagcttgtgtgtggactcctccagaaggggagcgggagtttccctgtaggagtttatcatccatggtgaggagggcagcagggggcactatttcctcagggtgaggtctttagttaggcctctgagcccaagctaagccatc

SEQ ID NO: 29255 - DNA, 457 bp, Homo sapiens
  misc_feature (1)...(457): n = A,T,C or G
catgctgccctccgnntaatatggtcatctgaccgncnggnggaattcggncaatttgccatcatcccacccctcagtgccgttggtggttgcctgacgaatagctgcacttaatagaaatcactgtggatgcaggagatggacggtgatgagctcaggaccagccagcaaccccatcaggcggtaatgcctaccatggtcacccatgacttcctctcgccactgctcggagctcctgcaaagccacaggcaacaacacatttctgctccgtacgagaagctcctattgtaagtcggtgacatggctggggttttctctcagcaaatattgagcaaacactgactgtgccaggtgatgtgctgggtcccaaacccttcccagacccagccctggcactcacggagatccagctaggaagtccgggaaaaggtcatcggggaaataaacaaagtcaag

SEQ ID NO: 29256 - DNA, 447 bp, Homo sapiens
  misc_feature (1)...(447): n = A,T,C or G
cattgacgatcgatgaactcttagngagngcggtggaattcgcggatggtccccaccatccagaactccatgaagcccttcaaggggagtggctcatgtgctcttgcagctggggtggctggggagtgaccaggagcatggctagctgaagggcttgtttctgcaggacatggactactcacgcatcatcgagcgcctcctgaagctggcggtccccaatcacctcatctggctcatcttcttctactggctcttccactcctgcctgaatgccgtggctgagctcatgcagtttggagaccgggagttctaccgggactggtggaactccgagtctgtcacctacttctggcagaactggaacatccctgtgcacaagtggtgcatcagacacttctacaagcccatgcttcgacggggcagcagcaagtggatggccaggacagg

SEQ ID NO: 29257 - DNA, 472 bp, Homo sapiens
  misc_feature (1)...(472): n = A,T,C or G
aggcgcggnnnnnnnngggcctgagagcatcngaannactgatgaccatncgtacangcggnggaattccccagtgtgactgcatagcagtgttagctggttggtttcaaactactggattccaggcaaaggcctacagattgaccttattatttttgaaaatatgttaagggttttttcatagagagagaaagaatggatttttttttaactgggaacctcctgattcttacggaaaattatccttctataagaagataccagagagatttattcaaggtaatttgataacctaaaatcaattctccattttttatcatatgtgggatttgttgctaagtcgtgttcaacaatagcttttatgttcctaacatatctgaaagcttatttatgaatggatatactggattattgatatactgattttttttttaatggggacatttgccattttcttcccagaaatatgtaa

SEQ ID NO: 29258 - DNA, 463 bp, Homo sapiens
  misc_feature (1)...(463): n = A,T,C or G
ggggcaggnnnnnnnaggcctgatagcatccgaaggactgagaccactcgaaggtcatggagcgatacgcccccatcgcgaaggacctggcgtctagagatgtggtgtctcggtggatgactctggagatccgcgaaggaagaggctgtggccctgagaaagatcacgtctacctgcagctgcaccacctacctccagagcagctggccatgcccttgcccggcatttcagagacagccatgatcttcgctggtgtggacgtcacgaaggagccgatccctgtcctccccaccgtgcattataacatggacggcattcccaccagctacgaggggcaggtcctgaggcacgggaatggccaggatcagattgtgcccggcctgtacttctgtggggaggccgcctgtgcctctgcacatggtgtcaaccgcctcggggcaaactcgctattggacctggttgt

SEQ ID NO: 29259 - DNA, 498 bp, Homo sapiens
  misc_feature (1)...(498): n = A,T,C or G
tggtgcaggggnnnnngtttgagaccatactgagtgccgctggaaacggccaacatggtgaaaccccatctctactaaaaatacaaaaattagctggacatggtggtgggcgcctgtagtcccagctacttgggaggctgaggcaggagaattgcttgaactcgggaggcgtaggttgcagtgagccaagatcgcaccactgcactccagcctggcaacagagcaagactcctcaaaaaacaaacaaacaaacaaacaaactctgatcattcacccggtgggatccccggcagctccttctccttcccgagctgtggctcatgggccattggattcagagaccttgagctgggtgctggctgccctaaaggagcacgacccctccagcctggtgaccgggaggcagagaagtgcagctgtccttgacaaaggcccagcctctgctgcctcaggccagactggccacaccccgatgccacagtcatctgccccgcccag

SEQ ID NO: 29260 - DNA, 474 bp, Homo sapiens
  misc_feature (1)...(474): n = A,T,C or G
gatggaaaactcgagttcgtatgcagtgtggtggaattcgctctttttgctacagaatctgactctgcaagagattaccttctccttctgccgtctgtttgagaagcgcccagcccaatttctgcctgagatggttgctgctatgaagggcaactccacactgaagggcctccggctgccagggaaccgcctggggaatgctggcctgctggccttggcagatgttttctcagaggattcatcctcctctctctgtcagctggacatcagttccaactgcatcaagccagatgggcttctggagttcgccaagcggctggagcgctggggccgtggagcctttggtcacctgcgcctcttccaaaactggctggaccaggatgcagtcacagccagggaagccatccggcggctccgggctacctgccatgtggttagcgactcatgggactcatcccaggccttcgcagatan

SEQ ID NO: 29261 - DNA, 452 bp, Homo sapiens
  misc_feature (1)...(452): n = A,T,C or G
ttttgagactctcganaggcggngnatgagtacctatgaaangcgccattcctcagtatctgtcctcttcctgttagtgttttacaattcctttctccttaatttttctccgctttacaaaatgtcacacagacaagtgcataatacttaaacaagcttttaaaaataatgctcataaatagctttggttctgtcataatattcgtatttataaacattttaagtcaattctcttcttttgttttcatttcagaaatatccatgtcctgaataaaagttgtgtcttgattagtttattatgtaacaatttagtgtgtttgacatttctaacttttatttctaacatttgctttattatagaacaataaacatgcagtgattgatttttcttacttcaagtggatgagtgagcaagtgactaaaatcttccgtgaattcttcagtgaatggtg

SEQ ID NO: 29262 - DNA, 463 bp, Homo sapiens
  misc_feature (1)...(463): n = A,T,C or G
nttttgatagccttcgaannnccnnntactgttgctctcgcacagncngnggaattncagaatcacaaatgcacacaactcttcttttatttccaacaagtttgccaactttggtagcttcttgcagcagtttctgaagttgcggaaggcacagaccagcacagacgccccgaccagtgcgcccagcgccccttccagcacacccacccccagcgctgggaagaggtccctgctcatcagcaggcggacaggcctggggctggccagcctgccgggccctgtgaagagctactcccacgccaagcagctgcccgtggcgcaccgcccgagtgtcttccagtcccctgacgaggacgaggaggaggactatgagcagtggctggagatcaaagtttcaccctcagagggagccgagactcggaaagtgatagagaaattggcccgctttgtggcagaaggaggt

SEQ ID NO: 29263 - DNA, 453 bp, Homo sapiens
  misc_feature (1)...(453): n = A,T,C or G
tttgaagccatagacaggcggngttggtgtacatcgacaacccgaacagagacctncgatagaccacgcggctttcactctttggtgtctcctctttatgcagtatagcatcagtgatgtcacgtttggagcaggggtcagttacatcgggacaccacggactccgtcgtcagccaaaggcaagttcttggtgtccttctgggctgatagatgcactgcctttgaggttctgggaaagctgaatgtgtttgtttgactcccttttagagaaaattgaaggccggagtcaaggaaatgacatcttatgtttatcactgcctgataaaccgcccccacagcctcagcagtggaatgtgcggtctcccgccaggaataaagacactccagcctgcagcaggaggtccctccgaaagacccctctgaaaacagccaactaaacagcgcctcccaccg

SEQ ID NO: 29264 - DNA, 452 bp, Homo sapiens
  misc_feature (1)...(452): n = A,T,C or G
ntaggatgccatagaaaggcgggttggattacatcgtaagncgcaaaggacctgctatccctcttgctcatcttctcctgaaagacaggtggcagagctgccatgctgcgaagcaccctatgcggcaaggggcccagggagtacccctgtcaacagccagcaaggaactcagaccctcagcccaacaagccacagctgaatcctgccaacagtcacatgagtagatttggaaacaaatcctctgccacctctcggaaagtcaagccttgaaatgaatgcagccccagccaacagtttcagcctgggaatggccctgtgcagagatactcagctaaaactgtagttggagtcataagtcagagaaactatgaaatcataaatgtacattgttttaagttgctgagtattggggtggtctcttccatagcaataggtaactgagacacatatcc

SEQ ID NO: 29265 - DNA, 465 bp, Homo sapiens
  misc_feature (1)...(465): n = A,T,C or G
ntttggatagcgtccganannccnatactgatagcgtccgcanagncnggnggaattnggacaatatggcgaaaccccatctctacttttaatataaaaattaagggccggtcgcggtggctcacgcctgtaatcccagcactgggggaagccgaggcgggcggatcacgaggtcaggagatggagaccatcctggctaacacggtaaaaccccgtctctactaaaaatacaaaaaattagccgggagtggtggcgggcgcctgcagtcccagctgctggggaggctgaggcaagagaatgacttgaaccggggaggcggaggttgcagtgagccgagatcacactactgcactcaagcctgggcgacaaagtgagactccatctgaaaaaaaaaaaaaaaaaaacacctctgcccacccgtatttgaaaaacatgtttcctccccaggaatcctggtgggtttt

SEQ ID NO: 29266 - DNA, 454 bp, Homo sapiens
  misc_feature (1)...(454): n = A,T,C or G
ntctgtagcccttcgaangcgnngtttgaggacctcggaagacacccngaanaacatcatcaatagctccgagggctctatctcgggctcggggcacaagcactgctcccgcaactggccgccccaccggtcggaagccactgacctgcaccgtcactccttcgcggagtccctgaaggtctaccccacgcagggccgcaggagcccgcaggagggcggctcccacgtgggcaggagactgctggagcagtcagccgagtccttcctccacgtgtcccacagctcttcggacatccgcaaggtgaccagcgtgaagcccctcaaggccatcccctgcagtagctctgcccctcccctgcctcccaagcccaaaatcgcagccatcgcctccatgaagtcccccgaggccgaccctgtggaaccagcttgtggagtcagccgaagacccttcctg

SEQ ID NO: 29267 - DNA, 466 bp, Homo sapiens
  misc_feature (1)...(466): n = A,T,C or G
tttttgatccccttcgaannncnnnnattggttggtcttcgcacagncnggnggaattccagcaggttggctcacagcagaaggcaaattccatcatcagctccctttataattgaacggtcatgcactgggtgtgctgagagtgtcctgcctggtcctctgtgcctggtggggtggaggtgccaggtgtgtccagaggagcccaatgggcagtgaggcagccatggggctggatgcactggtgcccctggcagtgacagtggccatcttcctgctcctggtggacctgatgcagcagcaccaacgctggactgcacgctacccgccaggccccctgccactgcccgggctgggcaacttgctgcatgtggacttccagaacatatacaccttcaaccaggtgagggaggaggtcctgaggatcccccaccaccagcaaacatgggtggtgggtggagccacagtg

SEQ ID NO: 29268 - DNA, 467 bp, Homo sapiens
  misc_feature (1)...(467): n = A,T,C or G
tggttccnaatcgatgtccatactccgtgtggtggaattcgaaataatggtcacaaatgaaaacaaaagggaatatatcgacttagtcatccagtggagatttgtgaacagggtccagaagcagatgaacgccttcttggagggattcacagaactacttcctattgatttgattaaaatttttgatgaaaatgagctggagttgctcatgtgcggcctcggtgatgtggatgtgaatgactggagacagcattctatttacaagaacggctactgcccaaaccaccccgtcattcagtggttctggaaggctgtgctactcatggacgccgaaaagcgtatccggttactgcagtttgtcacagggacatcgcgagtacctatgaatggatttgccgaactttatggttccaatggtcctcagctgtttacaatagagcaatggggcagtcctgagaaactgccca

SEQ ID NO: 29269 - DNA, 455 bp, Homo sapiens
  misc_feature (1)...(455): n = A,T,C or G
ntcggtttgacatcgcacaggcggnggtgatcccattctaancgacgagagggcttataagttggtgatttacctgatgattattttctacgagaagatccccatttagcgcgcagacatgctgaaggatgtcatgagagaatatgatgaacatttccctgatatcattgaacgagcaacgtacaccctggaaaagaagtttgggatccacctgaaggagatcgacaaggaacaacacctgtatattcttgtctgcacacgggactcctcagctcgcctccttggaaaaaccaaggacactcccaggctgagtctcctcttggtgattctgggcgtcatcttcatgaatggcaaccgtgccagcgaggctgtcctctgggaggcactacgcaagatgggactgcgccctggggtgaggcacccattcctcggcgatctgaggaagctcatcacag

SEQ ID NO: 29270 - DNA, 454 bp, Homo sapiens
  misc_feature (1)...(454): n = A,T,C or G
tttggattcccttcgaagncggngtnatataacattgaaaggccncnncattcacaaaaccaggagctgatactggctgtctttcaggacttcaactgacctgttggctggaacctgtccatgtggcccctcgcaatctccccatttgggctggtttgggcttcatcacagtccagcagcttacttctaagtgcaagcattccatgacaacacagcagaaaggcatgacatttttacagtgcagcctggctatctcatagcgtcgcttctgtcctactttatttattggtcagggcaatcacaaagatgtgcataggctcaaggaaaagagacatacccccgaccacgcgatggaagaagtgacaaggtcatgttatgagaggagtgtgtgggatgggagatagggctgtggccacctgcagaaaatagcatctgccacaggctgtcatggaag

SEQ ID NO: 29271 - DNA, 557 bp, Homo sapiens
  misc_feature (1)...(557): n = A,T,C or G
cgatagatcccctgnttcgagtggnggatagaatgcgcgttgggaacggntgtangacgtggctctttattcgtgagttttccatttacctccgctgaacctagagcttcagacgccctatggcgtccgcctcgacccaaccggcggccttgagcgctgagcaagcaaaggtggtcctcgcggaggtgatccaggcgttctccgccccggagaatgcagtgcgcatggacgaggctcgggataacgcctgcaacgacatgggtaagatgctgcaattcgtgctgcccgtggccacgcagatccagcaggaggttatcaaagcctatggcttcagctgcgacggggaaggtgtccttaagtttgctcgcttggtcaagtcctacgaagcccaggatcctgagatcgccagcctgtcaggcaagctgaaggcgctgtttctgccgcccatgaccctgccaccccatgggcctgcttgtggtggcagcgtggccgccttctgagaagtggccctcccttgtgccactgccaggggaggaaaggncttgatgtccagacan

SEQ ID NO: 29272 - DNA, 468 bp, Homo sapiens
  misc_feature (1)...(468): n = A,T,C or G
ntttgattcccctccgannnnncnnnnntcttgatgacctcgagacagncnggnggaattccccggctcgagcggcctggtgggcgagatcatcaagcgcttcgagcagaagggtttccgcctcgtggccatgaagttcctccgggcctctgaagaacacctgaagcagcactacattgacctgaaagaccgaccattcttccctgggctggtgaagtacatgaactcagggccggttgtggccatgatggagtctcactctgtcatcaggctggagtgcagtggagtgaactcggcttactgcaacctccgcttcccggttcaagcggttctcctgcctcagcaccgcccccccaagtaggtgggactacaggcacccaccaccacgcccagctaatttttgtatttttagtagagacagggtttcatcatgttggccaggatggtcttgatctcttgaccttgtga

SEQ ID NO: 29273 - DNA, 486 bp, Homo sapiens
  misc_feature (1)...(486): n = A,T,C or G
ggagtgcccnnnaaggccgccactgagaccctaggaactgagaccatcagnccangcggnggaattcctgccaagttctctttctcctggtctctcctaagtgtcttttccagctgacttcttccagacaggacctaaacaaggaccacattttcagtctctttgcctgtgagttccctgtctctccccacccgcatcatttatttgttgaaaaataggttgctgcctgctgtacgagtcacctgtgtcctggactaggctgactgcatccccgtggtgccgtgtgacatgttcctctgttccctgcatctctgggtgggcaaagctagaagcgtggtcagattcctagtggggtctggcgagcatccacctccatgagctatgccctgccccttcctgctcctgcttcctgcactcccaccctcttttccccatccccatcctcctgcccctcccattctttcccctggattcgtctttcccatn

SEQ ID NO: 29274 - DNA, 472 bp, Homo sapiens
  misc_feature (1)...(472): n = A,T,C or G
gccccgccatagaagaccattaggcttagagcggcgaattcgntccgggaagaagccacaccccagaggtgacagctgagcccctgccacaccccagcctctgacttgctgtgttgtccagaggtgaggctgggccctccctggtctccagcttaaacaggagtgaactccctctgtccccagggcctcccttctgggccccctacagcccaccctacccctcctccatgggccctgcaggaggggagacccaccttgaagtgggggatcagtagaggcttgcactgcctttggggctggagggagacgtgggtccaccaggcttctggaaaagtcctcaatgcaataaaaacaatttctttcttgcnnaanaaaaaaaaaaaaaaaaaaaaaaaaaaaaaaaaaaaaaaaaaaaaaaaaaaannnnnnnnnnnnnnnnnnnnnnnnnngggggccccctttcttccccccc

SEQ ID NO: 29275 - DNA, 453 bp, Homo sapiens
  misc_feature (1)...(453): n = A,T,C or G
ttctgtatacctcgacanccggngtnggtgaacatcccaaggacacganaatatcaagacacctgccgagcgtctgcgggtttcgcttccaccctcagcggagtatttctcaagacaccttccgagcgtcagctgactgcccttccaccctcagcagatgataatatcaatacacctgccgagcgtctgcgggggccgcttccaccctcagcggatgataatctcaagacaccttccgagcgtcagctcactccccttccaccctcagctccaccctcagcagatgataatatcaagacacctgccgagcgtctgcgggggccgcttccaccctcagcggatgataatctcaagacaccttccgagcgtcagctcactccccttccaccctcagctccaccctcagcagatgataatatcaagacacctgccgagcgtctggggggcccgttc

SEQ ID NO: 29276 - DNA, 461 bp, Homo sapiens
  misc_feature (1)...(461): n = A,T,C or G
ntttgtagaacctcgananccnnnnttttatgtcatccgaacgccggnnggaatcgggtctgtctgcaggaactctcccgtatttgagaagcctcttttcgagtcgttctcccggccagcccggccctgtgcctgctcggaagagctcactgccagctgcggcctgggcaccgcgggccatgtgtgtttgcatgaggaactctttagtggcagacacctaagagacggctgcggtcaccccacgcctccgtggctcatgagccgtcctgggtgcatatgaccagtttctgtgacttttctccagttgggcatgttgacagacatgtttcccctcctcccaccctcattttctggtcctcgcgactgagagccaggggcgacatcatgaccttctgtcccggccgccttatccccgggcacaaggaaagcagctgggccgtttctggctgtgtcccctcctg

SEQ ID NO: 29277 - DNA, 466 bp, Homo sapiens
  misc_feature (1)...(466): n = A,T,C or G
gggctccnattcgatgtcatacttcgtgtggtggaattcctggctgcacggggagagggaagtattttgctgaaatatgagaactggggcctcctgctcccagggagctccagggcccctctctcctcccacctggacttggggggaactgagaaacactttcctggagctgctggcttttgcacttttttgatggcagaagtgtgacctgagagtcccaccttctcttcaggaacgtagatgttggggtgtgttgccctggggggcttggaacctctgaaggtggggagcggaacacctggcatccttccccagcacttgcattaccgtccctgctcttcccaggtggggacagtggcccaagcaaggcctcactcgcagccacttcttcaagagctgcctgcacactgtcttggagcatctgccttgtgcctggcactctgccggtgcctttgagagggtngaa

SEQ ID NO: 29278 - DNA, 424 bp, Homo sapiens
  misc_feature (1)...(424): n = A,T,C or G
gaagctagaagggttatggttggagttctgtatagtgttgagtttccgacagggaaagaggattcctccaatgctcctagagagaaagcctgagcaggagatgatgcagcagaggggaagggccctgtggtgccgccgcccttccttcagcctccgaagggtgatggaaatggagagtggaggaccaggcctccagctgtctggcctcgcccttcacgccttaacactaagcccacctcccctgctctccttcccagcattgagcccttggttgcctgggcccaggctgggggttttcagtatttgtaagcatttcagcagaacaataaagcctttggactacggannanaaagnangnnancaaaaataaagagaaannnnnaaggaaaaaaaaatttttttnnnnantttgtgaacacgtaa

SEQ ID NO: 29279 - DNA, 467 bp, Homo sapiens
  misc_feature (1)...(467): n = A,T,C or G
gcccgcccctgatnaccntcggnactgatgaccactaggacagagcggnggaattcaaaaatacaaaaattagctgggcgtggaggcgcgcgccggatgtcccagctacttgttaggatgaggcagaagaatcgcttgaacccgggaggcggaggttgcggtgagccgagatcgcgccattgcactccagcctggcgactcagcgatactccgtccccctctccccgccccaagaaaaatctgttcagcggggagcgacaaggaaggagctttcagcccgactggggtcgcagggaagaattcaagatggcgtgtttaggagctctagctccttgacaaattagtaaaatgttagtcttaggagaagaacgaaaaggctctcctaggctaacaaacagcatacacagtgagaaacctcagaagaaataacattcaaggaagatagcaacaacgaatacatcagaagg

SEQ ID NO: 29280 - DNA, 467 bp, Homo sapiens
  misc_feature (1)...(467): n = A,T,C or G
aagtttnnnnnttacttatcccctcgannncncnatcagtagtcatccgaagccggggaanncttatttacttattcaaatttttgattttcagctctgcagggaattgtttttaaatctttatccatatttctggtttttttgtgaggagaaattaatagacggggcattatgaggtcaaaggttaggtacatcttctagacttcctgtcctccagagatgcgtcagttcctcttccactgctgtgtccgggagtgcccccacagaaaagctgtcctgttacctttaaagacttttagcaacttggaccttgcctaaaacatgaggcacactgtaagtagcttttctcttcagggacagcatgaattcaggctacccatggggttggacaggagactgggctctgcatgtagggggagtagttgtccctataaaaaaagcttttcagggtgcaggactttgaggcg

SEQ ID NO: 29281 - DNA, 537 bp, Homo sapiens
  misc_feature (1)...(537): n = A,T,C or G
cctcccttaccgtcttacacaccctcaaccacactacagctcaaaacagatccgtgtctcctcaccaggtcaggcgnnnnnnnnttttgattcatgcatggcagngcgnggaannnnananacaaggaacagggncnggcaaaaaggcagcaaacangaaagaaaagttgagagacccagggganccaancggggctcnaggagcggacagnagnnccaaggccgagaacacagaaagggaaaaggaagggggaggcggngctccagctgagnnaaagaaaccagaagccgcccatcctaagaagganaggacggatcttagggtgtataagagaagcgcaagagaaacatttaggctggtttatgtttgagtagagacatgaaagttttagataaagcagcagcacaatgagtccagcggcacatcagaaagcaaatcaccatgatcaggtcaggttcagggtggctttatgacataacatatgtcagtgtgctttacctattagtggaccaaaggcaaaaaatacgggtttctac

SEQ ID NO: 29282 - DNA, 551 bp, Homo sapiens
  misc_feature (1)...(551): n = A,T,C or G
ntttcaaccttagtccagcgnggtggaattcggnggcctggcacagtggctcatgcctgtaatcccagcacttcaggaggccgaggcaagcagatcatttggggtcaggagttcgagaccagcctggacaacatggtgaaaccctgtctctactaaaaacagaaaaattagccgggcgtggtggtgcgtgtctgtaatcccagctactggggaggctgaggcaggagaatcacttgaacctgggatggtgaggggctgttgggctggctccgtcgcagaggggagatgggaaaggctgacaactgtgcccacccccagggtatattcaggcctgccgggcactcatgatcaccgccatcctcctgggcttcctcggcctcttgctaggcatagcgggcctgcgctgcaccaacattgggggcctggagctctccaggaaagccaagctggcggccaccgcaggggcccttcacattctgggccgtnnactgggggaagggtgatgggcggnggtccnnctcacccgagacttcaggctgctttgtcttatt

SEQ ID NO: 29283 - DNA, 485 bp, Homo sapiens
  misc_feature (1)...(485): n = A,T,C or G
aggatgtcncnnnnnagggcgccccctgatgaccntcggactgangtcgttcggacagngcggnggaattcgtcagtcaaggaagggagacatggtggagatggccacacggtttgtgtccaccctgttgctagacctggaaaaggggaaggagagtctgttggagaagaggctggtggcggaggaggaagaggacgaagaggaggtggaagaggatggccccagcagctgctcggaggacgattacagtgagctgctgcaggagatcacagacaacctgacgaagaaggagattcagatagagaagatccatttggacacatcctccttcgtggaggagctgcctggagagaaggaccttgcccacgtggtagagatctatgactttgaaccagcgctcaagacggaggacctgctggcaacgttttctgagttccaagagaaggggttcaggattcagtgggtggatgatactcacgcactcg

SEQ ID NO: 29284 - DNA, 466 bp, Homo sapiens
  misc_feature (1)...(466): n = A,T,C or G
gggctncnaatcgatgacatactcagtgtggtggaattcgtccatggtcatgtcattgttgtcagccaacactccagaggaggaccagaggacttatgttttccgggcccagagcgctgaaatgaaggaacgagggggcaaccagaccagtggcatcgacttctttattacccaagaacggattgttttcctggacacacagcccatcctgagcccttctatcctagaccatctcatcaataatgaccgcaaactgcctccagagtacaaccttccccacacttacgttgaaatgcagtcactccagattgctgccttccttttcacggtctgccatgtggtgattgttgtccaggactggttcacagacctcagtctctacaggttcctgcagacagcagaaatggtgaagccctccaccccatcccccagccacgagtccagcagctcatcgggctccgatgaa

SEQ ID NO: 29285 - DNA, 467 bp, Homo sapiens
  misc_feature (1)...(467): n = A,T,C or G
aggggggnntatcgatatcatacttcgtgtggtggaattccggcagcggctgcagcgctctcgtcttctgcggctctcggtgccctctccttttcgtttccggaaacatggcctccggtgtggctgtctctgatggtgtcatcaaggtgttcaacgacatgaaggtgcgtaagtcttcaacgccagaggaggtgaagaagcgcaagaaggcggtgctcttctgcctgagtgaggacaagaagaacatcatcctggaggagggcaaggagatcctggtgggcgatgtgggccagactgtcgacgacccctacgccacctttgtcaagatgctgccagataaggactgccgctatgccctctatgatgcaacctatgagaccaaggagagcaagaaggaggatctggtgtttatcttctgggcccccgagtctgcgccccttaagagcaaaatgatttatgccagctcc

SEQ ID NO: 29286 - DNA, 467 bp, Homo sapiens
  misc_feature (1)...(467): n = A,T,C or G
tgggggcnnattgtcgacgtcactagtccgtgtggtggaattcgccttttctctgccacagcttctgcctttgggggcttacccttcctaggagcagaactgttgtggaggggaagaggacggtgaaggttccgaagggaagggggctgcccccactgaaaacgaagcttccagtcacagccccttcattatttatcaggacccaggggatgaggtggcaggggagggggctgcatggagggagtgccctcaccctcgtccccagcgcctgccccctcccgaccaggcctgggctgaggcccanggtaagggggctgaggcaggccacagaggagcaagacttgtcaggggccagacctgggtaggaggattgtcctccaggcacacacggcccccagccccccagcctgtcgaactgggctctcccagagggtccccggctccagcccaagcagggagccaggttg

SEQ ID NO: 29287 - DNA, 462 bp, Homo sapiens
  misc_feature (1)...(462): n = A,T,C or G
atggccnnnaaggatgacatactcagtgcggggaatcattcccctgcccgaggggcctccctatagcccgggacgggctctggatacttgcacctttggtcccatgggtgggggacaggagctgcttcccagctcgacttcagctagctgtgtccccaggcctgggcccagggcgccctgcgggccagcgtggaggctgacacccacacagatggtgtggaccatgctgccttgtggagctgggagttggagacagccgccaccccacaggccgggctactggcagccacactcggctttttgcccagtggcagaagagaccagccctcctcccatgcccggtcaccatgggggtcaggttattattgtaaggggtctcccttttacactggctcagtgctcacaacctttcaaggtggatgttacagggtggcccccattctaccgatgtgaaaactgagg

SEQ ID NO: 29288 - DNA, 550 bp, Homo sapiens
  misc_feature (1)...(550): n = A,T,C or G
ntcgaacacctgancactactccgagnggngcaattcttgagttcaggttgttcctttgctcaacaaacagcaattagaaacctcatgggtgccaggccctgggagaacgaagaggtcctcagcgtgccccgagttctcaacacttaaaaaggcctatggactttgggtgagcttgtagaataactgtgtgaggtcaccctgcttctgccaggctgctggccagtgtcaggccactcttttcctacctttaagcacagccttgtggtgcctgggttgacatggagcaggaagatgagatgcccaagggctgtgtttgcctggcagccctttcagcatctcctcagcagagtttcctcctgtcaccagtagaacacagcccagatgcaaacatcaggagcagacactgcccagatggcggctntaccccaactggactactctgaggctgtggtggtggacagccctgtgccgcaagctggagtaagccgattctccccatgggggaagcaggtacngggctctgtcactatcatgacctgtgctcanggg

SEQ ID NO: 29289 - DNA, 544 bp, Homo sapiens
  misc_feature (1)...(544): n = A,T,C or G
nttcgaacatagtccagcgngggcaattcctgganagtttccagtggctgcagagagagatcatgtggccatgttggcaagtgtgacccacagtgactctgagatcccagcttctcttaaccagggcctctcactcctgctccatgagctcttatgccagaaccccctccatcgtctacgttatctgcatcacttccaggtccaccctttctttcggggtgtggccttcgacccagagctcctacagaagcagccagtgaactttgtcacggagacacaagctacccagcccagttcagcggagaccatgccctttgacgactttgactgtgatctggagtccttcttgctctaccctatccctgcttgagcctctctactgtaaattggggcccggctgggagcctgaagatctccatccctgcctactcaagacggngttcaccgtgttggccgggctgatctcgaactcctgacctcaagtgatcggcctgccttgggcctccaggtgctggantacagaaatgcanaantggctgtcatg

SEQ ID NO: 29290 - DNA, 547 bp, Homo sapiens
  misc_feature (1)...(547): n = A,T,C or G
ntttggcacctgaatcactactccagagnggngcgaattcgacaccaggactggctggagggatgggatttggcagctgttttctggccagttaggataactgtttcctttcagggtctgaggcagttgttcagggtgacttcacgtggcttctgagcaggtgtggttttggttggccctgttcctgggactcctgctctgtgtccatgagggtcctggagcatccagatggagaggggcaatgccctggtggtgctgcgcagcctgctctggccgggcctcaccttctaccatgctccccgcaccaagaactatggctacgtctacgtgggcactggcgagaagaacatggacttgcccttcatgctatagaatgggagccagcctggatggttgtaaacagagtctacacatgattttcttacgcttcagtgcannacngggttcaccgggttggccggcttgatttaacctcctgccttaanngatnggcttgccttgccttccaaggtgctggattccaaacctgcccacctcgctgccctgg

SEQ ID NO: 29291 - DNA, 572 bp, Homo sapiens
  misc_feature (1)...(572): n = A,T,C or G
agggggcgcgnnnnnnnnnnnnaatcggatcatagtaccgcgnggtgcaantctgggaatctgacgcggatgcggcatgtgatcagctacagcttgtcaccgttcgagcagcgcgcctatccgcacgtcttcactaaaggaatccccaatgttctgcgccgcattcgggagtctttctttcgcgtggtgccgcgtgagtgccttgggcccgcgggagcgggaggctggaccccagcagcagcagcagtcactgcgcctcccctctgagcgctggcggccgggcaggcgctctgtaacttgccgtacacacctttctcattgaatattcctgaccgcccttaagctggtcatattatcctccccatcttacacggggaaaactgagctacagaactgaaatgactggcccaaggtcactcgggtgattccagcatgttcctctgaggtcacctttatttagttcttaccaggggtgaaatgctntgtgttanacgtgcagcagatagtgatgaatagtgcatggccttggatatgctaagaaactactgagtgtatgctttaaagagacaaga

SEQ ID NO: 29292 - DNA, 564 bp, Homo sapiens
  misc_feature (1)...(564): n = A,T,C or G
agacaacgtcgacaccgtccgnngggggattgatatctattcatggagcaataaaaaccttaaataaataggagtagcattaacaagaaattatagaacctatattggatcagttgagaacactaaagtatttcgagtcacttaaaaagggaagaccttggctggccgtggtggctcacgccagtggtcccaccactttgggaggctgaggcgcatggatcacctgaggtcaggagttcgagagcagcctggccaacatggtgaaactctgtctccactaaaagtgcaaaaattggccaggcatggtggtgagtacctgtggtccaagctactctggagtctgaggcgggcaaatcacttgaacccaggaggtggaggttgcagtgagcagagattgtgctactgcactccagcctggnggccagagcgagactccatctcaaaaaaataaaagtaaaaataaatacaaaaatacaaaaggataccttcaggacaaacagctatcgtggagcgagggagaaagaaagcttgtggngtcaacacagtggctcacacctgtaatcn

SEQ ID NO: 29293 - DNA, 584 bp, Homo sapiens
  misc_feature (1)...(584): n = A,T,C or G
cgaggagtnnnnnnaagtttgaacactactgagngnggngatttgcgnttctggtctctatagttatgctcagcacattgccagtatcgatgggaggcgcgggttgttcacaggcttaactccaagactgtgttcgggagtccttggaactgtggtccatggtaaagttttacagcattaccaggagagtgacaagggtgaggagttaggacctggaaatgtacagaaagaagtctcatcttcctttgaccacgttatcaaggagacaactcgagagatgatcgctcgttctgctgctaccctcatcacacatcccttccatgtgatcactctgagatctatggtacagttcattggcagagaatccaagtactgtggactttgtgattccataataaccatctatcgggaagagggcattctaggattnttcgcgggtcttgttcctcgccttctaggtgacatcctttctttgtggctgtgtaactcactggcctacctcgtcaatacctatgcactggacaagtgggtttctaccatgaatgaaatgaagagctattctcangctgtcacaggattntttn

SEQ ID NO: 29294 - DNA, 567 bp, Homo sapiens
  misc_feature (1)...(567): n = A,T,C or G
cggctgccccccggcccccaaatgagaccccatcgatcatcatccgaaggggcaancctgcttaacagtgcttggacggaacccggcgctcgttccccaccccggccggccgcccatagccagcccttcgtcacctcttcaccgcaccctcggactgccccaaggcccccgccgccgctccagcgccgcgcagccaccgccgccgccgccgcctctccttagtcgccgccatgacgaccgcgtccacctcgcaggtgcgccagaactaccaccaggactcagagggcggccatcaaccgccagatcaacctggagctctacgcctcctacgtttacctgtccatgtcttactactttgaccgcgatgatgtggctttgaagaactttgccaaatactttcttcaccaatctcatgaggagagggaacatgctgagaaactgatgaagctgcagaaccaacgaggtggccgaatcttccttcaggatatcaagaaaccagactgtgatgactgngagagcgggctgaatgcaatggagtgtgcattacatttggaaaaaaatgtgaan

SEQ ID NO: 29295 - DNA, 563 bp, Homo sapiens
  misc_feature (1)...(563): n = A,T,C or G
cggggccnnnnnnttttgaaaatagattcacctagtccgagnggnggaattccgtctctttttanagcttagaggtacaagctcaggacagtcttcagtaaggaaatttgtggatttccctttggatctttcttcctctgcagcccacaagtggctctagtgagacgagcatttaagctgcaggtggtggcactcgggtctcagagccaccagacgtgcaggtgggacagtggttccagctccgactgcctgtcagcgtccctcccaggtgctagccctggcaggcacagccctcccctcatgccagcaaaggaaatgctcttgatgagaggctcgctttaaagaagcccaaagcgtgtgcttatccaaggggttcagctattcctgacttcacggcttgcatgtttgatttttctaagagaaaagaggctgcctgctgggtgtctgtggaaatgagattaanaactgtacaatctcagattttactanaatgcnnnnnnnnnnnnnnnnnnnnnnnnnnnnnnnnnnnnnancnnncnntnnnnnntttaggcgcgttnacg

SEQ ID NO: 29296 - DNA, 574 bp, Homo sapiens
  misc_feature (1)...(574): n = A,T,C or G
ngttttgtgccccagggnnnccnaaattgagnacccctntggaggatcatccgngnggngcaanccttaacagggcttggacggaacccggcgctcgttccccaccccggccggccgcccatagccagccctccgtcacctcttcaccgcaccctcggactgccccaaggcccccgccgccgctccagcgccgcgcagccaccgccgccgccgccgcctctccttagtcgccgccatgacgaccgcgtccacctcgcaggtgcgccagaactaccaccaggactcagaggccgccatcaaccgccagatcaacctggagctctacgcctcctacgtttacctgtccatgtcttactactttgaccgcgatgatgtggctttgaagaactttgccaaatactttcttcaccaatctcatgaggagagggaacatgctgagaaactgatgaagctgcagaaccaacgaggtggccgaatctttcctcaggatatcaagaaaccagactgtgatgactgggagagcgggctgaatgcaatggagtgtgcattacatttggaaaaaaatgtgaatcag

SEQ ID NO: 29297 - DNA, 548 bp, Homo sapiens
  misc_feature (1)...(548): n = A,T,C or G
nttcgaancatacgtacactagtccagagtggtggaattcgaagcactgaanatagtgttcctacctacatgtcactgaccgacccagagacctcagccagggcctgtggctaggggccatccctggaggccttgcggggccatctgggtcggtcagtgacatgtaggtaggaagcactgaaaatagtgttcccagagcactttgcaactccctgggtaagagggacgacacctctggtttttcaataccaattacatggaacttttctgtaatgggtacaatgaagaagtttctaaaaacacacacaaagcacattgggccaactatttagtaagcccggatagacttattgccaaaaacaaaaaatagctntcaaaagatatttaagttctatgagaaattccttagtcatggcgttgcgtaaatcatattttagctgcacggcattaccccacacagggtggcagaacttgaagggttactgacgtgtaaatgctggtatttgatttcctgtgtgcgttgccctggcattaanggcattataccn

SEQ ID NO: 29298 - DNA, 575 bp, Homo sapiens
  misc_feature (1)...(575): n = A,T,C or G
ccccccccccccnncgcccccnnaattgagcaccacnatcgaatgacaatccgaaggggcaacncaaacacctcgaagacgctatccgatccatcaggcccagtattcctgtccggcggtacttcccacagtgtgctggaatggttatcacaagaaggctgtgctgccccctcgcaactccaggatggtgtgtagcccagtgactctgacgatcgcccctcctgacagaagattttcgcgttctgcgataccagagcagataatcagctcaacactgtcctcaccatcaagtaatgccccatacccatgtgcaaaggagactgtactgagtgccctcaaagagaacaagaagaaaaggacagtggaggaagaagaccaaatattccttgatggccatgaaaataaaagaagctgtcttgtcgacggtctcactgatgcctcttctgcattcaaaggtcctcgacccgggccagatacactccagttcacagtggatgtcttccactttgctaatgactccagaaacatgatatacatcaccttgcacctgaaggcaccctagctgacaggacccn

SEQ ID NO: 29299 - DNA, 454 bp, Homo sapiens
  misc_feature (1)...(454): n = A,T,C or G
catgatccttntcggnnnatgantgacatctgaccgngcggnggaattcccaggctaaagaaacgtccagcgtagcttcaaggatgcaccgcgtgatccctatcggatctccccgacgcgtcaggcctgcctagacggtgctgggagcgcgtctccttgaacgttgtcccgcctgggattgcgaggtaggtaccgcctgcctgtgtgtaccggggctgctgtctccggggaggggcttctggcggacaggagaaccaagcagcctcaggagctgcctgggtgtgtgtgtttctgtgcgagtgttgcatatctctgtgtgtgtttctgtgcaagtgttgcatgtctgtgtgtgtggggggggtggtgtctggtgaaaagaatgtgtctcgtgcggtggagcgccgtttctctgtagtccgcgggctctcttatgcgccctcttgtggtcccaagt

SEQ ID NO: 29300 - DNA, 476 bp, Homo sapiens
  misc_feature (1)...(476): n = A,T,C or G
cgggatgtccnnnntttgatnncctgatgtccactagacagngcggnggaattcgcgactcggcggaggctccaacttccagtggcccggtcgggaaagatcagagcctcctaagaaatatccagaagtcaagccatggatccacctgcacgtaaagaaaaaaccaaagttaaagaatctgtcagcagagttgagaaggccaaacagaaatcagcccagcaggagctgaagcagagacaaagagcagagatctatgccctcaacagagtcatgacagaactggagcagcagcagtttgatgagttctgtaaacagatgcagcctcctggagaatgaggccccaggttcaaaccagatgggatcctgagagctttgagagggtgttgccagttttaagctgagatggcccatttggagccttacagaactagaccagaagacatttgtggataaatctgaactcacttcctgtgtgt

SEQ ID NO: 29301 - DNA, 451 bp, Homo sapiens
  misc_feature (1)...(451): n = A,T,C or G
gagcggcccccnnnncacggagcgtcgngcanggacagncgggggaattcgaagaggcagaaccgaggtcgggagcccattgatgtctgagcctgccggagggcgagggtcggagaagcggattgggtcctgggcctctgtgatgaggcaggcacacctgtcggtcttggcttgctgctagaactagggccttctgctcgcccacctcccacccctacctggacgggcccaggcttggggactctgagctgtgttaaggagaacaagggcaaggagacctccctttgtgctccctcactccctaataaacatgagtctgatgttctccaaaanaaaaaaagaaaaagaaaaaaaaataaaaaaatataaaaaaaacaaacattaaaaaaaaaacatcactttcattaaaaaaaaaaaaaaaaaaacaatgggtgcgccgagtgttggggtg

SEQ ID NO: 29302 - DNA, 469 bp, Homo sapiens
  misc_feature (1)...(469): n = A,T,C or G
aggggaaaaaaactggagncccttnnnnctgatgtccatagtacagtgcggnggaattcgcggaaatgggcaacggcggacggagcggcctgcagcaagggaaggggaacgtggatgggggggcagtgactcctactgctgtctggggctcctgccagtacaggtgcatcgaatgcaaccaggaggccaaagagttgtaccgagactataaccacggagggctgaagataaccatctgtaacaaactgcctattttattggcatttttaccttcctgtgggtagaacggcccatgacggcaaaaaaaaagcccaacttcattttgctgctgaaagcattattattatctagctacggaaaactcttgctgattccagctgtcatttgggaacatgactacacatctgtgtgcctcaaactcattaaagtatttgttcttacatcaaattttcaggcaattagagtgacn

SEQ ID NO: 29303 - DNA, 466 bp, Homo sapiens
  misc_feature (1)...(466): n = A,T,C or G
agggaaaaanntttgatgatcactagtcctgtgtggcggaattcgctcagccgcacatcatctctgctacccaagatgtcccggctgtgggaagatgccagaaaaggaaccaaggaactgccatactgcccactctgggtctctgccacccacctgcttcagggccaggcctgggttcaactgggtgcccaaaaagtggcaattagtgaatttagcaggtgcctcgagctgctcttccgggccacacctgaggaaaaagaacaaggggcagctttcaactgtgagcagggatgtaagtcagatgcggcactgcagcagcttcgggcagccgccctaattagtcgtggactggaatgggtagccagcggccaggataccaaagccttacaggacttcctcctcagtgtgcagatgtgcccaggtaatcgagacacttactttcacctgcttcagactctgaagaggg

SEQ ID NO: 29304 - DNA, 471 bp, Homo sapiens
  misc_feature (1)...(471): n = A,T,C or G
aagcgagaaagaaatttgatncccctngnnctgatgtcctctagtccangcggnggaattcctgcggtagagggtcagccgctccgacagccaggtgcggaagctacaggagaagctggatgagctgaggagagtgagcgtcccctatccaagtagcctgctgtcgcccagccgcgagccccccaagatgaacccagtggtggagccactgtcctggatgctgggcacctggctgtcggacccacctggagccgggacctaccccacactgcagcccttccagtacctggaggaggttcacatctcccacgtgggccagcccatgctgaacttctcgttcaactccttccacccggacacgcgcaagccgatgcacagagagtgtggcttcattcgcctcaagcccgacaccaacaaggtggcctttgtcagcgcccagaacacaggcgtggtggaagtggaggagggcga

SEQ ID NO: 29305 - DNA, 475 bp, Homo sapiens
  misc_feature (1)...(475): n = A,T,C or G
agggattgcccccnnatagaaaaccatgatgacctctcgacgnngcgnggaattattgggagtcaacaacgctgatttctcccaaaactatagtttctcttacggtcttttcctcctttaccctgtggatatacactcaggaataatctgacattttagaaaagccgaacagtagatagtctccaagatgggaaacatgtcgtgtgtctgcacgccccggcaaactgccgccactcgttctgctgcctgactggttagctgctgtgcgggtgcgctcggtgacgctggtggtggtgcacgctcccgagctcccagagttaacactaatctgcaggtcggctgtgcatcgcattcgaggctccttttttaaagagaaaagcataggcctctgttctcatttgtaagaagtttgactcataatagaagacggtgtcttttgaagcccagtctctgtctgtcttcagaaacaaaagtg

SEQ ID NO: 29306 - DNA, 451 bp, Homo sapiens
  misc_feature (1)...(451): n = A,T,C or G
gcnagacttggacctaccgaatcncgaaaccttcgtanagnctggnggaattcgacggncctgtgtgcgaggtaccagctacacccaaatattcaactcccgctcctttagccaaatcttcgcctgctaaacaccagcccccacccatcagaaacctccaccagtccaacttcagcttatcaggtgcccagatagatgacaacaatcccaggcgcaccggccaccgcatcgtggcgccccctggtggccgctccaacatcaccagcctcggttgaacgtggatgcgcggaggagctagcctgaaggattctgggaatcatgtccatcccttttcctgtcagtgtttttgaaacccacagttttagttggtgctgatggagggagggggaagacgaaggatgctctttcccttttctgtttaggaagaagcggtactagtgtggtgtgtttg

SEQ ID NO: 29307 - DNA, 459 bp, Homo sapiens
  misc_feature (1)...(459): n = A,T,C or G
agggaaaaancctgagacactagactgtgcggccgtattaaaaagcccacctgaaagcctgtctctttccactttgttggcccttccagtgggattatcgagcatgttgttttttcatagtgcctttttccttatttcaagggttgcttctgagtggtgtttttttttttttaaattggtttggtttaaaaaaaagtaaaaaacagcccaaagcttttcacccaattggccccctactctgggaaaaaatttttccctccggccaggggacccagggtaaaccaaaggaaacaaccaggaggggaaggggaggcgttctcctgtttgtactaacccaggaggctttaagctccacctttaagggttgggacccccttgggggttaaggaaactgtttccccagggtgcagtgtgagtgtaatggcccaccggggcaaaagggaaggtgaccgcccacct

SEQ ID NO: 29308 - DNA, 473 bp, Homo sapiens
  misc_feature (1)...(473): n = A,T,C or G
gaaggcgccagccccttttgatatcgtantccgtgtgcaggaattcgtggagagcagggtctggcaagtgactggctcttgtccctacagagtgtactccactgggtctcgcccgcatgttctccgtcactgggaagctgctagtcaagccccggctgctggaagacctggaggagcagctgtactgctcagcctttgaggaggcagccctgacccgcaggatctgtaatcctacttcctgctggctgcctttagacatggagctgctacacagacaggtcctggctctgcagacacagagggtcctgctgggtatgtggcttcgtagggcttgggatacctgggtttccccaaggagagtagcccctggttccaggtgcttgctgacagcctcccatccctgcacagagaagaggcggaaggcttcagcctggcaacggaacctgggctaccccctggctatgctgtgcttg

SEQ ID NO: 29309 - DNA, 470 bp, Homo sapiens
  misc_feature (1)...(470): n = A,T,C or G
tggccgggnccnnaatgagaccctgagaccctgggagnggcgggaattctcgcggccaccaatgccaggcggggccctgctggggcggctgccagcgcatccagcgcctacaacgcgggcagcagaaagagtacccccaccccgtagacgtgcagctcccaggagaagctcaggacccgccgaagggggccccagcgtagcgggggtgcagtggcgttggctggggggctggaggctggggctgaagccatggagctggcggtgggctccggagggggaggctggcccagggctcgctgcgtggtgactcgaatgaggccccggcgtgacgtcgagggggcctggactgggggtgctgggggatggctttgggggcgccccggccactcctcggcttcatctgcaattataacaatattaaaatagccatttgaaaaaaaaaaaaaaaaaaaaaaaaaaaaaaaaaaggg

SEQ ID NO: 29310 - DNA, 222 bp, Homo sapiens
  misc_feature (1)...(222): n = A,T,C or G
aaccanaattggatgccgcagtggtcaggaccgagacgggagcagggccctaagtgccctgcacttttgctctttcactctcattctggtgatgggagacccttcgctgtctcccatcaccaccaccaaagccttcacttccctgccaaatacccgtcccttccatagccccagggctcccaccccttccccacaaaccctgcccaagcagtgtatggacgg

SEQ ID NO: 29311 - DNA, 447 bp, Homo sapiens
  misc_feature (1)...(447): n = A,T,C or G
taatgagnccatcgaantattgatgcgctacgganagncnggnggaattcgctgatgaggtggagagaaatgctattgatttggatgattaattggtagattcttttaggagacgaagttttcagtatctattaaaatttaaagtgcccatttccttagatccagtacatgagaatatattgtaaggagctaataggacaagtatacaaagataaatatatggggatattttagataattatttataatggcagaaagttggaaacaatctaaatgtctttcagtaggagattggttcaataaattatggtacatttccttcaatgactgtgcagtcctcagaagagattaggctgatctttaccaattgacgtgaaaagatgatgatattaagtgaaaaaaaaacaggttgctggctgggcatggtggcttatgcctgtggtcctn

SEQ ID NO: 29312 - DNA, 486 bp, Homo sapiens
  misc_feature (1)...(486): n = A,T,C or G
gcnnncnnaagggaaggcccnnnnttttgaaaacactgatgaccttagtacagngcggtggaattccttagaacagtgaccagctgggtctggcatgatgcccacatattcctctgttacacagcctctgtcctctacctggtaacagaacccccgtttcctctgggtacccacattccctgatacatccttccctacccattaagggttccaatggtggggttcacttgttcgactgtaggggaggacttgtgacccagcccccactgatcagtgtataacacccccatggccttagcaattgtttctgagattggtctgttccctgagccaggctggtaggatagaagctgtctttctatggcgctgaaaagcagtaggatgtaagcctggagttgccgcaagcaggaagaacccctcagaggaggaggccaacacagcagacggcagagccaagagaggtaaagagagaatccttgtcatcgn

SEQ ID NO: 29313 - DNA, 472 bp, Homo sapiens
  misc_feature (1)...(472): n = A,T,C or G
tggccggggnncnaaatgaaacccctgaagatctntgacggnccnggaannntgaacaagcagaccatcttcaccgtagagcagcttgacaactaccattactgcaccttcttcaataagacggacatcctcaagcggcattcgcgagtctatgagctggcccccaacctcgtcccaatggactacaggaagagccccatcgtccacgtgcccatgagcctcatcatccagatgccagagctccgggagaatcccttcaaagaaaggatcgtggcggcgttttccgaggatggtgaggggaacctcactttcaacgactttgtggacatgttttccgtgctctgcgaatcggctccccgagagctcaaggcaaactatgccttcaagatctatgacttcaacactgacaacttcatctgcaaggaggacctggagctgacgctggcccggctcactaagtcagagctggatg

SEQ ID NO: 29314 - DNA, 464 bp, Homo sapiens
  misc_feature (1)...(464): n = A,T,C or G
ggggataaaanactgatgacactagactgtgtcggcgaattcgcccgctctggcgtccgactcttgggctcaggacatcctactgccgctggctaccttagagcggacattttagcacacagacgtatggcgatgtgacgacacaccaggattgcttgcatctgcaaggcgccactagagctctcctctgaaccaactctgctgacaccgtgctgcagtgcttgcagcctctatatatgatcacaagcacaccactgtttacacccatctagaaggcccctcccagctgacatctttctgcctacctttcaggaagacagacgaaactctctgccttcaggtggggcaagactgctgatggctggaacaggagcttggcacctccaccctgacccagacacaagcctgtctgtcccactcaaatcgagctggccagagactacaactgtgttggttcccaagac

SEQ ID NO: 29315 - DNA, 208 bp, Homo sapiens
  misc_feature (1)...(208): n = A,T,C or G
tggnnnaacngactgctgnanntcaaaaaaggattggctttccagagggcagtgtagagctttatgctgaaaaggtggccactagaggtctgtgtgccattgcccaggcagagtctctgcgttacaaactcctaagagggcttgctgtgcggagggcctgctatggtgtgctgcggttcctcatggagagtggggccaaaggctgcga

SEQ ID NO: 29316 - DNA, 469 bp, Homo sapiens
  misc_feature (1)...(469): n = A,T,C or G
ggcaggggcnntttgaacccctgagancctccgcagngncgnggaattctacagaaccccttgtccgactggaggcacgattgtgtgtgggagaaaatttgagagaacttattggagatagaacatatggatgtgtctgcagggtggtgtgagcccaattgggccagggggtcccaaagacacatattctcaccccacctccacctgcttcctgatcacatcccagtcaccagcgggaggttactggatagtgagggagaacaactgcttgttgagagaggcagaggggtggaagggacctgaagctggcctggagaaaagcataggcccaggagagcctgtcctgggacagcgcctgtctcccacacagcaacactggcccagaagggacctacttccttggccctgggcacataccactgctgccctttgataagccccctgtggaaagcactccagtcttctctgn

SEQ ID NO: 29317 - DNA, 452 bp, Homo sapiens
  misc_feature (1)...(452): n = A,T,C or G
gggaaagataccctggaccctccgnacanttaggngcatctggangaccaaggggcccaggccaagatagcctctgctcagaccaacgtaagtgctcttgagactcaggttgctgctgctgtccaggccctggcagatgactatctggctcagttgagcctggagcccacaaccaggacccggggcaaaagaaaccgaaagtccaagcatctgaatggggatgagagaagtggcagtaattacaggcggatcccatggggccggaggcctgcaccaccgcgagatgtggccattttacaagaaagggctaataagttggtgaaatacctgttggttaaggaccagacaaagatccccatcaaacgctcagacatgctgagggatgtcatccaagaatatgatgaatatttcccagaaatcattgaacgagcaagctacactctggagaagag

SEQ ID NO: 29318 - DNA, 466 bp, Homo sapiens
  misc_feature (1)...(466): n = A,T,C or G
ggcggnaaaaactgataccntctgattgacgaccctagncagngcggnggaattccaagacctcaggcaccatgaataactacccaacatggcgtcggactctgctgcgccgtgcgaaggaggaggagatgaagaggttctgcaaggcccagaccatccaacggcgactaaatgagattgaggctgccttgagggagctagaggccgagggcgtgaagctggagctggccttgaggcgccagagcagttccccagaacagcaaaagaaactatgggtaggacagctgctacagctcgttgacaagaaaaacagcctggtggctgaggaggccgagctcatgatcacggtgcaggaattgaatctggaggagaaacagtggcagctggaccaggagctacgaggctacatgaaccgggaagaaaacctaaagacagctgctgatcggcaggctgaggaccaggtcct

SEQ ID NO: 29319 - DNA, 468 bp, Homo sapiens
  misc_feature (1)...(468): n = A,T,C or G
tggcaggggccnnaaatgaganacatgataagctnggaannngccgnnanngttgncgnngcgtttcttaaccaaaatggcatttgtttggctgtcattgtctagcatatatttattgtgttttacaaacatgaggatatatgggtgtatatggataaaaccaaacttatatatataagaagtcaaggcatgtatactagatattttaaagagttatttatcaagggaaaaagatgtgtgttataaagtaaacagagtctatattttctatataatggagagagccaaacatagcttataaattataggagggtttggatttcttttttattattaaaacgaacctaggaagaaaaaaaaagaccatgaatgcgactgttcttagaggtgttaaggccaaactactgtggaagctgggaggcgggccttcctgtgggcctccagcagacctgtgcctgccgctatgag

SEQ ID NO: 29320 - DNA, 448 bp, Homo sapiens
  misc_feature (1)...(448): n = A,T,C or G
gggggaatgagnccatcgaaactgagacctacggacagnctggnggaattcgagccctggtggggggtctgcgcccggtcaccatgacgacgccggcgaatgcctagaatgccagcaaaacgtgggaactgagtctgtatgagctgcaccggaccccgcaggaagccataatggatggcacagagattgctgtttcccctcggtcactgcattcagaactcatgtgccctatctgcctggacatgctgaagaatacgatgaccaccaaggagtgcctccacagattctgctctgactgcattgtcacagccctacggagcgggtaataggagagacatgtttgagatgagatgaaggggtacaaagttagggccctctcactggtcttggttcagcctaggcttcagttcccttgactgaccactcagggcttcccttctcctacccc

SEQ ID NO: 29321 - DNA, 442 bp, Homo sapiens
  misc_feature (1)...(442): n = A,T,C or G
nganaaactgagaccttcgacactgagngcattggangnncgngaatcgcgttccatcctcgtcctttgtgcctctctgtttgctgtgtttggggggctggcttgattccggataaggggaactggtgggctggaaagaggcatgcggtggccctcaagagccagaagaatgactgctaactggtgcctgggggacctatcccgccgtaattgtggtgctagagccgcattgtgtcctttgcctcggtccaacctttggagacctttcacggctctagccttggttgggagccgagggaaggagtttgggaatgtttggctctgtgtaacaatgaaataattcattggtgatgctctctggccggagtctgtaaagataagacgaagggaacgtcatcgtttggaaagcgtcgcaataagacgcacacgttgtgccgccgct

SEQ ID NO: 29322 - DNA, 447 bp, Homo sapiens
  misc_feature (1)...(447): n = A,T,C or G
nactgagnccatcgnaaaactgagaccttacggaaagcccggnggaattcatccgtagagagcacggagaccccctcatcgaggagcttaatcccggcgacgccttggagcctgagggccggggcacagggggtgtggtgaccgacttcgacggagacgggatgctggacctcatcttgtcccatggagagtccatggctcagccgctgtccgtcttccggggcaatcagggcttcaacaacaactggctgcgagtggtgccacgcacccggtttggggcctttgccaggggagctaaggtcgtgctctacaccaagaagagtggggcccacctgaggatcatcgacgggggctcaggctacctgtgtgagatggagcccgtggcacactttggcctggggaaggatgaagccagcagtgtggaggtgacgtggccagatggcaaga

SEQ ID NO: 29323 - DNA, 575 bp, Homo sapiens
  misc_feature (1)...(575): n = A,T,C or G
gagccccnnnnncccccaattgaattacagttcgaagtgggcaannccagcatctggactggcagcagcagggcttgcagcagctggactggcagcaggatgatccacagcctgaggagcagcaacagggcttacaacagctggactgggagcagccacaagaaccacagccccccttggaacccccacaggagccacagccccccttggagcccccacaggagccacagctggtgcaggaacaggctggcacccaggagcacacgggcttgcagcagcagacaggcacataacatctggagccacatcccccacagctggagctgcagcccccacagccagagccacagcccccacggccggagccacagcccccacagccagagccacaacccccacagctggagccacagcccccacagctcgagccacagcctctggagcagccacagcagcccatggttctggtggattgagggtggagcangtagaggagcangcatgactgcagagggagctgaaccgacatttctgaaggaagacgtgcaaatgaccaacgagagcttgaagaaatc

SEQ ID NO: 29324 - DNA, 441 bp, Homo sapiens
  misc_feature (1)...(441): n = A,T,C or G
nactgtgactgaatgcctngcgggacttaactggccttccatctctctcagacaccaagctgcagatccaggcttttctgtttaagtgttgccaccatggctctggagaagtctcttgtccggctccttctgcttgtcctgatactgctggtgctgggctgggtccagccttccctgggcaaggaatcccgggccaagaaattccagcggcagcatatggactcagacagttcccccagcagcagctccacctactgtaaccaaatgatgaggcgccggaatatgacacaggggcggtgcaaaccagtgaacacctttgtgcacgagcccctggtagatgtccagaatgtctgtttccaggaaaaggtcacctgcaagaacgggcagggcaactgctacaagagcaactccagcatgcacatcacagactgccgcctgacn

SEQ ID NO: 29325 - DNA, 459 bp, Homo sapiens
  misc_feature (1)...(459): n = A,T,C or G
ggcagggnnnnnnnaaatgatattgangatcatcacacagncnggnggaattcggagagtgaactcatccttttaccaggaacccgcacccgtgacaactttattttttcattcacaagggcagagcccccatgacctaatcacctcttaaaggccctacctctcaacattgttgcattggggactaaatttcttttctctctctctctctttttttttttttaaaagggagttttgtttttgttccccaggctggagggcaggggtccatttttggttaattgaaacctccagctccaaaattcaggggattttcctgcctcaccctcccaagaacctggaattacgggcttgcccccccacccctagttaatttttgtattttaagaaaaaagggggtttctccatgtgggccagcctattctttaactcccgacctcaagggatctgcctgcctcg

SEQ ID NO: 29326 - DNA, 472 bp, Homo sapiens
agagtgaaacttgaatcatatccatgtggtggaattccgccaagcgcatcagcaccggcctcattctggtcactgcggcgctggagctctgtgaggaggtgcacctctttggcttctgggccttccccatgaacccctcgggcctctacatcactcaccactactatgacaacgtcaagccgcgtcccggcttccacgccatgccctctgagatcttcaacttcctgcacttgcacagccgaggcatcctccgcgtgcacacgggcacctgcagctgctgctgatggctgccagccaggctgcccggcaagcggcgccccctctcctgctgtccctcctggtggaactgggagccccgaaccgggcagcgtggggtcctggcgttcaggctgtctctccctccattgttcagctctgtacttggatcctggggtagggaggcagggttaggaaccggggcagagtcagctct

SEQ ID NO: 29327 - DNA, 465 bp, Homo sapiens
  misc_feature (1)...(465): n = A,T,C or G
agcgccgcccnttaatgatacgttggcattgcccaggcggnggaattcggcaacccccctccctttctgtcccccttaggcagaggtgcagccttattgtttaagagccgagggattctcttcaggcactgaaaacccacatggagtgaaggctgtcaccagggggcagcgctgtgccatcgccctgtggttcaccctggaccctcgacacagcgagcgggacagggtgcaggcagatgacctggtgaagatgctcttcagcccagaagagatggacctctcccaggagcagcccctggatgcccagcagggcccccccgaacctgcacaagagtctctctcaggcagtgaatcgaagcccaaggatgagctatgacagcgtccaggtcagacggatgggtgactagacccatggagaggaactcttctgcactctgagctggccagcccctcggagctgcaaag

SEQ ID NO: 29328 - DNA, 463 bp, Homo sapiens
  misc_feature (1)...(463): n = A,T,C or G
agagcgcnnntattgattcgtgagcntcngcanggcnnnngnncataagnggntgcaaatccttctcttgcatcatacttgctaagcacccactttccttatctaatcacatggccaagaccagagtcaatgtgggtagggatacacatggcaaaataccaggaggcatgcttcattaaggatcaatagtatagcaagttaatacaacttcatgcactcactattagagctaatcaaaaataggagaaattaccagatctgagcaaggatatagaactctggaattctcatttacattgtaaggaggggaaatttttgctgtacaatcactgtgaataaccattttacagtatctagtaaaggtaaatgaatgcatatcctatgaccctgcaacaaaaccccacacatctgtgcaccaaaatagatgtatggaaatgttcggctgggcgcggaggctcacact

SEQ ID NO: 29329 - DNA, 466 bp, Homo sapiens
  misc_feature (1)...(466): n = A,T,C or G
cgagccgcccnntattgataccatgggcatcagcccgncnggnggaantccaacctgaaagaggcgattgaaaccattgtggccgccatgagcaactttttgttttccgtggagctggccaaccccgagaaccagttcagagtggactacattctgagtgtgatgaacgtgcctgactttgacttccctcccgaattctatgagcatgccaaggctctgtgggaggatgaaggagtgcgtgcctgctacgaacgctccaacgagtaccagctgattgactgtgcccagtacttcctggacaagatcgacgtgatcaagcaggctgactatgtgccgagcgatcaggacctgcttcgctgccgtgtcctgacttctggaatctttgagaccaagttccaggtggacaaagtcaacttccacatgtttgacgtgggtggccagcgcgatgaacgccgcaagtggatcc

SEQ ID NO: 29330 - DNA, 444 bp, Homo sapiens
  misc_feature (1)...(444): n = A,T,C or G
nactgagacctccganagcactggaacctcggatgcacgagagagttccgggggttgcacactgccctgcacagcagcttttcttacagggaggcggtctttaagatgctcagcaataaggagtctctggatcagatcattgtggccaccccaggcctcagcagtgaccctattgctcttggggttctccaggacaaggacctcttctctgtcttcgctgatcccaatatgcttgatacgttggtgcctgctcacccagccctcgtcaatgccattgtcctggttctgcactccgtagcaggcagtgccccaatgcctgggactgactcctcttcccggagcatgccctccagctcataccgggatatgccaggtggcttcctgtttgaagggctctcagatgatgaggatgactttcacccaaacaccaggtccacaccctct

SEQ ID NO: 29331 - DNA, 450 bp, Homo sapiens
  misc_feature (1)...(450): n = A,T,C or G
nattgtacctccgnacanncactgatagatgggatganncganagaattctttggaaatatatacggataatatacgggacctgttatatggtaagataaatttttgctaatcagctttaaataacatctgttaattcctttttaataatagatgcgagactatttctttgtaacctatatgaaattgtcttaagttattgcaaagacacaaaatttttttcttctaaagctttagttgaatacctttaaatagaataactaccttaaagcgatgtttatgggtacttcttagtagtaattagagcattggactgggagttacataatctgagccctgagttctagtcttctgtcaactgtcaattacatacattgtccttaggcaaatcattgaaccattcagggttaatgttcttgtttataaaatgtgggtggtaggttggagtggt

SEQ ID NO: 29332 - DNA, 462 bp, Homo sapiens
  misc_feature (1)...(462): n = A,T,C or G
gaggagcnnttaatgaacggaagactacgcagnggcanncggctgatcaaagaggaagcagcagcaatgtctgctgtgggggctgcaactccatacctgtatcatcctggtgatagtcacagtggccgagtgagtttcttgggggcccagcttcctccagaggtggcagcaatggcccggctactaggggacctagacaggagcacgttcagaaagttgctgaagtttgtggtcagcagcctgcagggggaggactgccgagaggctgtgcagcgtcttggggtcagcgccaacctgccggaggagcagctgggtgccctgctggcaggcatgcacacactgctccagcaggccctccgtctgccccccaccagcctgaagcctgacaccttcagggaccagctccaggagctctgcatcccccaagacctggtcggggacttggccagcgtggtatttggg

SEQ ID NO: 29333 - DNA, 470 bp, Homo sapiens
  misc_feature (1)...(470): n = A,T,C or G
agtgggcaccaancggacttgaaacctatggacaccctcnggaannccaggcctagcccctccgcagccctggtggaggtcctcctgcgcagcgggagcattttcccgcacacggtgagcgggggctgggccgcctggggcccgtggtcgtcctgctcccgggactgcgagctgggcttccgcgtccgcaagagaacgtgcactaacccggagccccgcaacgggggcctgccctgcgtgggcgatgctgccgagtaccaggactgcaacccccaggcttgcccagttcggggtgcttggtcctgctggacctcatggtctccatgctcagcttcctgtggtgggggtcactatcaacgcacccgttcctgcaccagccccgcaccctccccaggtgaggacatctgtctcgggctgcacacggaggaggcactatgtgccacacaggcctgcccagaaggctggtcgcg

SEQ ID NO: 29334 - DNA, 470 bp, Homo sapiens
  misc_feature (1)...(470): n = A,T,C or G
gtggtgagnntttgagatcactagtccgagtggtggacctcctcatatggaaatttcagacggacagaggagaggagggaggaagaagaaagtatactcctccagaatttcagtgatctgttgtggcagaccaggggaaggaaggtcttttgaggtcacttagaagcatctttttgggacatccttttgggatctctgtaggctaggcatctcatatcttgagactcacccccagcctccaagcctctctccatttctctaacctatgcattttagagcgagaggaccgcctcactaatgtcaccatcctgccttttctaaaacatgcaggctcacacattctactcctgcttaagggctgtgttaaacgttttctaaccatttttgttttatttttctgaaaaagttaacccctcccaactactcacacattggctcttcctcttgagccacaaagttttgattcttgc

SEQ ID NO: 29335 - DNA, 469 bp, Homo sapiens
  misc_feature (1)...(469): n = A,T,C or G
atgggccccccccgtattgaaccctatggaaggctancgaaanncggngnaanncattccaccaagcatggccctgaccggggctgtcaggggccacttttcctcacctttccagccccactgggaatggggtcagtcacagcagaaccgtcgaaaggtggacctgatgtgggccctgccgggggcgcttggcctcagcgggccatgggagacccagggaaacgactctagtgtgaggcagtggtcctgccagtgactgacaaaccctctttgtaagcaaacttgacaaataatgaatctactgaactcagttatagaacaagttcattttgcatgaacttctcttattgaagcagaagccacgtcatgagcctgggggctgtcctctccccgtctgggagtgggacagaactgttcagtgccttgaaagccacagatttctgactcctggaaggaactgggcagtccc

SEQ ID NO: 29336 - DNA, 470 bp, Homo sapiens
  misc_feature (1)...(470): n = A,T,C or G
agggtnntatcgatatcatctctcgtgtggtggaattcctgcatccgccctcagcacttcaaggccctgcatgtgcccgcacctctccactcccctggctcagcttggacctctcttctgaactccagacttgcggatcctgctccccttcccacttctgcacttgggggtctaatgaggcctcagtggaacatagaattcctcccgccctgacatcatagctcccgcctgggaggcctcctggatgactcctttcgcctcctcccttccctgagagcagcccctggctcaacctccacctccgtgctgcctcggaccacctgcccagtcgagctgccatcacctgccagggtgagccactgcgcctgatcaaggcatcaccgttgaacctcctaagaggaaaacataaggctgtgcaataccaggaactgggattctaggttgccccagacaccaaggcatcaaaagcc

SEQ ID NO: 29337 - DNA, 460 bp, Homo sapiens
  misc_feature (1)...(460): n = A,T,C or G
nttgtagatcagtagtccagtgtggaggaattcactgcctctgccttagaggagcccacggctaagaggctgctgaaaaccatctggcctggcctggccctgccctgaggaaggaggggaagctgcagcttgggagagcccctggggcctagactctgtaacatcactatccatgcaccaaactaataaaactttgacgagtcaccttccaggacccctgggtagaaggcagcagtgccacttctgtgcttggcattcaagtatagcaagacccctgtgtctgcagggtctaacccaagggaagccaggttgcccccactgctccacctcccctgttgcagctcctgcttcctctgaaggactcatcctttgccctcttacccaccagggcagagaaggctctgtggaaaaggtggccttggatgcactggcattgcctgtgtctgcctatgtcccttgc

SEQ ID NO: 29338 - DNA, 474 bp, Homo sapiens
  misc_feature (1)...(474): n = A,T,C or G
cgtgggggntttcatcgacatcactagtccagngcggnggaattcattttatggaaaggtgccctgtgactctgaaagtgtccggttatttagcaactattcactttattcatttacctatatcagcaaggatgcacgatttctggttttctttggagtttctactctattactaacattatgtgttgattctcaagttgttctagcagaactagtccagcaggtctgtcctttcaggctgagtttcgcgtgtctttcacattctttgagcactttcttactttttggtataagttgttttagggttctcctcctcagaggcaacaattgttgccagcttcttgtatctttccagagatacttcatgtgcatacgtgttaatgtggatatgtgtatgtaaaatttagcatttgcgaattaaacttttaattctaaaaagatgttaattgttaatttcataaattagacttaatg

SEQ ID NO: 29339 - DNA, 472 bp, Homo sapiens
  misc_feature (1)...(472): n = A,T,C or G
agggtnnatctcgatatcactcttcatgtggtggaattcgagaaatgaaaaaggacctgaacttcctcggtggttgttgagagttaaggcacggggttgatgttttcagatgaaattctcaaagcaagtcagggtggggatggatggtttcatcccacaggtgggaagattgaggcacaacaggggaggggccctcgctaccacacttaggaggggacaggctgggttggttgcagccatttgattcccattttgcctgtgtaggttagagaagaggtcttggggaccccactccatacattgtgctgtcaggtgcaggcctttttggggattccctgaatgttcgtgtgagtcgggggtctctaatggaggagtccagcttcacatgtgttcttgacagggctgtattttctttttagagtgagtttttctcaggtccttgattggaactgcctcagagccagggtccttn

SEQ ID NO: 29340 - DNA, 470 bp, Homo sapiens
  misc_feature (1)...(470): n = A,T,C or G
gagcggnnnnnnnnnattgagncctaactgagaccttagtccgtgtggtggaattcctgcctgctcccggtgtgaccgcgtccttccctggccgacccgaaggaagccttctggttgtctgccacttcctcctgttggactgcctgagagaggggaagagagagacctcggacctgcatgtcaagatggattttccccttttatctctgccctcctccactccctttttgtaactcccttacagcccccagacccttcttgaaacgagagccagcaagctgagcacagaccagcagcgacctcccttccagcccccagaaagctcggtcacttgagtgttttctagaatcctggggtgctcccgggccgctctcagagaagtggcaggtttcacgttcagccgtgtggcggatcgtgtggcttccaaagccttttacagcccccgccccccatcccgtggtctgtctgca

SEQ ID NO: 29341 - DNA, 431 bp, Homo sapiens
ctagccaaggctgcagcatatagaccaggaaatcaggtagcccagactggtgatggagcagagtctgggggaagggtcgtgggtggggaatttatcaccaacatccattgtagggggaatctatgattctgcttccccagcggattcccactctgtccaccaagtggggcgtagcacagcctcacagcaaccgccctgaccttgggcagtctagtgttcctgcattctagtccctgctgtgctgcaggactttgggcaagtgacctgccctctgtgagcctccctctgacacagaggaggtggctccccttccccacaccttagagtggctgggagggtaacaaagagggcctgcccctttagtctcctgcacccctgccccctggttcaccagagggagcggatgaaggatggcagcatctcacatgccc

SEQ ID NO: 29342 - DNA, 466 bp, Homo sapiens
  misc_feature (1)...(466): n = A,T,C or G
cactgagaccntccgcagngncgnggaattcgccgcatggtaactcaggcgccgggcgcactgtcctagctgctggttttccacgctggttttagctcccggcgtctgcaaaatgaagattgaggaggtgaagagcactacgaagacgcagcgcatcgcctcccacagccacgtgaaagggctggggctggacgagagcggcttggccaagcaggcggcctcagggcttgtgggccaggagaacgcgcgagaggcatgtggcgtcatagtagaattaatcaaaagcaagaaaatggctggaagagctgtcttgttggcaggacctcctggaactggcaagacagctctggctctggctattgctcaggagctgggtagtaaggtccccttctgcccaatggtggggagtgaagtttactcaactgagatcaagaagacagaggtgctgatggagaacttccgcagg

SEQ ID NO: 29343 - DNA, 474 bp, Homo sapiens
  misc_feature (1)...(474): n = A,T,C or G
agcggtnnatttgatgtgcatctctagtgtggtggaattccatgcgtggcagtgggtgcacccatgccctacgtgaagtggatgatgggggccgaggagctcaccaaggaggatgagatgccagttggccgcaacgtcctggagctcagcaatgtcgtacgctctgccaactacacctgtgtggccatctcctcgctgggcatgatcgaggccacagcccaggtcacagtgaaaggtgagtgtggcaggtgctgtaaccagtgccctccctgtcatctgggaggtcctggtggtgggcgaatgtgagctggctgccatgggcacaggcatggctgagggattcttgccctttcctgggtgtccctgccctggggtcctccagcccttagagggagggagggaattctgttattagccggcttaatgataatagttaaggcatattgagtttcttggtgggagacatcatgctag

SEQ ID NO: 29344 - DNA, 454 bp, Homo sapiens
  misc_feature (1)...(454): n = A,T,C or G
tactgagctctcgcacangcgnnggtgataccnctcgaggaacaaacnccaaacacatctgaacatcagaaggggcagaccttttacgcgccaccttaagagctgttacactcacgcgcgagggtccgcagcttcattcttgaaatcagtgagaccaagaacccaccaattccggacacaatattggcaccttgaaatcagccataaagggactacttataccatataaattggaagaccttagaagtccaggtgtttctcccagatatccagtcattaaacatttaccattgtatcactgactatatgtcaccaaaggaatcgagaagagatggagtcttgctctgttgcccaggctggagtgcagtggcatgatctcagctcactgcaacctctgcctcccaggggtcaagcgattctcctgtctcagcctcctgagtagctgggattaagg

SEQ ID NO: 29345 - DNA, 473 bp, Homo sapiens
  misc_feature (1)...(473): n = A,T,C or G
aggtnnntatcgctagcatacttcgtgtggtggaattaggacccgccacatgggccgcgttcgcaccaaaaccgtgaagaaggcggcccgggtcatcatagaaaagtactacacgcgcctgggcaacgacttccacacgaacaagcgcgtgtgcgaggagatcgccattatccccagcaaaaagctccgcaacaagatagcaggttacgtcacgcatctgatgaagcgaattcagagaggcccagtaagaggtatctccatcaagctgcaggaggaggagagagaaaggagagacaattatgttcctgaggtctcagccttggatcaggagattattgaagtagatcctgacactaaggaaatgctgaagcttttggtaagtgtttgctggattcctaaagtggtattttcctggtcaaaaaccatcagtaggtcttattatccaaggtcacccagctagtaagtggcagagn

SEQ ID NO: 29346 - DNA, 473 bp, Homo sapiens
  misc_feature (1)...(473): n = A,T,C or G
nggagccnnnnnnntttgtagattcgttatcagtgtggtggaattccaggcacccgccaccacatccggctaatttttgtatttttagtagagacagggtttcaccatgttggccaggctggtctcgaacttttgacctcagatgatcctcacatcttggcctcccagagtggtgagattacaggcatgagccagtgcacccggccaaattacttgcatgaaaaaaacacatagtgcttactttgtgccaggcactattctaagtacttcacagttattcgtataatctttataacaactccgaggaaagtactattattagtcttcccattttatagatggagcagaggcacagagaggttaagcagcttacccaagggcacacagctggtaagtggcagaatctggaactcaggtagtctggtgccagagtctaagctcttaacagctgtattatttttatgatttttaaa

SEQ ID NO: 29347 - DNA, 474 bp, Homo sapiens
  misc_feature (1)...(474): n = A,T,C or G
ggggtnnaatcatcgacgtcactagtgcagngcggnggaataccggcgtcatcgggatgatgcggacgcagtgtctgctggggctgcgcacgttcgtggtcttcgccgccaagctctggagcttcttcatttaccttctgcggaggcagatccgcacggtaattcagtaccaaactgttcgatatgatatcctccccttatctcctgtgtcccggaatcggctagcccaggtgaagaggaagatcctggtgctggatctggatgagacacttattcactcccaccatgatggggtcctgaggcccacagtccggcctggtacgcctcctgacttcatcctcaaggtggtaatagacaaacatcctgtccggttttttgtacataagaggccccatgtggatttcttcctggaagtggtgagccagtggtacgagctggtggtgtttacagcaagcatggagatctatggctctg

SEQ ID NO: 29348 - DNA, 475 bp, Homo sapiens
  misc_feature (1)...(475): n = A,T,C or G
tggggnnnaatcatcgtcctcgttagtgtggtggaattcgtgcagcgagtcagagcggcagatccggagtacagtggactggagcgagtcagcgacatatggggagcacatctggttcgagaccaacgtgtccggggacttctgctacgttggggagcagtactgtgtagccaggatgctgaagtcagtgtctcgaagaaagtgcgcagcctgcaagattgtggtgcacacgccctgcatcgagcagctggagaaggtgggtgggtagctcagctttgcccgcccctgccctttgggtgctgaggccctttcagcgcgcactcacacccacatgttatacaaacggcctgccaggagtgacccagcactcgggggtgaagagtcaaggaccctggagccaaatgcctgcgttcgaatcctggctcctcactgattagctgctgtatccccactgcctggaacaaacctggcgccn

SEQ ID NO: 29349 - DNA, 448 bp, Homo sapiens
  misc_feature (1)...(448): n = A,T,C or G
ttttgagacatctgcncgngccggttgattccctagaggggcatgtggagcgtccgcagcaggaagggctctcgcacgggggcgtcttgaggacgggcagcccctcccagccccggtgggagtcccgaggcagctgctgggggctgggctttgagctcggtcccgagagacccggcagggctggtcagaggggcacagccaccgcctgtgcctgcccctctctggcccactgggcgtcgtgcccctccccggagaggcagccttcacggcgggtcagggcctggccttggtccccactctgcgatgatttctgtgaaattttgctgtagcgatgacattgttttcagaatttccaagagttctgtctgttctgttttttattcagaatgaaatgaaatattttttttagttctgggnnnnnncncnnnnnnnnccanatataaacctg

SEQ ID NO: 29350 - DNA, 456 bp, Homo sapiens
  misc_feature (1)...(456): n = A,T,C or G
gacggagngctacntgagatcatcgaacagngcggnggaattcaacgggatcgtgcacgatgtggacgtgctgggcgcgggcatccttttggtgactctgctggtggatcgggacgggctgtacaagatgaaccgcctgtacctcacccccgacggcttcttcttccgagtccacatgttagccctggactcctccagctgcaataagccgcgtccagagtttaaacctgcaggtatattgtgatgggccacatctaccataagagacggcagctccctacagctctgctccaggtcctgagaggccgcctccgtccaggggatggactgctaaggagcagcagcagctatgtgaaaaggtttaatcgaaaaagggaagggcagattcaaggtgcaattcatacccaatgcatttgaaacaaccatcctggcatttctggaccgcaagagacttgg

SEQ ID NO: 29351 - DNA, 470 bp, Homo sapiens
  misc_feature (1)...(470): n = A,T,C or G
aggtccnnnnnnttcgagatcgttagacagtgtggtggaattccacagacaggcgaacgtccaagaagttcaaatgtgacaaaggacatcttgtgaagtcagaattacagaagcttgtccctaagaatgacagcgcttctttgccaaaagtgacacctgagaccccttgtgaaaatgagtttgctgaaggcagtgccttgcttccaggcagcgaggctggcgtttctgtgcagcagggggctgcaagtcttcctctcggtggctgcagagttgtgagtgactctcgcttagcaaagactagagatggcctgtccgtgccaaaacacagtgccgggtccggagcagaagaatccaacagcagctccactgtgcagaagcagaatgagccagggctacagacagaggatgtgcagaagccaccacttcagatggacaacagcgtctttctagatgacgacagcaatcagcca

SEQ ID NO: 29352 - DNA, 455 bp, Homo sapiens
  misc_feature (1)...(455): n = A,T,C or G
gattgagnccnacttgagacattagnccagngcggnggaattccctgactgaagtgtggaactggctgaaatgagaaagtggtaatttggggaggaccttgtgaaatggaaggagttttaaaccttacatgcatcagaattacctggagccttgtgaaaacacaggttgctgggccctagtccattaagaaaggaagtggggcttagaatgttcatttctcccatgttcccaggtgatattcaccatgctgtcctgtctggacactaccttttgccatacccattacaaggtattgcacgtgctggttgaactatggtctgtcttattttggtgctaaaagcctgtgccaaataccaacgctgcagcattaaggaatgtgatagaaaagattctgaatataggccaggcgcagtggctcacgcctgtgatcccagcactttgggaggccgaggcn

SEQ ID NO: 29353 - DNA, 558 bp, Homo sapiens
  misc_feature (1)...(558): n = A,T,C or G
agattgatccccctcncnnnnnncattgaganccctttgcagagtggcggaattctgcgcactcgatttggaccttgtgactgatctggttctgcacatcgatgctcgcggggaaccaggtgggatcctgtgcttcctgcctgggtggcaggagatcaaaggagtgcagcagcgcctccaggaggccctgggcatgcacgagagcaagtacctcatcctgccagtgcactccaacatccccatgatggatcagaaggccatattccagcagcctccagttggggtgcgcaagattgtcttggccaccaacattgctgagacttccatcacaatcaatgacatcgtgcatgtggtggacagtgggctgcacaaggaagaacgctatgacctgaagaccaaggtgtgctgcctggagacagtgtgggtatcaagagccaatgtgatccagcgcccgggcccgggggggccgctgccagtccggctttgcctaccactttgtccntcgaagccggctggagaanatggtccctttncaagtgcagagatcctgncacactt

SEQ ID NO: 29354 - DNA, 471 bp, Homo sapiens
  misc_feature (1)...(471): n = A,T,C or G
aggctntcnnnnnatccttaaaacatccgacanccggggatttgatgccatctgacacacctgnggtcacaagttagctattaactaatttaggacatgttccttcacctctttggggactgtcatccataaaatggaggggatggaacacattatttctaaggtatgttccatctgtaacatattttatgcatattctcctctgagaaacaaccaataagtattattatccctaataatatgctaaagaaaaaaggcctatctataaggcaaaagttattttaaatcaaagaaatgtagtcatgctgcatgcatcaatgtaactgaacagtataagacttaaggaagttttctatttatgggaagttatggtgtgcattttgtttcttaccaccacttttgtagcttgggctggtttccactgtacaagcgtaacttcagcacacagcataaaaactgaaacccactgta

SEQ ID NO: 29355 - DNA, 464 bp, Homo sapiens
  misc_feature (1)...(464): n = A,T,C or G
agccgccactgaaaccctcgnactgatgaccactaggacagagcggnggaattccgaatgggttgggcctccagcgtancatactgacacctacccccacccccacctgatcgccagacctcagggttttccggagctgaagaatgacacattcctgcgagcagcctggggagaggaaacagactacactcccgtttggtgcatgcgccaggcaggccgttacttaccagagtttagggaaacccgggctgcccaggactttttcagcacgtgtcgctctcctgaggcctgctgtgaactgactctgcagccactgcgtcgcttccctctggatgctgccatcattttctccgacatccttgttgtaccccaggcactgggcatggaggtgaccatggtacctggcaaaggacccagcttcccagagccattaagagaagagcaggacctagaacgcctacggg

SEQ ID NO: 29356 - DNA, 473 bp, Homo sapiens
  misc_feature (1)...(473): n = A,T,C or G
tgtgggnnnaaggatcgcgtcactagtgcgngcggggaattcaggaactgaaaaagaagattgggcaatattagagaaaattaggaagactgatttgcattgccatttaaatgtgttgaccctgatagtgctttgcacagtgatctttagaggttaaaaagaagcgataggagacattttgcttatctttcaagtgttcctgacagcatctcagaggatggtgttctctggcttactctctgggaaatgctgctctgttggaaatccggagttctgagtgatccccatgcgttttctgctgcagagcaggacatgctgaagtgattccttcgtgagcagatgttagaggcctccttttgacagctggttacaaggtagatcacaaatatcctatcacgtgtgttatgcgcctcattatggggaggaataatgagaataataagtccgcgtgagacttacccatatatatcttt

SEQ ID NO: 29357 - DNA, 453 bp, Homo sapiens
  misc_feature (1)...(453): n = A,T,C or G
taatgagccttacgganancttcgaaagngcggnggaattcagggtctcattccccatgtttagcaagattgcagtcaccggtactggtgcccattctgccttcaagtacctggcccagacttctgggaaggagcccacctggaacttctggaagtacctagtagccccagatggaaaggtggtaggggcttgggacccaactgtgtcagtggaggaggtcagaccccagatcacagcgctcgtgaggaagctcatcctactgaagcgagaagacttataaccaccgcgtctcctcctccaccacctcatcccgcccacctgtgtggggctgaccaatgcaaactcaaatggtgcttcaaagggagagacccactgactctccttcctttactcttatgccattggtcccatcattcttgtgggggaaaaattctagtattttgattatttgg

SEQ ID NO: 29358 - DNA, 475 bp, Homo sapiens
  misc_feature (1)...(475): n = A,T,C or G
acggtgnnaattgatcgacctcgctagtgacgnggaantcgatgaggtttcaccatgttggccagcctggtttcgaactcctgacctcaagtgatctgccctccttcacctcccaaaatgctgggattacaggcatgagccacccgccatgcccggcctctttttagttttgctattagaagtgataacattctttttagtttcactattagctttccttgcattcacattttacattctctcattagcatttctatccttggcattgctgagtttctaatgcttttttgcgtgagtgttttacccattaaatgtttttgtttaatttattattttcaagctttccttttgtttccataatgaatctttgtgagattcctgtattttagccatttccaaaaagtgccattttacttatttcactggaagtatttaaccattccaaactacaggctctaagtagcatcctgacatt

SEQ ID NO: 29359 - DNA, 446 bp, Homo sapiens
  misc_feature (1)...(446): n = A,T,C or G
natcgagtcctaggaccatcagcacagngcggnggaattccatgagccgtgtgcagccagagaggcagcttgcgttttctggaccagaagcagggtgggtgtggagaaggccaaaaacctcagggcgacctaagagctgtcctgcagcggggacagtggggacagcagggacagcggggaggcaggaaaagccccgaacacagctgaggcaggttctcagagcaagcctcagggccactaccaggtgacccctgccctcagctctcaccagcgaccctcacagaaacacaaaagggaggggcgccgacctcaacaatggcccagaggggccatactgcctggcaggggttctcaacctttagggagcgggagcaaggggccttccgaggataaatagaaatgaggaaaatgaggggaggtgacctctcatccttcctcttagctgg

SEQ ID NO: 29360 - DNA, 442 bp, Homo sapiens
  misc_feature (1)...(442): n = A,T,C or G
nggaaaactggacctccganatgagggcatcgaancancncctcaccgacgccgacatggtcatgagcttcgtcaacctcgtggattatgacaaggaatttttccacccacgctaccaccatcgagagttccggtttgatctttccaagatcccagaaggggaagctgtcacggcagccgaattccggatctacaaggactacatccgggaacgcttcgacaatgagacgttccggatcagcgtttatcaggtgctccaggagcacttgggcagggaatcggatctcttcctgctcgacagccgtaccctctgggcctcggaggagggctggctggtgtttgacatcacagccaccagcaaccactgggtggtcaatccgcggcacaacctgggcctgcagctctcggtggagacgctggatgggcagagcatcaaccccan

SEQ ID NO: 29361 - DNA, 453 bp, Homo sapiens
  misc_feature (1)...(453): n = A,T,C or G
nttagagngacccttcgagaacccttaggccagngcggnggaattccggttggaggaggtcggctggttatcggcagttggagggctgaggtcgggagggtggtgtgtacagagctctaggactcacgcaccaggccagtcgcgggttttgggccgaggcctgggttacaagcagcaagtgcgcggttggggccactgcgaggccgttttagaaaactgtttaaaacaaagagcaattgatggataaatcaggaatagattctcttgaccatgtgacatctgatgctgtggaacttgcaaatcgaaggtgagtggattcaatcatgtttattgtatctgaattatgagaaactattgtatataatgagtgacagtaaagataattttcaggaattgggaaagaaggaaaactagatttcactgaccttccaagtttatctagttacatagatn

SEQ ID NO: 29362 - DNA, 449 bp, Homo sapiens
  misc_feature (1)...(449): n = A,T,C or G
nttcgaagacaactgatgagccttgcggaanncgccaccgcgcccggactctaatggagtctgtacttaccattactgcatgagagagatgttcattgagcactcgttatgagccaagcactgtgcattgttcctacattatgccatgaaatttctataaaaaccttcaggtttgtagggatggatgattacctatcagctagatatgagtatcatacttacttgacagacaaggagtctttgacttaagtagcttgtccaagatcacaacatgagagttaagagaagggttttaaatgtgaagctttgtgatagaacccaaacccttacccaataagctggaccaccacggatctcaggaattggtcactctggctgccaaatttctgctcacctcttctctctcttcctttttattcttttcccaaaatataacgacacatcaaagg

SEQ ID NO: 29363 - DNA, 478 bp, Homo sapiens
  misc_feature (1)...(478): n = A,T,C or G
agtggtcncctaatgagactcttgttgagcgcagtagnnccccgggtgaaaattccgaggaaaacaaaacaaacgaatgaatgaacagacacacacaatgttccaagtttccctaaaatatgacccacttgttctgggtctacgcagaaaagagacgcaaagtgtccaaaaggaacaaaagaacataaacgaataagctaagaagaaaacaaaccagaacgaaacaaaacaaacacacggaccgataaacaaggaagcgaagtataagaaagaaggcctcatatccaattacctcactcattcacatgtgagcgacacgcagacatacgcgagggccagcgtcaccagaccagctgcgggacaaaccactcagactgcttgtaagacaaatacttctgacattttcgcttaagcaaatacaggtgcatttaaaacacgactttgggggtgatttgtgtgtagcgcctggggagggggg

SEQ ID NO: 29364 - DNA, 448 bp, Homo sapiens
  misc_feature (1)...(448): n = A,T,C or G
gggaatggtgaccatctgaacgcactgtatgtcctctagaccatcgnggnggaattccaaatcagtagcgttccttgtcattcttttgtggttggtttcacgtaaatattttgtgtgtatgataagagaatttgattttaatgaatatactttaaaagcaactttttttttattcttcctcaccatcgaagatggagaaaaataagaagggctgtcttgcggttccatttcttttgtggatagtaagaagcgctgtcttctggttccgttttttttttctggatagtaaggaggtttatcttactctggcttcattggcctcaaacctcaagtagtcactaataccctggctatgacagcttttatcgtagggttaaatggcagatttatttacttggcaaacattgtcaagtctcagaaaaattaccccatggtcttgccttcttcc

SEQ ID NO: 29365 - DNA, 441 bp, Homo sapiens
  misc_feature (1)...(441): n = A,T,C or G
nttganncccactgatgacattagtccangcggtggaattcggcacagctcgcagagaaacaagcttatcgtggtcgtgcatgcctgcagaaacctcattgccttctctgaagacggctctgacccctatgtccgcatgtatttattaccagacaagaggcggtcaggaaggaggaaaacacacgtgtcaaagaaaacattaaatccagtgtttgatcaaagctttgatttcagtgtttcgttaccagaagtgcagaggagaacgctcgacgttgccgtgaagaacagcggcggcttcctgtccaaagacaaagggctccttggcaaagtattggttgctctggcatctgaagaacttgccaaaggctggacccagtggtatgacctcacggaagatgggacgaggcctcaggcgatgacatagccgcagcaggcaggagg

SEQ ID NO: 29366 - DNA, 439 bp, Homo sapiens
  misc_feature (1)...(439): n = A,T,C or G
ntttgtagaccactggatagcgctgaggaattcggcttagcctcaggtggcagatgtttgaggaaaggaattatgccaggaaggtgggaccgggttatggtcgggtttctattgggaatgctctttgtgcttttgggcatctgaatggaagctttacatagaaccttaggtagaactcccccaaatcgccatatttaaaaattattttcactctattcttgcttaaaactgtactcttttgcaaattaacaattttatcactgattcagagttaaaaagaagactaacttttcaagcaaatgcatctgtaaagatgctttagattagactgtcatgtctcagtgtctatctgtatatattatttgatattcagagaatctaaagcactcgtctactgttttaatgagatttaacagcttttaacagtgagtttcgtttg

SEQ ID NO: 29367 - DNA, 436 bp, Homo sapiens
  misc_feature (1)...(436): n = A,T,C or G
nttcgaagaccattagatagcgctngaantagcctggcaaggagatagaaggtagctgaacattgaaatgagttttgaggggagtctcccaactttttaagctggtggggggccgtgttgcttactggaacaaggaggaacagagactctataagcagccagctgagcaatgtgagagttgtcttgtaccaacaagggaatctgactgcaaccaccttgctttccctacagactttgagaagcccgagagcccccgagccgccatcagcagctccccaggatcaccaatggcctcaagcgccagcaagcttagccccacccccgacgggcctccacccttggctcagcccgcactgatcctgcatcccttggcctccccactgcaggtgggcgtgccacctatgactctgtccatcatgctcaaccctgcgctcat

SEQ ID NO: 29368 - DNA, 216 bp, Homo sapiens
  misc_feature (1)...(216): n = A,T,C or G
caccattccatccgcccctacacagngtttgaactggagcaggtccggcagcatagccgcaacctcaagctgggcagcgccttccctcggggtgacctggcgcaaatggaacagagcgtggggcgcctgcgctccatgcactccaagatgctgatgaacattgagaaggtgcagatccacttcgggggctccaccaaagcccacagccagataaac

SEQ ID NO: 29369 - DNA, 439 bp, Homo sapiens
  misc_feature (1)...(439): n = A,T,C or G
tttgagacatttgatgacactagaaagngcggnggaattcgtgggtctcacccttaccctatctctgggagggaggtggcatcattttcgggttattaaagagagatggagggccccgagaagttaggtggctgcacaaaacaggagtcagtcatgggcctgggacatgaagccagtctgcttgactccagagctctttctgggatggcggaatgacccctactcactcggcaatggggtgaactccacggccgacatgctggtgaccttgctggggtccagctctatgcggtgatattcaaagatgctccttcgccgagattctgaaacagaggcagagcctgttgtcaggagcatatcacaggcagagggcatcgaggcctcttcccggacagtctgacaggtcagcctgctgcactgaaggcagtaagtgcacccn

SEQ ID NO: 29370 - DNA, 472 bp, Homo sapiens
  misc_feature (1)...(472): n = A,T,C or G
gaggggaaaaaaattcgaagacccctngnttccgagnatcactagtccgtgcggtggaattccccatctcgagcgggcggtcttaaatataggggactgttaaaaccccatatcttacttgactgggccttataaaaggaagccatcggatgtatgcctatcatccgagccgttcttgaccatgcaaagctatactccatacgtcctttactgacatatactggaaaccgcctgccatagagtgaggaacagctattttacatgaactgtcctgctaagaagtgtattaaagatttccattttgttttactaattgggaacatcttaatgtttaatatttaaactattggtatcatttttctaatgtataatttgtattactgggatcaagtatgtacagtggtgatgctagtagaagtttaagccttggaaataccactnttctattttcagatgtcatggatttaatgag

SEQ ID NO: 29371 - DNA, 485 bp, Homo sapiens
  misc_feature (1)...(485): n = A,T,C or G
cgagagtcgnccaatggagaccattcgatagacgcaccattagtccagagcggaggaattcgggcgaatcacttgagattagaagttcaagatgagcctggccaacatggcgaaaccccatctgtactaaaaatacaaaaaaagaaaaaattagccgggcgtggtgtcaggggcctgtactcccagctgctcgggtggctgaggcatgagaatcgcttgaacccaggagacggaggttgcagtgagccgaaattgccccaccgcactccagcctgggtgaaaaagcaagactcttgtctcaaaaacaaagaaacaaaccgtataccatcaaatctaagacactattgattataagatgaagttattttacatattaattaaacagaaaagtgcgtaagacggcataaagctgggacatcaaagggctatctccttattagtggaaggatgaatgagaaataacccacaacacaaagacagcaagg

SEQ ID NO: 29372 - DNA, 464 bp, Homo sapiens
  misc_feature (1)...(464): n = A,T,C or G
agggcnntatgatatcatactccatgtggtggaattcgttttaactttcttcataagttaagcaggagtcatttgcctctgtcatgaattccaagactacaaagttttaagagatgctgggatagcaaatgaggcttgaattctgtgttgacaagcccacacacctcatttcatttagtatccaagagataaacaaacaccacctcttctactccaggactggcatctctgggcttttctgccataatcccaaatcaggccaactctccttcctctaggattcgcgtggtgggatgccaggcagcgacacccttagagcaggaagtctgactgtagacccagctacaccccaaccagtgagggtctgcattgggcacttgggcctcctcgtgaggcgggggttcagggttctggtgcaatgcccaaggcagggccacttctcagccctagctctgggccagcac

SEQ ID NO: 29373 - DNA, 447 bp, Homo sapiens
  misc_feature (1)...(447): n = A,T,C or G
aggcggaggggnccatgagacatcatgagcccgtggganncccgaccatagggcatcaggccctggggggtctggtgtgggtaggggagtcctgtggtcaaacctgtggggagtatctgggcggggccaggtggctgggctggcttgatctcaagcagagctgggcgcttagcatcagtgaggaagttgttaaaaaacgcgacttcctttttcacttcctcaattttctctgcatgcttgttgaagatatgtttgcgcacaaactcaggacccttgaatttcttgccactgagaggacacagccacttatccttgcccagttcctgcgtgttggaggtgacgaacttctccacttcctgctctgggtctttgcgccccatcttctgggcctcttcctctgagagtgactcccgcacactcagcaacggcgtgagcttctcctcaaaa

SEQ ID NO: 29374 - DNA, 554 bp, Homo sapiens
  misc_feature (1)...(554): n = A,T,C or G
gcggttnnnatcgatcactctccganggcgcaannccaggnggccatgctgctcaatgtctcangccacgtcaaggagagcgggcaggtgctggccaagcagcacaccttccgtctgcgcaccccagacctctccctcacgttactgggagcagcagtggttggccaggagtgtgaagtacagattgtcttcaagaacccccttcccgtcaccctcaccaatgtcgtcttccggctcgaaggctctgggttacagaggcccaagatcctcaacgttggggacattggaggcaatgaaacagtgacactgcgccagtcgtttgtgcctgtgcgaccaggcccccgccagctcattgccagcttggacagcccacagctctcccaggtgcacggtgtcatccaggtggatgtggccccagcccctggggatggnggcttcttctcagacgctggaggtgacagtcacttaggagagaccatccctatggcatctcgaggtggagcttagccccgtgccaggagcaatgtgactggagtcagatgagcaatgacatt

SEQ ID NO: 29375 - DNA, 404 bp, Homo sapiens
agtagttaagacgttctaggcaataccatagacacatctgactgtgtctctctctttgagtgcaagaaactcaagtcatcttaaaaaaaaaaaaaatacaaaaaaaatttacaaaaaacaaacccaaaaaaaatatcttttttaggccaaagttttctacaggtattaaggaatatttttcttaatccttataagttttatgggttaaatatttcttaataccggtagcattaatttatacttttgtagcaacacaatatttttataaacagccggggcttggctcaagtcttcacaaggggtttaggcagggccatcttggggaccctgtgtaccatgtactgtatttaaaaaaaaaaaaaagttacctatggcccccctggctgggtaaataaacaaaaaaa

SEQ ID NO: 29376 - DNA, 557 bp, Homo sapiens
  misc_feature (1)...(557): n = A,T,C or G
gcggtgtnnaatcgatcacaatcggtgngcngcaanncctgngacgnngngaaactagtattccaattcagaggtcttcggatccaaagtttgcatgcatggaacctctgtcgcctcctcattttatagaggtggaaactgaggcccaaacaacagcagggatgactttaatcctaccaacttcccttcatgatcttcctgtttgcacaaggctactaggggtgggctctggctgggaacagatggaacagcttcccaggggaggtggctctagcttcctctgcatctcccacctccccaggagggtctcagggcttaccagactggaggagctcagctttggtctccagctcctgagcttgggcctgggatgatttattggccaggtagtagcgggcaaacttctgcagaaggacaggaaagtgttgggcctgcctggcttgcctgaggtgtctggatccctccccataccattggcctggaggctggggcccctcagtgtcttctctgtgggtcagggctgagaccaggtcnntctcacctcccctggcctcttn

SEQ ID NO: 29377 - DNA, 500 bp, Homo sapiens
  misc_feature (1)...(500): n = A,T,C or G
gcnnnatanncgaggggcccnnnaattgagncctcgagancattcggccagngcggnggaattcctgagctgcaaggtcacatagctagtaagggattgttctgggctgaagaaaaaggatgcatggaggggagtatcttgcccaaggtcacgttattagtaattagtggagtcagaattccaatgcaggttccttcactccagctcttcttacctcagaaaacacacttgcctggaccctcccctggagttggatttagttggcttgggcatggcgatttttaaaacttccccaggcgattttaatgcacagccagactgagaaccactgctttaccccatttttggagtaaaatgaattaccctccttaggaaatctggtcgctctatgtggccattcctttagttcctgcccctcctccacagaaacacaccattccaaatctggcagctaatttttcatggtctttgtttcttcaaaattattttcaggaagtctt

SEQ ID NO: 29378 - DNA, 560 bp, Homo sapiens
  misc_feature (1)...(560): n = A,T,C or G
gcggcnntttgaaacccctcgatcgtctctcccgagnggngcaanncgcagaatacagataattcccagaaagagaaagccccaccctggatagagaagtgagaagaggtgtaagattcattatacaaaataagagacttgaaagaaaatgagaccaaagacgcagtctcatgaaagtactgcttctggggaaaggaaagagggtgccttggaagggtcaccatctacctggaggcttggtgatagagagaaggggtagtagaaattaaggatcttggtgaaccagaatagaaaatagatactcatttctcccacccaaaaaggagtcattaattaaaaacaaacaaacaaaaaaacactttattaggtactatttactaagaaatccagttaagtcatctaaattccttgcttctgcctatacacaactatatctggtttaggaaaaataaaatatttcaagatgaacagaagatggcaggcaacatccatataaagttactttagctggaaaacanaatgatagtcaaaacatttcaactgggctgggcacagtggcn

SEQ ID NO: 29379 - DNA, 435 bp, Homo sapiens
  misc_feature (1)...(435): n = A,T,C or G
tcttaagccccttgaanccctggnggaancccggcgntttcttaagctctgtgaggaatggccagtggacgagaccaaacggtgtttgactttgcgcttacctgcgacagcgggtagcacaggcctttcgggagggagagaatacccaggttgcatagcctgaggcctgtgatcagatgtacgagagcttagcgcgactccattcaaactactacaaacacaagtaccctcgccccagagacaccagcttcagtggcctgtcgttggaagagtacaagctgatcctgtccacagacaccttggaagagcttaaggaaatagataaaggcatgtggaagaaactgcaggagaagtttgcccccaagggtcctgaggaggatcataaggcctgagctcaggccttacctcgtgcacatacctaggtgtggagtcttg

SEQ ID NO: 29380 - DNA, 439 bp, Homo sapiens
  misc_feature (1)...(439): n = A,T,C or G
actgatgaccctcgatgacatctgacagncnggnggaattcagccaccgtgccctaggttattttaatatagtttatcaccaatgtatgcaattttgtgttctgagtgctttacttttaatgacccaaactaagatgttctactctgtgtgttagttctctggcaagtagcagaattgtggtatgtgttcctaaaactaagatgtatcctgatcacgtgacagaggctgatacctctttaaaagataaagtttggaagtgaaacagagactagaacagatatttgtcacacccatgttctattttattttcatttgtaattattttagagacagagtctggctctgtcgctcaggctggagtgcagtggtgcagtcatggtacactgtaacctcaaactcctgggctcaagctatcgccccacctcagcctcccgagcg

SEQ ID NO: 29381 - DNA, 548 bp, Homo sapiens
  misc_feature (1)...(548): n = A,T,C or G
nttaggaacactagtccagcgtggtggaattcctggccaccacgggacaggaaggcacagagcatggagaatgatgaacttccgtcagcggatgggatggattggagtgggattgtatctgttagccagtgcagcagcattttactatgtttttgaaatcagtgagacttacaacaggctggccttggaacacattcaacagcaccctgaggagccccttgaaggaaccacatggacacactccttgaaagctcaattactctccttgcctttttgggtgtggacagttatttttctggtaccttacttacagatgtttttgttcctatactcttgtacaagagctgatcccaaaacagtgggctactgtatcatccctatatgcttggcagttatttgcaatcgccaccaggcatttgtcaaggcttctaatcagatcagcagactacaactgattgacacgtaaaatcagtcaccgtttttccctacgaatacaaaactgccagtcctatatggagtctgatcacaagactgcaagttctcacaga

SEQ ID NO: 29382 - DNA, 498 bp, Homo sapiens
  misc_feature (1)...(498): n = A,T,C or G
ggtggcgggnnnngnnaattgagnccatgagnacattcgnccagngcggnggaattcgcatgccaggccccaagggcccccccggccctcctggcccatcaggagcggtggtgcccctggccctgcagaatgagccaaccccggcaccggaggacaatggctgcccgcctcactggaagaacttcacagacaaatgctactatttttcagttgagaaagaaatttttgaggatgcaaagcttttctgtgaagacaagtcttcacatcttgttttcataaacactagagaggaacagcaatggataaaaaaacagatggtagggagagagagccactggatcggcctcacagactcagagcgtgaaaacgaatggaagtggctggatgggacatctccagactacaaaaattggaaagctggacagccggataactggggtcatggccatgggccaggagaagactgtgctgggttgatttatgctgngcagtggaaca

SEQ ID NO: 29383 - DNA, 437 bp, Homo sapiens
  misc_feature (1)...(437): n = A,T,C or G
actggagacactgataacctggngaaancccagactgttactgtgtctatgtagaaagggaagacagaagagactgcattttgataaaagaccttcactttaaacaattgctttgctgagatgttgttaatttgtagctttgccccagccactttgccccagccactttgacccaacctggagctcacaaaaacatgtgttgtatgaaatcaaggtttaaggaatctagggctgtgcaggacgtgccttgttaacaaaatgtttacaagtagtatacttggtaaaagtcatcgccattctctagtctcaataaaccaggggaacaatgcactgtggaaagccgcagggacctctgcccttgaaagcgggatattgtccaaggtttctccccatgtcatagcctgaaatatgggctcctgggatgagaaagacctgan

SEQ ID NO: 29384 - DNA, 472 bp, Homo sapiens
  misc_feature (1)...(472): n = A,T,C or G
gcagtttttnnnnactgagacctgagacntcgggaaccccagnggccagttcccttaccaacgagactgcgactcgctcaggggctctgccgcatcatgggcaacggcttcgcgggctgcatgctgtcccccacatctccccctgtgaggtgcgcgtgctcatgctcctgtactcgtccaagaagaagatcttcatgggcctcatcccctacgaccagagcggcttcgtcagtgccatccggcaggtcatcaccacccgcaagcaggcagtgggacctggtggtgtcaactcaggcccagtccagatcgtcaacaacaagtttctggcatggagtggtgtcatggagtggcaggagcccaggcctgagcccaacagtcggtccaagaggtggctgccatcccacgtctacgtgaaccagggggagatcctgaggaccgagcagtggccaaggaagctgtacatgcagctcat

SEQ ID NO: 29385 - DNA, 441 bp, Homo sapiens
  misc_feature (1)...(441): n = A,T,C or G
actggaaaaacanctangatcttcgganagncnggnggaattcgcggaggttcagcaagaatgcctgcataaattttccacccgggattatatcatgtgtccctccatcttcaacactctgaagaggtattttcaggcaggagggtctccagagaatgttatccagctcttatctgaaaactacaccgctgtggcccagactgtgaacctgctggccgagtggctcattcagacaggtgttgagccagtgcaggttcaggaaactgtggaaaatcacttgaagagtttgctgatcaaacattttgacccccgcaaagcagattctatttttactgaagaaggagagaccccagcgtggctggaacagatgattgcacataccacgtggcgggaccttttttataaactggctgaagcccatccagactgtttgatgctgaa

SEQ ID NO: 29386 - DNA, 448 bp, Homo sapiens
  misc_feature (1)...(448): n = A,T,C or G
cactgagccccccttgaacggatcggcacttgnancagccnggnggaatncggagctggctgttgcctggtcgtcagaaccctcacatttttctttccaggttctcactcttgggatatgggggcttacgaagacaatgcaacttcctagcccagaccctcacggcaggaggcctgcgtgtggggctgcgaaaggagaggacgacgctgtcggaggcaaggagagcaaattaccacagcttcttggcccagatctgcccttctttgctttgggattgcacctgggccatcagctcatgccaggctatgggggcagccagttggcattgctccccagactgaacagaaacctggccgccggatgggacctcctttggcacagacttgactgtgtaactgcataaactgcagtagcatcattgccctagatgccccaggagacctggcan

SEQ ID NO: 29387 - DNA, 561 bp, Homo sapiens
  misc_feature (1)...(561): n = A,T,C or G
ggcgtgcnnncctcgaacaccaattgagagnggcgcaattcgagaaaatgaaagcagctggttttgcagaagtgtgtgtcgcatgcgccagttgggcctggaccctcctgtgtccatccctgttcccccaggggctctatcagcccctgtaccccacactgccctctgaagacaacacaggctcctgcttccacctcggcccttgcccagggtggggcctggccctcatcttgaccaaagctgctgtgtggcagctcggcctctctacgaccccatcttggtggctgcacactcttcctggcccgcacccccatccccagtccctgttccccaagaggatacagagcacggtgctgggttgactcaactgtgcgtcccaggttcagggtcttacagagctccaccccctggggtcttacctcactgggaatgtgttttgaaaatgaatttgaagacaagccaacaaaccctgcactccaaaaaagcanaacagaccctaattnttttgtgccaaaaactgtggacatgctggctcagcatcctcaggaccaagttgttgct

SEQ ID NO: 29388 - DNA, 493 bp, Homo sapiens
  misc_feature (1)...(493): n = A,T,C or G
cggcggtgcnngnnnccttgatnaccctgatgaccactcgacagngcggnggaantcgcggggtattccgtgggctggaaagcattttgtgatgccctcacccctgagcagaatcagatcccaggcctccctctagagcccagtcctcactctcctgtccgcaccgacaccgccaggagctggagccctggcttcagatgaggagatgggtcagggaggggaaggggctcagcagggcacccagcctagcagtgggggcagagaccagaacctcagtgccctggggaacgaggcactgtttcccgaaactcccaatctgtgccacgtttgaagactgcctgcattaggagcaggccaactgctgccaaatccagccacgtgcagtccctctgtggtctgtggccacattagcgctaccgcagcagatgacacagagacacagcacggagcgtgtcccgccacgcccaattcccagagcccaatatatttgcta

SEQ ID NO: 29389 - DNA, 440 bp, Homo sapiens
  misc_feature (1)...(440): n = A,T,C or G
atccgaggactcggtagacctcgganagncnggnggaannctgngtgtatgtatgtattcctggacaagtgtgttcatctgcagtttttgcctgtggataagggnnaggattgggtaaagatcataataccagggccagctaaggcaacgactccctccccaaacccttgggacctcagccagtcccaaggctgccctgacaatcaggcaggctccccaccgtgaggccaagcctcctctgccactgccagcatggcccaagggaggcttggccttgggcttgccagcctcagctctgccctgacaagggtcttgtatccagggcagaggcctgaggtgacccaggcttgctttgtggctgatgccagcaggcttggttctagtgggcaccactggtgggcaacctccataactggcccttaggccctaccttcctacag

SEQ ID NO: 29390 - DNA, 481 bp, Homo sapiens
  misc_feature (1)...(481): n = A,T,C or G
agggttgnnnnnaactgagacatgagaacgtcgggaacctacanccactcccacagcgggctaccagaacgtggcctcccaggccccacagagcctcccggtcatctctcagcctccgcagtccagcaccatgggctacatggggagccagtcagtctccatgggctaccagccttacaacatgcagaatctcatgaccaccctcccaagccaggatgcgtctctgccaccccagcagccctacatcgcggggcagcagcccatgtaccagcagatggcaccctctggcggtcccccccagcagcagccccccgtggcccagcaaccgcaggcacaggggccgccggcacagggcagcgaggcccagctcatttcattcgactgacccaggccatgctcacgtccggagtaacactacatacagttcacctgaaacgcctcgtctctaactgccgtcgtcctgcctccctgtcctctactg

SEQ ID NO: 29391 - DNA, 464 bp, Homo sapiens
  misc_feature (1)...(464): n = A,T,C or G
ngtgcgtggccnncaatgaganccatgagtatcctagtacangcggnggaattcccagaatcccatcgacaccatgttccacctgcagccactcatgttcctggggctcttccctctctttgctgtatttgaaggtctccatttgtccacatctgagaaaatcttccgtttccaggacacagggctgctcctgcgggtacttgggagcctcttccttggcgggattctcgcctttggtttgggcttctctgagttcctcctgggctccagaacctccagcctcactctctccattgccggcatttttaaggaagtctgcactttgctgttggcagctcatctgctgggcgatcagatcagcctcctgaactggctgggcttcgccctctgcctctcgggaatatccctccacgttgccctcaaagccctgcattccagaggtgatggtggccccaaggccttga

SEQ ID NO: 29392 - DNA, 551 bp, Homo sapiens
  misc_feature (1)...(551): n = A,T,C or G
ntttgaaaactcgaacgctagctccgagnngggcaattcgcccgcagtgcangggcagcgcggcgcggngccaccgacgggacgcggctccgggaacatggctcgcttcgctctgactgttgtccggcatggagaaacaagatttaacaaggagaaaataatccaaggacaaggagtagatgaacctctttcagaaactggatttaaacaagcagcagctgctggtatatttctgaataatgtgaagtttactcatgctttctccagtgatctcatgaggacaaagcagaccatgcatggaattttggagagaagcaaattttgcaaagatatgacggtaaagtatgactcaagacttcgggaaagggtgagtaacttatttacatattgttcttccccataaattatcagtaagccacctcagtttgtcacttggctaanagtaaatgcatttctgctagggatntcgaatcagtgaaaatatttaagaatctaccatatgacagtcactggtacataccctcgtatataggatcttatattaaaatcaa

SEQ ID NO: 29393 - DNA, 468 bp, Homo sapiens
  misc_feature (1)...(468): n = A,T,C or G
agtttttaggggnctcgagacctgagtacgtgcggnggaattcctccctaacccgtttcccgaaaaaggtgctacctcctttccagacagatgagagagggcaggacttcaggctggatccaccactgggctctccctcccccagcctggagcacgggaggggaggtgacggctggtgactgatggatgggtagtgggctgagaagaggggactaggaagggctattccaggctcagccctgctcctgcagctttgccgctgagtgtaggaaaaacaggcatgacagaccagggtgagggttgtgcccagctgggccacggccatgcgtggggtggcccaataaacaccgtggactcccnnnnnaaaaaaaaaaaaaaaaaaaaaaaaaaaaaaaaaaaaaaaaaaaaaaaaaaaaaaaaaaaaaanaanannaaaaaaaanaaaaaaaaaaaaaaaaaaaantttcg

SEQ ID NO: 29394 - DNA, 544 bp, Homo sapiens
  misc_feature (1)...(544): n = A,T,C or G
ntttgaactttcgttcactagtccagagnggtgcaattccaggcacatgccaggtgctggaaaaagaagagagaaaggagatggcgtctaccagaaggggatggacttcattttggagaagctcaaccatggggactgggtgcatatcttcccagaaggtcagcagggctgactgggtcgagcccccccagtatgagcgggatgggctcccaagcctcgcctctgtgctctctcaccagggaaagtgaacatgagttccgaattcctgcgtttcaagtggggtaagggctgctggtctctggccacagccatcctcccggcccagagatggccctgtgggcccctggctcccgccccctcgggctggcttgtatgggggtagatgggcgtgtttgtagcgccaggaaggggacaggtgctgagactangcctgcctctcgcangggctttgcccaaggagctgaatngaactggangatgtcggggttgcantggccaaaggctgcacaaaagctggctcaggcnctactatgctacattctac

SEQ ID NO: 29395 - DNA, 529 bp, Homo sapiens
  misc_feature (1)...(529): n = A,T,C or G
ncctcgaactttagtccagcgcggtgcaattcccngtgcctggccagtgcaagctttaacaatagaagtttcaagggctcaggaaggaccagggggccatctaggctctccatgagttcacgcttaacattatgtttacgtctgtcagataacaattttggttttccacatcaggtgcattgcactgttagatgggtcatcataaaggtcatcaatctagtggcattcattcaatttgcacatcctaactgtttcagcactatctgatttagcatgaaaatctgccagggcagtcccttgatattcaggttcagctttccatgtatgggcttcaatcttataagaatttgttatttatttttcacctttactcaagatagcttggaacttataccaatttgtgatggcaacaggatagtagcaagttcatccacttgagtctgttttaataggggctcactagagtgagaaccctcttgttncatacatcccaaatgtgactgcaaggctgatattactacatgttgcn

SEQ ID NO: 29396 - DNA, 554 bp, Homo sapiens
  misc_feature (1)...(554): n = A,T,C or G
agggntcnnnnnnnttcgaacatagtccgcgtggtgcaattcgtctccaggaggaactgccggagccctttgagcatcttctgcagagaatcgcccggagacccaagcctcagcagttctttggattaatgggcaaacgggatgctggtgagataggcgaccgtccctaggtgtcttgggcagcccgccctgtctgctcactccttcctggagtaccccagggtctctcgctctgaatagagatttccactccaagaggggtgtaattccccaggcgcgacattggcccacaccgcactaaggcacgcacgggcccgcggggggagggaaagatctggttcgcatgcctcactgtattcgagtgaagcgctcccttgactaaagatccaaactgacaaagggaaggcacgggcctncaggggtagtactgcggatgatccaagtgcatgtggaagaggattttatagcattccctgaggtgagagntacattgtcttggatagaaatatncgttcttgaatcatcgacgggcagnggacatgtagtattgacat

SEQ ID NO: 29397 - DNA, 443 bp, Homo sapiens
  misc_feature (1)...(443): n = A,T,C or G
atcctgtnacctncgtagatctctggacagncnggnggaatncccagagggagggaatgggaagaattgccaagaggcccaggggggttttgggctttttaccccatggcccgatggtcctcatccacagtgggagggagggagtgtcacatggggtccccccagcgtgcacggagccctgggtgatggccgagaaaaaggcaggcagctggccccctgggagagaggggcgggcgccgcctctcatgttcccaccgcctgccgccgctctgcccaccgccatgccagcctcccgttggtcctgacagccaggctgcctccttcccactgtctcaggctctcagaaggcccacgaacacctggctacagcctccacccccacccagccaccatcacaccctgatcttggtcgctcacgcactggccgctgacctctccaagcg

SEQ ID NO: 29398 - DNA, 460 bp, Homo sapiens
  misc_feature (1)...(460): n = A,T,C or G
ggagggagggcngnnnaactgagactangtcctctacacagngtggnggaattccccttctaccccagggggtctcctccatcccacccttctctctctgctccagctttgcctccttggacgccttcgtcttcagctacttggccctgctgctgcaggcaaagctgcccagtgggaagctgcaggtccacctgcgtgggctgcacaacctctgtgcctattgtacccacattctcagtctctacttcccctgggatggagctgaggtaccaccgcaacgccagacaccagcaggcccagagactgaggaggagccataccggcgccggaaccagatcctatctgtgctggcaggactggcagccatggtgggctacgccttgctcagcggcattgtctccatccagcgggcaacgcctgctcgggccccaggcacccggaccctgggcatggctgaggn

SEQ ID NO: 29399 - DNA, 459 bp, Homo sapiens
cattgatccccctcggattgacgaccctagtcagagtggtggaattccgacgatctgcagagcatccgcgccctgcgcgacttcctgcgcaaggagtacgggggcctggacgtgctggtcaacaacgcgggcatcgccttcaaggttgctgatcccacaccctttcatattcaagctgaagtgacgatgaaaacaaatttctttggtacccgagatgtgtgcacagaattactccctctaataaaaccccaagggagagtggtgaacgtatctagcatcatgagcgtcagagcccttaaaagctgcagcccagagctgcagcagaagttccgcagtgagaccatcactgaggaggagctggtggggctcatgaacaagtttgtggaggatacaaagaagggagtgcaccagaaggagggctggcccagcagcgcatacggggtgacgaagattggcgtc

SEQ ID NO: 29400 - DNA, 449 bp, Homo sapiens
  misc_feature (1)...(449): n = A,T,C or G
natgagaccttggtagagcgcggattccgctccaaaggaaaacagaaaatccccttcaaatataatcggcctgtaaaggagtggctgcaggaaaaaggccggcagttaaccatcttcaacactcaggcgcaaatagccattggtggaaaagacaaaggacgcctcttccaaggccaactctctgggctctattatgatggtttgaaagtactgaacatggcggctgagaacaaccccaatattaaaatcaatggaagtgttcggctggttggagaagtcccatcaattttgggaacaacacagacgacctccatgccaccagaaatgtctactactgtcatggaaaccactactacaatggcgactaccacaacccgtaagaatcgctctacagccagcattcagccaacatcagatgatcttgtttcatctgctgaatgttcaagtgg

SEQ ID NO: 29401 - DNA, 468 bp, Homo sapiens
  misc_feature (1)...(468): n = A,T,C or G
agtgggtgagngttgagacactagtccgnatggaggactttggtaaatactgctggtggtatatcttcacttgctagcttttatcaatttagagtgattaaatgttcatgttgatggtgttaaaagattctagatggcatcctagaatctcagaaatgaggaatgataataacagacaagaagttggggcccatgattcattcaatgttaatggaagctgaccatcatagttccttctaatggagctgcattcaaattgaaatcagtttggaggtttgaattgaaacaaaacagacttaaaattatttttgaacctttgaaagttacttatggaaaccttcatttctgtttaacttcgtaattttgtctttccatttatttgtattggaaaagcaagggttagcaataagatcaaatataattactttgaatttactcagaaaaattgtaagttaaaaattcatggaa

SEQ ID NO: 29402 - DNA, 473 bp, Homo sapiens
  misc_feature (1)...(473): n = A,T,C or G
gcgngnnnnnnnccttgtcgacgtcactagtccgtgtggtggaattcgtacagagatgggcaggatataaatagatgtcgccaacgtttctggatctccaagacctgtatcagaatcacctgaggcacctgttcagcttgcagattcttgccaatactttgccccaccccaggtgagaatctctggaattgagattcccaggtgcatttggtgtacagtgacagtttgagagtcaccgaaatggggaaggagagactgttgactggtgtgaaaagtgttgctggggccccttctgaggggcttatcttgccatttcttcatgtcctcttgcaggcgaggtgtccaggcccaacccctcaatgtaggcttctgtgagcaggagtttgaacagacctgagccccangcaccgaggagggtgctggctgtaggtgaatggtagtggagccaggcttccactgcatcctggccaggg

SEQ ID NO: 29403 - DNA, 477 bp, Homo sapiens
  misc_feature (1)...(477): n = A,T,C or G
agggagtgcnnactgaannccnttactgatgactctaggaagngcggnggaattcaaaaagagaagagcttcagagtcatgcacaaagctgatactgtgttgaagcagagcacagtctgattttgctacttggactttcttacctggagggatatgaagcctgtataatagtttaatcttctcattcatttctccattatacataatatctgcaaaaagtttaaaaagagtgagttgatgccaatgctgaaagtccatttgtcaggacacaaactcactgtggagagaacactggggaaggtcaatacctgccacccccaactctcctgccccagacacacaccatggtagcaatgaaagtgttaaagactgggctggtgactatgtgagctccacggaactttgtgaatgttgtctggcctcataccttccaaaacattttaattttatggacaaaagttaggaacatggctccca

SEQ ID NO: 29404 - DNA, 463 bp, Homo sapiens
  misc_feature (1)...(463): n = A,T,C or G
cattgatgcccttcgnatagaagcacccctagtccagngtggtggaattcaacccccatccccctcccaccaccaaaccataaaggatctgtaagagaagcaagaaaaacgcactcccactaattctcatatggaaaaatcagggttttgaagacttcaggagctacagagatgctagcaccccagctctgcttgaattttaaattacattaatatgtattccctttttatatagctactcccgagcccggagaggacccacgcgtgacccgggccaagtacttcattcgagatgagtttctggtgagtcgagcctgtctttagtttcctctcttgttcctcctctttttctcatggatgtaaatttacttaattccaaattcaggggttcagctacccagttccatggttttagttcacgcacatccagtgtggatttgagctctttgcgcccctctttttg

SEQ ID NO: 29405 - DNA, 502 bp, Homo sapiens
  misc_feature (1)...(502): n = A,T,C or G
tgcgtttgggccagccagncattgagacccannnnatctgagtccctagtccgtgtggtggaattcggctatttctgccgggcgctccgcgaagatgcagctcaagccgatggagatcaaccccgagatgctgaacaaagtgctgtcccggctgggggtcgccggccagtggcgcttcgtggacgtgctggggctggaagaggagtctctgggctcggtgccagcgcctgcctgcgcgctgctgctgctgtttcccctcacggcccagcatgagaacttcaggaaaaagcagattgaagagctgaagggacaagaagttagtcctaaagtgtacttcatgaagcagaccattgggaattcctgtggcacaatcggacttattcacgcagtggccaataatcaagacaaactgggatttgaggatggatcagttctgaaacagtttctttctgaaacagagaaaatgtcccctgaagacagagcaaaatgctttgaaaagaat

SEQ ID NO: 29406 - DNA, 460 bp, Homo sapiens
  misc_feature (1)...(460): n = A,T,C or G
attggagacctcgaaanncnnntttgttggtcttcgaacagcnggnggaantccgagaacaagcagggtggcgcgggtccggttttgaagctgggccgggccgagttgtgcctgctgctgctggcgccgtccgtggtgcaggcggtggagcccatcagcctgggactggccctggccgacgtcctcaccggctacatctacccgcgtctctactggcctcttcgccgagtgctgcggtcagaagcggagccttagccgggaggcactgcagaaggatctggacgacaacctctttggacagcatcttgcaaagaaaatcatcttaaatgccgtgtttggtttcataaacaacccaaagcccaagaaacctctcacgctctccctgcacgggtggacaggcaccggcaaaaatttcgtcagcaagatcatcgcataaaatatttacgagggtggtctgaag

SEQ ID NO: 29407 - DNA, 454 bp, Homo sapiens
aatgatgacttctgatagagcggcggaattcgaagaaagaagccatttgaaataaccatgataagatctaatcaggaaacccagtgtccattacacacatgtggtaacattttaagactcttctggttgggctccttgagaaccaagctcgtgttcttataagctcatccttatattttcccattgtatgcatcgttgcatggcaaacacaggatttattcccaagctaaacctgtctcttggggtttcttatcttttacctccttggtgagcctcgggaagctagagcattgctctatggagaaaggagggtggcattgggaggaagggtaggaaaaacattattgggaagcagagaaagtcaatgtcaaatgaactgccaaggatgaatattatggctgctgggagcctcggagagtatcgtgtgtcttatgtgtctatttcacagtcggtg

SEQ ID NO: 29408 - DNA, 501 bp, Homo sapiens
  misc_feature (1)...(501): n = A,T,C or G
ggtgtacggggnannnnnnnttttgagaccctagtcattgtagagcaatacgaaggacgcggcgctgacccttccaggtcagctggagttgacccgcccacctgggcttttcaaccccagtccgcgagtttctttcttgaaggggtgggggctagattcattcacgtgcttcgtaatgaaataatccaaaaaataagaccaaagcgcccactggcaggagcgagggcggggcgccgcgctctataattattttctaagatgatgggggaggtttgttgcacgcgacagcccgctgaggaggcggggaccgagctacaacgcgggtcggatttggcgggggtttttttcctttgaagaaaaaaaaaacaaaaaaatacaaaaaggagaaagcaaacattgccacagcgncttttgcctgtggagagcctgaatatcctgtgatgcccaaaaacacccggggcatgacccggggcggggggctttctctctccccccccccct

SEQ ID NO: 29409 - DNA, 502 bp, Homo sapiens
  misc_feature (1)...(502): n = A,T,C or G
tgcatcccgggcccggccgnttttgataccctnnnnatcgagatccatatccatgtggtggaattcctgcccaggagcagatggaggggatgctgtgccgcaagcaggagatggaggccttcgggaagaaggctgccaacaggtcctggcagaacgtgtactgtgtcctgcggcgtgggagcctcggcttttacaaggatgccaaggcagccagcgcgggagtgccataccacggagaagtgcctgtcagcctggccagggcccagggcagcgtcgcctttgattaccgaaagcgcaaacatgtcttcaagctgggcttacaggatggaaaagaatatttattccaggccaaggatgaggcagagatgagctcgtggctacgggtggtgaatgcagccattgccacagcgtcttctgcctctggagagcctgaagagccggtggtgcccagcaccacccggngcatgacccgggccatgaccatgcccccagtgtcacccgt

SEQ ID NO: 29410 - DNA, 461 bp, Homo sapiens
  misc_feature (1)...(461): n = A,T,C or G
catcgaccaccctcgnattgangaccattagtccgngcggnggaattcgtgggggtgccaagggtgtctggctatttatcttacttttgtttctttctaactttttgctttctctctttcctcctgtcttatgaactaagcaagtttgggggtaggagggcagcagtagtagaggtctccttccttactacatgtccccaggaggaacagagaaggttggatactgccaatttagcccaacattatcagcagctggtctgcagaatctctagtaaaatccaaaaacctccaatattcttaattacttttgtacattaatccctccattgggattttgccattccctaaaggatctctgtcggagtaagaaaagtgaaaactaactcaaatcatgtgatttattagagataaaagcacagaccaaatgttggtagaattaagtaaaaggcaaatgagacgtn

SEQ ID NO: 29411 - DNA, 465 bp, Homo sapiens
  misc_feature (1)...(465): n = A,T,C or G
agcccccactgaaaccntcggnactgatgaccactagtacagagcggaggaattcctctgtgctgctgctttctcatctgtgaaaggaatattctggtggggacaaggcttttgagttgctgatagggtctcatgacatgaaagtactggccttggcacactgcctgggggggcgagaactccgcacatgcctgtgatgttacagttactgtcagttcacagcgaaccttccctccttttcctgtagactttcccacactcctgtaaccatccctccctcccttattcctctctgtctctctcactcacgcacacgcacacacacacacacacacttcattcactgtctccatgactctggactaaactaacgtatcgaggtgccattggaagccccattgtcctcattgtgttttgctttgtttggtagagacggagtctcgctctatcccccagactggagtg

SEQ ID NO: 29412 - DNA, 459 bp, Homo sapiens
  misc_feature (1)...(459): n = A,T,C or G
catggacatntcgnatgacgacatctagacagngcggnggaattcccctgtttgcccggggctggttcctgtccagagggggatgtcactgatggtgcccctaccccattcccacagagtgtacctgctgctccacctgcaggacctggaaaggtgagtaagcagccagcctctccgcagcgtgctggactctcactcggaaagagcttctaaccaggagtgggcacctgaccctggggctccctttcagctgcatggtcatagggaggggtcaggaggttaaccctttataacagcaaacacagtagcttacagttcctgtgggctagaaatctgggagcagcttaactgggtggttctagctcaaggtctctcaagaggctgcagtcaagatgtcagcctgggctgagttatcggagggcttgacgaaactggagggtccactttcaagatggcact

SEQ ID NO: 29413 - DNA, 492 bp, Homo sapiens
  misc_feature (1)...(492): n = A,T,C or G
ggccggaatcgagacccctgnnnattgtagagcactagtcagngtggaggaattcgtaactccttcatgcaataaactgaaaagagccatgctgtctagtcttgaagtccctcatttaaacagaggtcaagcaataggcgcctggcagtgtcaagcctgaaaccaagcaataccgtcatgtttcagccaagcccagagccctaagattacaaacaactatggccggaacctcctcagctctccctctgcagagttccctaccctaagagaatgttaccacctgaacagtcctcggtgaatctgagaggagaggatggggtaaggcagaagcaccagctgtactactagaagggagcttttggtggtagatcccctggtgtctccaacctgactaggtggacagagctcaaagaggccctcttaccgctagcgaggtgataggacatctggcttgccacaaaggtctgttcgaccagacatatcctagctaag

SEQ ID NO: 29414 - DNA, 448 bp, Homo sapiens
  misc_feature (1)...(448): n = A,T,C or G
gcccaactgaggcatcgaaactgagaccatcggacagncnggnggaattcgctatgacaagaccaaggtcaacaaggacaacaatgagatcgtggacaagatcatgggcaaaggacagatccaggtgaggccagggcgccggggcgaggctgagggagcctccaggaggtggttccagttgaaaaggaattctggtcaaggagcctgctctttcgtgattttggttccaagctggttggaggaaagttcccaggaggtggttctcccctccctgctagaggtggctgcctgttgtggccccggaagcccaggcgtgtgcgtggctcctcaggtgggtcatctgcgcttctgcaagatggaaacaaccagctttgttttcacacgccagctttagtctatgggtggttgtttcccggaacgccatgttgagaaggactcanaggctgcg

SEQ ID NO: 29415 - DNA, 470 bp, Homo sapiens
  misc_feature (1)...(470): n = A,T,C or G
gggaaggccatagaacncctnntnggnnattgaggncgatcgcaggcaccgctggnttcatagaataagtagaaagcattcccttctcttctttaggaagactttgagaaggattgatgttaattatttatatgtttggtataattcatcagtgaagccatctggtcctggagttttctttgttgggagttttattattattattattattgatataatctctctgtctctctctctctctttttttttttttggacaaagccctcttttgccccccaccctgaagggcaggggggcattttgggttaattgcaccccttgcttcttaggttaaagcaatcttcttgcctaaccctcttgagcagtgggaactacgggagcttgcccccttgctgagttatttttttgaaaaagcggggtttccccttgttgcccaaaggggcctaaagttttctttttgcctaaccctc

SEQ ID NO: 29416 - DNA, 445 bp, Homo sapiens
  misc_feature (1)...(445): n = A,T,C or G
nattgagnactacgactattacgacgnctggtggaattcgtgcccttgagcccacattttctcctaaatgtgtatgaatcctgtcctgtttggtgaccgacattgattggtcaaacttgcagggcacatgcctgagtgatagctgtcctagaaatctggcgaactctggccagtttttcagtgttcctgtttcttctaagagatttactgttttatattttgggacaaaaatcaaataaaagaaaaatggaagtggtgtttttaaacatggattgcaagccgacaggcagattcttggaaaacaaataaatctaaagagaggaacaagtaaaagaaaggacaataaaccctttctttgtgtatgtgatgctaataattaccatggtcttttttacagagtcctctacagttttcatctaactagttcagagcctttttacagtcg

SEQ ID NO: 29417 - DNA, 485 bp, Homo sapiens
  misc_feature (1)...(485): n = A,T,C or G
gaccgaaatcgagaccctantcattgtggagcaattcttgagggtgatgttatcagccatgacatcagcatgctggctgtgaccccggaaagactggcccccagcgacgttctcagccagcgctcgcagctgtccggggcttctctggcagaagccatgtctctcacatcatgtgccagcctccaccctcacgccatttccagggaacagactgcgggtatgtagcagtgtagtctttaacctgctctgatacatattcagagaatggattgttgtttaaaaagagttgcatgtttaaagagatatgaactagcttttcattattttgtatctagattatcaacaatggggctaccactttccttggctgtatatccatttcctcttggaagatcttgttgcttatgtgacctgttggttgttccccggactgggcacctgcaggagtcacggcagacggcagatgtggctggaagtcancgctn

SEQ ID NO: 29418 - DNA, 488 bp, Homo sapiens
  misc_feature (1)...(488): n = A,T,C or G
agcagaattgagaccctanccatcgatgtccntacgcagngnggaggaattcgctgaatttcagaccacgactgaggaagaagagattgatcggaccccttggggggaactggaaccatctgatgaagaatcctcagaagaagaggaagaggaagaaagtgatgaagacaaaccagatgagactggctttattacccctgcagacagtggccttatcactcctggaggcttttcatcagtgcctgctggaatggagacccctgaactcattgagctgaggaagaagaagattgaggatgcgatggacggaagtgagacacctcaactcttcactgtgttgccagagaagagaacagccactgttggaggggccatgatgggatcaacccacatttatgacatgtccacggttatgagccggaagggcccggctcctgagcttgaaggtgtggaagtggcgctggcgcctgaagagttggagctggatc

SEQ ID NO: 29419 - DNA, 485 bp, Homo sapiens
  misc_feature (1)...(485): n = A,T,C or G
gcccgcaatcgagaccctagncattgtagtgccattcgcagnggagaagtttgaggcagaagctgcagccttgggccaacgcatatcaacactgcagaagggcagccctgaccccctgcaggtccggatgctcaatgaccagttgatgctcttggaacggacctttctgaaccctagagccttcccagaggaacgctactacaggtgagtctgtcccagagtcctgggaggtgcctccaggtggggccggacaatggctccccacctgagacgaggtggtcagcttctctgccctttagagtgcaacccagcccctgaagaagatgggaatgtaaggctcagggaggggaggaaagttgcttgagggtccctctgggagctaggactggaacccacatttcctcccccgaccgccactgctgtaagagctccctggccttcagagacaagtggacgggggtgcttttcttgctcgctgcgtacag

SEQ ID NO: 29420 - DNA, 566 bp, Homo sapiens
  misc_feature (1)...(566): n = A,T,C or G
natcgaatttctagtcnaccgtggngcaantccatctgcaaaaaanatgaggctcgaacagaactctcaggtactttctagtttcatgagtccctgaattgtgaaaataaaaaattaccactgagaaaccatatacacttccagactggtggctgcctagcctggcctctgctccttgacagaggggctggccctggtgtttgagcttgtgtgcttgaattggcctcaggcccaccgtgccttttctcatctcagacagtactcttgctccttcagttgccacgctggctcccaccggcctctttccagatcatgaaggtatttttccttcatcaaattgagaggaagtccgtagtaaagctgcccgttgaccaggtagtgccgagagaatcggtaggtcacatggattcctaaaggtcccctgatcagccacagtttgattcatgttctgatgccctcccagatgatgccaccattatgtctgctggggctggnggtgagtcccagaatgccctggatgttatctgtaaaggataggaagcggctgctctggggccagtggccag

SEQ ID NO: 29421 - DNA, 568 bp, Homo sapiens
  misc_feature (1)...(568): n = A,T,C or G
attcgatttcgatcactagtccagagnggnggaattccaccattgtccagtctatggctgccaagacccagaggttccgtagtaagatggaagctgctggcttcactatctcgggagccagtcaccccatctgccctgtgatgctgggtgatgcccggctggcctctcgcatggcggatgacatgctgaagagaggcatctttgtcatcgggttcagctaccccgtggtccccaagggcaaggcccggatccgggtacagatctcagcagtgcatagcgaggaagacattgaccgctgcgtggaggccttcgtggaagtggggcgactgcacggggcactgccctgagctctgggtaaggacgagaagagccaaggtccgcctgctgccacagggtcaaaggaggttttcgatcagcccagaccagaggctctgagccctgaaccaaagtcccagagctgggctgngacgtgacctgtgctgagggctgtgagaatgtgaaacaacagtgtgaaaattggcaaaaaaaanannnnnannannaaaaatttattttntctactttcctg

SEQ ID NO: 29422 - DNA, 455 bp, Homo sapiens
  misc_feature (1)...(455): n = A,T,C or G
cattcgacaccattagcnatggaggccatatgcggaacgtgtccactgagcagagacctgagggaggtgggggagccctgtggatgtggatgtggatgtctgggaggaagggcattttgagcagaggcaccgaccaaggcgggagctgggagagggagtgcagggctgatgagggcagagagggaccacccaggaggaccctgatggactcagatgatcccaggctccctcccactacaggtatgggcagggatgggaacagggagaccagggaggaggctgctgggatggcccaggggaaaagcagtggcctgggccactggctgtttaattattttattcacgtattttattccacaaatttattttacaagtgttacatgagtgcctaccctgcatcctgtcccgcattgtgctggggacagagcagtgacccacagacccgtgaaggactt

SEQ ID NO: 29423 - DNA, 566 bp, Homo sapiens
  misc_feature (1)...(566): n = A,T,C or G
cttcgacttttcgatcactagtccagcgnggngcaattcctgcctcctccgcagagcaatggcggtgtctgccgggtccgcgcggacctcgcccagctcagataaagtacagaaagacaaggctgaactgatctcagggcccaggcaggacagccgaatagggaaactcttgggttttgagtggacagatttgtccagttggcggaggctggtgaccctgctgaatcgaccaacggaccctgcaagcttagctgtctttcgttttctttttgggttcttgatggtgctagacattccccaggagcgggggctcagctctctggaccggaaataccttgatgggctggatgtgtgccgcttccccttgctggatgccctacgcccactgccacttgactggatgtatcttgtctacaccatcatgtttctgggggcactgggcatgatgctgggcctgtgctaccggataagctgtgtgttattcctgctgccatactggtatgtgtttctcctggacaagacatcatggaacaaccactcctatctgtatgggttggtggcctttc

SEQ ID NO: 29424 - DNA, 459 bp, Homo sapiens
  misc_feature (1)...(459): n = A,T,C or G
catgacncccctccnntattatgaccatcagaccangcggnggaattccccggctgcactaacccaggctcctcctcgccccggccttcgggtctgggaaattgaggggacggcaggcccggctgccctggaactgggagacagggagaatcccctgccggggtccctggaaacagtgcccaccccacatcactacattccctcggcccgtgttagtgaataaagtattatatcctcaccccacccgtgcctgtgagtgaggtgggtgggagaggaagaaagttggggttctccaggctcaggtgccaagtgagttgtcaaggaaccaaatggggatgtaaacctaaaaggggttcccggcacctcggtttgtgttggttggaggtgatcgcacacttggcccttggttacgtcctcataaccttagacctgaaagggcccataaatatactatgttca

SEQ ID NO: 29425 - DNA, 458 bp, Homo sapiens
  misc_feature (1)...(458): n = A,T,C or G
cgccgtccannnnatttgaaaactgcgaccatagcacagngcggnggaattcgggggggcccttgcaccgcactgccgcctcctgactgccccgatccccgcagcccctgtgccggatttcatttccctcctctctcccagggtacctggccccagcactctcccatctgttcttcaggaaccgactcctctccagttgcaacaccagggagaaaggggcctccacatgcccaagtacccctgcaggatgaagggcaggccggcccttgatgtgccatttctgaataatagtcactgccgccgagtctaggatgtcctgttctaactcagccctgcctcggatgcaccaccgatctgtgcagagtgggtgtgggagtgtgggtgagggtcgaaatgccaaaggtctactttccagaatcaagtgccttctgcaaatcatgttggaaaagtccaaaccn

SEQ ID NO: 29426 - DNA, 576 bp, Homo sapiens
  misc_feature (1)...(576): n = A,T,C or G
agcgagaatttgatccccttggnnnnnnncnnnccttgaggctctctccgaaggggcaatncctccaccaaggagcagctgcggttccccgaggtgcccgggctggccggtggtatcgtggacgcaagcctgaccagcctttgtatgtgccccgggtgctgcgcaggcaggaagaatgggggctgacctctacctcggtgctcaagagagaggccccagctggcagggacccagaagagcctggagatgttggtgctggagaccccaactctgatcagggactccctgtgctgatgactcagggaacagaggacctaaagggcccaggacaaaggtgtgagaatgagccactgctggaccctgttggccctgagcctctggggcctgagagtcagtcagggaagggagacatggtggagatggccacacggtttgggtccaccctgcagctagacctggaaaaggggaaggagagtctgttggagaagaggctggtggcagaggaggaagaggacgaaaaggaggtggaagaggatggccccancagctgctcggaggacgaatacagtgagctgn

SEQ ID NO: 29427 - DNA, 455 bp, Homo sapiens
  misc_feature (1)...(455): n = A,T,C or G
catcgaaccccatcagcnnatgatgnccatctgcggancaagnngagccacctgcccctcaagttggtgccaggtccagtccgaagcatcctctggcggaggggctactgactgctctacagcccttcctgtctgaggccctggtcagccaagtcggggcctgctaccagttcaatgtcgtcctgcccagcggcacccaaagcgcctacttcctggacctcactacaggacgaggaagagtgggacacggggtgcctgatggcatccctgatgtggtggtggagatggccgaggcagacctgcgggccctgctatgcagagagctgcggcccctgggggcctacatgagtggacggctgaaggtgaagggcgacctggctatggccatgaagctggaggctgtcctcagggccttgaagtagcagccttggctgactttccagagcccaggcccg

SEQ ID NO: 29428 - DNA, 468 bp, Homo sapiens
  misc_feature (1)...(468): n = A,T,C or G
ccccccccaactgaaaacctctgatagatcacactagnaagngcggnggaantctgctgcttgagtgatggtgcgctaaaatctcagcaccactattttattcatccactttacgaaaaaacacttgcaaccccaaaagccattgaaatttaaagcaacggtgggacaaatcttctgaaagcttcctaatcaacatttttctgttaaaatgtactgcatatgcacatttatatattgggagcattttaaaggtttactttgctctgaaagaaatatttaatgtgtttcaaaataatttttgagattattctagttgtggttaagcttaaaggctgagaaattacttaactattcaaatagagcctgtgcaactatatgaaatgtcattatggagacactcattatgcttttcctgtagaacaaaacaagtagttgggtttatctgcaattagggttttttgaggaacg

SEQ ID NO: 29429 - DNA, 539 bp, Homo sapiens
  misc_feature (1)...(539): n = A,T,C or G
ccccccgctttcaactatactcctcatctagcttctctccatcttagttgtctcacctttgacacagccccgccccgcccgnnngngnnnnttttgagacattatacctgcggnggaantcgggatccggctcctccagctaccggcccaaggccatctacctggacatcgatggacgcattcagaaggtaatcttcagcaagtactgcaactccagcgacatcatggacctgttctgcatcgccaccggcctgcctcggaacacgaccatctccctgctgaccaccgacgacgccatggtctccatcgaccccaccatgcccgcgaattcagaacgcactccgtacaaagtgagacctgtggccatcaagcaactctccgttaaacatatacttaaccgtcttccctaagagtggatataagagtctgtagagtgttccccagtctgggtttgtctgacgtttctctcacgaccagcctgggtgtggtgggttttggaaggaatacgtggggcgcatgacagccaggtaggaccacga

SEQ ID NO: 29430 - DNA, 462 bp, Homo sapiens
  misc_feature (1)...(462): n = A,T,C or G
cgccctccccctgagaccttagatagagcgcgtcagacgnnncaggggncnggaatatccagtgttctctggcacccaagtgaaggggtcagtgttacaactatactctggagctgacacagaagtccagaccagaagtaaacttaaggccacgaatccatggtcttggatgaatcatgttgtaaggggagaatgtggactgagatgggagtgcactgtttgggggtgcaggggtgtatggccagaatttgcagtggagaggtaggtggggaccagggcacatggcgcctggagtgtcaggccaaatgcttagcgctggggagcccactgaagagtcctgggcagagcagtgaatgacaggtgtgattggcgtttcagcaggactgttctgacagccagtacagatgatctggggggggctgtggcagtggctgatgctgttgtcctttctaaagtaaatct

SEQ ID NO: 29431 - DNA, 565 bp, Homo sapiens
  misc_feature (1)...(565): n = A,T,C or G
nattgagctctaatcacagtngggcaattcctggcctacagcattattttanatgtacatgtctgatttcattcagtcttaccacattagctattatctccattgaacaaagtaataaatgtaaaatttaagcccaaagagattgttacattgctggtgagttctcagatctgttctgattccaccacacactactgcctgtgcgtaacttccagctaccttcctacgacatagatttgatcattgtttatttctaaaaatctcttaatttctcattgcacacagacacctgcccaccaacaccagcacaacctggcattcaaggccatatttggttggcattacacatttagtctcccattctctgctgtgcatactccttagtatctgctcatgcctctcttcattntttctccgcatggcccatgctatctgccttcatggctttgttcaaactcttcttcctagaatacctttanaaacagcaatcctccctttntattttgtttccttgcgtgttcccttcagagtattntaagntaacattatcataaccagtaggaag

SEQ ID NO: 29432 - DNA, 481 bp, Homo sapiens
  misc_feature (1)...(481): n = A,T,C or G
aggatgtcccnnncagggcccccactgagaccntggcctgatcaccctaggacangcggnggaattccgtctgtttcaagaaacccttgggcttaagcctcacttgctggtcctcaacaagatggacttggcggatcttacagagcagcagaaaattatgcaacacttagaaggagaaggcctaaaaaatgtcatttttaccaactgtgtaaaggatgaaaatgtcaagcagatcatcccgatggtcactgaactgattgggagaagccaccgctaccaccgaaaagagaacctggagtactgtatcatggtcattggggtccccaacgtgggcaagtcctccctcatcaactccctccggaggcagcacctcaagaaaggtactggcgcgtgcggctgatcacctcaggaaaggtactggcgcgtgtggctgatgtgctgatgccaccatctttcttggaggggacgtgcccgaggagca

SEQ ID NO: 29433 - DNA, 455 bp, Homo sapiens
  misc_feature (1)...(455): n = A,T,C or G
cttgacncccttgnnnattgatgacccttagtccagngcggnggaattccattgtagtacacgcggtaactgtgactagcctgggcaacctgtttggtggagccggtcagacccaacagtcttgggtggaagtcctggacgtagcgggccatggcttcaacgtcgtcccgctcggggtccacagtgatgaagacaggctgcactggaggcaaaccaggctctgcttccagctgccgcaccacctgcaccagcttctccagctcgtctgggcagatgtcagggcagtgagtgaagccaaagtacatcagcacccactggccccggaagtcagccttgcagcgagcccggcctctgtgatccagcaggtggaagtcgccctggcccacagctgcctggcgcagggcttctgttcgcttttgctgctgcagcctctccttctcagccctcagggccag

SEQ ID NO: 29434 - DNA, 424 bp, Homo sapiens
ctggcacatagggcagcccaacgaagccttaaagttcctgaacaaggcacgcaaggacagcacttggggccagagcgccatctaccacatggtgcagatctgtctgaatccagacaacgaggttgtgggcggagaggcttttgagaaccagggagctgagagcaagtctaacacctgcagctacatggagaagaaggagttggagcagcagggtgtgagcaccgccgagaaactgctgcaaggacagcgtccctgccctgctggccttggcacaagcctacgtgttcctgaagcagatccccaaggcgcgtatgcagttgaagcgcctggccaagaccccctgggtgctgagtgaggctgaggacctggagaagagctggctcctgctggctgacatttactgccagggcagcaagttcgacct

SEQ ID NO: 29435 - DNA, 452 bp, Homo sapiens
  misc_feature (1)...(452): n = A,T,C or G
ccccccatgacccctctgccatgagggcaattcgnngcccgcggacagggaagcacgatggctccaaaaggccagcggggccgagaagcaaggacagagaccagcatttaagggatctctggggggggcctccctggagttctccacatgtaaatatagcgaaaaaagaaaacactacgttactagaataaacacgtcctaaaatttctgtgcaaaaacacctttttgaacagcaaagatttcacccaccaaaacaaggaagcaagaagcttccacagtgtgcaggatccgaaacaggaccggcccggcgttgggtgagagtgggggaggggttgtcggcttctccatccagcttgccatgttctgtcgtcggtttcacattttcagagagactttaccagatgcaggaaatgaggatgaaggcaactctggaaggatgcaaagaagggaga

SEQ ID NO: 29436 - DNA, 459 bp, Homo sapiens
  misc_feature (1)...(459): n = A,T,C or G
ngaagaaactgagactatcgaaactgagggcatnagagagcgcggtggaattcagacatgggggacctgccgggcctcgtgcgcctctccatcgcgctgcgcatccatcctaatgacggcccggtcttttacaaggtggacgggcagcgcttcggccagaaccgcaccatcaagctgctcaccggctcctcctacaaggttgaggtgaagattaaacccagcacgctgcaggtcgagaatatttccattggtggtgtgcttgtcccactggaactgaagtctaaagagcctgatggggacagagttgtttatacgggtacatatgacacagaaggtgtgaccccaacgaagagtggagaacggcaacccatccagatcaccatgccgttcacagacattgggaccttcgagacagtgtggcaagtcaagttctacaattaccacaagcgggatcactgg

SEQ ID NO: 29437 - DNA, 480 bp, Homo sapiens
  misc_feature (1)...(480): n = A,T,C or G
aggagttgccnnnnaggcgcccactgagaccntcggactgagaccctaggacangcggnggaattgtgcagtcctcaccagaggctgaggatgcctggggcacaaggcatggtgacagctattagaagccatcgccagtcccgtatcaggtacccaaccagtggcagcagcatcacgccccctgtccagaaggtgctgctcaggactccagccacggtgcggtgctccacatccagccactccagctctgggccaggacaggagacaggaagatggttagtgaggaccagatgggctcagcctcactctgacaactgccttcttccagccctctaggtcctgcctgtttcttgcctgcctcacccagtggcatcacgatgatggtaaaaccagccagggctgagccagtaagggtgcgggtgatggcaaacattacatatctgacggaggctgcagatgccaagcccagcaccagggtan

SEQ ID NO: 29438 - DNA, 462 bp, Homo sapiens
  misc_feature (1)...(462): n = A,T,C or G
caatgaagacantcggtcagngncgngcaanncgtgaggaaaggggctgtgcttgtctgtgcctgggctgaggagggcgccgacgccctgggccctgatggcaaattgctccactcggatgctttcccgccaccccgcgtggtggatacactgggagctggagacaccttcaatgcctccgtcatcttcagcctctcccaggggaggagcgtgcaggaagcactgagattcgggtgccaggtggccggcaagaagtgtggcctgcagggctttgatggcatcgtgtgagagcaggtgccggctcctcacacaccatggagactaccattgcggctgcatcgccttctcccctccatccagcctggcgtccaggttgccctgttcaggggacagatgcaagctgtggggaggactctgcctgtgtcctgtgttccccacagggagaggctctggngggatggn

SEQ ID NO: 29439 - DNA, 438 bp, Homo sapiens
  misc_feature (1)...(438): n = A,T,C or G
aatgaacctcncganatcgaggcaattgaggcacggnggngcacgcctatagtcccagttactgaggaggctgaggtggctttatcacttgggcccttgtggcagaggttgcagggagccaagatagtgccattgtactccagcctgagtgagagaacaagaaagaccctgtctcaaaaaaaagattttattgctgtcacaggacatacaactcttctagcaaaagcctgtcaccctcaggagaagtctccctcctgggccctactttgctttggctcaagttaacagactgcctgcaagggaagtagggcccaatccagccctaatggatggagcaaagcaggaatctaatttccatatactgctgtggcacttagaaaggaactgaggcggatttgaatgttctcattttcacatgatgcagctaaagtttaagag

SEQ ID NO: 29440 - DNA, 457 bp, Homo sapiens
  misc_feature (1)...(457): n = A,T,C or G
gggagaactgagacctccgaaactgagggctatcggaagncnggaggaatgcaacggtcatgggaaaggaggtgggtatctggactggggtgggggaatattgaatactcaggaccactgagtattcaatattcttataatagatacattcacactggggatactggctagatgtcagcctcatcgcagctcacttggctatcaatcctgactgttttatgtacgtatatattttttcccaatgcacagataaacttacagagaaagaattcattgaggggacactggccaataaggaaattctgcgactgatccagtttgagcctcaaaaagtgaaggaaaagatgaagaacgcctgatgccaactgttcagctgtcctccctccacctaccactcacatgacacccgtgagcgcctgtgcacacacacacacatgcacacacacacgcgcgcact

SEQ ID NO: 29441 - DNA, 451 bp, Homo sapiens
agggagaactgagacctccgaaatgagggcattggacagacgagagccatgacctgagactgagtggaggggggtagttctgataactctgtgttttgttcataggagcaaccagggttttatgcacatgaaactggccaaaaccaaagagaaatacgttctgggtcagaacagccctccgttcgacagtgtcccggaagtcatccactactacaccaccagaaagctacccatcaaaggggctgagcacttgtccctcctctatcccgtggctgtgaggaccctgtgagcggaccagacctgccctgctctgtgacagagcctgagacttggaggtgccagaggccccccaccaaccagcccagccactgttgctggctgtgtcgtttgtgttgtgtgtatggtactagcacaccactgcatgtctctagaatgcttgtgccacttacgg

SEQ ID NO: 29442 - DNA, 459 bp, Homo sapiens
  misc_feature (1)...(459): n = A,T,C or G
ganggaaatgagaccatcgaaaatgatgactatcgnagagncnggnggaattactcgacatgtgtgtgggagagaagcgaagggcaatcatttcttctcacttggcctatggaaaacggggatttccaccatctgtcccagggactaaagacaacctgatgaggccacctggcatgacctccagcagccagtaacttgttagggaagagacctgcttgggccacatgggtctgctgcctgtgccaccacctttcccagaacactggacttctttcctgcccttttctacaactctacgctgtgtcagctgtacagccacccccccaccccttcctttcagcctccatcagggaagagacagtaaaaataatcacagtcaagtgattcaaaacaaaacaaaaagcaactgttaaagccaagtctgccccataactttaaaagccatcattggtcactgcn

SEQ ID NO: 29443 - DNA, 577 bp, Homo sapiens
  misc_feature (1)...(577): n = A,T,C or G
ggactattnnnnnaggggnnnnaagggnnnnnnnnttttgannccctttcgatccactatccatgtggtgcaattcctgcttttaaagattgagtttgaatatgggatctgtccacgaggaagagaaaatggctttacctttaggacaatctcattgtggactgctttatttatattattagtaacgctgttttaagtgttattctttttattgtattttatttataaaaaatgcctttatatattgaaatatataaatatatataaacacacacacacacacacacacacacacacatatatatatatatatataattgcctttatatttaggcggtatgagttctccctaagcgtgagttggctctgccctgcacaggcacccaaacagtcctacctaatgtcacttcaccaggaaatgagaggacatggtacagtgtgagagacagcactaacacgtgctgaataactactgtgtaccacgcactgtgctcggngcttgttactgttaactcatttaacccccacaactcatctacaaagttggcattaaaatccccaagtcactcagtgagcc

SEQ ID NO: 29444 - DNA, 452 bp, Homo sapiens
  misc_feature (1)...(452): n = A,T,C or G
gcnagtaagaacctccgaaacnggcgagctaccgnagnaaccgangncaatacaggggaaggaagggggcccaggtcacccagcaagtttttggtagagggcattttctcccaaccaggcaactccccgagtggcacagtggtgtgaagccatggatatcgggcccccccaaccccatgcccccagcctcctagccataaccctacctgctgacctcacagatcaacgtattaacaagactaaccatgatggatggactgctccagtccccccacctgcacaaaatttgggggccccccagactggcccggacacgggcgatgtaatagcccttgtggcctcagccttgtcccccacccactgccaagtacaatgacctcttcctctgaaacatcagggttaccctcatccctgtccccagcatgtgactggtcactcctggggagacactc

SEQ ID NO: 29445 - DNA, 463 bp, Homo sapiens
  misc_feature (1)...(463): n = A,T,C or G
cgcccccccaatgatgaccntcggactgatcgccgtcgcagnggcganagctgaagaagtaggagatgggaccaagggaaagatctcaggctagttgacggctcttccacattgacctggagtgagggaaagctgctgcccctgggagctatagtaaagaggagattcctctctcccaacacacacacacatacccctttttgtttcctttatttctgacctgccagctgtgtcccactgccccctggctgggccttggcgccagagctttggaggggcgtctaggatggctaggagcccctggcccagacgttcagtcaccctgggggagggtagctgtctctccgttatcaattatgcagagcatgggggaagggcagcaatgtgacaggagggtgggtctctctgtcactcactgtcaaccatatctaccaagtgttgatggtgcttctgcctcacattg

SEQ ID NO: 29446 - DNA, 461 bp, Homo sapiens
  misc_feature (1)...(461): n = A,T,C or G
cattgttgacatcgntcagngncgngcaattcgtcaagatttgtaatagaaattgccatttgaattttggtctgtaagcccaaagattgttactgtgttagtaactaaatattacgagatgcattaggaaaagaaggaaaagaaattttaagtaagccaaaaatctattatatagtcataagtcaaactcagttactagacttcaacaaataccaacccatgcctccatttcccaaacagaaataataatatgaacatcttagtatattgtcttctaatccttacattatgttatttttaagcagagtcaaactcatattctgtatataattgtatatacattgggtttttctcccttatagcaattcacactaggagtctcagtcaacatgattttttaatggctgtataatattctagcgtatgaacacatcattatttaaccattttcctgtcactga

SEQ ID NO: 29447 - DNA, 577 bp, Homo sapiens
  misc_feature (1)...(577): n = A,T,C or G
agagntcnannnnnaggggnnnnnnaggggnnnnnnnngtttgannccattcgaaccactatccatgtggtggaattccaaagtgctaggattacaggcgtgagccaccgcgcccggcataaagctcataaatatttttaaaggctatatatacatataatacatatgaatgtatatgcatgctttgtactacacataaatttgtaaaaatttcattatgatttgaaaattaaccagttattttaaatggaatgagaattaaaaagtattacagtaacattctgacttagaatattgacataatattcattcattacttatatatatgttttgttgagacggtgtcttgccctgtcgcccaggctggagtgcagtggtgtgatctcagctcactgcaacctccgcccggagggttcaagcaattctcctgcctcagcctaccaagtagccaggattacaggaatgtgccaccacacccagttaatttttgtattttttagtaaagacagggtttcaccatgttgactcggctggtctcaaactccggacctcaggtgatccacctgccttggcctct

SEQ ID NO: 29448 - DNA, 450 bp, Homo sapiens
  misc_feature (1)...(450): n = A,T,C or G
gcccaaattgatacctacgaaactgaggcatcnganngacnanaccctgggctgtccttacagggccaaaatgcagtgactcaggattctaatagcacccgttccctccaaaacatgccttctaccaattccattaacagagacaggtgtcagtggaaggggtgggtctcctgtccagaccaccccggcccgggagcagcctgggggatctaggtgggtccttccagagaggcaagtgagaacaactgaaccaagcctcagctattagatttggaatattcacacacttgacactccagagtcagaacagccccttccctttcccttcctcctggaatcagatagggttgaaatccttttaacaccatttggttatcagctcacaacctgaaggtttgcaagtttaggaaaagtgacatgcctctgagcacagggtgctttactcctttn

SEQ ID NO: 29449 - DNA, 432 bp, Homo sapiens
  misc_feature (1)...(432): n = A,T,C or G
actggcctcgaactgangcacgaagncggggaattccggaacgagtttgaagctgagaaaggcggacttttttccggagaattttcttgcttccgctggagcctctcgggaggcgggtgacgttatagtatttgtgagaagttggggtctgcgagggcattgtgatcctgcccaggcagaggtaagtgacacatgacctttgaattgaatgaggccctgatgatggcgtctccatttcagaggtgtagcctttgggctgggtcccggtcgcctctgttcagcgtatgatcccattcccagggccctggaggttcaggttcgtgggttagagagttctcctccggtcctcgatctcctgaatagaggtgacctccaggaactggggcatcagagatccggggctcgatttccaggctcgccatagacatcctg

SEQ ID NO: 29450 - DNA, 453 bp, Homo sapiens
gcccccctgatacactggctgagtcgcgctcgaccgcgacactttataggcctgctggatgtgtatggatttgaatcatttcctgtttacagtctggatcagttgtgcatcaactacgccaatgagaagctgcagcagcattttgtggctcactacctaagggcccagcaggaggaatacgcagttgagggcctggagtggtcattcatcaactaccaggacaaccagccctgtttggatctcattgagggaagccccatcagcatctgctccctcataaatgaggaatgccgcctcaatcgacccagcagcgcagcccagctccagacacgcattgagactgccctggcaggcagcccctgcctgggccacaataagctcagccgggagcccagcttcattgtggtgcattatgcggggcctgtgcggtaccacacagcaggcctggtggag

SEQ ID NO: 29451 - DNA, 447 bp, Homo sapiens
  misc_feature (1)...(447): n = A,T,C or G
natgatnccatcgaaaactggggcctcntgcaaagncagcccaaattctgcggagacttcaggtgctgaagtccacaggggatgtgtccggagggcggttcctgtacgaggggtatgcaacagtcactgatgcgccccccgagtgcttcctcaccctcagggacacggtgctgctgcgtaaggaatctcggaagctcattgttcagcccaacactcgccttgaaggctcagacgtgcagcttctggaatacgaggcgtcagctgctggcctcatccgatccttctctgagcgtttcccagaggatggacccgagttggaggagatcctcacacagctggccacagccgatgcccgattctggaagggccccagtgaggccccatctggccaagcttgaggaagatgtgtggccttgcccccaattccatcagaccaaggcttgcagg

SEQ ID NO: 29452 - DNA, 451 bp, Homo sapiens
  misc_feature (1)...(451): n = A,T,C or G
nngattgcccccctaactgaganctaccgnacagnctggnggaattcgagatacgtgcagctcaagcaggagcgtgaagggggcattcagcacatcagctggtcctacgtgtggaggacgtaccatctgacctctgcaggagagaaactcacggaagacagaaagaagctccgagactacggcatccggaatcgagacgaggtttccttcatcaaaaagctgaggcaaaagtgagcctccagacaggacaaccctcttcatcactggtggctgagctttttcccagcaggaatgggtcctcgaatcatcgtgcctctttcacagaaaggacgttgtggtggcctcaccccaggcatgcccaacaggaactgtcagcataaacctgggggccctcaggactaggacagggtgagccagtgctccctcctttcatgtacttggcctgagactg

SEQ ID NO: 29453 - DNA, 580 bp, Homo sapiens
  misc_feature (1)...(580): n = A,T,C or G
aggggaactnnnnnaaggggnnnnnnagggnnnnnnnnntttggaannccattcgaaccactatcagtgtggnggaattccgccgagaagtgagctccctggggaaggactggcacaagttctgcctcaagtgcgagcgctgcagcaagacgctgacgcccgggggccacgccgagcatggacgggaagccgttctgccacaagccgtgctacgccaccctgttcggacccaaaggcgtgaacatcgggggcgcgggctcctacatctacgagaagcccctggcggaggggccgcaggtcaccggccccatcgaggtccccgcggcccgagcagaggagcggaaggcgagcggccccccgaaggggcccagcagagcctccagtgtcaccactttcaccggggagcccaacacgtgcccgcgctgcagcaagaaggtgtacttcgctgagaaggtgacgtctctgggcaaggattggcaccggccctgcctgcgctgcgagcgctgcgggaagacactgacccccggcgggcacgcggagcacgacggccagccctactgccacaagccctgctatggaa

SEQ ID NO: 29454 - DNA, 457 bp, Homo sapiens
  misc_feature (1)...(457): n = A,T,C or G
cgcccccctgagacactggactgacgccgtcagcaanaaccattgnggaatagctaaacctttttaaaaaaatttattggattttcctccctgcttaaaagatttcaccagaaaaccttcatataaaaattcaggccctttttggacaatttttaaaatttgtatctttactagaacatgagaatctttttcccttggaagcttgaattataaatgtggtgtttggcctgcctcagcagcaccagttgactgctcgtgtgccagcggtgtggggaggacggggcaggacgctgcagctctctccagccctgttggcatcctcagtgcctgcaggcctctcgctgcctgttgggctgtctggggggtggccatttaaggatcgtggggacggggtccaccccaagaagaaagaaaggcccgtccacaggcccggctctgggccacgtgccccggaagn

SEQ ID NO: 29455 - DNA, 581 bp, Homo sapiens
  misc_feature (1)...(581): n = A,T,C or G
cgtcgccnctannntaggggnnnnnnagggnnnnnnnnnatttggaancccattcgaatcaccagtccagngaggnggaattcaggtaacgctgggtaagaaaatcggcttccgccagagaagaaagtccagatatctcaggtcctgtgaataacttagtttctctcgcatactctgtttttgagccattgaagcgcaatgaatgccaagcaccactcacttttcctcattgtctgagtgggatggaaagagtctcacttgcagttgcttcagtcacaacccaggcgtctgccttaatagcatcacctgtgccgtctgcgtttctagcgtcacctgtgccgtctgcgtttctagcgtcacctgtgccgtctgccttcctagcatgacctgtgccgtctgcctttctagcatgacctgtactgtctgcctttctagcgtcacctgtgccgtctgcctttctagttaaagttgattttaaattaatttgggaaaaacggtgaacaagtggngaaaaacatcaccaaagactccaaacaggtggaacgatgaacttaatgttccctgcaccctccttacagatg

SEQ ID NO: 29456 - DNA, 440 bp, Homo sapiens
  misc_feature (1)...(440): n = A,T,C or G
catcggggctccgtagatgcgggcaanncccacccggcgcatggctccatgaagcaagaggaggaggcagagcgcgagagattccgtccgccttagtcgcgtctgggccaggagaaaagcaaaaccatattcctgctgctgtcagttttgatgcactgagaaaacttcagagacctaagctttttccagagaagagaagctttactggtgttccagccctaaggctcatataacattaacagacaagacacttttcagaaagacaggcaacgtgttggaccttccggagcttctcagaagacagagggttttcttttgaggctgttgtacagtggcctgattatagctcactgtagcctcgaaattctgggccgaaatgatccgcctgcctcagcctccaaagtagctgagactacaggtgtgtttgtcaaagtgtctct

SEQ ID NO: 29457 - DNA, 556 bp, Homo sapiens
  misc_feature (1)...(556): n = A,T,C or G
ntttcgaaacattcgaatnactagtccagagtggtggaattcacctgacggtgaacctcgctgcgccccacggtcctggcgctttcttccgctacatgcgccagcccatcaaacaggagctcatctgcaagtggctggcggccgacggcaccgcgaccccgagcctctgctccaaaactttcagcaccatgcacgagctggtcacgcacgtcaccgtggagcacgtcggcggcccggaacaggccaaccacatttgcttctgggaggagtgtccgcgccagggaaagcccttcaaagccaaatacaaacttgtaaatcacatccgcgtgcacacgggcgagaagcccttcccttgtcctttcccggggtgtgggaaggtctttgctagatcagaaaatctcanaatacacaaacgaactcaaaaaaaaaaaaaaaaaaaaaaaaaaaacgggccggctgaaataaaaaggccccttaaaaccccgtggaaaacccggagggggccttttaggtggcagcctttgtggggtgcgcctccccgggcgttcttgaaccg

SEQ ID NO: 29458 - DNA, 456 bp, Homo sapiens
  misc_feature (1)...(456): n = A,T,C or G
cactgatgacntcgtcangncggcaanncanctggcaacaaaagcactgtaattattcaatacttacacagaaatcctcccataaaacaagtatgcttcaaaaaatcatattgtcttaacaatgaccatgttcccctttggttgaattggcctcttttgtaagattctaattacccaaaattaagggtttttgggggtttttgtttgtttttgttcttttgttttgttttaccatgctaggactgggtaactttattcaagaccttgacaaaatgatccccaaagtaatataaatgtagacactttaaaaagtccagatgtggaagtgaggagcgcctctgcccggccgcccatcatctgggaggtgaggagcgcctctgcccggctgccctctctgggaagtgaggagtgcctctgcccggccaccccatctgggaagtgaggagcacctctgcc

SEQ ID NO: 29459 - DNA, 464 bp, Homo sapiens
  misc_feature (1)...(464): n = A,T,C or G
nactttagagcatctgtacgccagcgncgnggaattccccaacaccaagaagaactggatgcctgcgagcaagcaggcggtcaccgtttcctacttctatgatgtcacaaggaacagctatcggatcatcagtgtggacggagccaaggtgatcataaacagcacaatcacaccgaatatgaccttcaccaaaacgtcacagaagtttgggcagtgggccgacagcagagccaacacagtgtttggtttggggttttcctctgagcagcagctgacaaagtttgcagagaaattccaggaggtgaaagaagctgccaagatagccaaagacaagacgcaggagaaaatcgagacctcaagtaatcattcccaagcatccagtgtcaacgggacggacgatgaaaaggcctctcacgccggtccagccaacacacaccttgagtctgagaatgacaagctgaaga

SEQ ID NO: 29460 - DNA, 465 bp, Homo sapiens
  misc_feature (1)...(465): n = A,T,C or G
aggacgagcccnnncactgatgntccatgagatcctacgacangcggnggaattccttcacacagggttctggggaaaacaaggaaggtgggaggggtagccctgcctcagggagtggacttacctggcctctctgctcagagatcatcaattatgaatttgacaccaaggacctggtgtgcctgggcctgagcagcatcgttggcgtctggtacctgctgaggaagcactggattgccaacaacctttttggcctggccttctcccttaatggagtagagctcctgcacctcaacaatgtcagcactggctgcatcctgctgggcggactcttcatctacgatgtcttctgggtatttggcaccaatgtgatggtgacagtggccaagtccttcgaggcaccaataaaattggtgtttccccaggatctgctggagaaaggcctcgaagcaaacaactttgcct

SEQ ID NO: 29461 - DNA, 442 bp, Homo sapiens
  misc_feature (1)...(442): n = A,T,C or G
acttgatgacccttgaagaccctctanacagngnggnggaattcgaatcctcagcgttcgggcaaagggcagagaatccagccagaagttacatgtagatctaatgaccttctccaggagtcgaggacccactacctcgctgaattctcagagtcaaaatgcgtctctacctgctggtcccagaacagtcccctgctgctgcattgaatgaatctcatctcacttcctcgagtcagccctacctatatttgatgatcacaaaccttatccttacgttgccagcagtaacattctgcatccctcacccactccactgtgtccttttcctcccactgatcttcactctgccttttctaggggaactctgaacagtatttctgagaaggggatgaagatcgtctcccaagtaaatatgttgagtttgactgggcaccgtggccct

SEQ ID NO: 29462 - DNA, 437 bp, Homo sapiens
  misc_feature (1)...(437): n = A,T,C or G
actgatgaccatagaacacnctggnggaanncctcctgggccgcctggcggccatcgtggctaaacaggtactgctgggccggatttggtggtcgtacgctgtgaaggcatcaacattgctggcaatttctacagaaacaagttgaagtacctggctttcctccgcaagcggatgaacaccaacccttcccgaggcccctaccacttccgggcccccagccgcatcttctggcggaccgtgcgaggtatgctgccccacaaaaccaagcgaggccaggccgctctggaccgtctcaaggtgtttgacggcatcccaccgccctacgacaagaaaaagcggatggtggttcctgctgccctcaaggtcgtgcgtctgaagcctacaagaaagtttgcctatctggggcgcctggctcacgaggttggctggaagtact

SEQ ID NO: 29463 - DNA, 480 bp, Homo sapiens
  misc_feature (1)...(480): n = A,T,C or G
aggggcccccccnnncncnnaacttccgaccntcntccgngacgngcaattctgagcctccgggccagttcaccttcaccgccgaccggccgcagctgcactgcgcagccttcttcatcagcgagcccgaggagttcattaccatccactacgaccaggtctccatcgactgtcagggcggcgacttcctgaaggtatttgatggttggattctcaagggggagaagttccccagttcccaggatcatcctctcccctcagctgagcggtacatagatttctgtgagagtggtcttagcaggaggagcatcagatcttcccagaatgtggccatgatcttcttccgagtccatgaaccaggaaatggattcacattaaccataaagacagaccccaacctctttccttgcaatgtcatttctcagactccaaatggaaagtttaccctggtagttccacaccagcatcgaaactgcagct

SEQ ID NO: 29464 - DNA, 460 bp, Homo sapiens
  misc_feature (1)...(460): n = A,T,C or G
accgtaggccttcgccagngccgnggaatncgcgactttaaaggcgccgggactgagcgaagggcgtttgggtactgccgtcgccgccgctcatgccggggaggggtgcgttagtgtcaggaagcgggctgcgccgaggtcgtagcggaaccagctggcgaccccgcagaatgaaccacaagagcaagaagcgcatccgcgaggccaagcggagtgcgcggccggagctcaaggactcgctggattggacccggcacaactactacgagagcttctcgctgagcccggcggccgtggcggataacgtggaaagggcagatgctttacagctgtctgtggaagaatttgtggagcggtatgaaagaccttacaagcccgtggttttgttgaatgcgcacgagggctggtctgcgcacgagaaatggactctggagcgcctaaaaaggaaatatctgaaccc

SEQ ID NO: 29465 - DNA, 553 bp, Homo sapiens
  misc_feature (1)...(553): n = A,T,C or G
agggttccnnaggggccnnnnattcgancacaancggtccactatccgtgtggtggaattctacaaaaggaagagagactctcacaggtccaagggtctagacagacttgctgctggaagaagtggtgtccttgcctatggatggggaggaggtcattgcagggaggaagatgcagggctgtgagttgggcagggaagactcctgttatctccccttgggtaagatcttccctcccttccttaacatgctcacagctcctgctttgctgggtatctcggtcatcaagacttctatccctctccttggggataataggagacttcccccccttttaagatgcatttctggacttcctaaaatgttttattatgagcacttttcttattctcattccaagacagagtctccctctgttgcccaggctggaatgcagtggtgggatcttggctcacagcaacctctgcctcctgggcaattctcgtgcctcagcctcccaaagtactgggattataggcgtgagccactgtgcccagcctatatttttattcctan

SEQ ID NO: 29466 - DNA, 443 bp, Homo sapiens
  misc_feature (1)...(443): n = A,T,C or G
actgatgaccactggatgacatctagancagncnggnggaattcgagccgggactccaagtgcatcattcagatgtctggaagcaccttctccattgttaaccccaaacagcccaaggagacgcccaaaagcttcagctttgactactcctactggtcgcacacctcacctgaggacatcaactacgcgtcgcagaagcaggtgtaccgggacatcggcgaggagatgctgcagcatgcctttgagggatacaacgtgtgcatcttcgcctatgggcagacgggtgccggcaagtcctacaccatgatgggcaagcaggagaaggaccagcagggcatcatcccacagctctgcgaggacctcttctctcggatcaacgacacgaccaacgacaacatgtcctactccgtggaggtcagctacatggagatttactgtgagcg

SEQ ID NO: 29467 - DNA, 446 bp, Homo sapiens
  misc_feature (1)...(446): n = A,T,C or G
nattgagactgangaccttcgacagnctggtggaattccattgggcacctctgggagtttgtcctgggcacagacagcttccacctgggcttcacggagaccgggcactgcctgggcaaaccgaaccctgcgctcgcacctcctacacggctgcagtgggacattccaaaacagtgccaggcggtcatcgagagttcctaccaggtggccaaggcgttggcagacgacgtggagttgtactgcttccagttcctgccctttggcaaaggcctcatcaagaagtgccggaccagccctgatgcctttgtgcagatcgcgctgcagctggctcacttccgggacaggggtaagttctgcctgacctatgaggcctcaatgaccagaatgttccgggagggacggactgagactgtgcgttcctgtaccagcgagtccacagcctttgg

SEQ ID NO: 29468 - DNA, 436 bp, Homo sapiens
  misc_feature (1)...(436): n = A,T,C or G
actggatgccactgatcacgctggggaannccgacgctgtggttgctgtaaggggtcctccctgcgccacacggccgtcgccattgtgaagctgatcaaagaggccaagcagagactacagcagctcttcaaggggagccagtttgccattcgctggggctttatccctcttgtgatttacctgggatttaagaggggtgcagatcccggaatgcctgaaccaactgttttgagcctactttggggataaaggattatttggtcttctggatttggaggcaatcagcggacagcatggaagatgtgtgctctggctcggataagagatgggacatcattcagtcactagttggatggcacaaggctcttcacagacgcatctgtagcagagtggaacttgtactaacttatgatagaatgtatcagaataaatgtt

SEQ ID NO: 29469 - DNA, 441 bp, Homo sapiens
  misc_feature (1)...(441): n = A,T,C or G
actgaagaccctgatgacccttagacagngnggnggaattccacagactcagagagaacccaccatggtgctgtctcctgccgactagaccaacgtcaaggccgcctggggtaaggtcggcgcgcacgctggcgagtatggtgcggaggccctggagaggatgttcctgtccttccccaccaccaagacctacttcccgcacttcgacctgagccacggctctgcccaggttaagggccacggcaagaaggtggccgacgcgctgaccaacgccgtggcgcacgtggacgacatgcccaacgcgctgtccgccctgagcgacctgcacgcgcacaagcttcgggtggacccggtcaacttcaagctcctaagccactgcctgctggtgaccctggccgcccacctccccgccgagttcacccctgcggtgcacgcctccct

SEQ ID NO: 29470 - DNA, 446 bp, Homo sapiens
  misc_feature (1)...(446): n = A,T,C or G
ggagtcccgggttccccccctgggtaccatgaaacgtggcagaanncgccttctcaagatcctcagcaagacgctggcagccctgcgccacttcaccccagatgtctgccagattctgctggatcagtccctggagcttgctgaatacaacttcctgtttgccctgagctttaccactcccacctttgactccgaagaggccccctccttcgggacccttctggccacagtgaatgtggccctcaacatgcttggagagctggacaagaaaaaggagcccctcacccaggcagtggggctcagcacacaggcagaagggaccaggacgttaaagtccctcctgatgtttaccatggaaaactgcttctacctgctcatctctcaggcgatgcggtaccttatggacccggctgtgcacccccgggacaaacagcggatgaagcagg

SEQ ID NO: 29471 - DNA, 442 bp, Homo sapiens
  misc_feature (1)...(442): n = A,T,C or G
ncctgatgactgctgcactngcggnggcattctgacaaggaatattattacaccaaggaggagcagtttanacaggtgttcaaggagctggtgtttctgggttggtataccacaggggggccacctgacccctcggacatccacgtccataagcaggtgtgtgagatcatcgagagccccctctttctgaagttgaaccctatgaccaagcacacagatcttcctgtcagcgtttttgagtctgtcattgatataatcaatggagaggccacaatgctgtttgctgagctgacctacactctggccacagaggaagcggaacgcattggtgtagaccacgtagcccgaatgacagcaacaggcagtggagagaactccactgtggctgaacacctgatagcacagcacagcgccatcaagatgctgcacagccgcgtcaagc

SEQ ID NO: 29472 - DNA, 567 bp, Homo sapiens
  misc_feature (1)...(567): n = A,T,C or G
ngaanntnnnnaggggnnnnnnggnnnnnnnnatcgaacactgttcagtccctagtccgtgtggtggaattcgcagcccgctgctgcccccgacttcctgcagctgccaacggagccaggccgcggccgagcagccgccgtggccgctgctgtggcctctgcagccgctgcacaggaggtgggccgctagaagaaaggtggttcacggtcggggcccgctctgctgaccatggggaggacgccctggcgctcccaccctacacaatgctcgagtttgcccagaagtatttccgagaccctcagaggagaccccaggatggcctcaggctgaaatcccagggagcctcgggagtccagaaccttggaggacatgctttgcttcaccaagactcccctccaggaatccctcatcgaactcagcgacagcagcctcagcaagatggccaccgacatgttcctagctgtaatgaggttcatgggggatgccccacttganggccacacatgacatggacatgctcttgtacctgctgaagctgatcggggaccatgangncatgcgggatn

SEQ ID NO: 29473 - DNA, 439 bp, Homo sapiens
  misc_feature (1)...(439): n = A,T,C or G
aactgaagacattgatgagcgtggnggaannccnnnaaaaattttcagacggccacaattttataagcaatagtcttccattaattttataagcattgtatcaatgacaataaaaagatgactcaaaaagccttatatacctaacaattgagacagatctttgaagtatcccctagatcaaagaggaaatcaagatggaagtcatgagttatctggaaataaagaggggaacacttcatactaaaacttgtggaatgtagataaggctgtactaagagaaaaattgatgtccttaaaatttatattattaaggatgaaacgaataagtgaatgtttaagtaaagtaaggaaataaatgaattaatattcactttattattattattattattattattattattttttgagacggagtctcactctgtcgccgaggctg

SEQ ID NO: 29474 - DNA, 441 bp, Homo sapiens
  misc_feature (1)...(441): n = A,T,C or G
atctgatgcctccgtangaccttaganagncnggnggaatncggaatagctcaccgtttacaccctccctcatagatacacagattttatttttttaatggatatttatttttttacattggtcagtacacaggtcaggagctcacgccagggccttgaggacaggctgaccctcctccccggggtggcgtggggctggggcaccctccgacggcagagcctccttcagaaagtgcagctcaagtcttaaagacaccaaaactgagccatgggcacgcgccgtctccgggccatggcgttcactgcagggcgggggcggcaccgctcccctgtgactgcatcccgcctccctggggacctgcctgtggcaggaaggaatggggggccccagccccaggccgggaaggagccagcggccgacaaagcagaaacacccgctgt

SEQ ID NO: 29475 - DNA, 446 bp, Homo sapiens
  misc_feature (1)...(446): n = A,T,C or G
natcgattgacgtcgattagaccgngcggtggaattccaagaagttccgacttggctgtgctataggccacaatgaaacagcaatggttagtgaagctctcgtgggactccccagccaaggactcaacagcagctgtgaggcccagatgttcacaggtgactcacagatgtcctacacagtgcccattatggcttttgcttttgtctgccaccctgaggtgctgcccatctatacggagctctgccggccctccaagcgcaggatgcaggccgtggccaacgtgtccattggggccatgttctgcatgtatgggctcacagcaacctttggatacctcaccttctacagcagtgtgaaggcggagatgctgcacatgtacagccagaaggacccgctcatcctctgtgtgcgcctggccgtgctgctcgcggtgaccctcactgtg

SEQ ID NO: 29476 - DNA, 445 bp, Homo sapiens
  misc_feature (1)...(445): n = A,T,C or G
nattgattgcattcgtccgngcggnggaattctgacgtatgacgaagttgcattctattgccaccgtaaatgctgagaagccacagcaagagctgtgaattgtgggtctgagggtgtggttatgtggggcagagagatgggagtcatgatggtggaggtgaagaatccggcagaggcaccaccaactgagttgattagaaggggtcactttccttgatgacacaaccaggttgtgaagccaggttgctctaagagcgggaagacagcattcgagtgtgaaggcagctgtgagggaggaagcgaggggcaaaatcaggagggcgcaggtgtgggtatatgtgtgtttgtggttntgacgatcangtcttttgagcaggtgcccccgaggaaaggtgcacacatgcgcgcaaggcttgccgtgacgtgtgaggacgaagtcaagggt

SEQ ID NO: 29477 - DNA, 439 bp, Homo sapiens
  misc_feature (1)...(439): n = A,T,C or G
aactgatgacacttgagaccgtggggaanncnggcaaaacacacagctgaggttgctgatgtggccactagaaaaaggggacccttccattccttggcatggacatttagactctcaagaataccactgaagccatgcagaggtgaggatagaggcaaagggagataacacaaacactcagaggaaaagatgatgtgaaaacagaggcagagattaaagtgcagtgacctcaagtccaagagtgccgaaaaagccaccagaagctggaagagttacagcagcctctgaggtggtggagggtggcagcaggacagtgagctgacggccaacccctgtgcccaagtgtgctgctccgctcaactccatgtgcaccagggaacagccattctctgcaggctgatttgatctggaaccacaattgagtctagttctggaatct

SEQ ID NO: 29478 - DNA, 443 bp, Homo sapiens
  misc_feature (1)...(443): n = A,T,C or G
aactgatgacccctgangncccttagaacancnggnggaattctaacgacccaatcaggtctaaatggccagaaattgagggcccttttggtgggttctcccacttgacttgttgcttatcctcaggtatttcagagcaggggcagaggggtcttaaagccaggccagcctgttctgcccacttcctaccttggggagttcactgtctcctatggcagccccttctatccaatgcaagagctaacatccaccttcttgtccccccactccctgcccgccgaccccagggccccccacctggcttctaacatcacctttaagagccctacacggtatccctgatgcctcagccactgggcagccctgcagcaacgtgcagaaaatgatgcaatctgcagaaacttctcaacttctcatttatatctaaaagcagactgttctca

SEQ ID NO: 29479 - DNA, 454 bp, Homo sapiens
  misc_feature (1)...(454): n = A,T,C or G
ntttgatgatcactagtccagttcgagggcattcccggaaagcccctcttatgatgtttgttgccaatgatagattgttttcactgtgcaaaaattatgggtagttttggtggtcttgatgcagttgtaagcttggggtatgaaggtttgggccacgcctgggcgcttccggctgcgccggatgctgtttcctttccgctcccaggggcgttgggaacggttgtaggacgtggctctttattcgtgagttttccatttacctccgctgaacctagagcttcagacgccctatggcgtccgcctcgacccaaccggcggccttgagcgctgagcaagcaaaggtggtcctcgcggaggtgatccaggcgttctccgccccggagaatgcagtgcgcatggacgaggctcgggataacgcctgcaacgacatgggtaagatgctgcaattcgtgct

SEQ ID NO: 29480 - DNA, 432 bp, Homo sapiens
  misc_feature (1)...(432): n = A,T,C or G
actgagacactgagacctggggaanncaaangaaaagcccgaatccacctagtttttatcaaatttaaggcattggtatttcattttgtgccaaaatggcttatatcacttatttagtacttcatgtctgaaggtctctttcaaattacaatccacgactaagatgaaacaaaatgttttagctcaaaatttttagctgaactaggcaaaactgacaataagttcatactgctagatagccactctcaagccttcatactagcagaacagattcagagattcagaatgcaactagataaccggttggttacattttgtaacgccatcattttcttagcacaattttatagagttaaaattgaaaatctgttttacttcagcacttctatcattgagtaataaagcactattagaaataccaataccagcgca

SEQ ID NO: 29481 - DNA, 443 bp, Homo sapiens
  misc_feature (1)...(443): n = A,T,C or G
actgatgacaactgangaccctctgaaagncnggnggaatacccgagagcacatccagcatttgcatcacctccctggcacctcctatagttacattcactacatccccaccgccgcctgtcatccctcacgtctctgtggccacccgggtgtcactgccagcaccaggcactgctttcacgtaaaatgtccaaatcacatcttcagcaagaaagcaacctcacggattgccccgcctcaaggtctttccaccctctttgatatcagcgttcggagaggtccccgccagcccggtggctgccctcaggtcccgtcacatgtctcaagggtccagcgttcgaggaagcactgttgtagatgacagagctttttgtttcacagctgcggggattctgctgaccatcttttagaaaattatttcataatttattctggctttgccg

SEQ ID NO: 29482 - DNA, 477 bp, Homo sapiens
  misc_feature (1)...(477): n = A,T,C or G
catcgagcccccaatggagnagcatctggccagngcggnggaattcacttaagatactattaaagatgacccatctcatcagatgacagactgatcttaaattttggttatacattattgcaccagcattactttgcagtctcctaactcaaaaactagtgacttttagttttaatctaacatttactcctttataaaaacagattttgcatgggagtggctatcctgtgtacatttccattattgtagtgaagttgaactagagcaactgctaaagtcaccacactgccctaattaagtaaataagatcatgtactactcaagctaattgattttacggaatacacaggaaaagtaaagtttgcttttcctggtgtcagagatgcctccagctacacaacttttgaactgtgctttataaaggcttgaaaaaacaaaataagatgatctacagaatgttcctaagatctgtagtgc

SEQ ID NO: 29483 - DNA, 474 bp, Homo sapiens
  misc_feature (1)...(474): n = A,T,C or G
gcgagccnnnnntttggtcgacctccataggccgngcggnggaattcgccatcaagaagaagatgcagatgctgaagctggacaaggagaacgccatcgaccgcgccgagcaggccgaagccgacaagaagcaagctgaggaccgctgcaagcagctggaggaggagcagcaggccctccagaagaagctgaaggggacagaggatgaggtggaaaagtattctgaatccgtgaaggaggcccaggagaaactggagcaggccgagaagaaggccactgatgctgaggcagatgtggcctccctgaaccgccgcattcagctggttgaggaggagctggaccgggcccaggagcgcctggctacagccctgcagaagctggaggaggccgagaaggcggctgatgagagcgagagaggaatgaaggtcatcgaaaaccgggccatgaaggatgaggagaagatggaactgcagg

SEQ ID NO: 29484 - DNA, 479 bp, Homo sapiens
  misc_feature (1)...(479): n = A,T,C or G
ggnggggnnccggggnnnnnnnaactgagaccctgtagaggacgtgtganagngcgctgagatctcacattcttgaaggtggcattgaagagcactaagatcggaagatgagtgagcttgaccagttacggcaggaggccgagcaacttaagaaccagattcgagacgccaggaaagcatgtgcagatgcaactctctctcagatcacaaacaacatcgacccagtgggaagaatccaaatgcgcacgaggaggacactgcgggggcacctggccaagatctacgccatgcactggggcacagactccaggcttctcgtcagtgcctcgcaggatggtaaacttatcatctgggacagctacaccaccaacaaggtccacgccatccctctgcgctcctcctgggtcatgacctgtgcatatgccccttctgggaactatgtggcctgcggtggcctggataacatttgctccatttac

SEQ ID NO: 29485 - DNA, 465 bp, Homo sapiens
  misc_feature (1)...(465): n = A,T,C or G
ggtcgcnnnnactgataacctcgctganaccntcgnaannncnngngnnggcagaggctatcgggctggacaaggacaaacccaaccgtgtgacctaagtggctgtgaagatgttgaagtcggacgcaacagagaaagacttgtcagacctgatctcagagatggagatgatgaagatgatcgggaagcataagaatatcatcaacctgctgggggcctgcacgcaggatggtgggtgccggccagactggctttccctgcccagcggggagaagatctgagctggggtatcagtcccaaggcctctctcagccacagctagggaagggggttaagagaggctgctttggcagaggtttaaaatgtgttatctcgggatctgggctccgctcattggtgttcattcaggaatacagatacctagattcacacacgtggtgtgttaacagaggcagctgagtaatt

SEQ ID NO: 29486 - DNA, 471 bp, Homo sapiens
  misc_feature (1)...(471): n = A,T,C or G
gggtagtgnnaactgatnccntcatagtagacactaggcagngcggtggaattcgctccaggccgtgcgcatgtttgctgactacctcgcccacgagagtcggagggacagcatcgtggccgagctggaccgagagatgagcaggagcgtggacgtgaccaacaccaccttcctgctcatggccgcctccatctatctccacgaccagaacccggatgccgccctgcgtgcgctgcaccagggggacagcctggagtgcacagccatgacagtgcagatcctgctgaagctggaccgcctggacctcgcccggaaggagctgaagagaatgcaggacctggacgaggatgccaccctcacccagctcgccactgcctgggtcagcctggccacgggtggtgagaagctgcaggatgcctactacatcttccaggagatggctgacaagtgctcgcccaccctgctgctgct

SEQ ID NO: 29487 - DNA, 461 bp, Homo sapiens
  misc_feature (1)...(461): n = A,T,C or G
ggttcgnnataagaaactcctactgaagccctcgnannnncnngannntatgaggcgactggacgggcggcgggcagagagtgcttcggggattcaggtgtcggtcatggctcaactcttctactactttgccttgggagctatttgctacatcctgtgcgagaaacgcattggctgcctgcaacgatccatccccgaggacaccgtgaccttcgtcagatccatcgggttaatgttccagaactcactctatgccaccttcctccccaagtggactcgccccgtgctgcctttctggaagcgatacctggatggatggaatgccatcttttcctttgggaagaagctgattgatgagaagctcgaagatatggaggcccaactgcaggcagcagggccagatggcatccaggtgtctggctacctgcactttttactggccagcggacagctcagtcctc

SEQ ID NO: 29488 - DNA, 546 bp, Homo sapiens
  misc_feature (1)...(546): n = A,T,C or G
gacatccctatctaacgtacaaatttcaacttagaatttataacatttacaaacaccacaaaggggaacnanannnaatgagactctagacangccggtggaaacgctttcttaagcctgtactttaggcagaggtcctttaaaaaaggaatcttcaaggattttttcaccctgaggcttgaaaaatatcttaatagaaaattatcatatgaatttgtcctgtaggaagaggcatttatttataaatacccttgcccccattactatcttaagaaaagcagttctaggccaggcacagtggctcatgcctataatcccagcactttgggagtctaaggtgggaggatcacttgagcccaagaggtcgagaccagcctgggcaacatggttagacccattgcagcaaaaagtatatatattagctgggtgtggtggcatacgcctatggtgccagctgcttgggaggctgaggtgggaggatctcttgagcctggaggttgaggctgcggtgtgctgtgatcgcaccactgcactccagcccaaacg

SEQ ID NO: 29489 - DNA, 468 bp, Homo sapiens
  misc_feature (1)...(468): n = A,T,C or G
ccttgacgtccattacaccagngcggnggaattcgctgcccactgcccattcctctcatattggcacatctgctgtccattgggggttctcagtttcctcccccagacagccctacctgtgccagagagctagaaagaaggtcataaagggttaaaaatccataactaaaggttgtacacatagatgggcacactcacagagagaagtgtgcatgtacacacaccacacacacacacacacacacacacagagaaatataaacacatgcgtcacatgggcatttcagatgatcagctctgtatctggttaagtcggttgctgggatgcaccctgcactagagctgaaaggaaatttgacctccaagcagccctgacaggttctgggcccgggccctccctttgtgctttgtctctgcagttcttgcgccctttataaggccatcctagtccctgctggctggcagggg

SEQ ID NO: 29490 - DNA, 467 bp, Homo sapiens
  misc_feature (1)...(467): n = A,T,C or G
ctcgactttcatgacccttagcccagngcggtggaattcttcgtgtaccgcatccggttggtacgtgtcaacgaggacaccatggagctgatcctggggcccgacggcgtctgcattctctgccagccaggtgagccgagccagctggtgggccgcatcatccagaaagaccccctgcgccgcttcgatggctacctcatccagggcgccaacaacaagaagattgccaaggatgtcttcaagaagggggaccaggcctaccttactggtgatgtgctggggatggacgagctgggctacctgtacttccgagaccgcactggggacacgttccgctggaaaggtgagaacgtgtccaccaccgaggtggaaggcacactcagccgcctgctggacatggctgacgtggccgtgtatggtgtcgaggtgccacgaaccgagggccgggccggaatggctggtgtggt

SEQ ID NO: 29491 - DNA, 481 bp, Homo sapiens
  misc_feature (1)...(481): n = A,T,C or G
ccccagccccccnnnctttagaaattcgatnaccactaggccagagacgaggaattccttcctttgttacctagcaagtagggctatttccatcggtattttaaatgtggggtcacagatcttttggggagggtgtgcttggcagggggcctcttggagccaaagggatgtggtgtgagttgcgattggctggcactcacacccccacccctcacccacatcccagattcaagtcaggaaggcaggttttatttcagggcccttttcaagatgccctggcagcagatttctgcaggatgaggggtagcggtgtgtaggcagtgagggggaggttccaggggctgtcccacagcctgtcttttccaggctgggctccatcttccagtcccaaaaccctccttcacagggcccagaggcttgtgaggaagccaggtggacccagccttataagagtgggcatggggggcccctgatatctgga

SEQ ID NO: 29492 - DNA, 461 bp, Homo sapiens
  misc_feature (1)...(461): n = A,T,C or G
agcagccactgataccntcgnactgancggcnctcgnacgagncngcagnacggccgtcacccgcaccgctgcctgcttgcggttggagaaattttggccctaccgttcctccgtagtcacctctctatagtgggcgtggccgaggccggggtgaccctgccggagcctccgctgccagcgacatgttcaaggtaattcagaggtccgtggggccagccagcctgagcttgctcaccttcaaagtctatgcagcaccaaaaaaggactcacctcccaaaaattccgtgagggttgatgagctttcactctactcagttcctgagggtcaatcgaagtatgtggaggaggcaaggagccagcttgaagaaagcatctcacagctccgacactattgcgagccatacacaacctggtgtcaggaaacgtactcccaaactaagcccaagatgcaaagtttggn

SEQ ID NO: 29493 - DNA, 477 bp, Homo sapiens
  misc_feature (1)...(477): n = A,T,C or G
ccccagcccngnnnnnnttagaattcgtagtncgtgagcaggaactcgcaaaggaaagcaaaaggatgggacatcttttggagagtatggcggctggtacaaagcctgcaaagttgatagtccaactgttacaaccactctaaaaaaccttggggcactttacagacgtcaaggcaaatttgaagctgcagaaacgttagaagaagctgctatgaggtctcgtaaacagggtcttgacaatgttcacaaacagagggtggcagaagtgctcaatgaccctgagaacatggagaagcgcaggagccgtgagagcctcaacgtggacgtggtcaagtacgagagtggccctgacggaggggaggaaggcgtctctggccgagcctctttttgtggaaaacgacagcagcagcagtggcctggaagacgccaccgctaactgaccccaacctggccccgctccaggatgggactgccgag

SEQ ID NO: 29494 - DNA, 596 bp, Homo sapiens
  misc_feature (1)...(596): n = A,T,C or G
ccccagatcgatcactatcgatagaatcactcntccgagnggcggaattccagtctcagccttcagggcctgtgtccttgcggtagaggtcactttcttcattcttttattcctcacgtattttcattccttcaatattgagtaccagtgatgctggaaatctggatcgaatcaaagaaaggaagaacatcagaatctgttaaaacataaatacaaaggaaccttattcctgattttaatcaccttgaaaggcaggttcctgtaattgcagacgaccaggccaccttggccactgtcactcatgggtttcctggctgctgggtgccacctggctcagggtgcaccgtcagggcgtgcggctctgcgtgcttgcgtctgttcattgtttccatgtttttcttanagcaagaagcaaggaattatttcaggaattccttttctgtttgcaaatctgacacaaccttggttggaaccagctggttttttgcctgccagtcctgtggctgcatcaagggagcagagtgctcacgcgtgtgggagcgagtaaacgtgaggaagcgtgtgcggcggcctgagtccncaggcctnncctagan

SEQ ID NO: 29495 - DNA, 551 bp, Homo sapiens
  misc_feature (1)...(551): n = A,T,C or G
agggttcccccaggtnnnnnnnnaatcgaaccacattgagtgtgctgcaattcgctactggggaggctgaggcaggagaatcgcttgaacctgggaggtggagcttgcagtgagccaagattgcgccactgcactccagtctgggtgaacagagcagggctctatctctgaataaataaaagttcccttgtaatggaagctgacagtttttcaatattttgtttcaacatttgtgtaacttacactgggtaaggataatgtattttaagtaacatcctcatgttgcctgtatttgtttccctgtgtttatacagaggaggatactatgtatactaaatgtatacacagttcatgtatgcatttactaaacactatacgttaacaggggtgggggagtttaaagtgaagtcttgattcttagacgtgacttttcaacatacatttgggcatcttttttttttcatgagaatctatctgaaattgtaagtcaaaattgctgactcatgtgatgtgacaatttggaggtatatctaaggagtgacagtcacaag

SEQ ID NO: 29496 - DNA, 590 bp, Homo sapiens
  misc_feature (1)...(590): n = A,T,C or G
ccccagggtcgatcactgtcagtttggaggaactctgtctctgtgctctntctataggtacagctcaagatccctgcccggtttctcagctggagaaaaggcccagggttagtgaagcatccagaggcctggagcttggacatggaagacccagagttgcaggtgaactggtggcttcccccattccctctgcacgggccaggacccagagccccagcttggggaaaacagccttccagggtcagtgtttgagtgatgggtaggaagtctcacctgtaatgcacttcaggttgcatatttcctttcagtgttttatcacagaagcagttgggattttcataaaagcagacacaccttttagaggtggaaattgagaagtgaaggatcaaagtttggggcttgaggggactntanagaataggtgaggaaactgaggctaggatgacctggccatggtcactgtgagagggttggctcatgtcacacacgtgcccctacggactcatggtggagacatgcanggggcctggcacctantgccctgggtcacttggngacagccccacacangactttgagtgtggctgcgg

SEQ ID NO: 29497 - DNA, 588 bp, Homo sapiens
  misc_feature (1)...(588): n = A,T,C or G
cccagcatcgacactatcagatagatcactagtccgagnggaggaattcctcacctgcacctccctgctagacctcctgctgcccactggcttggagccactggactcagaggagcctagtgagaccatgggcctgggagctgggctgggagcccctggctcatgcttccccagcgaagagaatgaagagtctcggattctgcagccaccacagtacttctgggaagaggaggaagagctgaatgactcaagtctggacctgggacccactgcagattatgtttttcctgacttaactgagaaggcaggttccattgaagacaccagccaggctcaagagctgccaaacctcccctctcccttgcccaagatgaatctaggtgagcctccctggcatatgcctcccagagaggaggaagaagaggaagaggaagaggaggagagggagaaggangaggtanagaaacaaaggaggaggaagcanagagaaaaataaaacaaagcaagacaggggcanaaaaagaaggaggagatctgaatctcgtcttttcagganganatcgagctggaaataaagagagactgtga

SEQ ID NO: 29498 - DNA, 481 bp, Homo sapiens
  misc_feature (1)...(481): n = A,T,C or G
cgccagccccgccccccttagaaattcgatntccactagtccagagaggaggaattccgtccgcgcgctgcacaatggcggctctgaagagttggctgtcgcgcagcgtaacttcattcttcaggttcctgcttggctcgagtttgagtttacagcccctgcaagtaaatccaagagcctgttacagattggcggtcgtgccttatgaaatctgacttctacttccagaaatcagagcctcattcccttagtagtgaagcattgatgaggagagcagtgtctttggtaacagatagcacctctacctttctctctcagaccacatatgcgttgattgaagctattactgaatatactaaggctgtttataccttaacttctctttaccgacaatatacaagtttacttgggaaaatgaattcagaggaggaagatgaagtgtggcaggtgatcataggagccagagctgagatgacttcaa

SEQ ID NO: 29499 - DNA, 542 bp, Homo sapiens
  misc_feature (1)...(542): n = A,T,C or G
aggnagcnnnnttttgaaaacccctcgaaccactatccgtgtggtggaattcccaggtggtggcggtggacagagactcgggccagaacgcctggctgtcctaccgcctgctcaaggccagcgagccgggactcttctcggtgggtctgcacacgggcgaggtgcgcacggcgcgagccctgctggacagagacgcgctcaagcagagcctcgtggtggccgtccaggaccacggccagccccctctctccgccactgtcacgctcaccgtggccgtggccgacaggatcccccgacatcctggccgacctgggcagcctcgagccctccgccaaacccaacgattcggacctcactctgtacctggtggtggcggtggccgcggtctcctgcgtcttcctggccttcgtcatcgtgctgctggcgctcaggctgcggcgctggcacaagtcacgcctgctgcangcttcgggaggcggcttggcgagtacgcccggctcgcactttgtgggcgcggacggggttcgggctttcctgcagaa

SEQ ID NO: 29500 - DNA, 480 bp, Homo sapiens
  misc_feature (1)...(480): n = A,T,C or G
cgcccgcccccgnnannttagaaactcgagaccataggcagngaggnggaattcgtctggagaagcggaggtcaccccaggcacccctctctgcctgcctcctcctggggagcctgaggctcagatgaaggccagtgtttaggggcatcagatgaaggccagtgcctcaggaggccagggcaacacagcctcccggactgctctcccgggcagaccctccccagggcttctggcactgtgtcccccttgtggtggcttggggggtgcagtgagccccgctctgcccagtctcagtagagcccttcagaccccagcaccctgtcttccggtgggggtggggacaataggaacagtcccctgacctgaaggcagccaaggggccgcctgccagcctgggccctgtagggcaggccacacactcattctttcaaggccagatagtaaacctttgccagccacgtgtgctgtggtgaaggcgga

SEQ ID NO: 29501 - DNA, 552 bp, Homo sapiens
  misc_feature (1)...(552): n = A,T,C or G
aggggtgccnnagggncnnnnnncctcgaaccactattgagtgtgctgtaattctcagcctttgtgtgacccctggtctctcttgcatggtcatgggaagtgtcagagctcccgcagtcctggacttggtctggaatggtgtcaagcccactgcccacccaccactgccttcccccttgctgcctctccccgcatgttttcccaggatgccaagaccagccctttcaccatcccctggcaccactccccttcccccaccctaaaggctcagcttagattcccacgctctcctacacctgcgctgcctcaggtccctgccgtggcctcgagccaagtgcgatatccctgactgtctctttcccgatgggcgtgagccccagggggcttcctggtcaccatggtgttcccagctcccagcccaccatggatgctcggatgctgctcacatgaggtgacagctgggccccccacactctttcangacatgagtgcattggtggctgcccgcatgcggcacatccccttggccccagggtcagactggcgcgatcn

SEQ ID NO: 29502 - DNA, 478 bp, Homo sapiens
  misc_feature (1)...(478): n = A,T,C or G
cccccgccccgnnnnntttcgagatcgtagtcagtgtggaggaattcggtggcatgtgttggggtcggacgcaggggctctcagagcaagggccacaaagccgatggcacagatgtgcccctgggcctggcccgtcacccacatgtggtgccctgggccagggcgtgcgggcgccagagccttccctacacagcctaagagcaggggcaagactcggcccctcactcaccctgggaggcctgcctgggctacatggacacctgggtctctttctacccccattcaccatggaccaggggcctccatttcctgggggctcttgcggcatgtgatttgggggtccctgggacattctcccgtcagctccacctgagccaagtgtcctgttccctgcggcccttggccttccagggtcctggccaggcaggggtcaggcaccccatactcttccgtgtggcacaggtgtccacccaccccn

SEQ ID NO: 29503 - DNA, 553 bp, Homo sapiens
  misc_feature (1)...(553): n = A,T,C or G
tgtttttccnnaggggcnnnnnttttgaaaccccctcgaaccactatccgtgtggtggaattcacgagaggcccagggccgtcttccacgaggaaggagcagcggcgccccaagcaccggccgtcggaggcggacgaggaagagctggctcggcgccgagaggcccggaagcaggagcaggccaacaaccccttctacatcaagagctcgccatcgccacagaagcggtaccaggacaccccgggcgtggagcacattcccgtggtgcagattgacctctccgtccccttgaaggttccagggctgcctatgtcagatcagtatgtgaagctggaggaggagcggcggcaccggcagaagctggagaaggacaagaggaggaaaaagaggaaggagaaggagaagaagggcaagcgccgccacagctcgctgcccacggagagcgacgaggacatcgcccctgcccagcaggtggacatcgtcacagaggagatgcctgagaatgctctgcccagcgacgaggatgacaaagacccccacgacccctacgggg

SEQ ID NO: 29504 - DNA, 441 bp, Homo sapiens
  misc_feature (1)...(441): n = A,T,C or G
gggttttgagattctcganagntctgaggactgggaacaaccggnggaatacacaactgatattgtgggnggcgtacccatcatttctcccactcagaaagtttaagtaaatgagtggggtgaaagtattgacggaaataatctgaaacggtcgcaaagccatcttccttactttactcctaaaccacctcaagatagtgcggttatcaaagctggatattgcgtaaaacaaggagcagtgatgaaaaactggacgagaagatattctctattggatgaaaacacaataggctacttcaaatttgaactggaaatggaacctcttcgcgtaaataccacttaaagtgggtcataaagtccaggaatgtaagcaaagcgacataatgatgagggacaacctctttgaaattgtaacaacgtctctaacctttctatgtgcag

SEQ ID NO: 29505 - DNA, 446 bp, Homo sapiens
  misc_feature (1)...(446): n = A,T,C or G
ggggatggagtcctnngannncactgangatcatctganagncnggnggaattccttgatggaaaaaaaatattttttaaaaaaaagatatactgtggaaggggggataatcccataactaactgctgaggagggacctgctttggggagtaggggaaggcccagggagtggggcagggggctgcttattcactctggggattcgccatggacacgtctcaactgcgcaagctgctgcccatgtttccctgccccacttcacccccttgggggctgctcaagggtaggtgggcgtgggtggtaggaggtttttttttttacccagggctctggaaggacaccaaactgttctgctggttaccttccctccgtcttctcctcgcctttcacagacccctcctgcctgctcctgtccagccaggtctaccacccaccccacccttttt

SEQ ID NO: 29506 - DNA, 436 bp, Homo sapiens
  misc_feature (1)...(436): n = A,T,C or G
catcaggcctccgatgaggnctccgnannnacagactcaaaacatcaataaactggttctgtatacagacagtatgtttactttaaatggtatttctaactgggttcaaggttggaagaaaaatgggtggaagacaagtgcagggaaagaggtgatcaacaaagaggactttgtggcactggagaggcttacccaggggatggacattcagtggatgcatgttcctggtcattcgggatttataggcaatgaagaagctgacagattagccagagaaggagctaaacaatcggaagactgagccatgtgactttagtccttgggagaacttgagccagcggctgtcttgctgcctgtacttactggtgtggaaaatagcctgcaggtaggaccattgcagtgatgggcagatgcgtctttcacacggaatcaggca

SEQ ID NO: 29507 - DNA, 459 bp, Homo sapiens
  misc_feature (1)...(459): n = A,T,C or G
tagcncnnnnnnnnnnnaatcgagatcactagtccagtgttgtggaactcctcctaaaaaaataataataatagtatgatggaagacatttagatcactatgaaattctagagtaacatttatttttcgtcttactctttctcagatactactgcaaattaccccctacccacctttgctttctgggcaacaagaaaaaaactgtggaggaatattaccagatttcaaattatactacagggctttaataatctaaacagcataggtttaggttactaaacctaaatcctttatgctgttttactgttataaagacagacacataaaccaatggaacagaatacagagcccataagtgaatccatagatatacagcgagctcattttcaacagatgtgccaaaaacatacattggggaaaggactgtctattcactaaatggtgctggggaaaactgga

SEQ ID NO: 29508 - DNA, 453 bp, Homo sapiens
  misc_feature (1)...(453): n = A,T,C or G
attgatatggttgcatggccgngcgnggaanntgggnncaccgggcctgggcttgatctcttgactcttgtgatccgtccaccttggcctttcaaactgctgggattacaggcatgagccaccgtgcctggccccagataaccctttttatgtgagagtgtagagaatgttgctgcagctggtgtgggatgggggatggctgggttgagactgtgttgtcacctgcagtgtacacctgaggtgacatggttctgaacatcactttccccattgaaggcccgagtgacctatcacttgcttctcaaaattcaggaactaggtgactctaggagagtgcacaggaagctttctgcatattctttcaagagatttcgaggtcactgactcttttttcaagacttaaacacaaaatccacatccatcattcttgcgtaaagagaccattcttttttt

SEQ ID NO: 29509 - DNA, 455 bp, Homo sapiens
  misc_feature (1)...(455): n = A,T,C or G
cattgatttcatagcactngcagngacanttggggaggctgacgcagaggaatcatttgaactcgggaggcggactttgcagcgagctgagatctcgccattgcactccagcctgggcgagagggtgacactccgtctcataaaaatacaaaaaatagataagtgggagctaaatgaggagaactcatgaacacaaagaagggagcaagagacacctctacttgatggtggagggtgggaggagggagaggggcagaaaagataactattggtactgggcttaatacctgggtgatggaatcatctgtacaacaaactgcggtgacacaaattgacctacaacaaacctgcacgtgtacccccaaacctaagataaaagtttaagggaaagaatgaagcaagctaaactttagacaacaataacagcaacaagaaaaagaagtgacaggtgttat

SEQ ID NO: 29510 - DNA, 488 bp, Homo sapiens
ggcgggagcttctcgctggcaggtttttctgtacctgcgcttatcttttcacttaccttcgccagttcgcggaaacgtgactgaaagcaacgcgttatgggcaaggtggtggggacttattcgttacctcctccaggctcgctctcttccaattcattatctttagctctcgggtcctggaagcgcggagcctctctggccttgagccccgagggcatggccctgtgatgtcacaaggtggcgtgacagccgggacgaaccccgacccccagcgcggcatccttcccgcggccagcgaccaccgcctcccgggaaggtggctgaccacagccgcaagccgctgcgcgcccggcaagccgaatggaaggacggcgcgggcaaacgaacgcccagtgaggtccagagaagagagggaccttccgagggtcttctagtcgatctcggacaggcttttgagtgccttttaagcattccaaaattttcaggag

SEQ ID NO: 29511 - DNA, 551 bp, Homo sapiens
  misc_feature (1)...(551): n = A,T,C or G
tgttccncnnnaggnngcnnnnnattgannncccctcgatccactatccatgtggtggaattcgggtgtcaagaatcggcagggcctgagaggatcacagaccaggaggccagtgaaaaccatgttgctgccacagggagtcacctctgcgttctcaggagtagaaaattactgaagcaactgtcagcctggtgtgggcccagttctgaggatagtcggggaggccggcgagctcccggcagaggccagcaaggattgaccagagaggcttgcctgtccatcttgggccacttccccagggccctggtttgggtcagactgtgtctgtgctcagcaagggcagccccgagcctcacaccatgatctgtgtcccagccaaggaggacttcctccagctccatgaggactggcattactgtgggccccaggaatccaaacacagtgacccattcaggagcaagatcctgaaacagaaagagaagaagaaaagggagaagaggcagaagccaggacgtgcctcttctgatgngcccggcggggaagagcccgtg

SEQ ID NO: 29512 - DNA, 549 bp, Homo sapiens
  misc_feature (1)...(549): n = A,T,C or G
gggttcncnaagggcccnnnttttgaaacccctcgaaccactatccatgtggtgcaattcatggagaccaggacatgcatgaggttgtgcgaaagcattgcatggactatctgatgaagaatgccgactacttctccaactatgtcacagaggactttaccacctacattaacaggaagcggaaaaacaattgccatggcaaccacattgagatgcaggccatggcagagatgtacaaccgtcctgtggaggtgtaccagtacagcacagaacccatcaacacattccatgggatacatcaaaacgaggacgaacccattcgtgttagctaccatcggaatatccactataattcagtggtgaatcctaacaaggccaccattggtgtggggctgggcctgccatcattcaaaccagggtttgcagagcagtctctgatgaagaatgccataaaaacatcggaggagtcatggattgaacagcagatgctataagacaagaaacgggccacagactgggaggccacaaatgaagccatcgaggagcagg

SEQ ID NO: 29513 - DNA, 577 bp, Homo sapiens
  misc_feature (1)...(577): n = A,T,C or G
agacgacgaacctcggatcacagtccagngnggnggaattctcggatggcgcatagcattcagctctgggcatccaaccagcttgatgcctcccagcactgggacaggtccgctcatagcccagcttggccagggccctagacacaagctcctacttggctggcccgggggtccttgctgccagccactatactggctccttaaagctgctggtaccgcgcctccgccagccgctcattgccccacactgcgcagagcgcctttgtctccgctggagtccacgacatgctccggcgggcggcagccccaccactgctgccaccacgggagaaggagacagttttgtctggttaaattttatataaatttaatgctggtctcataaaaacagttgagtgggggcctctactttntttttttcttctcttaaaatgtacatgtattcttgcggttactttttttccatgtgtgaaaaaatcacttggaattaggatttacattttctaagatttttggagatgcactggaaatcggcttatgttngtttgctttggattcgnctttatgcagctatcgc

SEQ ID NO: 29514 - DNA, 450 bp, Homo sapiens
  misc_feature (1)...(450): n = A,T,C or G
nagcggcccccnnnacaccgggacttgngcancgtacagncnggnggaattntttttaaggattccagctttccctcctggccagaaatgttcagcctggactcattcagaaaagcatccctggatgtgaatgaggaccctccttaaacaggaatggagaggttgagctggtcatttccaaccttagcttcaaggcagaactggaattagtttcaaaataaaccttgatcctaggcatttagttctagaagatcctacaagcacgtctgctgtaactctatgtatgttttctgtaaaatcacatacctataaaataaaaagaaaaaaatcacacatctataatattataagagagcttatgggaaaaatagaattgggccaatgcaactgcaactttttgaccaaaatatgacaaaaaacaattattggtgcttgggaagatgcttcgga

SEQ ID NO: 29515 - DNA, 451 bp, Homo sapiens
  misc_feature (1)...(451): n = A,T,C or G
gggcggcnnnnnnaactagtcggccgtcancgncngnncnnnnnnannanncaaaccgcaggccctgctctggcaggcaggcaaagctaggcagaataggatttccaggatcctgggtctgttccctgcggcagggctgcagaacggacttgggagccctcctttgcctgctcccgcgggtcacccagcgagtgctgagaccccattttctgtcgaggcgggccgagtcttcccttatccccagacgcctatcgggcagggttgggctgaatcaaatgggagccctccagacataaggaggccagaggctgcaaggagcggggtcgtgaccgcttacaccccttctccacagcccggcccgacctggagggcccccggggcactgggcggtgagccacctcctggcaactctcggtgccgtcccctgccctcgctcgaggcctcttctccn

SEQ ID NO: 29516 - DNA, 462 bp, Homo sapiens
  misc_feature (1)...(462): n = A,T,C or G
gcgctgcnnnttaagagtactagagcntgngcggnggcattccttgttactgttttcattttccctttcaatgaaatggtgtgaagatgggaggctcaagatagggatcctgttttttctgcgggacacgtcttaatcccatcatgcgtgtttcttcagctatgtattctaataatctgctaaagtagaaagtaaaagacctgctattttatctcattgggaccgtacgttttagagatcgggaagtaaacagtccactaaccctgccgataactatcatctggcccggaggagaaccctgcaggtggttgtgagctccttgctgacagaggcagggtttgagagtgccgagaaagcatccgtggaaacgctgacagagatgctgcagagctacatttcagaaattgggagaagtgccaagtcttactgtgagcacacagccaggacccaacccacactggn

SEQ ID NO: 29517 - DNA, 466 bp, Homo sapiens
aggggaaaaatttgagacattagactcgtagacattagacagtgcggtggaattctaagtattagcagcacgcaatagagatactagatttggaccatgaaacagaacccttagtcccctacttaaaataatgataattcaactctcttcctggataaatgctttcatatcaccttgacttacgttgaacaaaactaaaattaccttttgcagaccaactttgatacccttgaagatgttaagttttttttactttttattgccagttaacatagggaccagatagtgaaaaatagctgaagtgtttttccagagaaattggagatcaagacaagatagaaaattacaggggaattgctgatctgtatacccaaaaccctaaattcctgcctcttcagtgttaagaataagacataagctttgtatacaagtttaaaaccatatgacttccagtttcttacaaatg

SEQ ID NO: 29518 - DNA, 446 bp, Homo sapiens
  misc_feature (1)...(446): n = A,T,C or G
agcgcgcnnnnnnnaacgggacttgngcangtcnagcggnggaatnnaanacacccacctttattcctcgaggcaaaaagacctggagaatctgaaagccgaggtggcgcggcggcaccagctgcaggaggccagcagaaacagggatagagccgaggagcccatggctaccgagcccgcgccagcgggggccccaagagacctgggctcccagcccccggctgccaaggacccttctccgagcgtgcagggatagagagggagccagacggacagccagccagcggccccgtcaccagggagcccgactgcgggagaagggggcgagcctgcgggcggaagaggaagcaaggccctcttccttcacgtctcaccccaccccacccccgtgtcctcctgggagcctggcctgcctgccccgcagaaggtgtttttgcgctggttcn

SEQ ID NO: 29519 - DNA, 446 bp, Homo sapiens
  misc_feature (1)...(446): n = A,T,C or G
nattgatgactattagactttgatggcgtattcctctatccacagtcccttctctcctggtctggtgtatgcaaattgtatggaaaaagggctgtgtttatattcataagaatacaagaacttatgaagagtgaggttggtgtgtcactggtcaacctttgtgctcccagatcccatcacagtttggcgattgtggagggcctcctgaaggaggagatgagtaaatatatttttttggagacagggtctcgctgtgttgcccaggctggagtgcagtagtgcagtcgtggctcactgcagcctccacctcctgggctctccagcgatcttcccacatcagcctcccgagtagctgggaccacaaatgtgagccaccatgcctggctaatttttgtactttttgtagaaatggagtctcactatgtttcccaggctgatcttgaact

SEQ ID NO: 29520 - DNA, 453 bp, Homo sapiens
  misc_feature (1)...(453): n = A,T,C or G
gggcngcnnnnnnnncccggatagcagncnatcgtctggncgaattcacctttagaagctctacattcttggtggagaggttgcggagtctgcacagaagtgcacacacctcattgccagcaaagtgactcgcaccgtgaagttcctgacggcgatttctgtcgtgaagcacatagtgacgccagagtggctggaagaatgcttcaggtgtcagaagttcattgatgagcagaactacattctccgagatgctgaggcagaagtacttttctctttcagcttggaagaatccttaaaacgggcacacgtttctccactctttaaggcaaaatatttttacatcacacctggaatctgcccaagtctttccactatgaaggcaatcgtagagtgtgcaggaggaaaggtgttatccaagcagccatctttccggaagctcatggagcacaagca

SEQ ID NO: 29521 - DNA, 475 bp, Homo sapiens
  misc_feature (1)...(475): n = A,T,C or G
ccccgccccccnnnnttcgagttcgtagtcagtgtggaggaattcgcttctgcctgtcatctaccaccccacctggtacccagccggagtgtgtggccgccttgctccgggcctgcagttcaggccgaccagaagggagagaggccaaagggagcgtgtcactcagccttgtctcctaagtgccgggtgtgggtgccgggtgtgagcgccgggtgtgggtgccaggtgtgagcgccgggtgtgggtgcctcctgggtgcggtgagggatgaacagttgatgcttacctgccttttaactcttctgcccaccatagggcgatgccagtccctccactccagaggagaacgaaaccacgacaaccagcgccttcaccatccaggagtactttgccaagcggatggcagcactgaagaacaagccccaggttccagttccagggtctgacatttctgagacgcaggtggaacgtaaan

SEQ ID NO: 29522 - DNA, 556 bp, Homo sapiens
  misc_feature (1)...(556): n = A,T,C or G
agacctgataccntnaaannnctttgatcacatgcaggggtgaattacacccaactcgagccccccggcggccgctttgaggagggaggtcagggcgagttcacattatttcttttccatcggaagtggcgctcgtgcattcaactcgttcccgctcatggaacccctctttaaaaagacgcagggcacctgtgagcgcaggagcgagcctaaggccacccagcggcagcgcccgtgtcctgggcactcagcgtgctgggcagagcaggtgcgatggccccagtcctagcagccctcgcccatgtcctgtgcccttacatggctcccggactgtgcagggagccgatacgtttgctgatagcaatactggaaccaccgggtgcgatggcagtgaggagactgcccagtgtccttggggctgtgcttgcaataaagaaagaaatttcctggaaggcagtctgcaaaagagggaaccggtgactcaaaaagacagatgtgttgtaatttaccccaaatgtgcatccacatagtgctttttctcttgcccttcggctgg

SEQ ID NO: 29523 - DNA, 557 bp, Homo sapiens
  misc_feature (1)...(557): n = A,T,C or G
ntttcggaacnatacgtacnacctagtccgagtggtggaattccaaagattnttaagaaagcagcccagtgcagtggctcatgcctataatcccagctctttgggaggctgaggtgggtggatcacctgaggtcaggagttcgagaccagcctggccaacatggcgaaaccttgtctttactaaaaatagaaaaattagctgcgtgtggtggccatgcttgtaatcccaaatactcgggaggctgaggcagaagaatcacttgaacccgggaggcggaggttgcagtgagccgaggttgcgccactgccctccagcctgggcaacaaagcgagactccgtctcaaagccagaaaaaaagatttttaggaaaggaatgaaatactctgacttatattttagaaggatcactctggttgctatgttgcattatagactctaagggtagaaccagggagagcaataggacactgggtacagtatctangagaaaagtgatagaggcttgcaccanggtagtatcangagaaatgggtacaagttgggtggattatgatan

SEQ ID NO: 29524 - DNA, 576 bp, Homo sapiens
  misc_feature (1)...(576): n = A,T,C or G
gacgaggttgataccctnnnnnnnnnnttcgaaccacagtccgtgtggtggaattccagggaattcacacccctccccttctcccacagccaaggacagacaggctgcctggacctgagcccaacagccttcagcctcagaaacgcatggggggccacacactccttatatcctcccacactaaggttcccctggccccacgggagcttcaggaaagccccccaagttagccactgctctaggacgagctctgtgtcccccacaccacaggcctcgaagcagggtgctggtgggtgccctgcaccccaatcccaggtccccttggccccctatttttctcgggcccattggggcctgtttctcacctgctggctggaccccctgaagggccgttcccagaggctccccaggaggctcaaggctgggggcttatgttgtggtcggnggtccccgccttcagccccccgctcccacccccgagcctaccctttgtctcgcatgagtgcaatatttcattcccggtggttgtctggngaggtggttggacgaagtcctgcttgaggctcggngatcaan

SEQ ID NO: 29525 - DNA, 568 bp, Homo sapiens
  misc_feature (1)...(568): n = A,T,C or G
agcgacgttganacantanaannnncttcgatcactatccgtgggtgaattcgcttttctctgctctcctgaaccttaggcttgtctcggcccatttgaagaccaggaagttgatcaattctgaggctgctgagagacggtggcgcgattgggacagtcgccagggatggctgagcgtgaagatgcagcgggtgtccgggctgctctcctggacgctgagcagagtcctgtggctctccggcctctctgagccgggagctgcccggcagccccggatcatggaagagaaagcgctagaggtttatgatttgattagaactatccgggacccagaaaagcccaatactttagaagaactggaagtggtctcggaaagttgtgtggaagttcaggagataaatgaagaagaatatctggttattatcaggttcacgccaacagtacctcattgctctntggcgactcttattggttggaatctacatttctgaaggaacccactcaacagaagaagacatcaataagcagattaatgacaaagagcgagtggcagcttgcatggaacacn

SEQ ID NO: 29526 - DNA, 513 bp, Homo sapiens
  misc_feature (1)...(513): n = A,T,C or G
gttgtctgtgcttccttggttcatgcttctactgtgacacttatctcactgttttataattagtcgggcatgagtctgtttcccaagctagactgtgtctgaatcatgtgtgtatccccagtgcccggtgcagggcctggcatagagtangtactccataaaaggtgtgttgaattgaactgcgtctgcctcctcccccgggtcaggcgagagcctgacctacctgcagagacaagcaccaccgcggtgaagaggcccagctcctcctcggtaagcgccagggagttgagcttctcgctgaagtcgaacatggcactgagcaggtctcccatgcccatggcaccaagctcctgcaggctgtangtggtgcggcttaagaacatcactgtctggtccttcacgttgaacaacgaagcanagcgcaccatcagcacctaggagggaangggaacagtcatnctgggtgtgggtggaggagcactgaccanatcgccccttgagtttgcagaggtg

SEQ ID NO: 29527 - DNA, 452 bp, Homo sapiens
  misc_feature (1)...(452): n = A,T,C or G
gggccgcnnnnnnnaaacggatagcaancntccgncnggncgaattctggaaaaccagagccagcttccgttcctcagcctttcttctctaaacaccaagttccaccattgacagaacactgagtcctgcacagtcacatggacacgagtaaggagagttcagaggctgcagtggagttccacacgaagcacaggaggtgaaacccctttttcctggctcctcaggagacatgtgaagacaacgcgattagaggtccttcaggcacggatagggtttgtatctgctgaatcccaatccatctcacatctccatctctaaatgcgcactttcggatatctgtgaataccccctgtgaagttcctggttggcagcgggcggggtgtgcagctctgtgtccaagtatgaaatgccccaatgccagttgcaattgttttgattttggtgttagagt

SEQ ID NO: 29528 - DNA, 568 bp, Homo sapiens
  misc_feature (1)...(568): n = A,T,C or G
agagaagttgatcccctnnnaannncnctggaacactatccagaggggcaattcgggggcagtggnggtggggctgggacgctgtttgtgctcagcggngacagccagggttgatctggcccttagggttttggatgtttttaggatgacataaaaagcaagtgttttccccatttcctcttatgaaacaccgtctgagcccaaggtacacattgggcggcctgcaggaacctgctccaggtggacacacgggccagcagccgcgaaccttgaagctggggtgaccgcaggagaccctgtaaggcctgtgagcggagccctcgaccccgtgacaccctggccagacaccctgcttggactggggtggcctctgctacccaggggtctggcacgggggagggctggggctttctctgcctggtacacacggaaaggcggctgtgcggacgcagggtcaccgtgctccggggtttctgacagtcgngtgttcctgggcctttggagtggctgcgaggcctgaacgccttgtggatccgctgtgtccagccccgctgagcttcgccagggt

SEQ ID NO: 29529 - DNA, 553 bp, Homo sapiens
  misc_feature (1)...(553): n = A,T,C or G
nnttacaancatcagtccagcgaggtgcaattcgtgattcctgccagatgttcttagcatgcttggctctcccacaaagtcttctataaatcagaagacaatatgaaaattcattctccttcccctcataaacaagttccatcgaagtgtaatgactacttttttaactacttcactcttggagtggacatcctctttgatgcgaatacacacaaagtgaagaagtttgttctacacaccaattaccctgggcattataatttcaacatttatcatcgctgtgagttcaagatcccactagccataaagaaagaaaacgcagatggtcagacagaaacatgcacgacctacagcaagtgggacaacatccaggagctcctgggccaccctgtggagaagcctgttgtcctgcacaggtcttcctccccaaacaacaccaacccatttggttccacattctgctttggtcttcagcgaatgatctttgaggtcatgcagaacaaccacattgccctcgtgaccctggatgggccccccaggccctgtagccacn

SEQ ID NO: 29530 - DNA, 548 bp, Homo sapiens
  misc_feature (1)...(548): n = A,T,C or G
nttcgaaacatccggtcnactagtccagagtggtggaattcgcgccgagcggtggcgtcgttgtcgccccctcctcgtcgggaagaatcgtttggtctcctgccgtgcccggccggtgctgctgtcgctgctgctgcccgcgcgggttgtggatgttgtcggctccgtgttgtgatgacaggagaatgtgtgtgtgtcccgggcccagacgaattggtcaaatctttccttattgaagattcacccaagagacatcaagatgacctctggccagagactgagtcatctttgcatgacatcaacacgacctgcttctgcaggcccttggggaacagagcacaagctctattccagatctaagatggcagcctgggaaccctttccaaccatgtgcatataaggatcttgacacggaaagagatggnacagctttcctcctttgatcattcattctggctatccacacacctagaaccgngaagttatagtctgctgcttactactgctgctgatagaatatatttgcggagtcatgagagcatcngcat

SEQ ID NO: 29531 - DNA, 464 bp, Homo sapiens
  misc_feature (1)...(464): n = A,T,C or G
aggcgctnccccccctgaganccctgnnangcangtacangcggnggaantcccccgggctctccaaggagagagtgagagcttcactgtctgacttgtcaagccttgatgatgtggaaggaatgagcgtgcgccagctgaaggaaattctggctcggaattttgtcaactattctggctgttgtgaaaaatgggaactggtagagaaagtaaaccggttatacaaagagaatgaagaaaaccaaaagtcctatggcgagcggctgcagctgcaggatgaggaagacgacagcctgtgtcgcatctgcatggatgccgtcatcgactgtgtcctactgcagtgcgggcacatggttacctgcaccaagtgcggcaagcgcatgagtgagtgtcccatctgccggcagtatgtggtgcgagccgtgcacagtgtcaagtcctgaaacaggctcccctcaccagga

SEQ ID NO: 29532 - DNA, 452 bp, Homo sapiens
  misc_feature (1)...(452): n = A,T,C or G
tgtagcnanaggagnnnntttgaaaccctnattgatgacccttataccatgtggtggaattcctccatgccacgctgggtcccatatacaggacgggatggatctccccttccccccttcccagtcacgtgagttggacaagcatcaggtgtttgcttttaaagcacagcctctttgggaaagcaacacattatcgagacttgctgtgatctccccgggagatcggactggctttgacctcttcctctctggagggccatgtgccatcagcaggagctccacatcgagccccaggccagaaccccctccctttcacagagagggaactttattgcacaattgggtgccttttaacttttgtgtgttgaaatgggcgttttggaagcaagggtcaggggacagcttctaaaggtgtgagtctctgacctgagcatctgggcctcgcctcggcc

SEQ ID NO: 29533 - DNA, 573 bp, Homo sapiens
  misc_feature (1)...(573): n = A,T,C or G
ggaggcgtcgatcaccctnnnnnnnnntttcgatccactctccatgtggtgcaattcctgagagtgccaaatacaaagggctgtgactcccctgataggaggttgcctcaatatccttgtccctctccctgtcatcatctgagcctcagagatatccctcctccagggcataatttacagcttatagccactggccctgtttttctctcaatgtcctacctcttagtttgtacgactcagaagatctgggctctgaatttggatctatccttgcatgctgtaactttaagcaagtctcttgaatactttgagcttcattttcctttacaaaatgctgaaactgtcagctgggtgcggtggctcacgcctgtaatcccagcactttgggaggctgaggcggngggatcacaaggtcaagagattgagatcatcctggccaacatggtgaaaccccatctttactaaaaatacaaaaactagctgggcgtggtggcgcccacctgtagtcccagctgcttaggagactgagaaaggagaatcgctcgaacccgtgaggcggaggttgcagtgagc

SEQ ID NO: 29534 - DNA, 550 bp, Homo sapiens
  misc_feature (1)...(550): n = A,T,C or G
nttgaaaactgatcactatcccgagnggngcaattcttntaaacctgagctttaagactcccactagcttcgtgtcctttggcatgttaacgtgcctcagtttcctcatctgtataatggggatatatgaaaggcaccagtcctaaggtgaacattaagtgagatgattctagttacagacttagaacaatttccagcacatagttaaatatccaggaaattctggtactgttatgtgtgggtgagctgacctggatgtagatgttttcctctctcttgctgacccctccgccagttttgtcttgtgatgccattaacacatctctccctttctgacctggctcctgcccattggtgtcccaagaaatcgtgagaatagttagccccccgtctccccagcctgttgctttctcgtgtagttgttcacagtagttgagaagttgaagagcttttgcctattgaaggtgcactgagaataaactctttcctgccaccagaanttgcagtggttcacgggctgcactcatttccattgatgcanngtatagcn

SEQ ID NO: 29535 - DNA, 540 bp, Homo sapiens
  misc_feature (1)...(540): n = A,T,C or G
nttcgaacattagtccagcgaggtgcaattctgaagtggaccaattgatccagaattctcctgagtgttatcagttgttgcatgaagcaagacggtaccacatacttgggaatgaaatgatgtccccaaggactaggccacgcaggtccactggctattctgaggtgatagttgtcgttggaggatgtgagcgagttggaggatttaatcttccatacactgagtgctacgatcctgtaacaggagaatggaagtctttggctaagcttccagaatttaccaaatcagagtatgcagtctgtgctctaaggaatgacattcttgtttcaggtggaagaatcaacagccgtgatgtctggatttataactcacagttaaatatttggatcagagttgcctctctcaataaaggcagatggcgtcacaaaatggctgtcctccttggtaaagtatatgttgtcggtggctatgatgggcnaacagactagcagcgtaaatgtatgattcttttcaatcgatgactgagttgctccttaggaa

SEQ ID NO: 29536 - DNA, 449 bp, Homo sapiens
  misc_feature (1)...(449): n = A,T,C or G
agagggccaggggtcctcccaactgagaccatgannaacgtggagaaantcgagccacccagacaagcgagaatttgttcagaacactggcatcccctgaactcttctaatcctttgagcagtaacaggacctgccattgtggccactgagcggctctggagtacctgcctgcacatccggctgcccggtgcgagctgctactgctgttgtgctggccaggccagggtggggaatggtcggtgcccttcctggcgctcagctagggaagctggaagactgcagggtggagggctgggatgctctcggagccgcatccacacccccaaggatcccttttgtctgggcccgtacgctcacccgaagcctgcagctgccacgtctgaggacctgctgaccagcctgcgggccataccccagtgtttctgatacccaagcccgaggctggggn

SEQ ID NO: 29537 - DNA, 458 bp, Homo sapiens
  misc_feature (1)...(458): n = A,T,C or G
aggtcaggaggccccccctgatnnntccatttgancttagcanagncnggnnggaattaaggagcttcacgtacgtgggggcgctcaagacccacattgcagtgcatgccaaagagaagccctccagcctctaagtcaggccatgcagcagtcacgcagtcggctttcaggaggtgccagcagctctgttggctcaagttgaggcaggttgaaggattcacagggtaagatcgggcacagtggctcccgcctgtaatcccattactttgggaggcccaggtgggaggatcgcttgagcccacaagtttgagaccagcctacgcaacattgcaagactccatctctacaaaaaatataaaagtcagccaggcgttgtggtgcatgcttgtggtcccagctactttgggaggttgaggcaggaggatcgcttgagcccaggaggcataggctgcagtgag

SEQ ID NO: 29538 - DNA, 456 bp, Homo sapiens
  misc_feature (1)...(456): n = A,T,C or G
aggaccagggnnncccccccaaatanccatgangaccctgcgcaannccccnngngactcactcgacccatccatgtggacagaaaccagcatcatctgttccactgcaggggtggggatcccagcttgggaagggttggggaagcgtccacaccctctccaccacaagctcccccaacaagaacctgtcttcagctcctccagccagggacccaggtgttggtcaaagacccgcagctccccgagccggggctcccgctgcagcagcattcgcaccacgtgctctcccaggaagccacagccccctgtgaccaggtacaccagcttctgggcctgtgcagagtcggccatgcctggctggggaagagaccttggctcatccaggggctggctgccacctgctgcaaccacctgttactgctggaggtgccctggagcggagacgaggctggcgtt

SEQ ID NO: 29539 - DNA, 453 bp, Homo sapiens
  misc_feature (1)...(453): n = A,T,C or G
ggtcagggggcccgcctgatncccactangatgtccgcacgngcgnggaattccggtcacgtcggccgggcatggctgcatggagcccggccgcggcagcgcctctcctccgcgggatccgcgggcttccacttcaccatcggatgtttgccactcagactgagggggagctcagagtgacccaaattctcaaagaaaagtttccacgagctacagctataaaagtcactgacatttcaggaggttgtggggcgatgtatgaaattaaaattgaatcagaagaatttaaggagaagagaactgtccagcagcaccagatggttaatcaggcactaaaagaagaaatcaaagagatgcatggattgcggatatttacctctgtccccaaacgctgaccacgccctggctgcatagatgctgctgcttaagaccttggatgaacttcactgacan

SEQ ID NO: 29540 - DNA, 450 bp, Homo sapiens
  misc_feature (1)...(450): n = A,T,C or G
nattgattgacgtagattagaccangcggtggaattcttgagagagaacgacagactggagttccatagactttctgaagaaaacactttgttgaaaaacgatctgggaagggttcggcaagagcttgaagctgcagaaagtactcacgatgcacagaggaaggaaattgaggttttaaagaaagacaaggaaaaggcctgctctgagatggaggtgctcaacagacagaatcagaactacaaggatcaattatcccagctcaatgtcagggttcttcaactgggacaggaggcttctacccaccaggcccaaaacgaggagcatcgtgtgaccattcagatgttaacacagagcctggaggaggtggttcgcagtgggcagcagcagagtgaccaaatccaaaaacttagagttgaacttgaatgcctgaatcaggaacatcagagcct

SEQ ID NO: 29541 - DNA, 458 bp, Homo sapiens
  misc_feature (1)...(458): n = A,T,C or G
aatgccggngnnncccccctgatgntcattgagncccctcgccncnncnggnggaattcggatgaaggaggtgcggatgacaccgctacgcgccctggacgactttgttctggggtcggcgcgtctggcggctccggatccatgcgacccgcaacgatggtgccaccgagtcatcaacaacctcctatactaccaaaccaactaccttctctgcttcggaatcggcctcgctctcgccgggtacgtgcggtcacttcatacgctcctgagcgcgctggtagtggcggtggccctctgcgtgctggcgtgggcagctgagacccgcgcagctgagcgccgctgccgccgcagccaccctgcagcctgcctggccgcagtgcttgccgtcggcctcctggtgctctgggtcgcgggcggagcttgcaccttcctgttcagcatcgccgggccggtgcttc

SEQ ID NO: 29542 - DNA, 450 bp, Homo sapiens
  misc_feature (1)...(450): n = A,T,C or G
aggccgggcnccccaatgatgaccatgataccctgcggaancgaaggncatcgcaacgaaggttttgggaacagtaaaatggttcaatgtaaggaacggatatggtttcatcaacaggaatgacaccaaggaagatgtatttgtacaccagactgccataaagaagaataaccccaggaagtaccttcgcagtgtaggagatggagagactgtggagtttgatgttgttgaaggagaaaagggtgcggaggcagcaaatgttacaggtcctggtggtgttccagttcaaggcagtaaatatgcagcagaccgtaaccattatagacgctatccacgtcgtaggggtcctccacgcaattaccagcaaaattaccagaatagtgagagtggggaaaagaacgagggatcggagagtgctcccgaaggccaggcccaacaacgccggcccta

SEQ ID NO: 29543 - DNA, 459 bp, Homo sapiens
  misc_feature (1)...(459): n = A,T,C or G
agggccaggagggcccggcctgatnntccccagttangcnagtacgngcggnggaattncgagggtgtaaagcaggccctctggctcaccaagaccaagttaatagaatgccttcccgagaaagtgcttatccttgtggatgatccaaggaaccacatagagaaccaagacgagtgcgttctgaatgtgatctctcacgcccgtctctggcagaccactgaggaaatccccaagagagagacctactgcccggtcatcgtggacaacctaatacagctgtgtaaatctcagattctcaagcatccttctctggccaggaggatctgtgtccaaaactccacgttttctgctacctggaaccgagagtctcttctccttcaagtccgtgggtctggtggagcccgactgagcactaaggatcctctgcccaccatcgccttcagagaggagattgaagct

SEQ ID NO: 29544 - DNA, 416 bp, Homo sapiens
  misc_feature (1)...(416): n = A,T,C or G
naataagatgacatcgacagncgttggtgatctccgtctcgagcggcctgtgctagggccctgggcttggggagggaggttcacctgaggaggactgtggccctcacacctctagggtacacagggagaggaggcccggagcaccctggagggcagagacaagcgggagtgatgtggaggtcgccctgggagcctctggaaggccttgctagtgctccagctgcatggaagagagcggctagcaactgttccctggttgggccctcagtggatgctggccaggccctactcttagccccttcatcatgtcatctcccttatgctggagctgccccgatgtggagtgggcaggaaggggcctggaaaaaataaaggatcttggcagttgataaaacgtaaaaaaaaaaaaaaaaaaa

SEQ ID NO: 29545 - DNA, 472 bp, Homo sapiens
  misc_feature (1)...(472): n = A,T,C or G
ccccccccactgagnccnntngaattgacgaccattagaaagngcggnggaattcgcagatccagcaggagctggagcagtgtgacgtccccgaggacgtgcgggttggctgcctgaccacagacttcgccatgcagaatgttctgctgcagatggggctgcacgtgctggcggtgaacggcatgctgattcgtgaggcccggagctacatcttgcgctgccatggctgtttcaagacaacgtctgacatgagccgagtgttctgctcacactgtgggaacaagaccctgaagaaagtgtccgtgaccgtcagcgacgacggcaccctgcacatgcacttctcccgcaaccccaaggtgctgaacccccgcggcctccggtactcgcttcccactcccaaagggggcaaatacgccatcaacccccatctcaccgaggatcagcgcttccctcagctgcgactctcccaaan

SEQ ID NO: 29546 - DNA, 464 bp, Homo sapiens
  misc_feature (1)...(464): n = A,T,C or G
ggntgtttataatccctatagntaagacgncatangaacagccnccacnggatgtataacgcgacctcctaccaccacagttacgaagacactggcctcctttgcttccatgccagcgccgacccaagacaggttcgagaaatggtagaaatcatcacaaaggagtttattttaatgggcggaaccgtggacacggtggagctggaacgagccaagacgcagctgacatcaatgctcatgatgaacctggaatccaggcctgtgatcttcgaggatgtggggaggcaggtgctggccactcgctccagaaagctgccgcacgagctgtgcacgctcatccgcaacgtgaagccggaagatgtgaagagagtcgcttctaagatgctccgagggaagccggcagtggccgccctgggtgacctgactgacctgcccacgtatgagcacatccagaccgtcctgtn

SEQ ID NO: 29547 - DNA, 467 bp, Homo sapiens
  misc_feature (1)...(467): n = A,T,C or G
cccccccatgacnccntngnnatgacgaccattagacagngcggtggaattctgcagacccgccctgggcatgctggcctgtgacggagcctgaggtcacagccccctgactagcctgagaccttcctaggggctgtggctgtttccggggaggccgggaggggcagctgtgagccctgtggaggacgttgggagtaacgctgctttgctttggcaggttgaaggggcccggccaggactcggggaagggtggcctgagagcagcgatgacctctggggtcactgtcccaggagggacttcacctggaacaagagctggaggcagccgcttgcccaggaggcttgtcccctgaggcgcttcgccagtgaggtgcgggctcagggcctcgagtctctcctggagcacgggctgcggtgcgccggcagcttacggggcggccagtccttgcccacaacgatgtggagcn

SEQ ID NO: 29548 - DNA, 454 bp, Homo sapiens
  misc_feature (1)...(454): n = A,T,C or G
gtgcgcggcnncccccctaaatgatcatagaccagctggcggaanncgaacatgtttgtccattaacaaacttataatagctgaaaaacagggttgtgagaacagcttcagttaaaattgtcctgtctagtttgaatatttcaagaacagaaagccttttttttttttttttttttttggaaagggggtctctttttgtgccccggggggaaaggcgggggacccttttaagttaagggaaccccccccccccagggtaaaggggttttttggccccccccccccaagtggggggaataacgggccccccccccccccccgggtttttttttggttttttaagaaaagggggggttcccccttttggccggggggggttttaaccccgggggggggacccccccccccggccccccaaaggggggggattaacgggctggaccccccggcccgg

SEQ ID NO: 29549 - DNA, 457 bp, Homo sapiens
  misc_feature (1)...(457): n = A,T,C or G
nggccgggcnnccccaactaagatcattgangatcctcgcccnngcgnnggaattngccatattctgaggtatgtcagcacaaaaacaaaggtgtgactttccctagtctgtaattacttatgtgctgaacacggaggtctgctaaatcagaatctccaggttttagcagaaaagctcctaagataattctgctgggcagttagaaaaaaaagaaggaaatgaaaaaggaaaagtgagaagacaaggaaagttaaccctgcattgtcttctgtggctagatggtcagcaagacagatggcctccagaatgagcaatgggccatcagcagacctgccggaagtagggttcagccacatgccatttatggcatggctgccctggtgttggtcacgggcttgattctttctgccagacaacaaaccagcccgtccactggctaacttagtgagaaggagc

SEQ ID NO: 29550 - DNA, 468 bp, Homo sapiens
  misc_feature (1)...(468): n = A,T,C or G
agcgaaaaannnttcgatgtcattagtcatgtgcggcggaattctgggattacaggcgtgagccatcgcgcccgaccagaagcattttcttttcaaagtgtgtgcacagagtgaggaggccagcctgggcaacatagtgagttgagacctgtctctacaaaaaaataattacgaaaattagccaggtgtgctggtgtgcacctgtagacgcagctacagactgaggcgggaggatcacttgagtccgggaagttgaggctgcagtgagctacaatggtgccactgcactccagtctgggtaacaagaccctgtctcaacaacaacgaaaagttgggagggaaagggagtagctccatgaactgacgctggacattcaggcatatccacatgagactcactgtgcacttgctcagtagctaagatgtctgccccacaaaatagaacccttcagttgctgctgctcaaag

SEQ ID NO: 29551 - DNA, 484 bp, Homo sapiens
  misc_feature (1)...(484): n = A,T,C or G
catcgaatagcgtacactaggccangnggnggaattctcctgcagaataaagaatccctgacggataaagtcatcctggacgtgggctgtgggactgggatcatcagtctcttctgtgcacactatgcgcggcctagagcggtgtacgcggtggaggccagtgagatggcacagcacacggggcagctggtcctgcagaacggctttgctgacatcatcaccgtgtaccagcagaaggtggaggatgtggtgctgcccgagaaggtggacgtgctggtgtctgagtggatggggacctgcctgctgtttgagttcatgatcgagtccatcctgtatgcccgggatgcctggctgaaggaggacggngtcatttggcccaccatggctgcgatgcaccttgtgccctgcagtgctgataatgattatcgtagcaaggtgctcttctgggacaacgcgtacgagttcaacctcagcgctctgaaat

SEQ ID NO: 29552 - DNA, 460 bp, Homo sapiens
  misc_feature (1)...(460): n = A,T,C or G
tatggaagacctcgnaanncncatcggaagctctcgnacagncnggnggaatntcggatggcccacgtggtgcttcaggtagatttgtgcttcaccctcctggagggtggcgaggacacagcccactgcatgcagcatgggagagagctggggcgaatatctccatgtctttggaggatgtcagctggccgctttcagggcagagtcgggtgggcgttggtgccaccttaagaaggagagcgatgcgtgggtctggccagagctctggagccaatgccgggctgcctgagagcagaggaaatgcatggcccatgtgcatttctgagtattttaaactcgttcaggccctgcagccttcatgatgatgtagctcgcagagaagagcaggagcagaattagccctttcttcaggccatcttgcctcaaagggtacacatgtttggcggataagatgaaactt

SEQ ID NO: 29553 - DNA, 474 bp, Homo sapiens
  misc_feature (1)...(474): n = A,T,C or G
agcggttannnnnnctcgatggcactacttagtngcgtggaattccccctagagctcccatcctagcccctgaggcaggttcctattggtgtttggatgctgtttgtgttttccctcttggcttaatcagccctgattttcttcattttagggcaggatgctgaacgggctacattaaaaaacaaacctctctctatatatatttataaatgagaactgttggatgacacctttgacatatcagccaatatcaatcaagctgaagactccagacactgtctgtgtgactgtaacatttcttcaaggaaagtatagcgtctatggagttcagagggcacgtgtttgggggaaaatatatatgacatgaagaagaagatgaagaaaaatgagaaaaaaacacacaaaaggcaactttaaaacaaaatatcacgagcagacggggaggctgaagggctgggagctgggaggagacgc

SEQ ID NO: 29554 - DNA, 478 bp, Homo sapiens
  misc_feature (1)...(478): n = A,T,C or G
cgcgcanannnnnnnttttngtgcgacgatcatagtccgngtggtggaattcctcccgcctctgcctggactacgagacggccaccatctcctacatcctcactctcactgatgaacagtttctggtgcaggatcagttcccagtgacgcccgtgagcacgctgtgtgcagaggccagggaaacggcgcggcggctgctgacccactacgtgaaggtgcagggcctggtcatatcacagatgctgcgcaagagcgtggagactcgcgactggctcagcactctggagccccggaatgtgcgggccgtcatgaagcgggtggtggaggataccaccgccatcgacgtgcaggtggggctcctgtacgaagagggtgttcgcaaggcccagagcagcgactccagcaagaggactttctccgtgtacagcagctctcggcagcagggccgctacgcccccagctatacccccagtgcccc

SEQ ID NO: 29555 - DNA, 447 bp, Homo sapiens
  misc_feature (1)...(447): n = A,T,C or G
ntttgagacctccgaaggcggngtgatatcgtcgcaactccgancnaagtgatccacccacctcggcctcccaaagttttgagattacaggcaggagccaccatgcccggccgtcagcgctatatgttttaaatagctgattcttcactcactttgtatgtctgtgagtgcgtgtgtgagtgtgtgtgagtgcgtgtgtgagtgtgtgtgtgagtgcgtgtgtgagtgcgtgcgtgagtgtgtgtgtgtgttcctgtcctgccagggccctgaaggcatgcttggtttgtctttggggtgaaccagtgtggataacacagcgggttcctctgtgccgccaggcctttgcaggttccgttccctcaccccgatgcctcccacaccttccctgcctgactccaagccaggttggcgcttcctctgggcctcaacatagcacaggtgact

SEQ ID NO: 29556 - DNA, 465 bp, Homo sapiens
  misc_feature (1)...(465): n = A,T,C or G
aggtnnctttgatgacgtcactagtcagtgtggtggaattccagatgtccgagcgcagcatcctcagccggctggccagcaagggcacggagcctcactccacaccggcctacccgccgggtccctacgctacacctccggggtacggggcggccttcagcgccgcacccgtaggggccctggccgccgcaggcgccaattacagccagatgcctgcagggtccttcatcacagccgccaccaacggccctccagtgcttgtgaagaaggagaaggaaatggtgggggcattggtgtcagacgggctggatcggaaggagccccgagccggggaggtgatctgtatagacgactgactggatcccaggcctgcccttcacccaggccccgtccccgaggccgacccccaactcaagcgctggggcctgctgccagccctccaccttccccaccccttgggccatc

SEQ ID NO: 29557 - DNA, 463 bp, Homo sapiens
  misc_feature (1)...(463): n = A,T,C or G
agaggtcnnaatcgataccatctccatgtggtggaattctgggcgtgttcgtgctctgctggttccccttcttcttcagctacagcctgtacggcatctgccgcgaggcctgccaggtgcccggcccgctcttcaagttcttcttctggatcggctactgcaacagctcgctcaacccggtcatctacacggtcttcaaccaggatttccggcgatcctttaagcacatcctcttccgacggaggagaaggggcttcaggcagtgactcgcacccgtctgggaatcctggacagctccgcgctcggggctgggcagaaggggcggcccggacgggggagctttcccagagacccggggatggattggcctccagggcgcangggagggtgcggcaaggcangagcttggcagagagatagccgggctccanggagtggggaggaaagaaagagacccctttgn

SEQ ID NO: 29558 - DNA, 472 bp, Homo sapiens
  misc_feature (1)...(472): n = A,T,C or G
gagaagcgccgtttggagacatctgatagtagaccttagtccgtgtggtggaattcctgaggaccgggccaggaatctgagggttggcttatgaaggggatgccaccttgcccaattcgatttcctcctcgcctttgcttattcatccccacccccatcctacgttgattctatttctgttgcataccctgcttccttcagtttgtgtatgtgttgcggccagatctgtggatggtgagctgacatcatccttccctctctccctcagtcctcaacattcacccaccaccccagtgcctccccacaaggtctgaacacccctgtgaagatgtgaggcagagaggtgatcccaggcctggggaacagggtgagagccatccttgccacactgggggcctccctaacttcctgcttgaagtttacgtaagtctctcccgtgacgaaaaggaaacgcagggagggcaccaggcgn

SEQ ID NO: 29559 - DNA, 466 bp, Homo sapiens
  misc_feature (1)...(466): n = A,T,C or G
ttttgaaagacctcgcaaanncnnnnttggttgatcatccgnanagccnggnggaattcggnaccggctctactgccacctcttccagcttctccgccggcgcagcagggaattgcataggctgaggcggctcgggagattcagcggcgaagcaagtgcagatagatggccttgtggcattaaagataatcaaacattatcaagaagaaggacaaggaactgaagttgttcaaggagtgcttttgggtctggttgtagaagatcggcttgaaattaccaactgctttcctttccctcagcacacagaggatgatgctgactttgatgaagtccaatatcagatggaaatgatgcggagccttcgccatgtaaacattgatcatcttcacgtgggctggtatcagtccacatactatggctcattcgttacccgggcactcctggactctcagtttagataccagcg

SEQ ID NO: 29560 - DNA, 449 bp, Homo sapiens
  misc_feature (1)...(449): n = A,T,C or G
tttgtagacatcgnaagccggnngtganacctttaacnngcagagggnttgggatgaaaagaaaaaccagtgggtgaattttaatgagccagaagaggaggttaattgtcattctagttcctgttgggtgtgaggtgtgagtggagggaacagcctcatgtggccctgtgatatttgggtggctgttgccccttttggagcctcctgactgtgccatcccagtgggtttctgtgcacacagtgggtgtctgaagctgtgtttccctctgcagaagaaagccccgcccccacctccaacctcgatgcccaagactgtgcaagctgccccgcctgccctcccagggcctcctggagcccccgtgaacatgtactctagaagagcagcaggaaccagagctcgctacgttgacgtcctgaacccaagcgggacccagcggagcgagccggct

SEQ ID NO: 29561 - DNA, 457 bp, Homo sapiens
  misc_feature (1)...(457): n = A,T,C or G
cactagaacaccattagntttgacgcgcgtattcaaagaatgtaagttttctctccccagcaccagcagcagtaggtgggtattccacttacaactccttgtcattgtagcatttgtgagccatgtcctccaagactgggccattggtgctggtgcagccacgtgcagagaagggagtattgggtgtttggggtgtattctacctgatgagcctttaaagtgtgtgtgcttgtgtgtttatatgttgtctctttctgaactagataaattaattctttttttttttttttttttttttaaaaaaaaattttttttttgccccccaggtgggggggagggggggaatttttggcccatggaaccttccccttccgaagtaaaagaaattttctggcttaacctcccaaaggggtgggaataaagggccccccccccaaccccaatttatttttttttt

SEQ ID NO: 29562 - DNA, 463 bp, Homo sapiens
  misc_feature (1)...(463): n = A,T,C or G
atttgaaagccttggaanannccnnttggttgacatcgnacagncnggnggaattcgcacgtctctctaggcttcttcgatgacattttcatccccccagagtcactgctttagccagccgagttcgacgaagcggagcaggtgtgggtgtgggagtacgagacggaggaaggagcacacgacctctacatggacaccggcgaggagatccgcttccgggtggtggacgagagctttgttgacacgtcccccacagggcccagctcagcagatgccaccacttccagtgaggagctgccaaagaaggaggctccgtacacgcttgtgggatccatcagtgagccaggcctgggccttctctcctggtggaccagcaactagccctggggctggacagtggaccctaccagcctgcgggaaggtggtatggccggctgtgaagacaacagcagctgaggccgat

SEQ ID NO: 29563 - DNA, 468 bp, Homo sapiens
  misc_feature (1)...(468): n = A,T,C or G
agaggtnnacctcgtgagcatacttagtgtggtggaattcattctggacaaagactacctgagatcactaaataagcttccacgccagttgcctcttgaagtggatttaactaaagcgaagagacaagatcttgaaccgtctgtggaggaggcaagatacaacagctgccgaccgaacatggccctgggacacccacagctgcagcaggtgacctccccttccagacccagccatgctgtgataccggcggaccaggactgcagctcccgaagcctgagctcatccgccgtggagagcgaggccacgcaccagcggaagctccggcagaagcagctgcagcagcagttccgggagcggatggagaagcagcaggttcgagtctccacgccgtcagctgagaagagtgaggcagcgcctccggcccctcctgtgacgcacagcactcctgtaactgtctcagaaccact

SEQ ID NO: 29564 - DNA, 469 bp, Homo sapiens
  misc_feature (1)...(469): n = A,T,C or G
agagtcnnnaattgtagacntccactagtccgngtggtggaattcccagcctcacctaatggtttcttagcaaacttcagtagaatgtttagaacgcggccctgataaacttgagtgctggtaggaggtgctacctcgctcaatctgtgagcaaccagccctgtgccctggatgcttggcgggtggagagaaagacagtgttatgtgggcaagcctccaactcaccagttgcagtagagcatctggctctctgtctgctgctatagccctgtgagtcagccagacgtgtggtccccaagccagcttcccacctagcacccttgttctgctacagctcccccacctgccctcttgcattgcctaggatcccacgccccgctttcagtctgctctgggacatctgtcttcttctttgcaggggactaagtatatgacttaatgaatcctaaaaggaaaaaaagatgtcagg

SEQ ID NO: 29565 - DNA, 453 bp, Homo sapiens
  misc_feature (1)...(453): n = A,T,C or G
nactgagacatcgnacangcggngttgataacatgaagccctacgtggacggcaagggccgcgagctccccaccgcgttcgactacgtggagttcacccgctcgcttttcgtgaactgagccactccctgggtcacccacccctcgctgcttgccctgcgtcgccttgctgcatgtccgctcctctgtgtgctctcactttccactgtaaccttaagcctgcttagcttggaataagacttaggagaaaatggtgcttcactaacccgcttccggtccagtcacaatcatcatgtcactgtggggacccagatctgtgtcttgaagcagctgccctcattccgacttcagaaaatcgaagcagctggctcctccccttgttctctctcccaccctcccccaaatctgttttcatgtaaaagacaaataaatgatgacttcccccaaaaaaaaa

SEQ ID NO: 29566 - DNA, 553 bp, Homo sapiens
  misc_feature (1)...(553): n = A,T,C or G
ntttccgaacatctagtccagcgtggtggaattcctttcgccttcctgctgcctaagatgcgccgacatgaatcccatcgtagtggtccacggcggcggagccggtcccatctccaaggatcggaaggagcgagtgcaccagggcatggtcagagccgccaccgtgggctacggcatcctccgggagggcgggagcgccgtggatgccgtaaagggagctgtcgtcgccctggaagacgatcccgagttcaacgcaggttgtgggtctgtcttgaacacaaatggtgaggttgaaatggatgctagtatcatggatggaaaagacctgtctgcaggagcagtgtccgcagtccagtgtatagcaaatcccattaaacttgctcggcttgtcatggaaaagacacctcattgctttctgactgaccaaggcgcagcgcagtttgcagcagctatgggggttccagagattcctggagaaaaactggtgacagagagaaacaaaaagcgcctgggaaaagagaagcatgannaaggtgctcagaaaacagatngn

SEQ ID NO: 29567 - DNA, 483 bp, Homo sapiens
  misc_feature (1)...(483): n = A,T,C or G
agccgcgccaatagaaaccctnatagtagaccttagtcagagcggtggaattcatgtgcctgttcccccttcaccttccaccaagcttcctaaggccgacccagaaggcaagcagatgctggtgtcatgcttcctgtgcagcctgcagaaccatgagccaattaaacctcttttccttagaaattacccagatgcagatttttttttatagaaatgcaagaattgcttaatgcagaaaattggtaaaaaaaagagtggggcatttgctgtaaaaatatctgaaaatgtggaaggaactttggtactgggtgatgggcagaggttggaagaatttggagagctcagaagaatatgggaaataagggaaagtttgaaacttccttgcgactcattaaatgattgtgaccaaaatgctgatagtaatatggacagtgaaatccatgctgaagaggtctcagatgcaaatgaggaacttattgggaa

SEQ ID NO: 29568 - DNA, 424 bp, Homo sapiens
cagtgcctggccaaggccaaggccaagagccccctggaccaggagaccaggctggcgcagctgcagagcaggatggcactggtgaagaggttcatccaggcccgcaggacgtacacagaggaccccaaggagtccatcaagcagtgtgagctgctcctggaggaaccaaacctggacagcaccatccgcatcggggacgtctatggcttcctggtggagcactacgtgcggaaggaggaataccagacggcctacagattcctggaggagatgcggcggcggcttcccttggccaacatgtcctactacgtgagcccgcaggccgtggacgccgtgcaccgggggctgggtctcccactgccacgcaccgtccccgagcaggtccgccacaacagcatggaggacgccagggagctggacgagg

SEQ ID NO: 29569 - DNA, 443 bp, Homo sapiens
  misc_feature (1)...(443): n = A,T,C or G
catcgattgccgtccattagaccgngcggtggaattccttatttgtatggaatgcgcttattttttgaaaggatattaagccggatgtggttgttcacgcctgtaatcccagcactttgggaggccatggcgggtggatcacttgaggtcagaagttcaagaccagcctgaccaatatggtgaaaccccgtctctactaaaaatacaaaaattaaccgggcgtggtggcgggcgcccgtaatcccacctactcgggaggctgagacaggagacttgcttgaacccgggaggtggaggttgccctgagctgattatcatgctgttgcactccagcttgggcgacagagcgagactttgtctcaaaaaagaagaaaagatattactcccatcatgatttcttgcgaatatttgttatatgtcttctgtaacctttcctctcccgg

SEQ ID NO: 29570 - DNA, 483 bp, Homo sapiens
  misc_feature (1)...(483): n = A,T,C or G
aggcagtcccaatcgagaccctagtagtagaccgtagaccagcgcaactgggtctcaagttaaaaaaagaaagcaaggaaagagtaatttacaacgaaggaaaaaaacccacagcacacccttcgcggctgtcagcgctctcctgatgtcacagtggctgcgtgtccttggggtgggtgaggtgtggggagcccagcccctggccctgcctcccgcgccccgctccccttctctctcttactcggntaagccatagcgaggcctccgctcgtttcagatatgaatttgttttatagattataaatatgcatatacagtgtatgtataaagcagaatgcctgcctttcctggttattttttgtaccatattggaaattatattatttattctttaccaattttgggaataaaaggtgttttggttatttaatataataagagctgttaaacttctgtttaaatttccagttcaactagtaaatg

SEQ ID NO: 29571 - DNA, 557 bp, Homo sapiens
  misc_feature (1)...(557): n = A,T,C or G
ggtggcgggnnnnnnnnnaatagatcttgtcagcggggcaattcctgagcttcccnagtggtagaattgcaggcatgaattgctgcacccagcctcatctgtgctgtgaattatgtgctgtattgactctcaagcatgatgaccattggtggtttctgtaccatttcctgttactttactgaaacacacctactccattaacttcttgggttaagtctagaaagtaacagtttacttgtaaaccacatttcttatccccaataagtatttttttaagattattaaagttcattattactaccctatgatgtgaaagtgtcatttgcttaatctttttaattttttattctcaacctcatcttactgaagagaataaaactcttttaccatattcttaaaatgtggaattctcggccaggtgcagtggctcacgcctgtaattccatcactttgggaggccaggtggggtgatcatctgaggtcaggagttcaagaccagccctgccaacatggtgaaaccccgtctctactaaaatacaaaaatatctgggtgtgtg

SEQ ID NO: 29572 - DNA, 452 bp, Homo sapiens
  misc_feature (1)...(452): n = A,T,C or G
gtaaaactgagacccttcgaaaatgaggaccttacggacagcctggnggaattcccagggaagcagggatgacagaaccccatagcatgagggcaggaggagtggatacaaggatgtggagaggggaaagactcccccattcctttccctcctccctcgtcatagaaagtgaggaccaaggcacccaaggtctgaccatctgtgtctccagagctcctgcatgtgactaacctctgtgtaaacttctccaaactgcacaccctgggtgacaggcccctgggaggcctcaagggacaccccttctactactatgccttctatgagcttgtagccaaaggcagttgcctgtgccttgggcacacctctaagtgcaggtctgcacctggaaccccagccaatgtggtgaggacaatgggaggggcattctgttgctggtggggtgggcaagctgg

SEQ ID NO: 29573 - DNA, 469 bp, Homo sapiens
  misc_feature (1)...(469): n = A,T,C or G
agggtctcnntatcgatagccctactccgtgtggnggaattcatttttgatacttaaagtgatttttgtaaattaaacttgcttttaaaaggtcattattaataacaaaaattaaactttggaaagatcttaatctgtagtgcttttgtagtttttagtaaatcactcagctattttatgcttgccttttattagaaatgacatagcttttagcttagaaatatatcctggttttattttgtgcctggaaacatttggttaaatttaatgactggaaagtcatttactcattgaatgtaaaacaggtaatccaaacttaattgtaaatgtaattgtaatgctgttataaatttacatgtatattataaagtaccttatttttcttcctatataattatttatagaatagatgttcatatgttggctggggtgaatcacaagtagatcacagcaccatacattctcaggg

SEQ ID NO: 29574 - DNA, 552 bp, Homo sapiens
  misc_feature (1)...(552): n = A,T,C or G
ntttgaaacacctgatccccnatccagagnggngcaattcgagaccagcagtgctttaatgtgtcccagccaggatcttccttgttcaccaagaaagtttcccatgtagcccaccacaccagaagtagaagttcctccagattccagactctaatagccagttattacaaaggaaatcaataatacctagtggctttgtttctttgggatgtttggttttttaactattaagaatatttactttatgctgggcacggtggctcacgcctgtaatcccagcactttgggaggccgaggtgggcggatcgcgaggtcaggaaattgagaccatcctggctaacacggtgaaacccagtctctactaaaaacacacacacacacaaaaattatccgggcgtggtggtgggcacctgtagtcccacctactcgggaggctgaggcaggagaatggcgtgaacccgggaggcggagctggcagtgagctgagatcgcgccactgcacttcagcctgggtgacagagcgagactncgtctcanaaaaaaaaagaattt

SEQ ID NO: 29575 - DNA, 487 bp, Homo sapiens
  misc_feature (1)...(487): n = A,T,C or G
aggacgtccaatagaagaccctaatagatgaccctaggacangcggaggaattcgacggaagagggtttattgtcttttgactcgttaccaaccctctgcttactccttcccctcaaaaaagggaagctgacttctcaggttagccagcagctcactcatacttttttctctctctattccataggctgatctgctgacttggggctctgaatctggatactctccatcaccggttggctgctgtcaccatttccttcctcgttgatggcactactagtggtcaagcagaggatgcagatgtacaactcaccataccaccgggtgacagactgcgtacgggcagtgtggcaaaatgaaggggccggggccttttaccgcagctacaccacccagctgaccatgaacgttcctttccaagccattcacttcatgacctatgaattcctgcaggagcactttaacccccagagacggtacaacccaagn

SEQ ID NO: 29576 - DNA, 466 bp, Homo sapiens
  misc_feature (1)...(466): n = A,T,C or G
atgggtannaatcgatagcatactccanngcgnggaattcggaggcggagcagggagccgggagcgggctggcccgcgctcctcctgctggctggggattttctagcctgggcgctgacgccgcggacctccctgcgaccgtcgcggaccatgggcgacaaagggacccgagtgttcaagaaggccagtccaaatggaaagctcaccgtctacctgggaaagcgggactttgtggaccacatcgacctcgtggaccctgtggatggtgtggtcctggtggatcctgagtatctcaaagagcggagagtctatgtgacgctgacctgcgccttccgctatggccgggaggacctggatgtcctgggcctgacctttcgcaaggacctgtttgtggccaacgtacagtcgttcccaccggcccccgaggacaagatgcccctgacgcggctgcaggaacgcctcatca

SEQ ID NO: 29577 - DNA, 471 bp, Homo sapiens
  misc_feature (1)...(471): n = A,T,C or G
aggtgctcnntatcgatgatcatactcagtgtggtggaattccttgtacactagatgttgatgaaatcggtgattgagattttgtcccagcagacaggtgtgtgatggcaacagtgaaataaatacaaaaccttctcccaacccagaaatcctctccacgaaggtagagacagaaaacgcttttattaagcattaaaccagaatgtgatgcacatcacagacaatccactaagaaattgcaagaggaaaagcaaacatcatatctttatgacagaggataatgaggggagctgccttggggctgctggatgatacatcgggacaggacagtgcgagcttccagcaaggcagctctagttggagccctgatttctttccaaggcaggtcttaaggtacaagagaaagagaaatggggcttcttagaaccccctgaccccacagcttctacttggatggaatttttggaagaa

SEQ ID NO: 29578 - DNA, 481 bp, Homo sapiens
aggagttccaattgagaccctcgtagatggccgtagaacaccacacgcagaagccatccctgtactggtggtacctcttggagctgggtttctacctctcactgctaatcaggctgccctttgatgtcaagcgcaaggatttcaaggagcaggtgatacaccacttcgtggcggtcatcctgatgaccttctcctacagtgccaacctgctgcgcattggctctctggtgctgctgttacacgattcctccgactacctgctggaggcctgtaagatggtcaactacatgcagtatcagcaagtgtgcgacgctctcttcctcatcttctcctttgtcttcttctacacccgactggtcctctttcccacccagatcctctacaccacatactacgagtccatcagcaacaggggccccttcttcggctactacttcttcaacgggcttctgatgttgctgcagctgctgcacgtgttctg

SEQ ID NO: 29579 - DNA, 475 bp, Homo sapiens
  misc_feature (1)...(475): n = A,T,C or G
ctcgaccccctnatagtagaccctaggcagngtggaggaattcgttttagtgaacatttcccaagaacagggacagcctctcacatgcccatggtacagttctcaaattcaggaaatgtgtaatattctctgatcagcccaggagttgctaatttgtagttcctgtttcaaatttgccaactgtcccaataatgattttgaaagccgttgtttttctggtccaggatccaatccaggatcaagcgctgcctttagttgtcctctctgcagcctcctttcgtttggagcaggtcctcagcctttctgtctttcatgacattgatgtttgtgaagagtacagtccagtttctgttgtagaacgtccttgaagttggtcccggaatatttgtttaaagtgagttgggaaaccacattcacatgtcttttggttatgtgtgtatttgtcaaacagccagccttgtgctgcgtgctgtga

SEQ ID NO: 29580 - DNA, 468 bp, Homo sapiens
  misc_feature (1)...(468): n = A,T,C or G
ggtgccnntatcgatgacatagtcagtgtggtggaattcgaactgcggggtcacagccaagagcctagtgcagcactctcaagttccagaatacctgcccagctcagcctagagaaagacactgccatcttttcctgcatgcggatcggttgacgagaccaaggcccacacctgaaaactctttccaaaggcaggcagagccatcccattccgtagcagccctccaacaaatgggtggacatttctcatgccatgacccccagccattgacgtgggtggaatttaccagcaccagccggccactgactgtctccttccttccttcctaccttccttccacgtttcctttcctttcccttcctttcctccctccctgctcccacctcgcgccctgtccctccacctcccactccagaatccggtgggggaagcgttccgtagctcgctctatgaaggcctggagaaacc

SEQ ID NO: 29581 - DNA, 469 bp, Homo sapiens
  misc_feature (1)...(469): n = A,T,C or G
agagcctnntatcgatgatcatactcagtgtggtggaattcgaacatcttagtagcatctttgccacatgtcccccttctttctcccactgcccctcagggctcctgcactaatggagcagcagagcccatcttcaaggctcctggtgtctttttaggctttagctgcctccctgctctgaaacctcagtagctccctaaggcctgcaggaaccatcctggagtgtttagcctggcttatggggtcatggggtcctctgcgccctgaccccaggcttcctttccatcccctactcccttctgttcactcttgggctctctcctgtactccaagccaagtgccccagggcccagcacaggccaggactgggcacagctgaccccgtagagattagggaggaacagtgcctctctttaccctgctgtgagcaccactggcctttccttcagatagcttgttcacctcccaa

SEQ ID NO: 29582 - DNA, 548 bp, Homo sapiens
  misc_feature (1)...(548): n = A,T,C or G
aatcgaacatagtccagccgtggcgaantccatgttagtagaataaaagatgaaaacgttgatatcatctcagatgcagagaaagcattttggcaataataactctcagaatactggaaatgtaagtgaaattcctcaacttgacacagcacatctatgaaaaagcaatattcttaatggtgagatcattgagaaggaatgctttctacctaagatcaggaacaaggcaaagatctctgctgtcagtgcttatgttcaacattgtactggatggaggtcagtgaaataaagggcatacataagggaaaggaagaaataaatctttttttattcccagatgatactaagctattttagtgagtgaattctaattagtgaatttaatgaggttataggatacaaggtccatgcatganaatcagtggtatttctatatgtaaccaacctacaatcaaactgaaatttctaaaacagttccatttatgtgagcatanagaaataaaaatatttaagaggaaaattacggnagctgtgcangaccttttatn

SEQ ID NO: 29583 - DNA, 486 bp, Homo sapiens
  misc_feature (1)...(486): n = A,T,C or G
gccagtgccaatggagaccctnatagtagacattagtccangaggtggaattccgcgggcaagggaacctctccagtctcaggacaatggtggttgggagaagctaagctaaggtcaaagccaaacacagcgagaacttagcctaagtgtatcggaccagctaggatcaagacccaacccttgactaggaaggagggcatcttgaatgccagttccctaagacagcatttcacgggtgaggtgtattctcccatggcaagacattggaggtgctatcatgagagaaagaacaatggatgcttgcagaacagaacccgcagatgaccactaaggaatgacactggttttccttctctaataaaaataacaacaacaacaacaaaaatagctgggcgtggtggcgggtgcctgtantcccggctactcgggaggctggggcgggagagtcgcttgaatccgggagacggaggttgcggtgagctgggn

SEQ ID NO: 29584 - DNA, 477 bp, Homo sapiens
  misc_feature (1)...(477): n = A,T,C or G
aggagtcccattgagaccctaatagngaccgtaagaccgacatcgacatcacatgctgggatgcacacccagttccagaagaggaggagggcttctagggtggtgattagcggtggcgccagccctaggctacccttgccaaggccgcccacctgcatcagcctctggccagacggcccgccgtgcctgcattcgcagcagctccgcctggcacccactccggattccggccctggctggggacttggccgcttccctacccacagggcctgacttttacagcttttctctttttttaaaaagttgataggagacttgtacagttgactggctttcctctcgttggtagttgagacgctgttgcaaattccacccctccttccctggtccagattgtagctcttagtcctccctgctcagctggccgggttggaggcctcaccctgcttggggcctggcgtggggggagctctggtg

SEQ ID NO: 29585 - DNA, 481 bp, Homo sapiens
  misc_feature (1)...(481): n = A,T,C or G
ggggatgtgccnnnnnagccccgcccaactgagaccactcggatagatcgccgtaagncgcaacagctacagtgggagccagcctatggcacatgggaggcgtgagggcagtgctgcccgtgcagagtcaggtgtgccactgccttggcggactgcagtgcgtgtgaaggcaccttctaagagggccagggatgcagctatggagataaggcgggctggggacagaaacaggtgggcacagaggcccaagacaccatcggatggagggcagggtctaaccctgtgctcctgagcgtcagctgcctgggttcgaggcggcgggtccccggccccttgtgatggtgtgtaccatgggggagctcggggacagggcaagcccgagcatggtggggctgcagggtgggtctgaagccaggttgggtggggagggtcacaatccctgactgcataaggtcaggggctcctgccccaatgcctgccc

SEQ ID NO: 29586 - DNA, 489 bp, Homo sapiens
  misc_feature (1)...(489): n = A,T,C or G
ggcacgtccaatagagncccctngatagtagaccattagtccagagcggaggaattccaagctgtatgtgatcgggggcagcaacaacgatgccggatacaggagggacgtgcaccaggtggcctgctacagctgcacgtctggacagtggtcatctgtctgcccactccctgctgggcacggtgagcctggcattgctgtgctggacaacaggatctatgtgttaggtggccgctcacacaaccgcggcagccgcacaggctacgtgcacatttacgatgtggagaaggactgctgggaggaagggccccagctggacaactccatctcaagcctggcggcctgtgtgctcaccctgccccgctccctgctccttgagccgccccgcgggacccctgaccgcagccaggccgacccggactttgcctctgaggtgatgagtgtgtctgactgggaggagtttgacaactccagtgaggactaagctcn

SEQ ID NO: 29587 - DNA, 469 bp, Homo sapiens
  misc_feature (1)...(469): n = A,T,C or G
catgacaccctgatggaggcgtaatncgaacatgaagcgcanacagaacgacgtctttggagaagctgagcagtgattgtggccgcccccagcccctgctgccccagcctgtgtctgttctcctcgagggctccagcatcctctgcttcccccaccacgttcccatcacccacctcattgatccactgaccaaatccttaaccctagcgatggcttgggagatggggggttggatagcatcctctttcttggcccttccttatcctaggaaaagagggttcctctccttgtgtgtgtctcttccccccacccctaattcttctgctctgtttgggaagacgtggaggaaaaggtgacttctgcccccaccgctcttacccccactgtagtggcctttggagatgcccccacctcccccccaccaactcttgcgtgttggagagaaggggccctcccagcacaaagttgg

SEQ ID NO: 29588 - DNA, 472 bp, Homo sapiens
  misc_feature (1)...(472): n = A,T,C or G
cttcgaccatcgatnaacactaggccagagtggtggaattcctcacagtaagctccctgggggtaagggcgggtcgtcttgtgtcgcattttgtctcctttggagatccgttccgtttggaacggaagctggcgcacagaaggctctttagaagtggtggacctggtttctgcagacctggaagaggtagctcagaaatgtggcttgtcttacaaggcagaagctctccggaggatccaggtggtgcatgcatttgacatcttccagatgctggatgtgctgcaggagctccgaggcactgtggcccagcaggtgactggttcttcaggaactgtgaaggtggtggttgtggactcggtcactgcggtggtttccccacttctgggaggtcagcagagggaaggcttggccttgatgatgcagctggcccgagagctgaagaccctggcccgggaccttggcatggcagtgn

SEQ ID NO: 29589 - DNA, 469 bp, Homo sapiens
  misc_feature (1)...(469): n = A,T,C or G
catcgagattagtangccgtgtggaggaattcgcggctgagtcccgctcatgcccacaaccacctgcgtgccccggccttccaccaactggtgcagttctgccagcaggcatacatgcagtacatccaccaccgcttgattcacctgactcctgcggactacgacgactttgtgaatgcgatccggagtgcccgcagcgccttctgcctgacgcccatgggcatgatgcagttcaacgacatcctacagaacctcaagcgcagcaaacagaccaaggagctgtggcagcgggtctcactcgagatggccaccttctccccctgagtctttcacccttagggtcctatacagggacccaggcctgtggctatgggggcccctcacacagggggagtgaaacttggctggacagatcatcctcactcagttccctggtagcacagactgacagctgctcttgggctatagn

SEQ ID NO: 29590 - DNA, 486 bp, Homo sapiens
  misc_feature (1)...(486): n = A,T,C or G
tgggatgtccnnnnnagggccgccactgaagaccctcgnactgatctccatcaggacagngcggnggaattccaccatcgctggcgtgccgcagtctgtcaccgagtgtgccattcagatttgcctggtcatgctggagacgctctcccagtctccgcaagggagagtcatgaccattccggaccagcccatgccggccagctccccaatcatctgcgcgggcggccaagatcggtgcagcgacgctgcgggctacccccatgccacccatgacctggagggaccacctctagatgcctactcgattcaaggacaacacaccatttctccgctcgatctggccaagctgaaccaggtggcaagactacagtcttactttgccatgatgcacggcgggaccggattcgccggaattagactccagctctacagaggtgaaaggctattgggcaagtttggatgcgtctactcaaaccacccatgaan

SEQ ID NO: 29591 - DNA, 488 bp, Homo sapiens
  misc_feature (1)...(488): n = A,T,C or G
ggcagcgccaatagagncccctnatagtagaccctagtccagngcggtggaattcccggctcgagcgcgctgccccctcctctctccgcagtactcgccagggatgaccatgagcgtgtgatggggcggcagccccgggcctctctgcgggcctaggcttctgcccagcgcccctgctcagggcgaggggctgaggtcacacctcgggcacctggactcctggccaatcaaggcttgcccagctgggaggccccacacgaaagactcttaccattttattaaaaacgcaaggacttcnnaaaaaaaaaaaaaaaaaaaaaaaangggggccctttaaatttaaggggccccttaaaaccccggaaaaaccccggggggggccttttaaggccccccccttggggggtgcccccccccccgggctttttttggcctgggggggggcccccccccctggctttttttaaaaaaaagaaaaaattgccttc

SEQ ID NO: 29592 - DNA, 480 bp, Homo sapiens
agccaccccaattgagaccctagttggaggcagtaattccgggcacctgaggccaagtggagcagaggtggacatggggttggattgttttgattatttatagttacacaaggacttctcccagctgaccctcaggatgccccaagtcaggaagaccattaagaataggaggagagggctctgcctcaactttcctaggaaagagcccacctcggagatagctacggtttcctctggtggagatggtgaggatgaaggctggagagtgagggaggaggctctgctggccgcagagaacacagggatgggagggtccctagccttcgggcacctccagggccagagagcaggctcagagcagctagtgtggagctcagcatccccaccccacccctcctccctgtagagctgatttgaggcctccttctggggctgggctctgcaggccaggtgggtgtggcctgtgttttcccttctgtt

SEQ ID NO: 29593 - DNA, 485 bp, Homo sapiens
  misc_feature (1)...(485): n = A,T,C or G
ggcacgtccaattgaggcccctnatagtagaccttagtccangtggtggaattcggccagcccgagcaacaggttctgtgtcaccagcctggaccctgacacgctgcctgctgttgccacactcctcatggatgtcatgttctactccaatggagtgaaggaccccatggccactggggatgactgcggccacatccgcttcttctccttctccctcatcgagggctacatctccctggtgatggacgtgcagacgcagcagaggtttcctagtaacttgctgttcacaagcgcatccggagagctctggaagatggtccggattggaggacagcccctggggtttggtccagtctgggaatcaggccccactggcccaacatctccactcatcttacccgtcacccccagctccagtcacaggcaggctgcgtcccaagtcacgaccaccaagcaggggcagtggctgtgtctcaaagaccctt

SEQ ID NO: 29594 - DNA, 480 bp, Homo sapiens
  misc_feature (1)...(480): n = A,T,C or G
gcngctccaatagaagaccctagttggaggctgtaattcctgcgagttgagacctccagggaagtctcgtccggatccatcgctcttctctcaaggagcacagtcctgggaaaggcctatggacctgtgggccggtgatgcgggcactgcagaccaggccaggccctcgggtaaagctctgaggagaggccaaaaccaggcttcaggttcgggaaggtgactgcttgcaactgcagtagcaggaacatgtcaggtgcttactgggtgagacccagccggggaagcctctccaactcctcctagccctggaaaccagacacccagagccccaggctttctcggcacccagaagaagtggggagcgggcaaagcagaaaacattcaatgcatgatgtaggattgctgcgttggcactaagctgttgtattaagcatgagaggtgtttgtttaacgttggcaaagggatttaacaagaaacaa

SEQ ID NO: 29595 - DNA, 483 bp, Homo sapiens
  misc_feature (1)...(483): n = A,T,C or G
gccggtcctttgaacccctnatagtagaccatagtcagtgcggtggaattcgggaaggggaaagagagaaacgaaaaatgcctccttttatgtgcctaaggtctgtttgacataaaattttactttttcctgagtgtattttagcagaaatgttcacatttcagtcatgtagcttgcaaaaagaaaaagaaaagcctcgctgtgaaatcaaaccatctgtttttcaagggagcggagagaacgcagatcccaagggcgtggggcggggtccggaaccggcatatttcatatcttctctctccacgctgcctccccgcccagctctgccggacactttctcctcctgaggagacagaccccgtgcaggaagagagaaaggacgcggggacgggcgcagacggggcctctccgggagctgggggatcggggcgcggagccttccgcccgcaccgcccgcgctcacgtgcgcctgggccagcacct

SEQ ID NO: 29596 - DNA, 445 bp, Homo sapiens
  misc_feature (1)...(445): n = A,T,C or G
catcgcgatcgatgaccctangtccgngtggtggaattccgcaagaataaagaaatcaagattgaaccagaaccatgtggcacagactgcttccttttgctgaggctaactctcgctgtcagactcccacaaaacagaaggctagtccagccccacctcaactctgcgtagtggaagcaccctcggagcctgtggaatggactggggctgaagaatctctttttcgagtcttccatggcacctacttcaacaacttctgttcaatagccaggcttctggggaccaagacgtgcaagcaggtctttcagtttgcagtcaaagaatcacttatcctgaagctgccaacagatgagctcatgaacccctcacagaagaagaaaagaaagcacagattgtgggctgcacactgcaggaagattcagctgaagaaagataactcttccac

SEQ ID NO: 29597 - DNA, 481 bp, Homo sapiens
  misc_feature (1)...(481): n = A,T,C or G
aggagatccnnnnaagcccgccactgagaccttcggactgacgtcattaggacangcggaggaantcggcgagcagcgcgggctcggcctatgcgaccggtggcgccgtttcggcttctgccttgagaggattcaagatgaccaacgaataacctgttcccaagaaggttcgattgagtgaaacagacttcaaagttatggcaagagatgagttaattctaagatggaaacaatatgaagcatatgtactagctttggagggcaagtacacagatcttaactctaatgatgtaactggcctaagagagtctgaagaaaaactaaagcaacaacagcaggagtctgcacgcagggaaaacatccttgtaatgcgactaacaaccaaggaacaagagatgcatgagtgtactactctaattcagtacctcaagcaagtccagcagccgagcgttgcccaactgagatcaacaatggtagaccc

SEQ ID NO: 29598 - DNA, 491 bp, Homo sapiens
  misc_feature (1)...(491): n = A,T,C or G
cgcgcacgcccccnncccctttgaacaactgaaatctactacgaagagccgaggaattccatagatgaaggttgcgagagccaagtgttctgttcctgctcctacgatgcttccacatactttgatacaacctgcaacgacatcaaagacatctacgaacgcatggctggcacggcctttgactttgagaacatgaagcgcaaacagaacgacgtctttggagaagctgagcagtgattgtggccgtccccagcccatgctgccccagcctgtgtctgttctcctagagggctccagcatcctctgcttcccccaccacgttcccatcacccacctcattgatccactgaccaaatccttaaccctagcgatggcttgggagaaggggggttggatagcatcctctttcttggcccttccttatcctacgaaaagagggttcctctccttgtgtgagtctcttgcccccacccctaattcttctgctctgt

SEQ ID NO: 29599 - DNA, 464 bp, Homo sapiens
  misc_feature (1)...(464): n = A,T,C or G
gcgtaggnnnttattgttaccgttagcactngcggnggcanncgngngaagccccaggaggcccccaaggaactcgtcatccctttgatccagaatgttcattttatgcagccaccagcccggccccctgggccatccacagatactggggccttggcggatggggtggtgtcccacgctgtgaaggagctcattgcggaatccaagaagtctctggaagagagagagaatgcgggtgtcgaccccacgctcgctatccccatgatccagaaaggatgcacccccagcggggaaggggcagacagcgaaccccgggcagagacagtgccagaggaggctaattatgaggcggtccccgtggaggcctatgggctggccatgctgcggggcatgggctggaaacctggcgagggcatcggccgcaccttcaatcaagtagtgaagccccgtgtcaactcactgag

SEQ ID NO: 29600 - DNA, 461 bp, Homo sapiens
  misc_feature (1)...(461): n = A,T,C or G
tggggaaaanntttgtagacactagtctcgtgggcgaattccccagcgtgggtttctaaggcgcggaattttccgtacagaccgatttaaggctgcaaggaaggagtcctgggagcatggctttccctgagccaaagccgcggcctccagagctgccgcagaaacggttgaagacgctggactgcgggcagggggcagtgcgagccgtacgatttaatgtggatggcaattactgcctgacgtgcggcagtgacaagacgctgaagctgtggaacccgcttcgggggacgctgctgcggacgtacagcggccacggctacgagctcctttgacaacagtagtctctgctccggcggcggggacaaggcggtggttctgtgggatgtggcatcagggcaggtcgtgcgcaaattccggggccacgcagggtcctccaaagtccagcctcctctgagtggcaa

SEQ ID NO: 29601 - DNA, 471 bp, Homo sapiens
  misc_feature (1)...(471): n = A,T,C or G
nttcgagacctctagtaccgtgaggaggaattccttagcccgtcacccttatttattattgtagctatttatttatttattgaagatgtcccccagggtctccaggctcccctgcccgccccaagccctgcccctcctgtacatatagccctttccccactcagctgtggtgtctcgtggccccgtgaactcaccgctcaccctcctgaacccccccccccgcctttttttaaaattcacccccatccacagttgtcagttgggaagaggggccaaatgacaccctaaagcaggctgatcgggcaatgggagggggccaggcctgccagcccctcggttttgccggggggggccaaggccgctgttgggggtttccctgtgtggaccatggggatcaaagtctggcctgccaggctcctctccccgttttcttttttggtggggggtcggctgagggaatacaccaccctg

SEQ ID NO: 29602 - DNA, 476 bp, Homo sapiens
  misc_feature (1)...(476): n = A,T,C or G
cgccccgccaactgatnacccctccgnactgatgtccattagaacagagcggcggaantctagatttcttgggagcactggacattcctgagccaagcccacccccagggggtccttcgcctgggggcccacccctgtccaccggacctatagaggacctgctccagtacagccagaaggacctggatgcaggggtaaaggcgacacaggatgagaaccgggagctgaggagcaggtgtgaggagctccacgggacgaacctggaactggggaagatcatggacaggttcaaagaggttgagtaccaggccatggaggaagttcaaaagcagaaggaactttccaaagctgaaatccacaaagttgtaaaagaaaaagaccaacttaccacatatctgaactccatggagaagtccttgtccgacctcttcaagcgttttgagaaacacaaagaggtgatcgagggctaccgcaag

SEQ ID NO: 29603 - DNA, 443 bp, Homo sapiens
  misc_feature (1)...(443): n = A,T,C or G
ctcgagatcgacgaccttagtccgngtggtggaattcggtgggcagggccgccccggccatgtttacagccccggccctcgacagtattgaggccccgagcccccagcacttgtgtgtacagcccccgtccccgccccgccccgcccggccggccctaacttattttggcgtcacagctgagcaccgtgccgggaggtggccaaggtacagcccgcaatgggcctgtaaatagtccggccccgtcagcgtgtgctggtccagccagcggctgcaggcgagtttctagaaccagagtctatataaagagagaactaacgcctaaaaaaaaaaaaaaaaaaaaaaaaaaaaaaaaaaaaagctcttttttaattgggggcctctcttggagaaaggggtgcttgccttcctcgtcccaatactgatgggggttgttaaacgcccc

SEQ ID NO: 29604 - DNA, 470 bp, Homo sapiens
  misc_feature (1)...(470): n = A,T,C or G
natcgagattcatagcncgtgtggaggaattccccggctcgagcggccctgactgactgtattctctggccacattcaagtcccccattggtgggggcagagaagtaggaccaggccatccttggctccagagctcgaagaccccaagacagccctctgctctcagcggcgccacagagagcctgggctcagccttctgcatcaggacatggcctcgtccactgagggcacgatttaaacatttgacatcagaagctttatttgtaaacctcacacagataaggaccaagggctggcggtgtggccagaggacaggggaagctgaaggccccgtgcttgagctcggcagtcctgctccttgcagtgaagccaccatgggtgaccgtccagcctcacccggtggcctgcacagtgagggaagggcttcagggccatctgctcccagggcaggggacaggccaccaaggacc

SEQ ID NO: 29605 - DNA, 471 bp, Homo sapiens
  misc_feature (1)...(471): n = A,T,C or G
agcccgccactgatnaccctcggactgatgacgttagtccangcggnggaattcatcgagagggacttcatgctaagcttctccagagaccccaattgctatgtccaagatctgctccgctcccagagccgggacctcaaagggatgacagatgtagccggcaaccctgaagaggagcgccgggctgagatctaccaccagccctggtcccaggaggccgtcagtcgctacttttactgcaagatccagcagcgcaggcaggagctggagcagtcgctggttgtgcgcaacacctaagagcccaaaaataagcagcacgacggaactttcagccgtgtcccgggccccagcattttgccccgggctccagcatcactcctctgccaccttggggtgtggggctggattaaaagtcattcgtctgaaagaaaaggtcttaactgccacatgctcacacgcctacaaagaaaa

SEQ ID NO: 29606 - DNA, 450 bp, Homo sapiens
  misc_feature (1)...(450): n = A,T,C or G
agccgctnnntnnccccagctgcacacntcagacnggcgaattcactcatacagtgtggagactcctgtgggctgcgcctggctcccagtggccacggagcaaatcccttccacaccagcaagtctccccgtggcctgtgtgtcccggggtccccagggaagctgcatttgacttgagacccttccctcaccatgaccccccacactctaattccctttcatcaggcgtcacctgtgccgtaccccccgggccctgggatgctgcccccccatctccctgcctccctcagagtctctgaggacctcccccctctacccggcgtgtcccgctcaccctctggggaggttgcttgctttgccgtctgccttggctgccttccctttctgctgagtggtggccggccttgctttgctgtcttgctgcactgctagggtgaacccggggccctg

SEQ ID NO: 29607 - DNA, 480 bp, Homo sapiens
cgcccccagcccagccccctttagatttcgaaaccactatgcagagtggaggaattcctcatgacgctcatggaacctctttctttgatcttctttttcttttctccccctcttttttgttctaaagaaaagtcattttgatgcaaggtcctgcctgccatcagatccgaggtgcctcctgcagtgaccccttttcctggcatttctcttccacgcgacgaggtctgcctagtgagatctgcatgacctcacgttgctttccagagcccgggcctattttgccatctcagttttcctgggccctgcttcctgtgtaccactgaggggcagctgggccaggagctgtgcccggtgcctgcagccttcataagcacacacgtccattccctactaaggcccagacctcctggtatctgccccgggctccctcatcccacctccatccggagttgcccaagatgcatgtccagcataggcagg

SEQ ID NO: 29608 - DNA, 456 bp, Homo sapiens
  misc_feature (1)...(456): n = A,T,C or G
atgcgctnnnnnnaaacggattcaagcccattgaccancnggnggaattctgactccaaccgaggctgcccaagcgccagaggtgacctatgaggcagaagagggctccttgtggacgttgctactcactagcttggatgggcacctgctggagccagatgctgagtacctccactggctgctaaccaacatcccgggtaaccgggtggctgaaggacaggtgacgtgtccctacctcccccccttccctgcccgaggctccggcatccaccgtcttgccttcctgctcttcaagcaggaccagccgattgacttctctgaggacgcacgcccctcaccctgctatcagctggcccagcggaccttccgcacttttgatttctacaagaaacaccaagaaaccatgactccagccggcttgtccttcttccagtgccgctgggatgactccgtcac

SEQ ID NO: 29609 - DNA, 501 bp, Homo sapiens
  misc_feature (1)...(501): n = A,T,C or G
agtgagccagggccngnnnnnatgagaactgagaacatacccagngcgnggaattctatcattccggcaccatgtgtataagaagacagaccaccgcaacgtggagctcactgaggtcgggccccgctttgagctgaagctgtacatgatccgtctgggcacgctggagcaggaggccacagcagacgtggagtggcgctggcacccttacaccaataccgcacgcaagagagtcttcctgagcaccgagtgagcacactcaccactcagtcaggacatggacttggaactcaggatggggctgtcatagacagacccaccagtaggaactgtcacagaatggcctgctgaactgggatgtggaactgtggcgggtggagaggtctgaataaaccgtctgtgtcatggcnnnnnaaaaaaaaaaatatatataaaaaatcaaaaaaaaaaaaaataaaataaataaaatatttttttatttgtataattccccccctcccc

SEQ ID NO: 29610 - DNA, 458 bp, Homo sapiens
  misc_feature (1)...(458): n = A,T,C or G
tggcctnnnnnnaaagaaagttgncgacagaccagcngnggaattcctccaggagaaggaggaaggacgggaggcctatgcctccgacagacacaggaagtcttctgacaagcagcaccctgagaggcagaaggacaaggagcccagagacaggagaaaggaccgaggggctgccgacgcggggagagacaaaaaagagaaagtctttgaaaagcacaaggagaagaaggataaagagtccacagaaaagtacaaggacaggaaggacagagcctcagtggactccacgcaagataagaaaaataaacagaagctccccgagaaggctgaaaagaagcacgctgccgaagacaaggctaaaagcaaacacaaagagaagtcggacaaagaacattccaaggagaggaagtcctcgagaagtgccgacgcggaaaaaagcctgcttgaaaagttggaan

SEQ ID NO: 29611 - DNA, 501 bp, Homo sapiens
  misc_feature (1)...(501): n = A,T,C or G
tgagggnaggcccccttttggaccctannattgagaccatatccaggggggaattcaggtgatccacccaacttggcctcccaaagcgctgagattacaggcatgagccaccatgccaagccccaaagacttaattcttatccactacatataggagaccccaaaatgagactaatgtgcagtcttcccaaaactgatttaatgattttgttaatggcaacagtggtaacagcccatagaaaagtactcaaaggccgggcgaggtggctcacgcctgtaatcccaccactttgggaggccgaggcgggtggatcgcctgaggtcaggagttcaagaccagccgggtcttgaacgtggtgaagccccatctctactaaaaatacaaaaagatgcttgcctgtagtcccagctactcgagaggctggggcgggagagtcgcttgggcccacgaggcggagttggcagttagctgagatcgcgccattgcattccagcctgggn

SEQ ID NO: 29612 - DNA, 461 bp, Homo sapiens
  misc_feature (1)...(461): n = A,T,C or G
aggggctgnntnnncccggagtcnggacntcagtctggtcgaattcctcacttccaatgggattggagtctgttgtattcttaagagatagcctgatatgtggtttataggtgaatcaataaacaccaacagcggcggaaaaaaaaaaaaaaaaaaaaaaaggggggaaaaaaaaaaaaggggaacccccccctgggaggaaatttttttttttccctgaaaaaaaaaaaatttggggtttttaggaaaaaaaaaaagggcaaaaataaaattttaatttttccttgcccccaaatttttccgggggggcaaaaaaggcaaaataaagggggggggaagggccttttcttttgacccttctttttaagggccccccaagaaatttgaaaagggccaatttaaaaaggggggcgccggcaaataaattggcaaaaaaaaacaaaatttttggggggtttttt

SEQ ID NO: 29613 - DNA, 458 bp, Homo sapiens
  misc_feature (1)...(458): n = A,T,C or G
gagttaccaaagaagaanntttgtagacattgttgatggcctctgancacgnggnggaaatcgncaacctctccctcatacattcatgggcgggctggcgctttgcacggccacttagatcagcttcaatgtcctggggttctcggccgcactgtccaccaacatcatggactggtgagtcacacagaaggtgggcgtgagggggacgagacccggtgctcacctgcatctgggtgtgcagattctcaggtgagctgagaattcctcccgtgagccaaagcacgtgcgtccaatgctggcctttcctaaagagcaaatcaacaggcatccccggaaggtaagtttctcaaaaataagccgaaatttcaggatggacggtcttggtacttaaaatgctaaccatggagacacggttagctgacatatgctgaaatacgcacatacgctcagcagtgtgt

SEQ ID NO: 29614 - DNA, 460 bp, Homo sapiens
  misc_feature (1)...(460): n = A,T,C or G
aggcgctgnnnnnncccggagccttgagcacagtcagtcgaatggaatactgcaagtgcgagcaactcaagggcgagtggtaccatataagccccaatcttagcaagtgcggagaagaactgggtcgactcaagctagttcttctggagctcaacttcttgccaaccacagggaccaagctgaccaaacagcagctaattctggcccgtgacatactggagatcggggcccaatggagcatcctacgcaaggacatcccctccttcgagcgctacatggcccagctcaaatgctactactttgattacaaggagcagctccccgagtcagcctatatgcaccagctcttgggcctcaacctcctcttcctgctgacccagaaccgggtggctgagttccacacggagttggagcggctgcctgccaaggacatacagaccaatgtctacatcaagcaccn

SEQ ID NO: 29615 - DNA, 432 bp, Homo sapiens
ttgagacactttgagggcgtggaatagaggagggacacagcctccatgctctcctatttccttaggcctgaaccagctttccgaatctatttccccacaagtaaaatggatgttaaaatacctgctttagctccaggattgctctgagagcaacggggacagacaacaggatggacaatttgggacacagcctggacaggaccttcagcctcaagaacagaggaagggggcaggtgctaactccacacccagagcactcagatctgtgtcatggcctcagaggtcgctcactgtcaggcctggccacgaaggcttgcgagagccccagaactggaaggagctgggccatgaggaaccgtgtgggggccccgtctgtttacccacaacctgtctccaatgccaccacggacgcacatgcacacacggtacact

SEQ ID NO: 29616 - DNA, 440 bp, Homo sapiens
  misc_feature (1)...(440): n = A,T,C or G
attggagacactgttgagngcgctcgaatcacccggtggaagtcacggaagctcacccccttctgaatgggtgcactcctggggatttccgcggccttgcctgggagcggggtacggacatggaagctcaccctcttctgaatgggtccactcctggggatttccacggcctttcctgggagcaggttagggacatggaagctcacgcccttctgaatgggtccactcccggggatttgcacggccttccctggatgatccactcctggggattttccgcagctctccagatgacgtgcacgcacactaaacacccagaagttagggaggcactgatccagtgaagtcctcagatcaaccttgtgagctttttacaagtacctgtcactgttaaactgctgatgaaatgtgaaacgacttcacaggatttcagtctgata

SEQ ID NO: 29617 - DNA, 557 bp, Homo sapiens
  misc_feature (1)...(557): n = A,T,C or G
agagtanttaaggggcnnnnagnnnnnnnnnntttcgaancacatttcggaccctagtccgtgtggaggaattcgaattccaccacctctggagccctttcactttatgactgcttcctggacgggtggtgggaaggcaggagcctgggtccttaggctgggggcctctctccatccacccacctttccctcattccctctcttggagcagcagccgcccaggcctttagggagggagggtttctggggcccttgggttggagtggggtcgcgttgcattgtgttcatgaccatgtagctcatgttgaaattaaagtttttggcttttctaaaaaaannnnnnnnnaaaaaaaaacaaaaaaaagaccctgaccgagtaaaaagaactnanncccccgctcagcaagtattgggaatgaaaaaccccccaagactgccaagaagtgcttgttttggcaccccctcctgggttacccccccccactcctttttgggccgggggggggcccccccctgttttttccaaaaaaaaaaaaaattccccctttttttggttt

SEQ ID NO: 29618 - DNA, 490 bp, Homo sapiens
  misc_feature (1)...(490): n = A,T,C or G
gatggcggggnnnnnnnaatcgagatatcgtagacccgtggnggaattcgtcagctcaggcacatagaagcagcatttgaccaggaggctgcggcagtgttgatggcacggcttggggtgttccgagcggagtcagaggaggggcccgatgtgctccggtggctggaccgacaactcatccgactgtgtcaaaagtttggacagtataacaaagaagaccccacttcttttaggttatcagattccttttctctatatcctcagtttatgttccatctgagaagatctccatttcttcaagtgtttaacaacagtcctgatgagtcgtcatattacagacatcattttgcccggcaggacctgacccagtccctcatcatgatccagcccattctctactcttactcctttcatgggccaccagagccagtactcttggatagcagcagcattctagctgacagaattttgctgatggatactttctttc

SEQ ID NO: 29619 - DNA, 495 bp, Homo sapiens
  misc_feature (1)...(495): n = A,T,C or G
gccgcccgccnnngnnnaaatggagaaactggagaacactaggccagngncgnggaaatcacctaaacaagctgctagagtctacaaggaggctgcatgatgagtataagccactgaaagaacatgtggatgccctgcgcatgactctgggcctgcagaggctccctgacttgtgtgaagaagaggagaagctttccttggattactttgagaagcagaaagcagaatggcagacagaacctcaggagccccccatccctgagtccctggccgctgcagccgctgccgcccaacagctccaagtggctaggaagcaggatactcggcagacggccaccttcaggcagcagcccccacctatgaaggcctgcttgtcatgtcaccagcaaattcaccggaatgcacctatatgccctctttgcaaggccaagagtcggtcccggaaccccaaaaagccgaaacggaagcaggatgaataaagaaagggagagcaca

SEQ ID NO: 29620 - DNA, 442 bp, Homo sapiens
  misc_feature (1)...(442): n = A,T,C or G
attgaagacatcattgagggcgctggaaacagcgngacggaagtcgccaacttgagggaagggggcgtctcgtcagctggtccctgctatggagctattgatgtgcaatattagaaaggagacatgaaaaaaggagaaaaggaaagacagaagtgtatatatatattatttaaacaaacaaaaagaaggcgcgttactatttttttttcacccggcaaagaggtgagaggatgggaaggagcatccaggcgtgggaagcggcgagatcctcgggctgggggtgcccacgtttgctacctcccactgagaaatcgctggagctcacaattgtctctcacagtgcatgtgatttttttaaggaaaaaaaaaaatccctatttaagattctgaaggtgctaccattattttgccacagactttgaagaaacttttggatgtgggg

SEQ ID NO: 29621 - DNA, 447 bp, Homo sapiens
aggagatcatttgaagaccattgttgagggcggtggaattcgaagactattgtgactgatgttttccaggggtccatgaggatcttcactaaaaagcttccccatcctgatctgccagcagaagaaaaagagcagttgctccataatgacgagtaccaggagacaatggtggagtccacttttatgtacctgacgctggaccttcctactgcccccctctacaaggacgagaaggagcagctcatcattccccaagtgccactcttcaacatcctggctaagttcaatggcatcactgagaaggaatataagacttacaaggagaactttctgaagcgcttccagcttaccaagttgcctccatatctaatcttttgtatcaagagattcactaagaacaacttctttgttgagaagaatccaactattgtcaatttccctattaca

SEQ ID NO: 29622 - DNA, 441 bp, Homo sapiens
  misc_feature (1)...(441): n = A,T,C or G
attgaagaccatagttgatgacgcttagaccangnggcggaagtgccatgatccccagcactgtcccatcctgcacaaaggcccacaggcatgcctgtactctctttcattaaggtcttgaagtcaggctgccccctccccagcccccagttctctccccaccccctcaccccacccggggctcactcagcctggcagaggaagaaggaaggcagacatctccgcagccactcctgggccttttatgtgccgagctaccccacttgccttgggcgtgtccactgagccttccccagccagtcttggtctcaattttgttatgttttggattggtttgagacggagccttgctctgtcacccaggctggagtgctatggatcgatcttggctcactgcaacctgcacctaccaggttcaagcaattatcttgccccagcctc

SEQ ID NO: 29623 - DNA, 445 bp, Homo sapiens
  misc_feature (1)...(445): n = A,T,C or G
ggaagtcanctcgagacaattgttgagggccgtggaattcggcggctccggtgtcggcgggtggcgcggcgcccccggagggggccatatctaacggggtttacgtactgccgagcgcggccaacggagacgtgaagcccgtggtgtccagcacgcctttggtggacttcttgatgcagctggaagattacacgcctacgatcccagatgcagtgactggttactacctgaaccgtgctggctttgaggcctcagacccacgcataattcggctcatctccttagctgcccagaaattcatctcagatattgccaatgatgccctacagcactgcaaaatgaagggcacggcctccggcagctcccggagcaagagcaaggaccgcaagtacactctaaccatggaggacttgacccctgccctcagcgagtatggcatcaatgg

SEQ ID NO: 29624 - DNA, 453 bp, Homo sapiens
  misc_feature (1)...(453): n = A,T,C or G
gagcgcggcnnccccaactatgaccactgacaccctgcggaannccgcattnctgttcactaaccccactccaggacactgcccctgaagcctttgcatctctgctcttcactcctggggggcagctgagctccccgcgtgctgtgtcactgctttgttccagacacaaaccagcacgtctagggcccagcccctcccccaccccggcatttcagcgtcaagtgcacttagcggggtacccggctcccccagcccccacacccgtcctgggtctcagggtggttccagcttctccttgggcagccagaagttggagtcccatcccccaaggcacattttttttttttttttttttgggacaagggagggggtcaaacgaacccccttggcctgggcaagccctaactccttaagggggcctcggaaagggggaaccatattggcctggggaac

SEQ ID NO: 29625 - DNA, 476 bp, Homo sapiens
  misc_feature (1)...(476): n = A,T,C or G
agagggccaatcgatgacctctctagtgacgngcggnggaattcgatgaggtttcaccatgttggccagcctggtttcgaactcctgacctcaagttttctttcccccttcacctcccaaaatgctgggattacaggcatgagccacccgccatgcccggcctctttttagttttgctattagaagtgataacattctttttagtttcactattagctttccttgcattcacattttacattctctcattagcatttctatccttggcattgttgagtttctaatgcttttttgcgtgagtgttttacccattaaatgtttttgtttaatttattattttcaagctttccttttgtttccataatgaatctttgtgagattcctgtattttagccatttccaaagagtgccattttacttatttcactggaagtatttaaccattccaaactacaggctctaagtagcatcctgat

SEQ ID NO: 29626 - DNA, 449 bp, Homo sapiens
  misc_feature (1)...(449): n = A,T,C or G
gaagaacntttgaagaccattgttgatgacgctctagaccangnggnggaattcggaaactccacatctgccttaaaaccaaagagggcttcctctataagccaagggaaaggggtgcttttatagaggctagcttctgcttttctgccctggctgctgcccccaccccggggaccctgtgacatggtgcctgagaggcaggcatagaggcttctccgccagcctcctctggacggcaggctcactgccaggccagcctccgagagggagagagagagagagaggacagcttgagccgggcccctgggcttggcctgctgtgattccactacacctggctgaggttcctctgcctgccccgcccccagtccccacccctgcccccagccccggggtgagtccattctcccaggtaccagctgcgcttgcttttctgtattttatttaga

SEQ ID NO: 29627 - DNA, 567 bp, Homo sapiens
  misc_feature (1)...(567): n = A,T,C or G
gtgagaanaaaattgatcacatcaggggggattgaacctctgcgggaggcggagaggagcaactgggacccaaaactgagcctgggagggatccgacagaaaagctcagggcgggtcttctccttgtgcccgggattgggctatgctgggtaccaccatgtactcaggcatggtgggttttgaacccataagccaaaggcccttgtcatcagctcttaacaagtatattttgtattttaatctctctaaacatattgaagttttagggccctaaggaaccttagtgatcttctattgggtctttctgaggttcagagagggtaagtaacttcctccaggtcacacagcaagtctgtgggtggcagaagcaagctagcgctgggcattcagtacataccacgatgtgctccctctcttgatgcttggcccctggggccttcagggctttgggacatcttgtcctcaaccctctccctagatcaatctgtgagggtccctgtagatattgtgtacaccatgcccatgtatatacangtacacacagatgtcacacagatgacacatgct

SEQ ID NO: 29628 - DNA, 470 bp, Homo sapiens
  misc_feature (1)...(470): n = A,T,C or G
gtcaagttgaaggaaaannnnnncctggatgtcatcagtaagngcggnggaanncctctatgattgctcttacacagctactgacatttatactttcgtgtaattcaagtcttctgcatattttccccttttgtgaacaggtactggtggagaatggaacaaaagctgggcacagccttctcatggatgccagggatctggtccttaagggaaaagagaagtcacctttggaccctcgacctggttttgtctttgccccggtgagtattacttctgcctgtcccaccacacggatctgaacttaggcgtggccgggaaatgtaagatggtaaagctaagccactctccactactttgtgttcctatccagttcctacctaatgattcccctggctcttcctacccactgctcctgtcctcccttctccctggccccttttgactctattattctcagtttttaaagtttg

SEQ ID NO: 29629 - DNA, 447 bp, Homo sapiens
  misc_feature (1)...(447): n = A,T,C or G
tttgagacatcctgatgtccattgaanagcccggnggaagcccttcatctgtctcatcgggctcagctgttgcggggacttccggtgaaagcacctttggaaccttgttgcactgtcggtcctgaccgccagcctgtcgtacatggtggggatgatcgccagcttttacaacaccgaggcagtcatcatggccgtgggcatcaccacagccgtctgcttcaccgtcgtcatcttctccatgcagacccgctacgacttcacctcatgcatgggcgtgctcctggtgagcatggtggtgctcttcatcttcgccattctctgcatcttcatccggaaccgcatcctggagatcgtgtacgcctcactgggcgctctgctcttcacctgcttcctcgcagtggacacccagctgctgctggggaacaagcagctgtccctgagcccaga

SEQ ID NO: 29630 - DNA, 478 bp, Homo sapiens
  misc_feature (1)...(478): n = A,T,C or G
cgcaaaaatgagaccctgtcagngngcnggaanncaccgtagcatctttgcccccccatgcactgcccaaccacaatcgcagcctgtcctacaataatgtgctcaaccctggctcgcctggtggccacgcctgcctcgcccatccagcagttggcgtggccggataccactcaccctacctgcaccctggggcaacgggcgacccaccatggcccctgccccacagcttcagtcccgtgctgggcccccggccccaggagccctcgcctgtgctctacgacatcctgtccaggaccatcatggcatccatccaggagcgcaaggacagggaggagcgtgagtgcctgctgcgctcccaggccgactcactcttcggcgactcaggcgtctatgatgctcccagctcctacagcctgcagcaggccagtgtgctgtctgagggcttctgaggtcctacgctgtgctacagctctacaan

SEQ ID NO: 29631 - DNA, 481 bp, Homo sapiens
  misc_feature (1)...(481): n = A,T,C or G
cgcccccatcgagnccntnatcgtagactctagnccangnggnggaattcgctgcctttagttgtcctctctgcagcctcctttcgtttggagcatgtcctcagcctttctgtctttcatgacattgatgtttgtgaagagtacagtccagtttctgttgtagaacgtccttgaagttggtcccggaatatttgtttaaagtgagttgggaaaccacattcacatgtcttttggttatgtgtgtatttgtcaaacagccagccttgtgctgcgtgctgtgatggggagcattactcaacagagcctggccctgaccttggggatgtagtttgggtttgtggggaaagcagctaccgccaggtgggctttacggacccctgtgtgtctcatgactagaggcactgacgcttggataaatacatactggatggatgcaggatgagtccgcattctataagtgtgcagaggtacagaagtggcn

SEQ ID NO: 29632 - DNA, 469 bp, Homo sapiens
gtggggccccaattgagacattagatagagcggcgtaattcgggaaaccagcccagtttctggcaggagaggcagaggaggtcaatgcctttgctctgggcttcctgagcaccagcagtggtgtctctggagaagatgaagtagagcccttacacgatggagttgaagaggcagagaaaaagatggaagaagaaggtgtgagtgtgagtgaaatggaggcaacaggagcacaaggacccagcagggtagaagaggctgagggacacacagaggtgacagaagcagagggatcccaggggactgctgaggctgacgggccaggagcatcttcaggggatgaggatgcctctggcagggcagcaagtccagagtcggcctccagcacccctgagtctctccaggccaggcgacatcatcagtttcttgagccagccccagcgcctgggtgctgcagtcttatcttcagagc

SEQ ID NO: 29633 - DNA, 477 bp, Homo sapiens
gcccccctcgagaccatgttcgtgtgctggaattcgcagctatggacggcggctacaggaggccaaggccaagcccaaccttgagtgcttcagcccagccttctacacacataagtatggttacaagctgcaggtgtctgcattcctcaatggcaatggcagtggtgagggcacacacctctcactgtacattcgtgtgctgcctggtgcctttgacaatctccttgagtggccctttgcccgccgtgtcaccttctccctgctggatcagagcgaccctgggctggctaaaccacagcacgtcactgagaccttccaccccgacccaaactggaagaatttccagaagccaggcacgtggcggggctccctggatgagagttctctgggctttggttatcccaagttcatctcccaccaggacattcgaaagcgaaactatgtgcgggatgatgcagtcttcatccgtgctgctgt

SEQ ID NO: 29634 - DNA, 451 bp, Homo sapiens
  misc_feature (1)...(451): n = A,T,C or G
nattgatgactattagnccangcgttggaattcctcaatacctactggaggctgcgggccgagccaggctacgggaacatggatggggccgtgctctggtagccctggccccgggggcaggaggctctggttcctcactcctcctgcctccaccccctaccatggacacatgggtgaggccgggctccccgcctcactgcccttgagaccaaaggggcagccctggccctccctcccctctgctggccagagggtctgcatctcagcccacccccaaccccaccgtttggggtgagaagcagaatctgtgcttccccagtctccttgccccagacaaccagcatgtaagacccttcccgcttcaccattccgattcctgtcccctttggggtacttgggggagactctggctcccaggatctgttccctatttcagtgccttcctaggaca

SEQ ID NO: 29635 - DNA, 479 bp, Homo sapiens
  misc_feature (1)...(479): n = A,T,C or G
gggcnccnaatcgagaccatgttcgtnggcggaattaaccagggaagctgtccctcactgttgaattttctctaacttcaaggcccatatctgtgaaatgctggcatttgcacctacctcacagagtgcattgtgagggttaatgaaataatgtacatctggccttgaaaccaccttttattacatggggtctagaacttgacccccttgagggtgcttgttccctctccctgttggtcggtgggttggtagtttctacagttgggcagctggttaggtagagggagttgtcaagtctctgctggcccagccaaaccctgtctgacaacctcttggtgaaccttagtacctaaaaggaaatctcaccccatcccacaccctggaggatttcatctcttgtatatgatgatctggatccaccaagacttgttttatgctcagggtcaatttcttttttctttttttttttttttttcctt

SEQ ID NO: 29636 - DNA, 449 bp, Homo sapiens
  misc_feature (1)...(449): n = A,T,C or G
aattgaagacctncttgatgaactctgaaagncnggnggaattcgggctgcttttgacttggttctcagaggcctcacaggtgcatctgaaatgctttttctgagacagtttggtgaccaggccagtatcttttgtctttcttgcaaaccctgtttgatttccctttttgtattcagaagaaaagtcctgatcttgtagcctgtttggagtctgtgatagaaacagagcagaaggcttttaaaatgcatcttcagacagtgaggtgtgtcctgatgcaggattaaccttgaactccggaggcagaagagccaggaaggagcactgagctggagctctcttgcatttggggcttgccgcctcccagctctgcgtttctgcaagctgatggccaggagccaagctacgctgaggggctgtgggggcagtgagcgtgccacccacacagagg

SEQ ID NO: 29637 - DNA, 441 bp, Homo sapiens
  misc_feature (1)...(441): n = A,T,C or G
attgattgccttcgtcagngcggggaattccaaagctctccccggagccccagacaccctccctagccccagcgaagtgcagtgcacccagcagtgcagtgaccccagtcccacccgcatccctcttgggctcgggcaccaagcctcaagtggggctgacctcccggtgccctgctgaagctgtgcccccagcaggcctgaccaaaaaaggagtgtccagtcccgcacccccgggaccatagccaagggggtcatcggccccgcgctgtacagcctccgtatacatatgtacacatataaataaagtgcgtccgtgctgcgtgaaaaaaaaaaaaaaaaaaaaaaaaaaaaaaaaaaaaaaaaaannnggggccccttttaattaaaggggcccttaaaaaccccgtaaaaaccccccggggggtttttttttggcccccn

SEQ ID NO: 29638 - DNA, 497 bp, Homo sapiens
  misc_feature (1)...(497): n = A,T,C or G
cgcccccccnnnnnnnnnttttgatcgagtccataggccangccgcggaatttgttccaggcagtagagatcctagcaggaactgccaatctggacatcagcctagccaacatggagatgcactcacctatgacagggacctgtaaggttctgcaaggctgaaggaggtgaagggacagcaacaaggatctcccactaacagaccaccacggagtccaagggagtagtccatagtgtcctcttataatccttttattatctgtaataataagttgatagtaacgttcccactttcacttctgattgtagtaacttgattcttctcacttttcttcatagttcatctaattaaagttttgtcaattttgttaatcttctcaaagaaataactttttgtttgttaatttttttctattggttttcctgcttttattttatttacctcagctctaatctttatcatttccttccttcagtagctntgggttcatttgcct

SEQ ID NO: 29639 - DNA, 482 bp, Homo sapiens
  misc_feature (1)...(482): n = A,T,C or G
cctcgatcgagaccactaggccangncgnggaattcgttgtctgagtttctaattaagaagtgtgaaccccacctgtgggaatcctgtgcaaccaggctagggatcaatactggggattaatttatctttgagtagttcctagaccacaaatttatgtgaaggtttttaagaatccagaaggattaaaacccttatcttccccactgtgccaatgggatttttgtctagttcccgtgtcactggggcccctagctttatgccacggttttggtcccaactcctcccctggtttagattaacctctccctccaaatccaattgcacgtcagcccctgcccatttaatttctctaagggactaacaaccactcggagagctgctacaagttccggggcctccatggtcactttctttgttcccaaaagaggtcattctcctttcccaggaggtgatcatctatttaactttntttttttttttt

SEQ ID NO: 29640 - DNA, 480 bp, Homo sapiens
  misc_feature (1)...(480): n = A,T,C or G
nttcgatcgagaccactaggccangncgtggaattcctgctttaaaggatgtaatgccttttaggtatacataaacattcaaaactgggaaaatatgggaaaaaatgtgggtctcctatatttggattctcattaaaattgctaacaaagttaattttcaccatccctttattcttctgtaaattgtttataaaatgacttgaaaaagaatgcagtcaattctcattacttgaggtagttatgttctatgaagttgccacaaacacgcaaattagtgaatactgagccattgctcctaacagaaatacagggttaggttcttgtaagcctttggtcacattttcaccaacttataaatacgtaagcttggtttatatctgtttctgtttaaagacacattatttaataaatatagacctggcatggtggctcatatctgtaatcccagcactctgggatgccaaggtgggtggatcactt

SEQ ID NO: 29641 - DNA, 510 bp, Homo sapiens
  misc_feature (1)...(510): n = A,T,C or G
gatantaganannnaggggannnnnnnaatcgtagacttggtcacngtcggggaattccacggacagacgcagacggacacagcgacatgccccagacacgttaagggactggttggccaaactcagacacgtggacagggatagacagaaagagacagaagctggggctacgtccatgtggacacagaccacagatgtgggcacacgaatccatccacctgtccacgtgcacacgtgaatgtagcgatagatatttggacatcaaatttggacaccaggtcacggagaaacacaaacaccacccaggaacacgcagacatatgcccatagcatcccacaggcccaggcaggaggtcccaccccagaccctgccccagacgctccctcaccctctcggccccctcgccctggcccccaggttctctgcagagatctctcctggacccccagcggtctccttggcgcccacgaacacaggcgtgcacacgcagcgcacatgcattgagaca

SEQ ID NO: 29642 - DNA, 439 bp, Homo sapiens
  misc_feature (1)...(439): n = A,T,C or G
catctgcccctcacccacccgaggctctgcccaccgcctggacctgcccacccctgaaagactggcccctggctccccgcccctcggtctccacgtggtgtatggatctgtggtcattgtccctctgcagaataaagattgctcaggcctgcctggcnnaaaaaaaaaaaaaaaaaaaaaaaaaaaaaaaaaaaaaaaaaaaaaaaaaaaaaaaaaaaaaaaaaaaaaaaaatnannnggcggggcccctttaaaaaagggggcccaaaaaaaccgggggacatggtggttggtgttttttaaaaacccccatttttttggggccccccccccccctttttttttttggggggggggggccccccccttttttttttttaaaaaaaaaaaaaaaaactttttccttttttgggggtgtggggtccttttttgtgnnccc

SEQ ID NO: 29643 - DNA, 224 bp, Homo sapiens
  misc_feature (1)...(224): n = A,T,C or G
cttggcagaaganggaggaagctgtaccgtgccaacggccacctcttccaagccaagcgctttaacaggagagcgtactgcggtcagtgcagcgagaggatatggggcctcgcgaggcaaggctacaggtgcatcaactgcaaactgctggtccataagcgctgccacggcctcgtcccgcttacctgcaggaagcatatggattctgtcatgccttcccaaan

SEQ ID NO: 29644 - DNA, 518 bp, Homo sapiens
  misc_feature (1)...(518): n = A,T,C or G
gggtctatgacgnnncaggagnnnnnnnnnttttgaaaaccattgtagatcactagtccagggcggtggaattccaccaaaccccagctccgcccccatccacggctcccagaatggtttctggagtccctgcaacagacctgtgaggagagggcagggcagggcctgcctcctgcgtccccgtgatgacctgggggatgcactgggcagggacagcttcctccatccacacagccctgtgggcaccaacaaggccactgtgacttcacacgacagcagtgttccccagctcagctgagccggggtgcaggggacagcacagggcacagtcctgtgccgcaaggccctcgtgctcctggaagcctctgggaggaggcgcccgctggtgggacgtcgaagtccaggcgctctcggcagcgaccccaggacggcgcacctaagctatgccgtggtgcangggacgtgctggagggacaggagcaggcaagagagaagccacctgtggtcccagccccacn

SEQ ID NO: 29645 - DNA, 480 bp, Homo sapiens
  misc_feature (1)...(480): n = A,T,C or G
catcgagtagcctacgncgngncgnggaattcgatgaagggggaatgatctgagccttggttcccctgacacgtcttgctagccccagggttagagtgggcagggcagagccgcgcagcacctgggagcggtacctttcccttgggcagcctggggtcccaggaacaagccagggcgagtggcatgtctgcctgagcagggtgtggccccagaaagctgaggagtgtgggctggcagagagcttcgagggcaaggccacccgcgggggcgtgtgtgtggtggggcttggcatgtgatggcagctccaggcatgccgctgcttgtatggctttctttggcctctgaccctgctgcccattctttccaacatcacagatgaactgcctctcctcctccctgcctggggagcccagtggccagggaggggagtggtggagccagtcgctgtaacactgagcctcagagacgaaccaaaaccag

SEQ ID NO: 29646 - DNA, 589 bp, Homo sapiens
  misc_feature (1)...(589): n = A,T,C or G
cgccttcgcccccctnnnnatagaacacctatccgagnggngcaattcagaccctggcaagcccagagcagctggagaagttccagtcctgtctgagccctgaagagccagctcccgaatccccacaagtgcccgaggcccctggtggttctgcggtgtaagtggctctgtcctcagggtgggcagagccactaaacttgttttacctagttctttccagtttgtttttggctccccaagcatcatctcacgaggagaactttacacctagcacagctggtgccaagagatgtcctaaggacatggccacctgggtccactccagcgacagacccctgacaagagcaggtctctggaggctgagttgcatggagcctagtaacaccaagccagtgagcctctaatgctactgcgccctaggggctcccagggcctgggcaacttagctgcaactggcaaaggagaagggtagtttgaggtgtgacaccagtttgctccagaaaagttaaggggtctgtttctcatctccatggacatcttcacagcttcaccctgacacgactggtnctatgaagaagccacttgtgtn

SEQ ID NO: 29647 - DNA, 466 bp, Homo sapiens
  misc_feature (1)...(466): n = A,T,C or G
agggagaannntttgatgacactagnctgtgtggcggtattcgattacaggcgtgagccaccacaccccaccaaggagcctcttataccactgtctcttcctctgtgattgtgggggctccatgcctctagctgggatgatgatgtccagacctgggaggagcccagggctacccacctctaaacatcagagggcaggaagcaagaaacagtcataggactgccctggagggtgctggggtcacctgccctcaggctgcagctgcctctgtcctggcacctccccttcccagaggctggtgactgcctcccagccattattggatgggtcacaggttaccgtctctttcagctcaccaagcttcagctcctttacttgctgctccaactgcagtgcactcttgttctcattattctggacagagagaagcaatcagtggccacccactataactggagaccccaga

SEQ ID NO: 29648 - DNA, 481 bp, Homo sapiens
  misc_feature (1)...(481): n = A,T,C or G
ntttgactgagatcactaggccangnggnggaattcaagtgaatgacacccaccccagttcctttccgtggcagtaaatgaggcattgagagaagaggaggagataccccgtgcccgagatggcagctgccgttggtgacgtgacaagtgccagtgttagtgccagttccagttccagggcctatgccatggctgaagcaagcatcagcaccagcaccaatgcaagtgccagttgccagtgccagggctagagccatggctggagcaagtatcagtacctgggacagtgccagtgtggttgcaatctcaggctagtgtcagggactcctcctgccagcagtgaaggctggggctgagtcttcactttgttttgctgtgggtagtcaaaagggccccacagcagtgggtgctggggtcctgacttttcaagagtcgaggggtagagtggggttagggagaacctgccgcccatggtatctgt

SEQ ID NO: 29649 - DNA, 471 bp, Homo sapiens
  misc_feature (1)...(471): n = A,T,C or G
agggagaaagaattgaannccnnnnntttgtagatccctagtcagtgtggtggaattcctcgggttttagtctggggggcatgcctttgtttttcaccctccagtcatggtgcatggtggtttctcattggtgatgaagtggagctttcaaaatgaatccatttcagtaaaaaaagtgggtcaactaaatacaaaatattaactaggtgacagtttatttggtgcatggagagggacgacatcacaaaggcagccctcaaattatgcaagcttggaaatcactgcctcatatctccttccagaatcaggagcaggcagcacccgtgtctcagcgcacaccctgtccttgtcttgcacctgatagtgaggcaggagaattgggtctggaggcagggaacctgaggccgattcctgctgactggataccagaggcaacctcttttcaacccctcctttttttgctggcagttg

SEQ ID NO: 29650 - DNA, 470 bp, Homo sapiens
  misc_feature (1)...(470): n = A,T,C or G
agcgaaaaaanttttgtagaccactangtcagtgtggcggaattcacacccctcacatactataaaataaatcttcactgccctatcaaaatacaaataaatcaatctatgctgttctgtccttcttgagaatctaaaacataccacaaaaatacatccccagtcttttgttctgtctgaggttagaattaattcaaattcagaatctgttgtgagaaatgcccaggctttaaaaattaaaaatggatggatcttctctgaactcagggagggcacatacttagatacctacaagacttggaggaattaagagttcacccttcatctcaccaaattttccccatttttctctttcttgtagaaggagagaaaccatgctctctagcaacattgagcaaaaatcataaccactcatctaatttctaagaggcacctccatcgagggccggtctcctgcttctttagacctn

SEQ ID NO: 29651 - DNA, 496 bp, Homo sapiens
  misc_feature (1)...(496): n = A,T,C or G
agaagtgccnnnnntttcgagacactgggcaccgtggnggaattcactagctcctgacacacagtaggtaatcgtaaatgggtgctattatttggcccgacccacgttataggacagaacgtctaacggatgcgtcagaacctgcgccctccggatcttggagggtacagagggcgcccctcggcctcctccctttcggaggtggggacaaggtggaggaagggctgcaggaggaggagctctagcatcgcgacccgccccgtcccgtccagtctggcctgggcgccgcgggaacgctgtcctagctgccgccacccgaacagcctgtcctggtgccccggctccctgccccgcgcccagtcatgaccctgcgcccctcactcctcccgctccatctgctgctgctgctgctgctcagtgcggcggtgtgccgggctgaggctgggctcgaaaccgaaagtcccgtccggaccctncaagtggagaccctggtgag

SEQ ID NO: 29652 - DNA, 471 bp, Homo sapiens
  misc_feature (1)...(471): n = A,T,C or G
aaggaagaaaaaattgagncccttnnnctcgtagaccctagtccgtgcggtggaattctgaaaacacagttaaacatttaagttcatactctgtgccgttgtttttagtgacaggatttcagcagtgcacagaaacagtccctgcccttgaggagctattggtctagttaggggaggtagacaataaacacataaatatgtcaatgtaataagtgccatggagaaacagcagagtaagggtgttagggaatatttatggagtgtgattattttatataagatggtttgagaaggcctccttgggaaggtggcagtccaacagagacctggatgaactaagcaaccaaaccttgtgggtgttgccgagcacggtggctcacgcctgtaatcccagcactttgggaggccgaggcaggcagaccacgaggtcagaagatcaagaccatcctggctaacatggtgaagccccan

SEQ ID NO: 29653 - DNA, 445 bp, Homo sapiens
  misc_feature (1)...(445): n = A,T,C or G
gggcattaaggaaatcagcaggcaaggcatttgcagtcatgttaaggataaaagtgagctatagcagaaggttaggaaggagtgtataggaaggaaattgatgggctgggcgcagtggctcacgcctgtaatcccagcactttgggaggccaaggagggaggatcacttgaggccaggagtttgagaccagcctgggcgacacagtgaaacaccgtctctaccaaaactacaaaaattagctgggcgagatggcgcgtgtttgtagtgcagtccctgccactcaggaggatgaggtgggaggataacctgagcccaggaggttgaggctgcagtgagctgagatcgtgccactgcattccagcctgggcaacagccagaccctgtctccaaaaataaaaaaaataaaatagaaagtatggctaaaatggggtggngattgtgtgg

SEQ ID NO: 29654 - DNA, 567 bp, Homo sapiens
  misc_feature (1)...(567): n = A,T,C or G
gagatgaattcgatcactatcaggggggaatctggtgtggccttcccggttgccccactttgtctttctaaggtaagaagccttcaccttccagcttttgtctggcctgtgctgcgtgggagccactggtctgtgcacatccacggtgggtgagtggccaagacaagcagtgtgatagagtccttggtgggtttagtcatctcggaagtcgtagggcagctatggaaaccactgggttctggaacgttccagccaggcagtggttgttcctcataggtaggtggccttggccttcatcccagcctgggatgctccattgcatttgtcacctagtcactgtatatacgtgcacatttgaccttttggcacagcccaggttccaggtgcgtgacctgccctttntctcattcccttaactgacattatttagtgtcagaggccgagcacagtggctcccacctataatcctagcactttgggaggccaacgcgggtggattgcttgagcccaggagttcaagagcagcctgggcaatatagaaagacctcttccctaccaaaaaaaaan

SEQ ID NO: 29655 - DNA, 465 bp, Homo sapiens
  misc_feature (1)...(465): n = A,T,C or G
aacgagaanntttgtagacactagtctgtgtggcgtaattccctgtaccgnggcatcttccctgtgctgtgcaaggacccagtccaggaggcctggtctgaggacgtggacctccgggtgaactttgccatgaatgtttgcgaggcccgaggcttcttcaagaagggagatgtggtcattgtgctgaccggatggcgccctggctccggcttcaccaacaccatgcgtgttgttcctgtgccgtgatggaccccagagcccctcctccagcccctgtcccacccccttcccccatcccatccattaggccagcaacgcttgtagaactcactctgggctgtaacgtggcactggtaggttgggacaccagggaagaagatcaacgcctcactgaaacatggctgtgtttgcagcctgctctagtgggacagcccaaagcctggctgtccatcatgtggacccacn

SEQ ID NO: 29656 - DNA, 472 bp, Homo sapiens
  misc_feature (1)...(472): n = A,T,C or G
agcggaagaaaaatttganncccctnntttcgcgatcactatccgtgtggtggaattcggaagataaatcaagataaaagaaggctaatgaaaagtattaaagatcagaaaattaaaattgaatgggggaaaaaattgaacagaagattggtcagatagaagcacttgaatatttttttaaggctattttgaattgtttgaattggggaagaatacacgaagtatgaaaaatgaaaaactcaatgaagaatgaatagaagtagaaagcaagagtgaagtagaattaaaagaatctggaagaatgaatgggtcctaggttaagtaaatgtatggtttatgttccagtgtctgtatgatcaagttgtagatgaatttgcgtgattacttagttaatagagaattggtgatctggttcaagtagggaattattgaggacagttagcagtattaacagtgggttattattgagctg

SEQ ID NO: 29657 - DNA, 509 bp, Homo sapiens
  misc_feature (1)...(509): n = A,T,C or G
ggggaaggagnnnaggggnnnnnnnntttgtagacatggagnacngtggnggaattcaatatgaatagagattgattaggatacctttggaaaactcacaaagcttctttagcattgaacgtgaaagtagtagtagtagtagcaataattaacacttgcatagcacttcctatgccagagaatgtttgaaacaccatacatacatacatatatataggtgtgtgtgcatgtattcattcagttaatcatttaaattatttaaggttatgtgcatgaaggcagaatggaaaggtagacagagggcaaagagggaacgactccagaaaatcgtgtcttctattctgagtcctgaagtcttcctgcctttgtttttgctcctcagctcatcggggccctagagcaggatgagcaggcacggcggcagcggctggcttataaggtggagcagctcattaatgccatgtccattgagagctgagaggaggagcctcgcattcctgggaagaggg

SEQ ID NO: 29658 - DNA, 443 bp, Homo sapiens
  misc_feature (1)...(443): n = A,T,C or G
gtctcacgacactgtcgcccaggctggggtgcagtggcgtgatctcagctcactgcaacctctgcctcctgggttcaagtgattctcctgcctcagcctcctgagtagctgggattacaggcacctgccgccctgcctggctaatttttttgtatttttaatagagatggggtttcaccatgttggccaggcttgtctggaactcctgacctcaagtgatccgcctgccttggccttccaaagtgctgggattacaggcgtgagccaccgcacctgacctgacctctttctttccaatttggaccccctttatttctttctcttgtctggttgctctagctacatagtactaggagaactatacccagtcttttgagggtttttaatcatgaagggatgtgaattttatcanatgctttttcagcattaattgaaatgatcat

SEQ ID NO: 29659 - DNA, 471 bp, Homo sapiens
  misc_feature (1)...(471): n = A,T,C or G
agcggaaannnntttgtagatcactagtctagtgtggcggaattcgccccatccctgcttgcccgctcccacagcttcctgagggctaattctgggaagggagagttctttgctgcccctgtctggaagacgtggctctgggtgaggtaggcgggaaaggatggagtgttttagttcttgggggaggccaccccaaaccccagccccaactccaggggcacctatgagatggccatgctcaacccccctcccagacaggccctccctgtctccagggcccccaccgaggttcccagggctggagacttcctctggtaaacattcctccagcctcccctcccctggggacgccaaggaggtgggccacacccaggaagggaaagcgggcagccccgttttggggacgtgaacgttttaataatttttgctgaattcctttacaactaaataacacagatattgttataaata

SEQ ID NO: 29660 - DNA, 473 bp, Homo sapiens
  misc_feature (1)...(473): n = A,T,C or G
aggggagaagnntttgagaccctnnnatcgtatgatcattagtccgtgcggtggaattcctgggcttagctccctagtagctgggattacagatgtgtgccaatgcacctggctttcacacttttaattagtgtgtttttgctgttctgtattagactatgagcaacttaagagcaagaccaagagtctggcattgtacctgctgtatttggcagtcatcaagcatctgttgactgtgtgttaatggtattatagaaggtgctctgaagtgagagtcagaagctgtatggctttgggctaggaccagttgggaagtggagttggtagaggtaaggcaggaggtcctgatttgcacatccatgtttagggcttcattgatcacactaggagggagcgacctgaatgtccatcacagatgaatggataaagaaaatgtggcatatccatacaacagaatattattcagccttana

SEQ ID NO: 29661 - DNA, 508 bp, Homo sapiens
  misc_feature (1)...(508): n = A,T,C or G
ggatagcgtncaggagnnnaggggatcgagaccctgatgacactagggagngcggnggaattccccgacacgagtgcagtaaagaaaaacggttatgagcgtaaagtgacattctcggccgatgggaatagggggaagtccgacactgagcaacgaacgcattcccgcgcctccaaaacctaggccgggggcgctggaaacccttaccggcacccggccaccgcggcagacgcttgctcctgccacgccccgccctcccccgcatcacgtgtctgcactcgctttcctcggattcccggatgtggttgccaaaacaaaggggatttggtgatggaggctttgttagaaggaatacaaaatcgagggcatggtgggggatttttgacatcttgtgaagcagaactacaggagctcatgaaacagattgacataatggtggctcataaaaaatctgaatgggaaggacgtacacatgctctagaaacttgcttgaaaatccgtgaacagg

SEQ ID NO: 29662 - DNA, 501 bp, Homo sapiens
  misc_feature (1)...(501): n = A,T,C or G
gtgccgggnnnnnccncncaatcgagttccatacgtagngncgnggaattcccctcacccctccatgtggtgcatgttgcttgcctggaaatttagacaggaagactctgggccctgccgcccacccgccacagctccgttttcagccacagcatccctgacctctccttggagaatgtgggggccactggacacgccaggccctgatgccggcacaggcagcctcctcttgttcctggaccaaactgagagtcgggctgctatttctcgtggcccagtaacgagatgcagatgaactggtgaggaagagggtttttatttctgcagccggttacaaggagaaggcctggaaattatcaccagaacaagtcaaattacaaagttttccagaggttatgtaccttccaacctagatgtctgtgtgtaagtgtgcattcatctgaagacataagtggntaacttttttcttttttcttttttttgagacggagtcttgctctg

SEQ ID NO: 29663 - DNA, 481 bp, Homo sapiens
  misc_feature (1)...(481): n = A,T,C or G
ntttgatcgcagtccataggccangncgnggaattcttgccagttccagtgattcgtactttcatgtccgagttggaaaccttggcccgacggtgatggactgcacgacttgctggactcccaagtccgaagttcctgcggcagcgcttgctttgtggcgccacctggaacatagagaacggtgggggtaaataaggggagcctgaagtttctgctctgtgcttgcgtgttcgaatcccatcgctgagactttcttctgctttggatcgcttgtcccaggctgacgccgcgctgcgacgtctcccctcgtaggagcctaacgccaacccctgcgccaggcagggatggaatcatcattctcattgtatagatggacactgaggctcgagaacggaaacgacttcttttgagaacaaaagctcagaccgctgagatgttcactctgcactttcagcagcactcacattgagatatgagaaga

SEQ ID NO: 29664 - DNA, 470 bp, Homo sapiens
  misc_feature (1)...(470): n = A,T,C or G
aggggagaaanncctgatgacactagnctgtgcggcggaattcggntgaaggagcactatctcaccttcgagaaaagccgttatgagacctatatccacctcctggctatgaaaatcaaagtgggctcagatgatctggagcggattgaggcccggctggccactctggaaggggatgacccttctctccggaagacacattcaagccctgccctcagccagggccatgtgactggcagcaaaaccacaaaggatgccactgggcctgatacttagctgacatggatttgcagaccccagggtgggcagatgtctccagtggggtcagtgagcacaattccagccaggggccacttggaccaagctccagtcagttgatgggcagctagaggggtgcagaaagcctgtgggcccaggagatggagatgccgtttgtggcgttgatctccttgcgtccttgggcatctccn

SEQ ID NO: 29665 - DNA, 563 bp, Homo sapiens
  misc_feature (1)...(563): n = A,T,C or G
natttgaacacanctcngannnnccanatgagctctgtcgagagaggtgcaattcgatttaaccagaatcccgccttccaggctcctgttcccttttattagctgctgaagattattcccttttcctaactccaggaccctcaggtgtcttatatctaaatcctttgccaggtccccacaatcccagcacctgcctctgtgagctgcccccaggccctcaccttggccctggccagcctcctgtgctcctgctgtctgaaggactggcccctcccccactgctgaagccacacgtacagatcctaagcaacagggccttttgctgggacgtatgcctggattatggccaaccgggaagagagagatgtatcttaaaaagtggaggtggacttctcctacagctctgacggtaacttanattgttgccagcttgaggcaagacaagggaatcatctagttaggggtaaccattaatttattttataaagaaaggaaatgctgaaagtcgtattagtactgagcttagttggagaccttagataagtaagtatctcttaggtaat

SEQ ID NO: 29666 - DNA, 456 bp, Homo sapiens
  misc_feature (1)...(456): n = A,T,C or G
agcgcccatgagaccctagctgatggcgtcanacacagccctgggattctggaaacatgagatccatttgcatactaatccccggctcgctgtgtgaccctgagcaagtctccttcactttctgtgcctcagtgtccttatttgagtaaaaagggaataaaactagatgagtggttttcaaactttaaaacactggaagctctctttgaaaacaaaagatgagaattgaaatggatggcactggaagctgttcttgtctactggggtttggagctgccaggggacctgctcacatccactcctcactcagcccctcccgcccctcccttctccacgcactgtgactgacttccatgtgtgagagcctgcagttaattctcctgtgtcttgaatggttgggagatgagttggtcagacccttagtgaaatgatgtgggaaggaacaggaatgctgtg

SEQ ID NO: 29667 - DNA, 543 bp, Homo sapiens
  misc_feature (1)...(543): n = A,T,C or G
ggtanagaacaaaggaaaaccnnnntttcgaancaccattcgtatcactagtccagagnggnggaattcgcgacctggctctccgcgggccacgtgggtggtgagggcacacgagtgggaagcggcaccgacgtgtttctccccgaccgtggctttgccaaagacttttaatagcattttttaagtgcaaaacgtctaggtaaaaatctttatcatcagtgaccaaattagaatgtatttaatatagtaggtggtttaagaactgttttaacgtaagacaaactgatagcaacattctgctgttttaaaggaagtgggtccgtgacattctgcagctagtccactactccaaggtaactatcgaacttggtttcagtgaatctattttgtttttaactacagtgatttattagctcagtatctagaaattacgtatattttgtgctactgtcatcgatgnngaaactctggttttatttggatttatgcacttggttcccatttggagcctctggtcttttctgngataagtggagtctgccg

SEQ ID NO: 29668 - DNA, 474 bp, Homo sapiens
  misc_feature (1)...(474): n = A,T,C or G
aggatgtccccncnnagccgcccactaagacactggctgagcgcgtcgcancggcacaccgngggatgctcaaagataatgctatgttggaatacctgaagattgcttatgacctggatttgtatggaatcaactattgcgagataaaaaacaagaaaggaacagacctttggcttggagttgatgcccttggactgaatatttatgagaaagatgataagttaaccccaaagattggctttccttggagtgaaatcacgaacatctctttcaatgacaaaaagtttgtcattaaacccatcgacaagaaggcacctgactttgtgttttatgccccacgtctgagaatcaacaagcggatcctgcagctctgcatgggcaaccatgagttgtatatgcgccgcaggaagcctgacaccatcgaggtgcagcagatgaaggcccacgcccgggaggagaagcatcagaagcagg

SEQ ID NO: 29669 - DNA, 494 bp, Homo sapiens
  misc_feature (1)...(494): n = A,T,C or G
agctcnnnnaaggagtgcncnncnnaggccccccatagatnaccntcgnatagatcacactcggacagngcggnggaattcggcggcggctggggctggccgtctgaggcgggtggcatcggctctgctgctgcggttcccccgcctgcccgcccgggagctgtcggccccggcccgactctatcacaagaaggttgttgatcattatgaaaatcctagaaacgtggggtcccttgacaagacatctaaaaatgttggaactggactggtgggggctccagcatgtggtgacgtaatgaaattacagattcaagtggatgaaaaggggaagattgtggatgctaggtttaaaacatttggctgtggttccgcaattgcctccagctcattagccactgaatgggtgaaaggaaagacggtggaggaagccttgactatcaaaaacacagatatcgccaaggagctctgccttcctcccgagaaactgcactgct

SEQ ID NO: 29670 - DNA, 458 bp, Homo sapiens
  misc_feature (1)...(458): n = A,T,C or G
gccgcccctgatnacactggctgatcgcgtcancacaggcnnncangtgatgctgtcatctcctggggggccactgaaaggagctgcctctttgtagctctccttggaaactacatcaggctgcgaatctgaaggaagcaaatgactgttctgtacttaccttctatgcctaagatgcagggcaagactctcgtgcaccagcataagagaatgcacagcattcgggagggaaccaatgccactgcaccctgcaggcagggccacctgagcagggctgaggcacgcacgagggaatctcttcacagcccatcttactgctggcaaagcagcttttccctgtaggtcaggttttcctaaattaggagccgagtctcacagacactttgatcacgaacctttcagtttctctcctaacaatgccatgggcatatgcctgtctatcccatcctttcagcagg

SEQ ID NO: 29671 - DNA, 465 bp, Homo sapiens
  misc_feature (1)...(465): n = A,T,C or G
ccccgcccactgagaccnctgnctgagcaccctaggaagngcggnggaantctcgctgctcagcccgatccccgccaactgtgcaggcggctgactttcagcggcagtttcagcagcgaggactcgagcgctggctgcagcgacaccatggatctctcctttatggccgcgcagctgcccatgatggggggagctttcatggactcgcccaacgaggacttcagcaccgagtactccctgtttaactcctctgccaatgtccacgcggctgccaatggccagggccagccggaagatcctcctcggtcctccaacgacgccgtcttgctatggattgccatcatagctacgctggggaacatcgtggtggtgggcgtggtgtatgccttcaccttctgaggacggcacaccctgcaccaccatggggtgaggcttggcacgtagctctgacttgctgtcggcctt

SEQ ID NO: 29672 - DNA, 462 bp, Homo sapiens
  misc_feature (1)...(462): n = A,T,C or G
ctttcgacaccctnatagangacccttagnacanccggnggaattcctcttcctccgttttctggtgtgctggaacgttcatcggaatattatgaatgatcactctgtcacagcttgtttattataatgcaggcaatcaattacacatccccaatgctggccggcccgcatgaaatttatatgctcagcacaaaccaatgtgaaaatggaatctcatttgccaaatgtctttctccccgtacagcacgatgattacagtctgtgtttgtttcaacagtcgtgtacaactgacagtgccatcatttactgcctggctcaggtcacgttactctaaggctttatttatggtgttacgaagggcagcacaggaaaaggacacgggtgtctgtcagggatggcactgtgttaaaaagtgggcgtgcaacgtccgaattcccgggcagccgctgcaatctcagcccn

SEQ ID NO: 29673 - DNA, 457 bp, Homo sapiens
  misc_feature (1)...(457): n = A,T,C or G
cactgatcaccttcggactgatcgcccgtagcacacngcgtnngcagaattttgacatgacttacagagtgcagtttggagatctttggctttcaatccgagtttgtctcctctcaaagcagaagtatggtgcactggtcaataactttgctgcctgggatcatgtaagtgctaagctggagcagctgagtgccaaggattttgtgaatgaagccatctcccactgggaactgcagtctgagggtggccaatctgcagccccatcccctgcctcctgggcctgcagtccgaaccttcgatgcttcacttttgacagaggggatatcagtcgcttccctcctgccagacctggcagcctgggtgtcatggagtactacctgatggatgctgcctccttgctgcctgttctggccctcggcctgcagcctggggacatcgtgcttgacctatgtgcagn

SEQ ID NO: 29674 - DNA, 500 bp, Homo sapiens
  misc_feature (1)...(500): n = A,T,C or G
aggagccaggggnnnnnnnactgagaactgagtacgtgtcgnggaanccattgaacgccagttaaagatacgcctgtaatctgacttctttgggaggccaaggcgggaggatcacttgaggccaggagtttgagactaccctgggcaacacagcaagacctgtctctacaaaaataaataagtaaataaatagccagatgtggtggcacacgatttgcagtcccattactaggggcggggaggggcgctgaggcaggaggtttacttgagcccaggagttcaaggctgtattgtagtgaactaagatcatgccactgcactccagcctgggctacagagctagaccctgtctttaaaaaaaagaaaagaaaaaaaaaagtatgtacactgaaatatttagggaacaataaaccaatgtcgacaatttattttgaaatgcatccagagatgagttggattgatggataaatagtgtaataggtagatgtgagataaagcaa

SEQ ID NO: 29675 - DNA, 457 bp, Homo sapiens
  misc_feature (1)...(457): n = A,T,C or G
ccttagatcccntaatgaagatcctcgcacagngcggcggaantcacgggaacgtacttgcggagctcaccccagaagaaatagacgatttttgatacactttgtattgcccattgactgagccagacgtgctggtgcacacgtagggcaggcgaaggccaaaccgggagggggcggccacgccctggattctccaatagatacactaggctacctagctggggcctcacaggggtcctgctgcctggtgtcttgctgatcatcaccctggtcacttcatgctgattagaatgacatctctttcgtctcctattttgttacccaactcttcctatttttgttaccaatcactgtgctctctgccgccccctggctccaggctaatttttctggaatgaattgagaaggtggcgtgctggcctgagctgatggaccacttggtgttttgcgttttggn

SEQ ID NO: 29676 - DNA, 466 bp, Homo sapiens
  misc_feature (1)...(466): n = A,T,C or G
gccctcccactgagaccntcggactgatgaccgtagtacagagcggtggaattccagcggttgctggttctgacgggttgtagtctgccaggacaattagttatgactactatcagaactggggccgtgatgggggtccccgcagctccggtgggggctatggaggggggccagcagggggtcatggaggtaaccgaggctccggaagaggcggcggcggcggagggggtggtcgaggcggcaggggccggcatcccgggcacctgaaaggccgcgaaatcggcatgtggtacgcgaaaaaacaggggcagaagaacaaggaagcggagaggcaagagagagctgtagtacacatggatgaacgacgagaagaacaaattgtacagttactgaattctgttcaagcgaagaatgataaagagtcagaagcacagatatcctggtttgctcctgaggatcatggatn

SEQ ID NO: 29677 - DNA, 460 bp, Homo sapiens
  misc_feature (1)...(460): n = A,T,C or G
gccagccccctgatnaccntcggactgagcgcgctagtacaaacgggccctaggatcaaattctggctgagcccttttaaaaaattttttaaaatagggaaatagcagtccctgcttggttcttgcctgtgaatcaagcgctctctccagcttctccaaccgaggcacacaggatatcaccgatgccagcgaaagggggctccacatgcacaagctggggtctgggtcagtgcacgctgcgctggcggagctggtggccctgccctgtctctttaccctgcagccacggccaagcgcagcccgagatgcccctcggataaagtggaccaaggtgcggactgcgtccggccagcgacaggacttgtccatcctggtggccaaggacaatgtcgtgagggtggccaaaagctggcaaggacgagtgtcactgccttcctacccccggcgccgagccaacgcc

SEQ ID NO: 29678 - DNA, 456 bp, Homo sapiens
  misc_feature (1)...(456): n = A,T,C or G
aggcggagncccccaatgatgatcatgatgatcctcggancnncnggnggaattncgactgtctttagcaatgagctccattatgtggcgaatgagctgaatggcattgtgggagggaagaacacagcggttgccatagctgtatggtctcacttcaacaccttccctttggaagtgtacatccggcggctcaagaacatccgtcgagcagtggttcggctcctcgatcgaagcccaaagaccgtggtggtcatccggacggccaacgcccaagagctgggacctgaggtgagccttttcaacagcgactggtacaactttcagctggacaccatccttcggaggatgttctcaggggttggagtatatctcgtcgatgcctgggagatgaccctggcccattatctaccgcacaagctgcatccagatgaagttattgtgaagaaccagctggan

SEQ ID NO: 29679 - DNA, 362 bp, Homo sapiens
ttctgcacagccaaaaaaggacaaaaacagcaacaacaacaaaaaaaacaaaaaaaaaactatctatctatctatctatctatctatccacataaacgaataaactgaacctacaaaatgggaaaaaatttttgcaaattatatttgaaaagggtctagtatctggcatctataaggaccttaaacaaatttgcaagaaaaaaaaaacaagcccattaaaacgtgggcaaaggacatgaatagccacttttcaaaggaagacatacatgtggccaatagtcatatgaaaaaatgctcaacgccactgattattagagaaaggcaaattaaaaccacattgagatatcatctaacaccacgcc

SEQ ID NO: 29680 - DNA, 358 bp, Homo sapiens
  misc_feature (1)...(358): n = A,T,C or G
ctttatgaaaactttatcagggaatttgaacacaggtaaaagcctctcatccgtttttcactttggagatgagtacattgatgctcggtggtgctcaaagactggtggcttttatttcagggtgaatcctctgtccctcgtggaaatcattcttcacgtagttagacagatgactggtaagtctcactttgttttataaaggagcagatccaaatggtggttaaaattgaaatataagttaactgaacttttgtgttttctgtatcagatattatgcttttattatactttatggncaaaacctaaagattaccctacctaagggtgtcttggttagcagaaaccagtctgttgatgt

SEQ ID NO: 29681 - DNA, 358 bp, Homo sapiens
cacctttctttatcaggccccaccctcagctcaagtagaaagcagcgttttccatgctgtggagagtctgccatgtggccctgcctggcatggcaaagccaatctgtaattacagcccctcttccaagagccaggcctcttacaaggctgcaaaccctggccttctctaaaatggaaaaaggcaggcggcaggcccccacctaattcccctgcctgacttatctccctgggccacccggtggttctgggggcaatcagaccctgggaaagaggaggggagctctgctggtatctttggccacactgcctggggctggacaacacgtttctttccaccacagcgactgaagttccatag

SEQ ID NO: 29682 - DNA, 357 bp, Homo sapiens
  misc_feature (1)...(357): n = A,T,C or G
ggatcctcgggccggagtcgggggggctccggccgagaacaacataatggtgtggaacgcggtcattttcgggcctgaagggaccccgtttgaggatggaacatttaaacttacaatagaattcactgaagaatatccaaataaaccacctacagttagatgtgtctctaagatgttccatccaaatgtctatgcagatggtagtatatgtctggacatacttcagaaccgttggagtccaacctatgatgtgtcttccattctaacatccatacagtctctgttggatgaacccaatcccaatagtccaacaaacagccaggctgctcagctgtaccaggagaacaaacgggaatn

SEQ ID NO: 29683 - DNA, 366 bp, Homo sapiens
ttttactgacacagagtttgggttttattgttatgtgcttggctgggtgcagaactgccctcaccacccctggccaccctggcctcttgggaggaacaggcagagaggtggcttcagatggctcttggctgccactctaggcctcggggcttatacaatgagcagtgggctctaccttccaataggaagtgcaaactaattcgaagtcacacttcaccaggagggagagatggtcttggctgaaggcactttaatcagggagcaaacccagtgccggagtttgtcttctcgttactctgataaatctagacaccactctcgtggagaaccagcactgccggcagctggggttagtgcactgactga

SEQ ID NO: 29684 - DNA, 359 bp, Homo sapiens
aatgagttctggtggtaccaactactacatcatgttcctcctgaaatgatgtaagagaaagtgtatagcatcacctatctttattcaaaagtgtaaactttctttgtcaatctatggacatgcccatatatgaaggagatgggtgggtcaaaaagggatatcaaatgaagtgataggggtcacaatggggaaattgaagtggtgcataacattgccaaaatagtgtgccactagaaatggtgtaaaggctgtcttttttttttttttttaaaaaaaagttattaccatgttttttgggaggcgggtttacaacactacaagctttgagttaaaagggaaagaggaaaaaaaaaaaaccg

SEQ ID NO: 29685 - DNA, 358 bp, Homo sapiens
attgattgctcataagttaaattggtaaagttagaaacaactattctaacacctcaccattgaaatttatatgccaccttgtctttcataaaagctgaaaattgttacctaaaatgaaaatcaacttcatgttttgaagatagttataaatattgttctttgttacaatttcgggcaccgcatattaaaacgtaactttattgttccaatatgtaacatggagggccaggtcataaataatgacattataatgggcttttgcactgttattatttttcctttggaatgtgaaggtctgaatgagggctttgattttgaatgtttcaatgtttttgagaagccttgcttacattttatg

SEQ ID NO: 29686 - DNA, 377 bp, Homo sapiens
ggacgcaagagagagagggaagaggtcaggctcctttaaacaactagctcttagtggaatgctcatgggaactaatggaacaagaactcactcattactgcaaggaaggcaccaagccattcatgtgggatctgccccataactaaaacacctccccccaggccccacctgtaacaccggggatcaaatttcaacataagacttgacagggccaaacaaaccatattcaaaccatagcaattaacttaacaaaatgttatgaaataactgacctgagaaaattggaaagagaaatatggcagtggggcaagagctaaattctcatctaccataaagggaattaatgggtgttgtctaaacttgccaaaccaggacat

SEQ ID NO: 29687 - DNA, 370 bp, Homo sapiens
ggtttttaagacatagccgtaccccttttgttcataaactaaagctccaagctgccccagggctctgcaggggccaccattgtggcttgaaaacctgatctttcagccttaaaaccttatgcttcaggtcctccttgatctgatgagcatatttataatagtccacgattctggtggacagccctaaaacgtactttttaaaaatggggaaatgcatgcctgcatttaagcccacaaataaatgatcgttaaagaataggatggcttatatcgttaatgaaaccacatcacgtacgacagctctgaaaacatgcttcatctgaatctagataacgaacatgatatactgtcattccacgccattcgctgt

SEQ ID NO: 29688 - DNA, 377 bp, Homo sapiens
gcagtccttggcaatgtggccacctctaccgcagttatagcaggcttcatcctcctgaagatcacaatccttggcaagatgaccagactcaccacagcgataacaaatatctggaagagacgaggaaacaaactggaaacctctatccgaggtaaaaccacctctgccacggcttctcattccacgacctcctgccccccgaggtctgcagtctcctgaacccagcagccatctacgccaacaacgagatcagcctgcgtgacgttgaggtctacggctttgactacgactacaccctggcccagtatgcagacgcactgcaccccgagatcttcagtaccgcccgtgacatcctgatcgagcactacaagtaccca

SEQ ID NO: 29689 - DNA, 370 bp, Homo sapiens
  misc_feature (1)...(370): n = A,T,C or G
gtaatagtaatcataattggacgatgacactctactgcaatagaagtcatgtgaatgcggtttgcttcccccttccctcaatattttattatactgtccctcacataacagaaaccatgggaaacaaaaccagggggaaggaagaatggcggcactcacagctgcggtttattacagtggaagaatacaggttaaaatcagcccggggaagaggcgtgtggggcagggcccaggagccaccaatggaaggaccaggagtccttctatttgctttangttggtttgggttgggttggttttttgggttttcgttgtgtttttttttggttttttgcgttttgagatggagtcccactctggtgtgagcttc

SEQ ID NO: 29690 - DNA, 373 bp, Homo sapiens
aacattttgtattgaatcaaatcgcctcagttcatgtttcattcattccttgtaactttttgtcaccctctattgggagacattctcaagacattaccaaaaatcacctaacgacagaaatgtttgtgtttacagcatggcaactcacagtgtgacgtgggaccaggagcacagatcactgaagagactgttagaaatgcaacttcaggctggacgtagtggctcatgcctgtaatcccaaaactttgggaggccgaagcgggcggatcacttgaggtcatgagtttgagaccagcctggccaacatggtgaaacttcgtctccaccaaaaatacaaaaattatctgggcgtgatggcatgtgcccgtaatcc

SEQ ID NO: 29691 - DNA, 364 bp, Homo sapiens
caaaaatttaaattcccaataataagtaaaattgaatcaatatttttaggcagatacatggggaaatcaataataaaagattgcttactatatgtctggtactctactgattaaatactttaatggcatttaacttattgaattaccttttaaataaatatttaaattaaatagttaatagtatttaaataggttaatgacttttactcaaagataagaagctgaattcattgactaattaatgactaacttgtcacacagctagtgggtggcagtcagtagttgaatttggatttctgtgactcaaagacctgtattcttaactgctgttttattatactgcggcttttgtgagaatataata

SEQ ID NO: 29692 - DNA, 377 bp, Homo sapiens
gtttaaatcagaaacaaattctcaagtaacaagaaccctttcccttttttctgcatcagcagggaaagggtgtgtctttggattttatttaaagcatgaaatttttttttctgagagaggaaagaaaaaacaaacacaaaaccaaaaaccaaatccctaaccaaaaactttttttagaaaagaaaagtacacagccaattacacaaatggaaacaaatcctttagtatagaaaaaaaaagaatatttgaagctcctaccaaacaaggaggaaaagaaggggtacaaagaaaaaaaagcccaaagaaggataaataaaaaataaatgcacaaagctaacagacacaggtaactagaattatatgcctttaaaaagttt

SEQ ID NO: 29693 - DNA, 365 bp, Homo sapiens
gttttttgctcgattctgatgacatggttgttcctcctcacagctccaagaacctgtaccctttcctgctcccagttattcaactgagtacagatgtttcacagcctccacatgtttatcttctggaagatggtttagaattatggttagtaactttggaaaacagtccatgtattacaccagagttgcttcgtatatttcagaatatgtcaccacttcttgaactaagttcagaaaatcttagaacttgctttaagatcatcaatggttatatctttttatcatcaacagaatttttacagacatacgcagtaggtctatgccagtccttttgtgaacttttaaaggaaattactacagaaggg

SEQ ID NO: 29694 - DNA, 345 bp, Homo sapiens
  misc_feature (1)...(345): n = A,T,C or G
gaattaaggcatataaaaaccacatatgtggtagtcatctgctgctatgagggctgaggattagagaaagctgggcttcagatcaagaagaaaggaaaagaaagaagtgcagggaatatactgatgcctaagttacttactgcttctgagccctccagtaggtctagctgtattactgctattcgattttataagacattcctgtatttctatagtaatttccctggttttggcttaagctagctgaaataaatttcagttaacatgcaaacaaaaaaatcttaattaatacagggacatactttttttttttgggngggggggggtggaganagnnnncnnnct

SEQ ID NO: 29695 - DNA, 379 bp, Homo sapiens
ctggagtgcagtggtgtgacctcggctcattgcaacttctgcctcccgggttcaagggattctcctgcctcagcctcccaagtagctgggattatgggtgcataccactgtacccggctaatttttgtatttttagtagagatggtgtttcaccatgttggccagcctggtctcaaactcctgacctcgtgatccgcccaccttggcctcccaaagtgctgggattacaggcatgagccaccgtttctggcccactcatgagttttgcccactcatgagttttgctcaaagcagctgatggctcgggcttccttcccaaaggcatcatctcattgagcacctggtggaggtcatccatctatgtgtgtaactcttacag

SEQ ID NO: 29696 - DNA, 358 bp, Homo sapiens
cgcggccgcgtcgaccaagaaaatagataggccaggctcagtggctcacacctgtgatcctagcattttgggaggccaaggcaggaggatcacttgaggtcaggagttcaagaccagcctggcctatttattttcttgtgcttttggcgtcatatctaagaaggttctgcctaattcaaggtcactcagatttactttatacttcttctacaaggggttcatagctttagctggcacaggtagggctatgattcattttcaattaatttttttgtatgggctgaggactaaccccacttatttttttacattggatatctagttattacacaccatttgttgaaagactttcatttct

SEQ ID NO: 29697 - DNA, 376 bp, Homo sapiens
gggaggcgcggtgaggagtcaggcttaaaacttgttggaggggagtaaccagcctgctcctctcgctctcctcctcgtctgcgccgcgtttcaaagagaaaattcctgttccaagagaaaataaggcaacatcaatgaaggagagaagagccagccagaaattatccagcaaatctatcatggatcctaatcagaacgtgaaatgcaagatagttgtggtgggagacagtcagtgtggaaaaactgcgctgctccatgtcttcgccaaggactgcttccccgagaattacgttcctacagtgtttgagaattacacggccagttttgaaatcgacacacaaagaatagagttgagcctgtgggacacttcgggttc

SEQ ID NO: 29698 - DNA, 365 bp, Homo sapiens
ccagacatgggaaggaaaagtcagggtcttttgtccgcaccactaggaactattgtgttactggatgattctgagaatgcctttataaaaaaaccctgatcacatcacgaccgttttactatctgcgaggccaccactgtgctggctactgtaacacttattggatttctttctaaacctgaactaggtatttcctacttgcctcctgggatggctaggaaaatatacactaacggtaagatacgacgcgtacatttatcctatttgagcgcattaagacactctttatccgcattccttaaatcatacggaatcggccaatatctctgtggggcttggagttgtttactttgctttctaaggta

SEQ ID NO: 29699 - DNA, 367 bp, Homo sapiens
ctggtctcaaattcctgacctcaggtgatctgcctgcctcggcctcccaaagtgctgtgattgcagacgtcagccaccatgcctggcctgaaaccttttttaggtaaagttgaattccatccttaaaagtttctgttatatcctatttagccattttctattgtctcccaaagaattcacatcaaaaaaacagctttgaactcccccttcaaaggaaacagtcgactttcataattagcatctaccattatccccaaatcttattttattcattgacttgaaattttttccaattgctttttttttttttttttagggttaaaaccaaaggtttactaggccaaaaaaaaaaaatacctctttgttg

SEQ ID NO: 29700 - DNA, 377 bp, Homo sapiens
gggatcgagaccatcctggccaccatggtgaaacctcatctctactaaagtacaaaaagttagctgggcttggtggtacgtgcctgtggtctcagctactcaggaggctgagacgggaatcgcttgatcgtgggaggcagaggttgcagtgagccgagatcacgccactgcactcctccagcctggcgacagaacaagactccatcccaaaaaaaaaaaaaaaaaaaaggattttccctttttttggggaccttaaagggccaaaaaaggcataccggtcctaaggttaacttggttggccgggagttaaccaaaatttttatttcactttcccagtttttaacctttaaaatggaagttggtttttgggaaaaggg

SEQ ID NO: 29701 - DNA, 368 bp, Homo sapiens
gtttcaacatgccttcctcactaagcctaatcattcctggctttagatttaaagtgaaagacacaagactcttcctttcacttgaacacttagaggtcattgcgggattattaattggcctaacttcaatattgttgtgtctcataaaactggaaagctttctgaggcgaaagagagagagagagagagagagagagagagagacactgggctttggctttcgggggaacagttacaacataccccacatttatggactacctgtactgcctcatatgggcatagctcttggtgcccccaattacaatagcaacatgagagatcacccgccaccataacagactctataagagggagaaagatgtaaa

SEQ ID NO: 29702 - DNA, 222 bp, Homo sapiens
cccgagaacctgggattacaggcatgtgccaccatgcctggctaattttgtatttttagtagagatggggtttttccatgttgggcaggctaccaacctcaggtaatgcactcgcctcagcctcccaaagtgctgggattataggcgtgagccactgcgcccagcctaatactttttttaaaaaaagtacagtaacttttaaaaaacaattcgacgcggccg

SEQ ID NO: 29703 - DNA, 373 bp, Homo sapiens
  misc_feature (1)...(373): n = A,T,C or G
cttcatactagtaatgtgggcagattctataccccaacccttattcaaaggtcgcctaacactgactcaggacctctgtctctgatgtgcttgaagttttaatcctaacacgtcatgtgttaaagaccactcccccaggagctctgaacaagtatatcaggtatacctggaacaagaccatactgtgatcgaaatctaactttaaagacccaaatcatagaaccacagaagacactgtttctgtccaactatctgttctgccatcgtttgtgtctatttcccacaaaccatctcattataatttagggcacacaaaaggctgatacaacagggttacttttcaaaggtctggaggtgaatagatacaatgcan

SEQ ID NO: 29704 - DNA, 378 bp, Homo sapiens
gtgggatgggtggggggtaacgggggaaactggggaagtggggaaccgaggggcaaccaggggaagatggggtgctggaggagagcttgtgggagccaaggagcaccttggacatctggagtctggcaggagtgatgacgggtggaggggctagctcgaggcagggctggtggggcctgaggccagtgaggagtgtggagtaggtgcccaggcatcgtgcagacagggcgacatcagctggggacgatgggcctgagctatggctggaaagaagggggagccaggcattcatcccggtcacttttggttacaggacgtggcagctggttggacgaggggagctggtgggcagggtttgatcccaaggcctgggcaacg

SEQ ID NO: 29705 - DNA, 375 bp, Homo sapiens
  misc_feature (1)...(375): n = A,T,C or G
ccgagattacacctctgcactcttgcccgggcaacaaagcgagactctctctcaaaaaaaaaaaaaaaaaaaacccccccctccgggttggttttttaatccaaaaaacccttataaacccttataaaatcttaaagtttctttaaactgtttgggaaaaatacggggggaagggttaaaatacaaacgggctgtcccaggggggattaattcaagagcaattacccttctttgtaaacccccaatggttacccttccttaaaaagggaaaacctttcatttttattaaaaccaaacataaaataggttaactaccccccctgaaaaattctgtttaggagcaccttatgggttttatgcatgcgggccttacan

SEQ ID NO: 29706 - DNA, 337 bp, Homo sapiens
ctcctactcgtcctgggaagggaacaccggcccagggcttgctcctctgactcctcatccccgctgccaaacccagagcatcttttcttccgggtccacattcccgcaggaccttcgatctttttcccccactgcgcagctttcaaaagcccccaagctctgggctcttcaagcctcccccaagctctgggctcttcaagcctcctccccatatagaaaacctttttaaaaaattatatataccatggccaccatagaagctttaaggaccctaaatcataaactctgtagtttggatagaaggcttataaaaatatagatagctctcaaatgggta

SEQ ID NO: 29707 - DNA, 369 bp, Homo sapiens
aaacaacataaaatatattacatttcatgtgtgataaatgaagttaggaaaatttattaagtactttcctcaatcaagaccatgggtgtagacagccctttcatgaagacataaagtaatatctgaactatgagtcaagttaactaggaaaactttctaggcagagagaacagtatatgcaatagaactaggcagaagaaaatacagtatttttttgtaagaactcaaagaaacttacagcaataaattgtgaataagatttgggaaggggtcacggtaatgatggtggttcataaggctacaaagggaagaccatgcaagtcttataaatgaatatatttggtctatctactactaatgtgaagatgc

SEQ ID NO: 29708 - DNA, 369 bp, Homo sapiens
caaacaccagctgcccggagcctggccctgggccaaattcaacgctcactgcaaacaggtagacaccacgctcaggggctcggaagtagccatgttcagggaagtagctgctgccaatgttgatgtatgtggtgttgaacttcactgtctgcagggcagccgtcccttctgaaaagctggcatagaaggccacaggggatcctgaaacataacaggacagtgcttagtgattcatcccttacaccattgggtgggaaattaaaccctgagacctaccgtcctcaccttattagcaatggaaataggtcactatttctagataacctagatattcccaacagcagtgttattgcaggagaaaagctagag

SEQ ID NO: 29709 - DNA, 377 bp, Homo sapiens
gcttcattgagctgctgagcagaagctgaaacacagaattctaagcgttgctgagacccactgacctgcagacctcatagtgggtgcccaggatgttgtcctacggagagaggctggggtcccctgctgtctccccactcccagtccgtggggggcatgtgatgcgagggacggcctttgcctacgtgcccagccctcaggtcctacacaggatcccggggacctctgcctatgccttccccagcctgggccctgtggcccttgctgagcacacctgcccctgtggggaggtcctggagcgccatgaaccactgcctgccaagctggccctggaggaggagcagaagccagagtccaggctggtccccaagctgcgg

SEQ ID NO: 29710 - DNA, 369 bp, Homo sapiens
ttaaattacagaaatacttaaggtatatcctttcctccagtattaactaaagatacatatatgtaaacagtcatagtataggagaagataagggaaagctgacaggactcatgcagtggctcacagctgtaagcttaactactcaggaggctgagacttggaggatcgcttatatccaggagttggaggctgccgttagctatggttgcatcactggactctagcctgtactatagagtgaggctctgtttcaagaaaaaaaaaaaaaaccctataagcaggttgtttcctaaagcctcctcaaaatctttttggcaaaggggagcttccttttaaacaaggacaacaagaatggggggttatttcctg

SEQ ID NO: 29711 - DNA, 377 bp, Homo sapiens
  misc_feature (1)...(377): n = A,T,C or G
gacgggatgagctgtcaagaacatctggtgtataaggatccgatgctttccataggtgatgcaaatgcccttggaaactggtgatttagctgttggattatctggaaaggtagccttaacctgtgaatgagaagactcgggtcgccccgctcagcggacccagcagcgtcgtctcccttctcagaggtggccgggcctccggaacgcgctacgaactttcctttgtcgccgtctctcgaagcggagccctcgtgtggggatcccccgcccttcggccacaagggaggttgttatcctcggcagatctcccgttctcactcttggggatacgcctctctccctccatgaagccacttgccctttctggtacttagcan

SEQ ID NO: 29712 - DNA, 137 bp, Homo sapiens
ctaagatcccccactggaaaccattgtcaccctgactgaccgtcctttggtctcccctgaagctttggctggtggttctggaccctgggctggccaaaaaaaggaggcttggtggcattacttggcgacccgggcgg

SEQ ID NO: 29713 - DNA, 368 bp, Homo sapiens
  misc_feature (1)...(368): n = A,T,C or G
tttgttttctatttattctaaatgatcatatttctttatgtaggatgcttaggattctgtggaaaagctgatggtatttttaaaaataaatagtattaaagaagtgtttcatgaataagtgagaaagaaccctcctgtttttatgggtttgtcccttcttgttagtatatggtgagagggaaaagttatatcacagaagatggaagtctcacctaagtaatcttgttcagtaatgcttacatgtttattctgagtttgtgcagaagttactaagtctcatcagaaagaggagaatgtagacttcaaaatagttgatttggaaaatattacagaatgtttggacataaagtttttcaattcactgcttn

SEQ ID NO: 29714 - DNA, 379 bp, Homo sapiens
tctggtgcacgcttataatcccagctacttgggaggctgaggcagcagaatcgcttgaacctggaagttggagattgcagtgagccaagatcacaccactgcactgcagcctgggcaattgagcgggactctgtctcaaaaaaaaaaaggggttttagaggtctagggaagggcctaaaatggactaccaggccccaggggaggtggaggctgttttttttacaaacaccctggaataacaacgttctaaactagcatatttcaagtacagccttttttcaaaaaagctggggaaattggttaaggcggttaataaaaccatgaaatctcggtttttttcctggaaacactttttccctaggtaaaagaaaaaatacct

SEQ ID NO: 29715 - DNA, 185 bp, Homo sapiens
ctcgacctcccaaagtgctggattgcaggtgtgagccactgtgcccaacccatattgctttaaaaaataaaacaatgttaataattaaaaataaccacaacctcaccattgaccatcctgtttagttttctcaaatttttttcaagtcatacatatcattaaaaaaaatgaggtcgacgcggccg

SEQ ID NO: 29716 - DNA, 362 bp, Homo sapiens
ctcgaactcctgagctcaagtgatgtacctgccttggcttcccaaagtgctaggattacaggtgtgagccaccgaacccatctttactcaccgataatatggtcaagtttcaaaaaatattttagccattctaataaatgaggagtggtatcccattgcagttttaatttgcatttttctgatgaatgaatgcaataatcttttcatagatttgccatcagtgtatctttttgatgaagtatgtgatcaatctgcccatttaaaaaaatggaaggctgggtgcaatggctcatgcgtgtatcgcagcactttgggaggctgaggacggtggatcatttggggttaggagttcgagaccagcc

SEQ ID NO: 29717 - DNA, 372 bp, Homo sapiens
  misc_feature (1)...(372): n = A,T,C or G
acaggttgtaccactctttctgttcttttacgaaggcagcagcgtttgttctattgtttatatttggtaacttctgagtgacacgtctctcctttgacatgcattgagtctttgccccaggaggctacagtgactcataagtttaaaaatatcacaattcttaaaagatcaggtttcttttgtcttctatttataaagagctcatcgtaaccccttttatcacagtcaagagtaggttctgaaagatagcactggggtgcatttggctttttgctttttattttcatgttgagcaaactctgcctactggtattacatgagttctcagatcccacaggaaatatctgcaaactatttttcccacttgacaan

SEQ ID NO: 29718 - DNA, 291 bp, Homo sapiens
  misc_feature (1)...(291): n = A,T,C or G
cattnttcctctttgtttataggagcatcctcttctatgtactaacatgggccatgcacacactgatctataaaaaacctctgaagaataaaatgactgccgacccttcttttggacctaaattctttgtgaccctatcttaccacgtatcacagagatactttagactaatgtcttcagaattcgctcaaagcagaaacttgtgtgtatatattgggggaaagaaaataggtctacttcttataaaaaaaaaagccttgacctacttgaatgcgatgatgttagggggct

SEQ ID NO: 29719 - DNA, 381 bp, Homo sapiens
cttggatgacttttattggaataattacatctgtataacaaagtggagcttactatgtttgacattgtttttctccaaagagaagtacgaatattagctttaaatccacatatcaagataagcactaaaacctaacagtctgtttatcactgattccacttcaaccttactttatttgtgaatcctgatacaataaaagaaatagtactttttcccctagataaaataggtccttgaaaatagtatttgtacaatctagttattcttacaagcagtcaaattctaaaaagggaataaacgaattttcagggtatcaagccaagtttaccaagtgggcttattatatgtatttataattcttcctaggatagccaataatag

SEQ ID NO: 29720 - DNA, 361 bp, Homo sapiens
gagagggcccctgttaggggtcagctgggtctgggtttgaatattgcatttgaatattttaccagcattgatgtcggataaattatttagtccctgtaagcctcagttttctcttcttctacacctctcgtcgacgcggcacgataaaccctatatatgaatggtatatgtgaccaaatttgctaaggacctaaaaactgtatgtcgcggaaaatcagggtttattcatcatcataggtcggcacctcgtaatgtgatatacaacccttacctaaatgtcgcaacggggctcctgtcgttaagctgttttaaagacgatcataaaacacttcttttttgggtccggggtggtcattaatat

SEQ ID NO: 29721 - DNA, 373 bp, Homo sapiens
  misc_feature (1)...(373): n = A,T,C or G
cactgcaggggctggcttcatgccttcttgaggttctggggcaagagaaagaccagattataaagctggggacagctggacatggtgatgtttgcctgtagtcccggctgcttgggaggctgaggtgggaggatcatttgaggccaggagttgaccaccctggagaccttgnctattttctcttattattattattttttttttttgagagtctaactctgtatcccaggctggaaagggcacaaacatgaccttggttaattccaacctccaccccctgggctcaagcgattcctgtgcctcagcctcctgagcagctggaaccacaggcacccaccaccacacccagccaatttccctgtatttttagtan

SEQ ID NO: 29722 - DNA, 357 bp, Homo sapiens
tcttgagctcagtggtatctggaggacagggcactggccactccagtcaccatcttctgccaggaagcctgcacctcaggggtgaattctttgccgaaatggattgccaaaacggtcaccagcacatttcccaggagcttgaagttctcaggatccacatgcagcttgtcacagtgcagttcactcagctgggcaaaggtgcccttgagatcatccaggtgctttatggcatctcccgacttacactgatagcattcagcaaccacaggagtaggtgaggacagtgtggttggtgagattattcaggtctgaggagtggcatgttaggattagtgagagaaaggtcaaaaaaaaaaa

SEQ ID NO: 29723 - DNA, 365 bp, Homo sapiens
tatgtatgtaggtatatatatacatgtgtgtatgtatattatgaagtagtataataaaactaaacataccctgcaacttgagaaatatgtcaccagttatataggagcttcctgtgttcccttttctgtgccatccctctaacaaatctcattgagatactatgaattgtgttcattttatcattcgcctacttaatttttctttttttttttttgaaaaaaagtttcgttttgtcccccaggttgaagggcaggggagcaatttgggttaattgaaagttttgcccccaaggttaaaacctttttcttgcttaaccctccgaagaagctggggctacaggggcccgccaccacccccagttaat

SEQ ID NO: 29724 - DNA, 358 bp, Homo sapiens
tttctctcagacctttgattaaaattcaatttaggctcaaaacgaacttggggcctcttcctttcaatgtgttgcaaacttggggcttcttcatttcaatgtgttgccacttgcccttgtttttaggctttaacaataacaccacaaggaaacgcacaaatgtttccagctccatttctggaaaatttcagtgagtgtctaagatgccttctgtgtctgtgagcttacagaactttaaagaactctctaaagtattctgtggagacatatatatatatatatatatctctttagagagagacatatatgtaatatagatatggatctttatatatatctctctctccacagaaatagg

SEQ ID NO: 29725 - DNA, 323 bp, Homo sapiens
ctttgctctcgacacatttgcttgtgacatgaccaattctatgtccttaacttctacacctgtttcatcgacctcttcctcttcactctcctcttgtacagttggagtctgtgtgttttcttgaatgtttgagacagcttcaccttgaactttgaatttctcagcagctgctagttgtgcttgctgggataaatcttcgatcttggcttccccaaaaactatgtaagtatctgaagcagggctcttgtagacatctggttttgtgatgacaaagaggatattcttagatttccggatagtgactctagtagtcgacgcggccg

SEQ ID NO: 29726 - DNA, 367 bp, Homo sapiens
gaagagctgcagacagcaaagtgctgggtgatctcctgcatgtcctcgtagttgaagagggggttgtagcaggttttgtggttcatgccgatgtcatggtaggtgaggatgacaggccggtttcccttgggagtcccacacagcgtgacgtgaacagagccatgtaaagtctcgatgtcctgctcctggacatcaaactcttgcaggaggccggtgatggtctcccctttctccaccaaaggcttcacctcagcgaggtctacatcctgcatctcccgagacatgtccctgctgtcacctgcctaacgcgagggagaaaggaaaggacggtgccgaggctggcggcccagcgccccgcggaagccga

SEQ ID NO: 29727 - DNA, 366 bp, Homo sapiens
  misc_feature (1)...(366): n = A,T,C or G
cagcactttgggaggccaaggcgggtggatcacccgaggtcaggagtttgagaccagcctgaccaacatgcagaaaccccaactctaccaaaaaaaaaaaaaaaaattccaaatttacccgggttgggggggccatccttgtatttcccgttccttaaaaggttggggcgggaaatttttttaaccccggaaggaaaaggttcccttgacccgaaaaggccccattgctttcaagccggggaaaaaagagcaaaattttttctcaaaaaaaaccaaacccaaaccattcccaaagttttttttaaaaaaacccccggcggtaaaaatttctttcaaaaaaatggaaaaggggcaaaaatggttccn

SEQ ID NO: 29728 - DNA, 354 bp, Homo sapiens
gtttcagccatgatgggaaaatgctggcgtcagcatcggaagatcattttattgacattgctgaagtggagacaggggacaaactatgggaggtacagtgtgagtctccgaccttcacagtggcgtggcaccccaaaaggcctctgctggcatttgcctgtgatgacaaagacggcaaatatgacagcagccgggaagccggaactgtgaagctgtttgggcttcctaatgattcttgagaggaggttgtagggagaggaggccccggcagaggtcttccttcatgtggttagtttggtctgttctctcggagttggtgggcaccctaaatatttgtaagttggtataaattgt

SEQ ID NO: 29729 - DNA, 369 bp, Homo sapiens
tgtcttcacatgatcatccctctgtatcctactctcttcttataaggacagcagttattaatatattgggctaaggtccaccctagtgacctcatcttctttaaagaccctctctccaaatacagtcacgttctggggtactgagggtaggacttcaagatacgaattttagaggggcacaagtcagcccttaacagtcatcaaaaactagttaagcctgagaaactgtcacagccaagaatatacagcctaagaatatacaacaactaaatgtaatgtgatatcctagctggcatcctggaacagaaaaaggactttaggtaaaatgtgaggaagtaggaataaactatggaccttagttaataattt

SEQ ID NO: 29730 - DNA, 368 bp, Homo sapiens
tatgatcatggctcactgcactccagcctgggcaacagaacgagactctgtctctaaagaaaaaaaaaaaaagagagggggaaccgccccctacaatggcacccctcaaaaagaacctgatcaaacaggcgaacctgggttaggaaattaaggaagccttatcaaagggcgcgcaaataagccaacttaattataactacgggggtacccttcccagggccagacaggtccaatttttttccgggccacgggtctccagccttacaagggggagggaggaaccctaaaaaagcctgacttttttttttttttttaaaaaaaaaggttttttgtacccccccctgggggggggggggaaaattggagat

SEQ ID NO: 29731 - DNA, 340 bp, Homo sapiens
gtttatgtcatcttatgtaagaaggcacttacatgagggctgcgaccttctcaatatcccgccctttgcactttaaatttggagccttttgcctttggagaaaggcatagatctgtctcctgggcaaggccttaactttggcatataaatctgatgaaaagattgagacttgcctcatcatttttcttgattgacatctggcaaccacaaagggatcctgagtgaaagatacctggcctgctgcagtttgcctcttggtgattgggactagcttgggcaccttacagcccaaaccgataggatgacttgccgaagtctgggaatcttccagcgtttttag

SEQ ID NO: 29732 - DNA, 341 bp, Homo sapiens
gtcatggggaaggtggggaaaagtctacactgagaagagaatggctgtactatccagccaaagagagacaaagtaaacctgtggtgatcaatgatgtttagtcaagaaagtatccctggggctgagatttagatgtacactttttttccagcactattgaggtaataattgacaataattgtggtcaaaaaatgacttgatatgatttcaattttcttaaatgtgttaagacttgtctgtggtccagtatatgatctatcctggagaatgttccacctacaattgagaaaaacatatattatgctgctgttggatgaaatattctgtacgtctgttagcat

SEQ ID NO: 29733 - DNA, 342 bp, Homo sapiens
gttttaatttcagaagggattttactaaattatacattgtatagctaattctcaatgaatgtgaatatctttattagaaggtaagtgaaagatactgtaactcttttattactttgtacccatcatgtcaaaatgattacatctaagtaggaccagctacataatttgcaagcccagtacaaaataaaaatgcagtgcccttgttcaaaaagttgagaatttcaagatggctatagcaaagcattaaagtaagcatgaggcctttcaactttttttttttttttttttttttttttggggggaaaccctttttttttcccaagcggggagcgcgggggggtt

SEQ ID NO: 29734 - DNA, 310 bp, Homo sapiens
gggggatgaggtgcaggcagttggacgcggtggtgtgcagtgtccgcatccaggcagggcgcccgtcggacgtggagtctgtcctcgtcttcttctcagtctctgcgtaggccaggtcgtcctcatcctccaacatctgcatcttcagcattttactgatcatgtccacaccctgtgtggtaaggaggactctctcggcgttgttgggcaggcccagccaggagggcgtctgggtgtcggggagcaactccacccactgcacaaactcctctcgcctgatgccatctggcatttgaagtcgacgcggccg

SEQ ID NO: 29735 - DNA, 216 bp, Homo sapiens
tcccacttctgtgtacatatctgaaggaaatgaaatcagtatctcagagatatctctactcccatgttcaagcagctatatggaaacaacttaagtgtctactaagggatgaatgggggatgagcctggctgggcgtggtggttcacgcctataatcccatccactccgggtggatcacttgagatcaggagtctgagaccaggtcgacgcggccg

SEQ ID NO: 29736 - DNA, 175 bp, Homo sapiens
tttcacaataccaggtcttcagcattacctagtttttgaactataaattcactaagataaatgccaccatttcccaagacttcctttttaaaaagcaatttaatcttatgcttgatgtatttctattatgcactggtaaatcaaaacaaaacaagcctggccgtcgacgcggccg

SEQ ID NO: 29737 - DNA, 326 bp, Homo sapiens
cgttgatctggccacctcagactgccaaaggggtgggattacaggcatgaagcgccgcgcccgggcttaagacagtttttaccattttgactataaacactggtagaaataagggttattcaaacctatctcctttgatctcaaggctgagaaaaccttttccttcacattgactaaggggaatattcttacaacagaaagggcgctctcaggttatgttgtaaaatttgacaaaagagggaaaagcccaaattggattttgaagattaaaacctttcctctcccattctgtttagaaatatattttaaatgtttagtaattggaa

SEQ ID NO: 29738 - DNA, 377 bp, Homo sapiens
agaccttgaaggtggcttttctcatctcaatttttgggtggatgttctttcttctcccttttggaacaggaaaggtctcagctagaataattagaaaggtagggttataatttataaaacctgtgggagacaaaaaaaaaaaaaaaaaaacccctttttcttggcccgggggggggccccctgtatccccacttcctgggggggctggggcggaaaaatcttttaaccccaggggggggggggaacctggggccccccctttgttccccacccggaggaacaaaaaaaacctttggccaacccgcccggaattcccaaatttttaatccgaaaatccggaaaacccccgaaggttcctttaactggggcttggggcc

SEQ ID NO: 29739 - DNA, 371 bp, Homo sapiens
gggaaatttatagcactaaatgcccacaagagaaagcaggaaagatctaaaattgacaccctaacatcacaactaaaagaactagagaaacaagagcaaacacactcaaaagctagcagaaggcaagaaataactaagatcagagcagaactgaaggaggtagagacacaaaaaacccttcaaaaaatcagtgaatccaggagctggttttttttttttttttaaaaaaaccaccaaattggataaaccgttgccaggactattaaggaaaaaaaaagaggtttcatttagaggccttaaaaatggataagggggatttcccccttgtggccacaaaaccccaacctcccttgaaaaaatcctttaacccc

SEQ ID NO: 29740 - DNA, 375 bp, Homo sapiens
  misc_feature (1)...(375): n = A,T,C or G
cgcacaatgaccgctttgtgctctccaagggccatgcagctcccatcctctacgcggtctgggctgaagctggtttcctggccgaggcggagctgctgaacctgaggaagatcatctccgacttggacgggcacccggtcccgaaacaagctttcaccgacgtggccactggctccctgggccagggcctaagagccgcttgtgggatggcctacaccggctgctctgggcgggtgatgaccgtggcagtgncttctctttcctctttgatatggccacagggaagctgaccaaagccaagcgtttggtggtgcatgaggggagccctgtgaccagcatctcaacccggtcctgggtcaaaccgaggtcctnctn

SEQ ID NO: 29741 - DNA, 376 bp, Homo sapiens
gttaggagcaattttttgtgggcagggggtggatcttacaaagcacattctcaatggcggagagaatattacaaaataccttcttaagggtgcgggggtgcgggcgtggggtgggtggggagaatattacaaagcaccttctcaagggtggggaaggtgtattgtcacaaggtcaattgatcagttagggtggggcaggaacaaatcacaatggtggaatgtcatcagttaaggcaggaactggctattttcacttcttttgtggatcttcagttgcttcaggccatctgggtgtatacgtgcagggcacaggggatatgatggcttatcttgggctcagaggcctgacagtgggtaatttccactctctttgtct

SEQ ID NO: 29742 - DNA, 376 bp, Homo sapiens
acccctactctggtcaccctgtgtgctaggaacagagatccaagttattacccttaaataatttatagtctgagatactgcaagggaagatgagattcagtctttaataagaatattttaaacaattatacctactgaaaaaatagaattaatcagtttggttgtgaacagtctactttatgtgggcagttgttctgaagatagacgatcagaatgacttaatgtattcacttaactgttttctcacaggaattcataagcttataatgcaattgcatcagccacagctgtctgaaccaccttagcctaggcttattttatccctgggatgtagctgctgttttggcctttggtgatcttcacccgtttaccgtag

SEQ ID NO: 29743 - DNA, 378 bp, Homo sapiens
ttatgatggctcgcattatatcagtaggggaaaggtcctataaatacatgaacctgggacaagtgtttgatatgaaaaaaaaatgaaaactggtttcctgcctcacaccatatacaaaccatcaattcctggtagaataaaggcttataggtgagattttcacatttaaacctttattataacaagatttgatagtttgtccatgactttaggcgacagaagggtttgttatacaggacgacgaggctgccacgataaaaaattggaccactacactcttttctggatagaaataataagaccctgtttattaagatacgttttatattgaagatgctagaatctcacccttacccgatattctattgtgcttagcag

SEQ ID NO: 29744 - DNA, 355 bp, Homo sapiens
gtaatatgctattatttctctttctgttttattcaactggagaaaaagatatggagagtcggaaagaatactgcattaacctattatgatctacatactgcaaataaaaattaaggctatcctttagattggttctaaaatgcctctgggtgtcatgcccacttttctgcttggaatattgtctcccatctcaccctcttgttcttcactgaatagctcccattcatctcagtttaaatgtcactttctcagagaagtcttccctcatcatcctaatctttacttaactttccaagtctttaaattaggttccccttgtaattctcccatataatatccagtgtcgacgcggccg

SEQ ID NO: 29745 - DNA, 283 bp, Homo sapiens
gccgacggcaggcgtgggtgggtgggtgacttcaggcctgcaggattgccttcctaaaccctgtgacacctaagaaaaggtggacaagtcctattttcaagagaagatgacttttaacagttttgaaggatctaaaacttgtgtacctgcagacatcaataaggaagaagaatttgtagaagagtttaatagattaaaaacttttgctaattttccaagtggtagtcctgtttcagcatcaacactggcacgagcagggtttctttatacgtcgacgcggccg

SEQ ID NO: 29746 - DNA, 366 bp, Homo sapiens
gttttttttaaaaaacatcttcctttccagtttagtttagtttttcctgctctaagtataaacactttctactttcttccctttttatgtaagtttttttcttttttgaaacccatctcaagctccatctccaagaaactctctgtgggtacttacgtcaccccaagtttatttttctgaactcttgctttttcactcattgctcataaattcatttggcaagaatttttcgttgggttttaaccactcttttagttctggtttgttctatttttttctcagaattgtaattgagtgtatattggctttgctaaataaattctaagctcctagagtgtgtatttagtgcctttatattgtctctgg

SEQ ID NO: 29747 - DNA, 301 bp, Homo sapiens
gtgtcgttttcttttttgtttattagcgctggggatcaggatcactttttgcctcgtaaaagcaattggagagagggttgactttttttttttaactgcgttggaattgttctgtaggttatcacgcccaaattgaaaaaaggtaaatgtggggatggctgcagcgtgagttaccggacacaaatttcttcagagactacttgaagacaacaaaataggctactcattatggccttcccccactgcctttaaaaaaattctaaaattggggtaaaagacataatataagtcgacgcggccg

SEQ ID NO: 29748 - DNA, 376 bp, Homo sapiens
cgcgagcttgcccctccccccgagcctggctccgaagcgcctcggctatctccggatactggacgaaggcgaagcaggcggccgcttcggctgcttccgaaaacacccgaacgtagggtttcgccgacttcccaggtttccgtaacttttccgagattatctcctcaacgttcggaggtttccgtgtgtcctcgtgtgccactgcgcccagtcccctctgcgagttcgggttcttccaacaattcaatccgtcccagtctttggcttcttccacggacttgctccgatcttctccgccggccctgtccaagcaatcggccacttccgacaatcctaaccgtcccggccttcggctctttccggagatttccggatc

SEQ ID NO: 29749 - DNA, 369 bp, Homo sapiens
tgatggcacagctgatttcttgggaaactgaggcctggggtttaaagcaactcaccccaaatgacagaactagcaactggtagaggccaaatttaaacctaaggaggagaggtaaaggggcaatgtaggtcacagagtacaatgtttgggttagacaggagaataagtttctgagatctgtggcacagcatggtgggtgaccatagttcggaatgtattatatatttcaaaattgctaagagtaaattttcagtgttctcactatgcccacaaaaatacacaggtgaagttatggatatgttaattagcttgatttactcattctgcaatttacacatgtatcaaaacatcacattgtaccccataaat

SEQ ID NO: 29750 - DNA, 377 bp, Homo sapiens
cgggaggcagagcttgcagtgagccaagattgccccactgcactccagcctgggcgacagagcgagactgtctcaaaaaaaaaaaaaagaagggttctaagggctcggttaacatccctttttaactaacaggggttaatccctttgggggccttgggttttttttggttttttttttttgggggggaaaaacccccaaaaacccaaatttttgggtggggggggaaaaccccttttaaccttaaaataaacccccccaaaaccccaaaattcttttaacccctggaaatttttagggggggccctccccaaaaaaaaagcccccctttcgcccgttgggaaaacgggccccaaccggcaaaaagaattcccccctt

SEQ ID NO: 29751 - DNA, 360 bp, Homo sapiens
cgcggccgcgtggacaaaacagtgctgaggtaggcagatcacctgaagtcagtactttgagaccagcctggccaacatggcaaaaccctatctctactaaaaatacaaaaaattagctgggcgtgatggcacacgcctgtagtcccagctacttgggaggctgagggacaagaatccctccaacctgggaggcagaggttgcagtgagctgagattgcaccactgtgctccagcctgggtgacagagcaagactctatttcaaaaataaaaaaaagaagtatcaaattaagaagaaacttcaaacttaatagaaactgtagaatctcaataattcatatcaaaggttatagttcaaaaag

SEQ ID NO: 29752 - DNA, 325 bp, Homo sapiens
agaatgctgcctttctccttacagaagaatgtgctcttaaagggagaaaaagcaaatacaaaaaattgtcattctgtcaatgttcatgacaaattatctggaactatacagattacatggcagtagtattcccgtggtcaatctgtacaaatcagggcatcttcatacaagtctcataagaaccacagcatagatttggcctgagacaagtacaagaatagcaggtaaggaattcagaatctcacaatttacaagtgagtaattaacaaaaactggctgctccattaaaaagtaaaaggtcaaccatatcccgtcgacgcggccg

SEQ ID NO: 29753 - DNA, 361 bp, Homo sapiens
cacgcctgtaatctcaacactctgggaggcagaggcaggaggatcacttgagcccaggagtttgaaaccagttggggcaacagagcatgaccctgtgtgtaatttaaaacaaacaaaacaatgagccaaagaagataattataaaatactttgaaataaaacttatgggatgcactgaaagccgtgcttagagggaaatctatagctaaaaacacttctattaaaaaggaagaagcctgggcaacatggtgagacctcgtctctgccaaaaactcagccagtcatggtagcatgtgctggtagtatcgcttgaacctgggagattgaggctgcagtgaagcatgattgtaccactgcactc

SEQ ID NO: 29754 - DNA, 369 bp, Homo sapiens
ctgtaataaaatggtaggagtcccgactgctgtgaacagtttttatttcccataatttttgttagaaacttttggaggagtcctgaaactaatcaaaatagtttattgatgcgaacagtgaatatttcctttgatgatattttttacaaaataaaagttgttaaacatatcctattatgacttgtcacaatgtcaccacattacatacttaccatgccactttcccttgtagactgttccaaatgatccagatccaattctttgtcccactgtaatctgcccatcaggaatctcccaatcatcactcgagtcccgtctaccaagtgttttcttgataaaaacagtaaaaaaggtcgacgcggccgcgaa

SEQ ID NO: 29755 - DNA, 266 bp, Homo sapiens
attactcttctctttcaggcctttgctcaaatgtcacctattcaataggatggtcagagaagggtgcattgatgaggtgacatttgagcaaaggcctgaaagagaagagtaatcaagcccctgcagattgcagggagaagggctttctaagcagagggagagcaagtgcaaagaccctggagtgggggccggtccagggtgatgaaggaacagccaggagggttgagtagccacagaagagtcaaagtatttggtcgacgcggccg

SEQ ID NO: 29756 - DNA, 345 bp, Homo sapiens
ttttactattttgatatatacaataaattattgttaactataatttcctaactgtattattgaatactagagtgtatttcttctaactgtatttttgtacccattagcaacttcttttttttttttaaacagggtctcactatgctgcccaggctggttgtgaactcctggcctaaagcaattttcctgcctaagtctcccaaagcgctggaattacaggcatgagccactgaccccagggagcaacttcttttaatcttcctctaaaagctctctttggaaggcaattttctcctttttaatttttttggctttggatttggggcttttttaaggcggagtctc

SEQ ID NO: 29757 - DNA, 341 bp, Homo sapiens
cagccaccagatttccattcatctttccaacgtctgctcagtaaaccccccaggacacacttaggctgtacggctgtgtcctcctttggctctcaaagccctcagtaccagttccctaagcctttcgaatggtgccaggagggagaagggcatgtatagccctcttggtctcttcctccccagaacccccaaagccccaggcatggagaagccctaggattgctgctcactcaaccctgcctaagatgaagcaaggactgcagacacattgtgccagtgctgaggcacagggctaggggcctgaggatctgcgggccgtctatctcaggtatccatgtgcg

SEQ ID NO: 29758 - DNA, 356 bp, Homo sapiens
ctcctgacctcgtgatccgcccacctcggcctcccaaaatgctgggattacaggcgtgagccaccgcgcctggccataaagttgttttttagtctctactttaagttcctgacaacccaggcaggaccaagactccctaatgtaattggaaatgagatcagcacattggcacaagttctacaggttaacgggaaaaaggagccctacaatctgcttttagatgccagggagcctggctgggccttatcttgattactgactgatgccactggtaggactaagttctttgatctatgatgtttgaaagccaaaaggaaatgtgtcttaaaggaaaagggacttcttctagaccctcg

SEQ ID NO: 29759 - DNA, 346 bp, Homo sapiens
gaaaaggattatttcgttcaaattatatataatcgtctattatcattcccctttatggcaaaggttctctcttaaatggcttacagattcacactaaggaagattttcataaggtgatgggggtaatttaaggatattcatgtgggaatacaagtctaacccaagctacagctgccttcaagtcctcaatttacatgacccagttaacactgatttagagaggtctcttctgcatatcgtggtagagttaccaattgataattccagtgggacttcttagtcctctctaatgccccctcctagggaagtgggggagttgtgtcgacgcggccgcgaattccagatc

SEQ ID NO: 29760 - DNA, 375 bp, Homo sapiens
  misc_feature (1)...(375): n = A,T,C or G
aattagcatggtcttaaaatacatttctgaggttactagctgtattttgaattgtgagcaaaatgccgagaaacccagttggcatttatacaaaatgttgacctcaggtctatagttcttaaatgtggctaattctgtaacatagtcttggtattttttaattatgaatgcatatcctatttccaggcaggctctcttacttgaacacaaatccaaaaactaatttagagtcttttttgcccagatcttttaagacttacaccccagagatttaagaagaaaacctctaaatttcaaaattatgaagaattacagaattactcatttaaggtactttaaaagaagtttgtacattgtcaaagtaaattttaattn

SEQ ID NO: 29761 - DNA, 365 bp, Homo sapiens
cttgaggaagcctctcgactcagcctcccaaaaagctgggaatactggtgcacaccaatgcacctggctaaagctgaatttaaaaaacaaagtttatgccagagaataagaaaaatgaaagtatatctcctaccttacttttaaataaaattaaaaaagatggttctaaagacgaaataaatggagaagagcctgctatgacagttattagtcttactctagaggaaagatacatattattattttaataatagctcattcaatctttttctaataagccatagggagaataatcatagagaattaattcttatacttcagtgaattccccattaaggtctccataacataactagaaccaatgg

SEQ ID NO: 29762 - DNA, 373 bp, Homo sapiens
  misc_feature (1)...(373): n = A,T,C or G
tttttgagacaggctcttgcttttttactcaggctgtgatgcagtggcatgatcatagctcactgcagcctcaacctctgggctcaagtgaccctctcatctcagcctcccaagtacntgggaggctgagatgagagggccacttgaacccaaggggctgaggtcacagagagctgagatcgcccccttgcactccagcctgggtgacagagcaggcctacgtctcaaataaaacaaatactgaaagaccttttcaaaaaatagaacatgtagaagggctttcatgtaccacacaaaagttctcttccaatgactgaaaataccctttggcaggtgcactgtcaatactgggaattggctcgtccatggcgcg

SEQ ID NO: 29763 - DNA, 373 bp, Homo sapiens
ggcaagtgtcagtcaggacgggagtccggcgggttacagcggaggcctaggtggcagacagggggcccgggccgctgcgtgttgtccacccaagatggagttcctcctggggaacccgttcagcacaccagtggggcagtgcctcgaaaaggcaacagatggctccctgcaaagtgaggattggacgttgaatatggagatctgtgacatcatcaatgagacggaggaagggccaaaggatgccattcgagccctgaagaagcggctcaacgggaaccggaactacagagaggtgatgctggcattaacagtgctggagacatgtgtgaagaactgtggccaccgcttccacatccttgtggccaaccgagat

SEQ ID NO: 29764 - DNA, 207 bp, Homo sapiens
gcctggctaatttttgtatttttagtaaagaggaggtttcaccatgttggccaggctggtctcaaactcctgacctcaagtgatccacttgcctcagccttccaaagtgctgggattacaggtgtgagccaccatgcctggccaattctttttttaaagaaataattcctccaatgtgttcagatgtgtgcgaggtcgacgcggccg

SEQ ID NO: 29765 - DNA, 345 bp, Homo sapiens
ctcatctgctactttggaagcatgagactttacttgctaagatggggacagggactgcggaatgccctacctgaagctccctttatgtgagggccaaacagtactttagcaggcaggaggattttatatttttacctttatccaaaaggaaggataaggaggagaaaggactaattacaaataaatcaatctcacccctaacctcagtaccatcaaaacaaataaagtctcatgcttccaaagtagcagatgagatcatcctgaagcagagagggaaaaagtcaaaggcccttcttctacaaaattagagaagctctattaagcttcctaaggcctaacagagcg

SEQ ID NO: 29766 - DNA, 351 bp, Homo sapiens
  misc_feature (1)...(351): n = A,T,C or G
cactgctatgagaaggaaccgggatggtttcacaaggagtgcaaactaaccaggtgcataaagccaggattccctgttctgggggggactccacagctaatttattatttcacagttggattaaatgctccctactgccatcaaggattgccaaggggactgtttggactcggagaaagagaccattgcaacccaaagcaggagataggggactgccatgctgcatgttctatatcccttaccttactcaaaaaatatgcttctaaagtatcagttggaaactgatttatagtctcattatatgactacaggactagaaaacttaacaatttaaagcatacctgcagtgan

SEQ ID NO: 29767 - DNA, 234 bp, Homo sapiens
aggtgatccgcccgcctccacctcccacagtgctgggattacaggtgtaagccaccgagcactgccctgaatcatattttattcccaaatttatgagactggaggactatgataagggcactgctattgacagactacgatcttcaggagaagtcattttggctgccattgatacctatctatttactgaatacagtggatacttaaccttccttagaccgtcgacgcggccgt

SEQ ID NO: 29768 - DNA, 226 bp, Homo sapiens
ctttttttaaaggattatctttaacagaaggcacgggaaggaccactacctctcagagatggaaaggcttgccatggtccacgcagcacaaagcccacccccagccatatcatcccagacaggaagggtgtagcctgggcttgcatacctccaaggacagggtgctcagtccctcctagaggccacttcacttcttcccatattggctcacaggtcgacgcggccg

SEQ ID NO: 29769 - DNA, 100 bp, Homo sapiens
gctcggtgcacaccgcacctgggaagacctggcaggagggggctgggctctcggctacagacttctccccaccccggaggacctggggtcgacgcggccg

SEQ ID NO: 29770 - DNA, 345 bp, Homo sapiens
ctgccctttctttgagcctcacaggtttccagaattacagtacaacctgtccctggtccctagacccttcccagctccaggtcttttaccagtgcctctgtctggatacttcctttacctgctttcagctcacaggtctccttccccagttctgaccactttggatcagcttctggtattgggcccagtccttctccccaactaggctggcaggtccatgaaggcaagacctgaggtcatctggatcactgctatgtccccaaaactcaacagagggtacacatacaaatccttcaaatacagtgacagccaataacagtaacattcaacatctgctacacaaag

SEQ ID NO: 29771 - DNA, 346 bp, Homo sapiens
cccagactgacatctttcatttaggggtcaggaaccacacctggtgcactaaggactctctgaacataaggctcacagtggctttcatccttgtgggtttgcccaaactgttggcagagcccatggatcatatatgcctgcccaaagactcgaggcagaacccattgtaaccagggatgaaagctcaagtccctatagcttaaaaacgcgtgagttaagaagaaccttgattgttatacttatgttcataaggatcactgttttttccccataactcaacaaagggacactaccaatccttcaaaacaggaacgccataaccggaccattcacatctgttcccaag

SEQ ID NO: 29772 - DNA, 349 bp, Homo sapiens
  misc_feature (1)...(349): n = A,T,C or G
gctttgagcatcttttatttcttccactaacatattgtaccctaaataagtttccctaaggtaaatggatgtttctaaacattgatagttctttcttttctacaaaaaggtatatgtaaatatacaaaatgagaagtcaaaatatgtattccatgcacagaaagagatcaagaggtggaatggagttggggtgtgaacagaggaaggttgatttatgttatatggttgctctctttttgtagctatttttatatcttttcagcttcctccagattactctagtttatttcctattgcttcttactattgacttttaattgttccctgacaataaactgttttatttaan

SEQ ID NO: 29773 - DNA, 344 bp, Homo sapiens
ggaacgccaagggccgcggagagaacccatgctccatctgggccgagacatcctggcctctgagtctgacaggggagcccactgcccggccaaacaggagctggggctgggagctcagactcagtccagcccacgtgggagtcctggggaaggagatagcccacgagcctcaccagccctgggtgacagccagatggtgtccgaagccccaggcctggggcaggcagggggtgtctgggccagggatgaacggaggccaaactgggtaacaagcagagtcgggtgtgcagtgtctcataggcaacgtgaggagtgtttgagcaggagccggtgcaggaggttgg

SEQ ID NO: 29774 - DNA, 348 bp, Homo sapiens
cagagtcttgctgtgtcacccaggctagagtgaagtagcatgatatcagctcactacagcctccgcctcccaagttcaagcaattctcacgcctcagcctcccaaggagctggggttacaggtctgtgccaccacaaccagctaatttttatatttagtagagacagggtttcatcatgttgaccaggctgatcttgaactcctgacctcaggtgatccacccaccttggcctcccaaactgctgggattacagccatgagccaccacacccagcctggtggagtaggttttctaaaggtttaaaagcatgagggtgtttgtgtaaccctctttctttagcttctaat

SEQ ID NO: 29775 - DNA, 281 bp, Homo sapiens
  misc_feature (1)...(281): n = A,T,C or G
tgggattctgctcctccagctccaggttaagcgagcctgtgtccggaaaggacttcaagatgtcggcgaccatgagcacccaggggtccgagtcgaggctggcgagctggatgatctccattagggcgcccttcatctgcaaaataggatgctgccggcgccaccatgcccctgcccacttccaagcccactccctgctgaggggnganggagngagantntgnattaagaaaaaacagaacaacataanngcttttatgccttcctcggcgacgcgggcg

SEQ ID NO: 29776 - DNA, 339 bp, Homo sapiens
ttctagtttcttgattttcagctcaggctgcattctaactcatactgtgaagacaaaggtgtttttgattcagaaatatatgaaatctgcatagtcttaatttgtaaaaaataaagaaaattccttaaccaaaaaaaaaaaaaaaaaaaaaaagaaaagccgggtttaatttaaaaaaaaaaaaaaaattcccaaaaaaagtggtttgatttcccatggcttcctccaaaccccgaaacgaaaaactcattatttttgcctaaggagtttttgtggttgaaaacaaaacctcctttccctttaaccctcacttaaaaaagaaccttgctttaaaagtgg

SEQ ID NO: 29777 - DNA, 356 bp, Homo sapiens
ctttggattggctgtcggacgcggatgtggttaatctggtgaagaacgcctacgggcgcattatcctgcaggttgtagcagataccaatataagcgccatagcagctcagcttgaaaacatgtctacaggctaccaccttggttcgcccactgctgaacaccatccagaagacacagaaacacctccacctaagattattactttggagaaaggctctgaaggcttggggtttagtattgtagggggttatggaagtccccatggagacctgccactttatgtcaagactgtatttgcaaagggagcagctgcagatgacggccgattaaaacgaggggatcagattttagctgtt

SEQ ID NO: 29778 - DNA, 93 bp, Homo sapiens
gatcacctgactcctctcgcaagcaaaggggatcaagggctaaaaataccttagaaaaatcaaacagcacctgcaacacatgcttatataaag

SEQ ID NO: 29779 - DNA, 338 bp, Homo sapiens
  misc_feature (1)...(338): n = A,T,C or G
ggaaaagtgggaatgtatgcagagctctcaaaagaaacaaaaaaggccaaaacggtgccttcagccacatcctctgaattggccctgacttggactaaatgcactaatgcaaaatcccttgacaaaagcgcataggttatttcaaaccagcattgctttttatgtaacctgttttaccgcatcttctcagcagcttctgaccactgctcaattttctcctttacagccattgttctggtggacaaataacctaggtactccaaatcctggcaggaaaaatatacagcattatgaaacagcactcagtaatcctaaaatgatttccaaagctggttacn

SEQ ID NO: 29780 - DNA, 355 bp, Homo sapiens
tttcatttctgtgaccacacacttactttctgctttgccctacaccaatctgaaatcagttccttttgaatgtaccagaaagaatgtgtttatacaaagctttgaggactctcaaatatttttcttgtgttttcttttcttttttttcttttttttttttttttggaaaaattttggttttgccccccaagtgggggggcggggaggcattttgggttaattgaaccctccgcctccccttcccccttaaaaggttaagggaattttattccctgggcctcccaagaagcgggaataacgggcttgcccccccaaccggggttaattttttttttttaagaaaaaacaaggtttc

SEQ ID NO: 29781 - DNA, 105 bp, Homo sapiens
  misc_feature (1)...(105): n = A,T,C or G
aaaggtagngagcggnggngnncnaangaagntatgacatcntgcctaattagcttcttaaatacatttactacttaatggttttgaagcaactgtttacttttt

SEQ ID NO: 29782 - DNA, 356 bp, Homo sapiens
  misc_feature (1)...(356): n = A,T,C or G
aattaattaatctttactaagataatgttaattgttagagaaaccacatcacacacatgcacacattcttgtacaaacttgtgcttttggggaaggattagagagagcctgagccaataaaaactatttactcaatataattactttttttttagatttattactaccataatgtgaaatgcagacgcnnnnnnnncnncnncncnccccctcngccccnnccccccttccttcccccctccnnncccctctctccctctccttcttttctcttcctcccttccctttcttttttcctttttttccccttttcttccttccttctcttttttttttccctccccttttttcccgcc

SEQ ID NO: 29783 - DNA, 373 bp, Homo sapiens
  misc_feature (1)...(373): n = A,T,C or G
tctaggatcaggaggtcaggagagcaagaccatgctggctaacacagtaaaaccccgtctctactaaaaaaaatatgaagaaattatctgggcgtggtggcgtgcgcctgtagtcccagctacttgggaggctgaggcaggagaatggcgtgaacccaggaggcggagcttgcagtgagccgagattgcatgccactgcactccagcctgggtgacagagccagactctatctcaaaanataaataaataaataaaacccctaaaatgcccccccccccccccccaggggggggatttaaaaccccccgattaaggaaaaacttttggagcttttcctagggggggaactttgggaagggcgttttttttagc

SEQ ID NO: 29784 - DNA, 344 bp, Homo sapiens
tcccaggccctttgctccactcagcttattcaggagctggatgaaggcacagctgtgcccaagggttatacactgaagaatctggtgcagccaagagccatactaatgggagcctgcccacctgacatcctgagggcttgcgttagaactgataaaggcagctagacgttcagcctgcccctcaactgtactccgaaccaatctccctgagacccagggccatggacagagcagattgagaatgggcctatcctaagaccttggcctttcagagctctgtccatcccgacacctgacccctcgcatggggagtggggcctggtgagtgttctgtttgggtgctg

SEQ ID NO: 29785 - DNA, 207 bp, Homo sapiens
  misc_feature (1)...(207): n = A,T,C or G
cactggaataccaggtggttcagnccatgtgcataatcacgagtaggaaccaccttgttgctgaaccggcctctgtcccgttcgtggataagacagtgcttcccatccatgggacagctttaggaggcaaaagctgaagatggattttttgcacctggctgatatggcttggctgtgtccccactcaaatttccgtggacgcggccg

SEQ ID NO: 29786 - DNA, 365 bp, Homo sapiens
gagagcaggagtctgaagctgagaatgaatcttccagctataacatgtgactcccatctctgggttcaaggtgggtctacttcatagccagtaagaagaaggaaaggaactatgcccattccttttgagatgagcaactggaagtggaacacattacttctgtttatatctcattagccataacttgagcacatggccttatcaggttataagggagacaaggaaatgtgtctctggctaagtgaaatttttattattaaagaaaataaggagtggttagcagataaaaaacagcagtctctgccacaatagttcactctcatagagggagaaacgtttcatccgtacataaaagggagagtatt

SEQ ID NO: 29787 - DNA, 365 bp, Homo sapiens
  misc_feature (1)...(365): n = A,T,C or G
ggagcccagtgtcttcatgcagaggagctcaatgtcgcgggactagctacaccaacatatgcactttttacatttagaaacactgtgattagaccacagaacaataaatatgtgccatcagaccaaaaaaaagtagagaaaggaactgaactccactctcgatgctatttacagaggacatctgtaaagtcttcataaaagaccttgaatgatgcctaggatggcagagcccctgggtcctactccatcctccagcctttgtcctttcctggcctcctgctctccagatctgtaaactgggctcaaggactgtacaagcagagtacaactaccccctccccggtgccagggcgcctgttgggttn

SEQ ID NO: 29788 - DNA, 414 bp, Homo sapiens
ggctactctggaggctgaggtgggaggatcattttagcctgggaggctgaggctacaggaagccgtcaaccactgcacactcgagcctgggcaacagagtgtctaaaaaaaaaaaaaaaaaaaaagggggggggccttttttaggggcgagtaaacctttgttgggttgggggggaaaaagaaaaggaaaacggccgatttttttcaaacttaaaaaataaggcccaaggaaattcgaaataacggggggtcccaacagaggaaaagggcccaactagggaaactggaacaaacaaaccctgttttaaactttaaggcccccttttttggggagcagggggattactataaaagctttttcaaaacctgcttggataacttaccccgcaggggcaagggagtttttttttttag

SEQ ID NO: 29789 - DNA, 364 bp, Homo sapiens
cgggagcagcgatgggcccacccacaaggtgaacttctatgtttaaggtcccaatttttattggcacttgggcaacattttcaacctaaagttttaagtgtaaggattcgatacttagaacactcttatctttcaggaatatataccaaatcattttttccctacttctcccatgaagaggaatacaagaagacacgtaggtggtggagcaccgtggctcacgcctgtaatcccagcactttgggaggctgaggtgggcggatcacccaaggtcaggtcccctcactaatttcaaaagaagagaaataaagataatgtggccaaatcttaattagccattgtcagagaggagaatttaagcatt

SEQ ID NO: 29790 - DNA, 384 bp, Homo sapiens
  misc_feature (1)...(384): n = A,T,C or G
gtccattactgaatcttgaaaatgagtcattaatctgaaaattgacagttaagcattgagcatttttaagaaagtaattgaaaaaatatctggaatctaccactgcctaacagtaatactagttttatgacattcttggtttactgtattatctaattactttaaaaatgtaattgaaagtgttgagtgtttatcatctggagagcattttattataaattaatcagaacagtagttttgaatccacaagtgcagtaagtttcaatgctactttgattggcagaacccaccaagtgaatttaggcagccagaagggattttgattattgggaaagtcttcttgggttctgaggttaaggtggattttattcttctcatctgtcn

SEQ ID NO: 29791 - DNA, 365 bp, Homo sapiens
ttttgagaaggagttttgctcatgttgcccaggctggagtgcaatggcacgatttcagctcactgcaacctctgcctcctgggtttaagtgattctcctgtctcagcctcccgagtagctgggattacaggcgtctgccaccacgcccagctattttttgtatttttagtagagacagggtttcaccatgttggccaggctggtctcgaactcctgacctcaggtgatccaccctccttggggcctcccaaagtgctgggattacaggcatgaaccaccacacctggcctaaaacattttctttaaatgaaaaaaacatatggagaaaacataaatcagctttcattatagatggtgccattttg

SEQ ID NO: 29792 - DNA, 363 bp, Homo sapiens
tttgctttttccggggattgattattttgttttacatgaaaacaagattgaaatattgaaaatgaggaactctagataaatattttttgtaaagtagtgctatggaaatgatgttgaactctctaagtcaccatatttaaatctaccattcacttcaaatttaactgaagatcaatttctccaattgttaagggttcattaatcaagtaattctggaaaagggcatattgatatttgaacttaattattacgaagttttataagttttagaatgaacttgaaaatgtatgtctaacttttttgtaacttacgcaaaataagaaaaatttgtggccgggcgcggtggctcacgcctgttatccg

SEQ ID NO: 29793 - DNA, 383 bp, Homo sapiens
attaactgctcctctgtgcttccactgtgtagcatctcccaaacttcacgcccatccagaacttcagaatgtcacctcatttggaaagagagtttttggagctataactagttaaggatcttgagatgcaatcacattggatttagtgtgtgccctgaatccaataactagtgtccttataagaagatgatgggggtgggcacggtggctcacacctgtaatccgagcacttcgggaggctgaggcaggtggatcacctgaggttgggagttcgagaccagcctgaccaacatggagaaaccccatctctactaaaaatacaaaatgagttgggcatggtggcacgcacgcctgtaatcccagctactcggaaggccgagacg

SEQ ID NO: 29794 - DNA, 360 bp, Homo sapiens
  misc_feature (1)...(360): n = A,T,C or G
ctcacttctcttttaaagagttttaaattttcatctccagctatgctcttcaaagctcttctttaactttccaacatcctgctgaataatactggcaagcactttgaatgccacatgtttctaattcaatttattattctcctcaaactatatttttcacctgcatactacatccagattaatgacatcattatcatccctgggcagcaacagtagacatctaatctctttttctccattagtactctattaccaaattctgtctattctaccttcaaaatgagtcctaagtagattccttcatttccaacttaattagcactgtctgaattcaggttgttacaacggtgtatgtaccan

SEQ ID NO: 29795 - DNA, 348 bp, Homo sapiens
gtaacattgggaggattagtatgaataaaagccatcttatcaatgaagtctttataaaatgacataacctctatatctgagaataaacattgtataggaggagagttctaaatatgtcaaaggttacatctaaaacattcaagcatgacagcataaaaatattcaaaataacttgatttgggattactatatagttccataaagctaaagttacatttaggtataaaccttcagtaaatatggcaacagcaaccataaaaagcatattccccagcagtgttctcttacctctatataaaatagtattccaaataagtacattttatagcaaaattatgcatttttcct

SEQ ID NO: 29796 - DNA, 347 bp, Homo sapiens
  misc_feature (1)...(347): n = A,T,C or G
aagcaaaggacctggcaaagggaagcatcgtgctgaagtatgaaccagattctgcgaatccagacgctctgcagtgtcccatcgtcttatgcggatggcggggaaaggcctccattcgaacttttgtgcccaagaatgaacggcttcattatctcaggatgatggggctggaggtattgggagaaaagaagaaggaaggggttatcctcacaaatgagagtgcagccagcaccggacagccagacaatgacgtgactgagggacagagagcaggagagcccaacagcccagatgcagaagaggccaacagtccagacgtgacagcaggctgtgacccggcggnggtn

SEQ ID NO: 29797 - DNA, 291 bp, Homo sapiens
tcactgctcagcctggtgggggctggagctcaaaaattgggagtgacacaggacaccttcccacagccattgcggcagcatttcatctggccaggacactggctgtccacctggcactggtcccgacagaggccgagctggggaaagttaatgttcacctgggggcaggaaccctccttatcattgggcagagagcagaaggtggcacagcccgcgctgcagcacttgaggttgtcggcgcattcgctgtccgagacgcactcttgcgtgcagttctggtcgacgcggccg

SEQ ID NO: 29798 - DNA, 348 bp, Homo sapiens
  misc_feature (1)...(348): n = A,T,C or G
ctccccttagaaaaagctgtttagtgaaaacagttaagggcaggccacttctacactcccagcgctaccctaggccctgcagagcagagtctcagacactactcggaacctggtggggaggcagctagtactatactcagccagccagaagtatccagtccctaagaacggattgccccacaattcccaggccctgagttgctatatattcctcttccttactgctgtttgtgaccccaagaaggagaccttggggcctgggcctgcagccaggagcaagaactcctggcagtgatttgagaattaattagagtttggctagtgttttaaaggcccaggcatcccccn

SEQ ID NO: 29799 - DNA, 117 bp, Homo sapiens
ccattgtgagcatattccccagcagtgttctcttacctctatataaaatagtattccaaataagtacattttatagcaaaattatgcatttttcctaagactttcatcaccaatatg

SEQ ID NO: 29800 - DNA, 377 bp, Homo sapiens
  misc_feature (1)...(377): n = A,T,C or G
cagaaaaagacttaaaattttctatatggctaatatttaggattaaaaagagtctgattatgtacatatgattttcaggtaagctgtgcaacttagaaaaaatgatgctggttaagttgaagacaaggattgtatctataaaactaatgcgagaggccgcgagaggccccgagaggccgggcgcggtggctcacgtctgaaatcccagcactttgagaggccgaggcgggcagatcacgaggtcaggagatcgagaacatcctggctaacagggtgaaaccccgtctctactaaaaatacagaaaattagcagggtgtggtggcgggcgcctgtagtcccagctattcaggaggctgaggcaggagaatggcgtgan

SEQ ID NO: 29801 - DNA, 375 bp, Homo sapiens
cggcctttctgtgaagggggttggtggcagtgcccacctcactagatgcctctgacccagcctcccctgggggagtgggtggtcacagaccctccctgccagagctcctggaaggctcctgcaggcctgacccatctattcctgtagacctggtttaggatgaagtctcggtgcgatttttgcagagttgggtttatctttcaactatagacccttctggctgttctcagccatatcatgtgactctgaatagttggatgaggaatggaaagaaagcaaggatgagagccgggcatgtggcagtctccgcccagcatcggctgtccgcacagaggcacagggcaggcctcctgtgcactccccacctagcactgg

SEQ ID NO: 29802 - DNA, 368 bp, Homo sapiens
  misc_feature (1)...(368): n = A,T,C or G
tttgcgtgaaaatcccaagtgtagaaaaaaggacatgagtataagatcatttaacttgattccttataggctgatttgggttgctaatgtattcgtactagattagccacttgggaggaattcaatgctgcatcattctgatagctgaaatagtaaaagtcaactccaaacagcctaaattctagtataaaaagggggtgatcatacaagtcctaaagtgtagatcagcagtcactgaacctcttagagtcacaaggcatttcttctcccaaagtcatgacctttatattttgttagccttataattgactaacaaagcaacctgccaagttggtgaaggttaattattgcctcatgaaatatacatn

SEQ ID NO: 29803 - DNA, 378 bp, Homo sapiens
  misc_feature (1)...(378): n = A,T,C or G
ctcagactcccaaagaaatgttgacatttaacaatgcaatcgacgtccaatttgcattgtttggtgaaaatgaaaatcttcctgagagtcaaatattcccaagaacaaaccagctcaataactgaacataacaaataaacaagtctgatttacaaacagaaacaatctgaatgtaatataacaagtggcaaagattatattttccggccaaatattttggagatttttttaaataaaactcaccttcatattcagaatttcacttgcatttttgtatctacaaaacatatttctcagctgacaaaataaaatatttcagtttaggaagactcaattcaaccttttactttaatatactatgttaattntaagttatag

SEQ ID NO: 29804 - DNA, 360 bp, Homo sapiens
cccaaatctcaccgcctgagcccactgttcccatcacgtcctgatggtgcgtcaggcctccctcaacatgtccccatgcccaccagggactcatggctacctggaagaaggcgtgtggagagatccggaaggtcagccctagcaggtcctcgtggatgcaccggtccccagccacatgctccaggggcaggccctcctggctaggagtctttcgctgtccctcctccacgaagtagaggcaggtcactccactggccctgcctggccctgctgtgaagtgctgcgctagggaggtcttcagctctgccagctcctcagggctcagcttctgggggtggaagtaggcaatggccatggcct

SEQ ID NO: 29805 - DNA, 368 bp, Homo sapiens
atcacttcttctcagtgtcccaaagccagaagagaggctgttgtttttaaaagcaggaaaactttcctaaacttggccagaattgcatcacagaccctttcctaaaacaatttccagcaaagggaatagacttaccatgtctggtacagatgaatcaaggtttgcccctgggggctggggaggggcttgtcccgctgaagcagactcttgcccagcagctgaacggagcctaggttcaccagacggaggaagagactggccactaacagtgcctgacacacagatgtgcttcctgtgatatcgctgctgccaccgttccaaatgtaagcagttggctgtctgggatactacctaccttcttttgtgtt

SEQ ID NO: 29806 - DNA, 368 bp, Homo sapiens
cgagtagctgggactacgggtgtgcactaccactcctggctaattttttgtatttttagtggagacggggttttgccatgttggccaggctggtcttgaactcctgatctcaggagatccgcccacctcagcctcccaaagtcttgggattacagatgtaagccaccacgcccagcctgaggcagtggatttagagggaaaaaagcctcaattatatttatgattatatttacaactatatattaattatatttataactctatgatctctgaggcatcaaaagccaggaatggggtccaagtggccttgaagcctgctttctgaagacaaggaccctatgtactgctctcacatagggctgagaaaa

SEQ ID NO: 29807 - DNA, 378 bp, Homo sapiens
gcgaccgagtgggagtggagtggagcgactgtggttgccgactctttcctcttccccacggtccagtcagcgggttaattaggccatcggccctcgagccgagacttgtctcttatttagttctggggagcgcctcgtcgacatgagtgatgtggaggaaaacaacttcgagggcagagagtctcgctctcagtcaaaatctccaacgggaactcctgctcgtgtaaaatcggagagcaggtcaggatctcgtagtccatcaagggtttccaaacactctgaatcccattctcgatcaagatcaaaatccaggtcgaggtcaaggagacattctcatagacgttacactcgatccagatcccactctcactctcatag

SEQ ID NO: 29808 - DNA, 287 bp, Homo sapiens
gcgcagtctattaacatcacggagctgaatctgccgcagctagaaatgctcaagaaccagctggaccaggaagtggagttcttgtccacgtccattgctcagctcaaagtggtacagaccaagtatgtggaagccaaggactgtctgaacgtgctgaacaagagcaacgaggggaaagaattactcgtcccactgacgagttctatgtatgtccctgggaagctgcatgatgtggaacacgtgctcatcgatgtgggaactgggtactatgtaggtcgacgcggccg

SEQ ID NO: 29809 - DNA, 366 bp, Homo sapiens
attttaatttttatttctctgatgattagaaatattgagcatttttcatgtttgttgactgcttgtaggtactcttttgaaaaatgtctgtttgtatcctttgcccgctttttaatggggttgtttcttgttgttttgttgttagagttccttgtagattctggatgtaagcgctttgttggatgcatagtttgcaaatatattttcccactttataggttggctgtttactttattaattatttcttttgctgtgcagaaactttttagttaaattatctcgtctgtttatttttattgcatttgcttttgaggacttggtcattaattctttgcctagaccaatgtctggaagggtttttccta

SEQ ID NO: 29810 - DNA, 254 bp, Homo sapiens
  misc_feature (1)...(254): n = A,T,C or G
gctgaaatgaagtgatggattgtgcctggaattttttggtttaatgactttagatttaggataaaatttcattttatagaaacaacatgaaaaaatcatcattgcttataatattaaagtctgatatagaaagtaatagtaagttttccagcataggcttggatctttaaatattttgttctgtatttctggattttttttcttttggctcttctggagaattacagtaaagtttggagtnnnnncncgnnact

SEQ ID NO: 29811 - DNA, 353 bp, Homo sapiens
  misc_feature (1)...(353): n = A,T,C or G
gttgcagaggagcgagctggacgccactgtggggctctgagagtcctgaattcttactgggttggtgaagattccacatacaaattttttgaggttatcctcattgatccattccataaagctatcagaagaaatcctgacacccagtggatcaccaaaccagtccacaagcacagggagatgcgtgggctgacatctgcaggccgaaagagccgtggccttggaaagggccacaagttccaccacactattggtggctctcgccgggcagcttggagaaggcgcaatactctccagctccaccgttaccgctaatataagtaaagtttgtaaaattcatacttaataaacan

SEQ ID NO: 29812 - DNA, 369 bp, Homo sapiens
tctaaaatcacaaaggtctaacgggcacccagatggcatcagcggggtatttagagaagtgcataagggccaattaagcccatttcgtggtttattattattagcggtaattatttctggcatgcagttcaagggtgtctgtggcctgtctgagctccggaagtgcatccacagcaccctcctgtgaatgtttatagacccaggaggggagccctgggttgggagctccagaccactggggatgggaggcagagactctatgtatagatcatactcttgtggaggtagaggcctggaacatgatggctaaactcctgtcgctgattctgggctaagaaagaaagaaaatccaaaagacagcaaggacct

SEQ ID NO: 29813 - DNA, 360 bp, Homo sapiens
ctggcagaaaccttgaagttgctggtaccaagaaccgctttatccagattaatataagtgaaagcctttaaatgcagggacgaaaggtatccctagaagagaagggaaaacactaataagtataaatctgtttatttatcacatacagtagcattagggattcattttcaattctggactctactgagactaaacgcaaaggcaaaagtggtaaaatcaaacctataaaaacatcacttctggacaacagcctaagcccacaagctcgtgtccaatatgggaatggatgataaagaatacctctagccattcagtggcaccaaccgatccaaagtctccagcactccaactggcaaagat

SEQ ID NO: 29814 - DNA, 302 bp, Homo sapiens
ttaccatccttgagggtggcactggttaccctcccggcactacatacctatacacacagcccaacccagagggactgaagagcacgaacaccaatatccagggaaagccctaagaccaaacctggaccccatggcacttaccaggggccatagcattccttcctggcacaagcaggattcacaccctccctccatgggaaaagcagactcctcctccatgccatgtcataaagtcctgcgtattgtctgggcatcagctccacccagtacaagacaaaggggaatccaggtcgacgcggccg

SEQ ID NO: 29815 - DNA, 350 bp, Homo sapiens
tccacttcactgaaaatttgagagttaatttttaaaatttctgaattttggggccactggtgctggaaaaaaaaattactctctctgttctctttcttgtaaaaaattcagtgctaacccacacaaatccagacagctgcctcatctattctgcttcatctattctcttgctgaggacattctatattcttaggttcctattgaacaacagcaccattctgaaaaatttgcgtactggcaatcaaatcattctgcaaacagtaacgcagattccaatgataagatgagtgagcaggatgcaagaacatcttaaagatcacctgccacacttgtgtttgaggtgctcaatg

SEQ ID NO: 29816 - DNA, 357 bp, Homo sapiens
tctcctattgtgtgggttgtctcttcactttgttgattgcttcctttgctgtgcagaagcttcttaacttgacgtgatcccatttgtccatttttgctttggttgtctatgcttttggggtattactcaagaaatctttgcccagaccaatgtcctggaacatttccccaatgttttcttgtagtagtttcatagttcgaggttttagatttaagtctttaatccatttcgattttatttttgtatatggtgaacaacagggttgaagtttcattcttctatatgtggatatcatgtttttctagcaccatttattgaagagactgtccttttcccaatatatatacttagcacctt

SEQ ID NO: 29817 - DNA, 351 bp, Homo sapiens
gtggaacgtgtgatcaccattatgcagaatccacgccagtacaagatcccagactggttcttgaacagacagaaggatgtaaaggatggaaaatacagccaggtcctagccaatggtctggacaacaagctccgtgaagacctggagcgactgaagaagattcgggcccatagagggctgcgtcacttctggggccttcgtgtccgaggccagcacaccaagaccactggccgccgtggccgcaccgtgggtgtgtccaagaagaaataagtctgtaggccttgtctgttaataaatagtttatatacccaaaaaaaaaaaaaaggtcaacccggccgaaaattcaaaatc

SEQ ID NO: 29818 - DNA, 358 bp, Homo sapiens
tttttttttgagacggagtctcgctctgtcgcccaaactggagtgcagtggcgtgatctcagctcactgcaagctccgcctcccaggtttatgccattctcctgcctcagcctccccagcagctgggaccacaggcgcccgcaaccactcccggctaatttttttgtatttttagtagagatggggtttcactgtgttagccaggatggtctcgatctcctgacctcatgatccgcccgcctcggcctcccaaagtgctgggattacaggcatgagccactgcacctggccttatctgaactcttgagagttgaacagaacactccaaaatttgaccagtgttgagaatgggcgtttt

SEQ ID NO: 29819 - DNA, 344 bp, Homo sapiens
  misc_feature (1)...(344): n = A,T,C or G
tgaatccgacattctgctggcgcgcgtnncgacattacctctgtgctctnnttcaggcgcgtttnngctcaaatggtgcacctaattgcaatagcgaaatggtcagaagaagggggtgcacttggatgagggtgaccannnttgagcaaaggcgctcgaaagagaaagaagtaatcaatgccccctgcagcattggcagggaagaagggcctttctaatgcagagggaagagcaacgtgcacaagacacctggagttgtggggcccggtccagggtgaatgaaggaactagccaggagggttgagtagccacagaagagtcaaagtatttggtcgacgcggccg

SEQ ID NO: 29820 - DNA, 127 bp, Homo sapiens
  misc_feature (1)...(127): n = A,T,C or G
ggatgcgcttgtgaatgttgatggtgtattctcgggttaccacttcgttgatggcagaacggccctttttcttctcgccacccttctttgcgggagccattctgcagcgtccgtcgacgcggcagnn

SEQ ID NO: 29821 - DNA, 358 bp, Homo sapiens
  misc_feature (1)...(358): n = A,T,C or G
ttttttttaaatatcaattaaacctataaaaaacatttaaaattatattctaatttaaggttgattttttttgtctctttgctttggattctgtaaaaagtctagattggtatcaagtgaaaagacaagaatactaccttatgtgtgtctctgaatttgctgatctctcgagatatcaggtctcttttgtcttcttccatttctatagcatttatatcctccttagtgatgagtggataagggatcagtggggccactggaaatctgcggaaaatggcctccttcttttccttcttcttcttcctggggngagaatcagattcctgtgagggggcatttagctcactggagtattcan

SEQ ID NO: 29822 - DNA, 358 bp, Homo sapiens
cagccctcgcagctgctctgtctatggaatagccattcttttattcctttactttctttataaacttgcttttgctttactctatggacttgctctgaattctttcttgcatgagattcaagaaccctcttggcctctggatcaggacccctttcccgtaacagtgctatggctgggattttgctccctgctctgccactctggacatagctgtacatccttgagcaaactttttcacttctctggtttccttacttgtaaaactgggcacatggaactacaaaaggtcccttgcatcagcaatattctaagattactcaggaaaatataagcccaaagacccaagttgttaaaggag

SEQ ID NO: 29823 - DNA, 359 bp, Homo sapiens
ttgagtttttaaaataacactaaaatttttttttaatggaacacaggattctggtggaaacgttagcaaaaaagacaaaaaagtgttagtgatgtctgatttggctatatttttcacttatactaaatactaaaagcttgtgttcttcagtcggatatagaatttaacaagtaatactacagagtaagttctatagcagaatttaattttcaaagagcccaatttaaatacaatggttttcttaaacttttattttttctgagacaaggtctcactctgtcacccaggctggagtgtagtggcatgatcacggctcactgcagccttgacctccttgggctcaggtgatcctctcatgt

SEQ ID NO: 29824 - DNA, 207 bp, Homo sapiens
gcctggctaatttttgtatgtttagtaaataggagggtttaccgtgttgcccaggctgtactcaaactcctgacctgaagggatccacttgcctcacccttccaaagtgctgggattacaggggtgagccaccatgccaggccaattctttttttaaagaaataattcctcgaatgtgttcaaatgtgagcgacgtcaaggcggccg

SEQ ID NO: 29825 - DNA, 370 bp, Homo sapiens
gtctaactcgattctttgaaataagccaaaatcactcagtcattactaccaaaaggaattagtctaaattctataagtatccataactacatttgctctatctttaaacagcaggtctcacattttaagattctcagatttatgcttttcacaaattccacaagccagtcaaatagccatctctgatgtttaaatatatatatatgatgacaatgatgatggtggtggtgagaatgatgatggagacaaataatgacagcaactaacaatgtgtgtgggcctggcaaatagcacctaagaacaagagattgcatgactacttctaatattctactcaaaaaataactgtatggtgaaggaaatctaaata

SEQ ID NO: 29826 - DNA, 345 bp, Homo sapiens
cgctgctgcccctgctgtcgctcctggtcggcgcgtggctcaagctaggaaatggacaggctactagcatggtccaactgcagggtgggagattcctgatgggaacaaattctccagacagcagagatggtgaagggcctgtgcgggaggcgacagtgaaaccctttgccatcgacatatttcctgtcaccaacaaagatttcagggattttgtcagggagaaaaagtatcggacagaagctgagatgtttggatggagctttgtctttgaggactttgtctctgatgagctgagaaacaaagccacccagccaatgaagtctgtactctggtggcttccagtgg

SEQ ID NO: 29827 - DNA, 375 bp, Homo sapiens
gacgccagaaactgcagttcttttggcttcctatgctgtccaagccaagtatggagattacaataaagagattcataagccaggctacctggctaatgatagactcctaccccagcgtgtattggaacaacacaaactaacaaaagaacagtgggaagaaagaatacagaactggcatgaagaacatagaggaatgttaagggaggattctatgatggaatacctgaagattgcacaagatctagaaatgtatggagtcaactattttgaaataaaaaataaaaaaggaactgaattgtggctaggtgttgatgctttgggtctgaatatttatgagcatgacgacaagttaacacctaaaattggttttccctg

SEQ ID NO: 29828 - DNA, 237 bp, Homo sapiens
ttacgcaatgccctggtggtctggttgaccgcattcgaggccaagcggaccatcagggcattgtccatcactcccaccaggaagacgactgctaagatgaccatggccgggatgtctggatcacgcagtgtgttaaaagttttatccacaggggtgttgagggacagggtatccttggcatcataatgcccataaacagggggggtataattgaaagagggcatggcgacccgggcg

SEQ ID NO: 29829 - DNA, 105 bp, Homo sapiens
ctggtggattaaatctatacctgtcccactatcccccaatcccctccaaaccacttttctataggattaacgctgaaccgataacataaccaggatgccacatgg

SEQ ID NO: 29830 - DNA, 239 bp, Homo sapiens
gctggagttttgatttttaactaaacgcaaatctgtagattctctcctctcccatcccagaaaacaaaacaaaataatgcttttcgaaattgtttctaggactttaaaacataatggtatatccaaaattctttatttcagaatgcaacaatagattccattaatatagactcaagatcaaaacagcatacctgctaagctaagatagatggtgttgattccactggtcgacgcggccg

SEQ ID NO: 29831 - DNA, 344 bp, Homo sapiens
gttgcccaggctggtttcaaactggtgagctcagccaatctgcccaccttggcctcccaaagtgctagagttacaggcgtgagccatcgtgcccggtcaatgaaacaataaagttctatacacttatttttattttctttacttttttttttttttttggaaaaaaattaacctttttgtgccccgggttaaagggcagggggggggatttatttattggaacctttggcttggggttaaaagaaatcttcggccctaaccccccgaagaacgggggataacgggggggggccacccccccgggctattttttgtttttatagaaaacaagggctttttcatct

SEQ ID NO: 29832 - DNA, 354 bp, Homo sapiens
tttggttgcgtcgaccgcattttaaatcaatgaggaagagttaattattaaaggggactgggacaagttagatattaggggaaaaacagatccatagctcactctgcgtcacaataaattcgagacagacttaagtgcgggtacacacacacacacacacacgaaaccttataagtgcagaagaaaattatttttataatcttggagttaggaaagccttcctagatatgacccaaatcctagaaaacctagactgatagatattttgattagaaaaattaaaaatagctagtgatatcttctgcaacgcagaaaatctaaatgaccaccttgggaacaacatttgcagttgtt

SEQ ID NO: 29833 - DNA, 352 bp, Homo sapiens
ttgttttttgtcgaccgagtattatatgttcccaggatggggttctgtatataggtagcccatggatggcataaaatatcaacaaaaagtgtatttaaaaagctatcctggatttgtctgtctatggtgatactcactcattccttataaacattccacagaaattgggattgggagactgaatatacattgtttatgtcagccttgatggtaaataaaaataatgccaaactttggaataaagtgggtcatgctctgtaaaatgaaaaaaactttgagagagctttgaaatacttcttacaggctacccatgttcagccagatgatattggtgcccatatgaatgtaggag

SEQ ID NO: 29834 - DNA, 338 bp, Homo sapiens
  misc_feature (1)...(338): n = A,T,C or G
cgatatttctcaggtctacacacagaatgctgaaatgaggcctcttggttgttgtatgattttaattggtatagatgaagagcaaggccctcaggtatataagtgtgatcctgcaggttactactgtgggtttaaagccactgcagcgggagttaaacaaactgagtcaaccagcttccttgaaaaaaaagtgaagaagaaatttgattggacatttgagcagacagtggaaactgcaattacatgcctgtctactgttctatcaattgatttcaaaccttcagaaatagaagttggagtagtgacagttgaaaatcctaaattcaggattcttacan

SEQ ID NO: 29835 - DNA, 342 bp, Homo sapiens
cgatatttctcaggtctacacacagaatgctgaaatgaggcctcttggttgttgtatgattttaattggtatagatgaagagcaaggccctcaggtatataagtgtgatcctgcaggttactactgtgggtttaaagccactgcagcgggagttaaacaaactgagtcaaccagcttccttgaaaaaaaagtgaagaagaaatttgattggacatttgagcagacagtggaaactgcaattacatgcctgtctactgttctatcaattgatttcaaaccttcagaaatagaagttggagtagtgacagttgaaaatcctaaattcaggattcttacagaagg

SEQ ID NO: 29836 - DNA, 337 bp, Homo sapiens
tgcattataaatgggatatgaggcgtaggcttggagaaccacaggcaaggatgagagaagagaatatggaaaggattggggaggaggtgagacaactgatggaaaagctgatggaaaagcagatgagtcatagtctgcgggcagtcagcactgacccccctcaccatgaccatcatgatgagttttgccttatgccctgaatcctgatggtttccctaaagttattacggaaacagacccctgctttcgaatttacatgttcatgatgtgcccttgttgtaaacctttacctgtcacttgtttacgtgggtctcctattaccagcttctaattgaat

SEQ ID NO: 29837 - DNA, 335 bp, Homo sapiens
gggggtttgttttggctaaagttaacaatcaggtgctcttaatttctccttcccattagagcgctcagtgatcatagaagctgcgcgattgtttgttttgcttcactgtttgttgttgttgttgctgtttgtttctgttttgttgttgtttcattctttttcccattgggtttgatcagctctacctgacttgataaaatcctaaagaagttccaaattatgggaaacaaggcctctggagtggctaaatttcccgtcccttcccaccaacacacacacacacgaaaagggccgggcacagtggctcacacctgtaatcccagcactttgggagg

SEQ ID NO: 29838 - DNA, 382 bp, Homo sapiens
attaaaggtcccaaatttatttaggggttagggataacacaaatatttgaagtctactaataatttgaaacatgattttattcaatgccttcaatggcctttctaaataaatctgttaatagacctgttagcaaacaaatctaaaaagggtggctttacttaatactctccccattccttttgtgattgaattgttcatagtgaaatagccagaaggaagtacttagaaggagaacatatcaggaatgccgataaggttgaaatataatgcattttcatctctttatacaataaacgaggatttggccttctaactgccattcctctgaagaaaagaatttaagaggtgccttttatgtcattaaatacacccataatcctt

SEQ ID NO: 29839 - DNA, 388 bp, Homo sapiens
atttcatccaaaatgacatttactatttttactgtttattccaaaacgcaggaaaagcttcatataagatattcgttgcagtatctaaacgagtgaccaaccagaaacaattcaaatgtccagcaatatggaaattgtccaggataaacttatgtcatactcccacttgatagacaattatgttgctattataaacaactacagccaggcacggtggctcacgcctgtaatcccagcactttaggaggccaaggcaggcagatcacaaggtcagaagtttgagaccagcctgaccaacatggtgaaaccctgtctctactaaaaatacaaaaattagccaggcgtagcggcgcacacctgtaatcccagctactcaggaggctgaggg

SEQ ID NO: 29840 - DNA, 386 bp, Homo sapiens
  misc_feature (1)...(386): n = A,T,C or G
gtagattcttactaatggaatctctctgattagccagaattaatgtaaatggaagattagccatgtatttatcttttctgatctgagaagcttcagttcttattttcccaataaattccccaataaaactcaatgactcaatggaattaaatacacagaagcacccatgtggtttaaaggcggcagtccataactgactcaaaaagtaaggcgatttggcatcaaccggccgaagatcaagttcataaatttttccatctaaggcatactcatcatcagtggattgtgtccttatctcatttgctagttcttgggcaaggccatccttccctaaaataaaaaggttaactttatctatattggtactatcgngatataatcttaag

SEQ ID NO: 29841 - DNA, 385 bp, Homo sapiens
ggaccattgcattatgtgttcagaagagcagcgctttaacaacttcctgaaagcccttcaagagaaagtggaaattaaacaattaaatcatttctgggaaattgttgtccaggatggaattactctgatcaccaaagaggaagcctctggaagttctgtcacagctgaggaagccaaaaagtttctggcccccaaagacaaaccaagtggagacacagcagctgtatttgaagaaggtggtgatgtggacgatttattggacatgatataggtcgtggatgtatggggaatctaagagagctgccatcgctgtgatgctgggagttctaacaaaacaagttggatgcggccattcaaggggagccaaaatctcaagaaattccca

SEQ ID NO: 29842 - DNA, 381 bp, Homo sapiens
  misc_feature (1)...(381): n = A,T,C or G
ggaagaagccattaagttttcagaagagcagcgctttaacaacttcctgaaagcccttcaagagaaagtggaaattaaacaattaaatcatttctgggaaattgttgtccaggatggaattactctgatcaccaaagaggaagcctctggaagttctgtcacagctgaggaagccaaaaagtttctggcccccaaagacaaaccaagtggagacacagcagctgtatttgaagaaggtggtgatgtggacgatttattggacatgatataggtcgtggatgtatggggaatctaagagagctgccatcgctgtgatgctgggagttctaacaaaacaagttggatgcggccattcaaggggagccaaaatctcaagaaatn

SEQ ID NO: 29843 - DNA, 164 bp, Homo sapiens
  misc_feature (1)...(164): n = A,T,C or G
gaaccttgtcctctggttataatggaggnaaaattaccttttctgaccatgttacccttgagatgccaaatagaagtgcatcaggactagtgtttggggctagagatgcaagtgcgagtgttatcagcaaatatatgacatttaaaccaaggtcgacgcggccg

SEQ ID NO: 29844 - DNA, 380 bp, Homo sapiens
  misc_feature (1)...(380): n = A,T,C or G
cccaacccacactttcacaggatgagcacccaatggaactgcataaagaactcattctaaaaaaagaaaagcctagcatgtaaactgcacatatgccactccaaggaaaacacatgatctgtcctgaacagcaaaggtttaagaattacaagttatgacacttacatgtccatcacatttcagaatcttgctttaattcttcttctttttatattttactttagtgtcgctctcttcagaatttgcccaacatttaacacaactatcaccatcatcctctttgtcttcacagtgatgaacacaagagtcatcacctgcagaaatcaataatccgtcctatttatgttcttaagtcagccatgtaggagaaataactgcgn

SEQ ID NO: 29845 - DNA, 383 bp, Homo sapiens
gcgtctcactatgttgccctacctgggctcaaactcctgggctcaagcagtcctcctgcctcggcctcctgaagtgctgggattataggcgtgaaccactgtgcccaaccttagctgaagatttttttaagtattttttaatgtagtatattaacatttggcttagatattagcattttctgatttttttatttaatagattaattctaggcattttcataaagatttcttttctataaatcttatttttacattgacttcctttaatgagatttgatttggctagatacatgattactcataagaatgttgcaagtcattttaaagaaacattaaaacactaaaaatagcaaccttaaaattataagtactcaaactgtaag

SEQ ID NO: 29846 - DNA, 378 bp, Homo sapiens
cctacttcattatctccccaatatatctacctagtccatagactggctcagagcaggcctttgacaatatttaattttatcccacaatggcatttcaattcctttgtcattctgagaaaaatactaacagcatgggaatttggtgcatggatcattaacagtaagacattaaaatcaaaatgtaggcaggatgcagtgactcacgcctgtaatcccagcacttcgggaggcaaggcaggcggatcatgaggtcaggagaccgaaaccatcctggctaacacaatgaaacccagtctctactaagaatacaaaaaattagccaggcatggttggacgtgcctgtagtcccagctacttgggaggctgaggcaggagaaa

SEQ ID NO: 29847 - DNA, 384 bp, Homo sapiens
ctttttgtccagacttctccctctgcctgcgatgttcttttccccttcttccttgggcaaattccccctatcttccaagacccaatgcagaggacaggtttactagaagccccttcagggtactcccagtgcctagaatccagcctgtcattttggttgaataattaatcagatcaagaacatcttccctgagttcccaacagagacgcccccccacacgccctcgtgctccctgcactcctcctccatgctatgttggaacttcttgaagtcaggcttcatttcttttctgtttccttccttgcttccttcctttctttcttttttttttttttttggaaaaaaagtctcactttgtcccccaggttggagtgcaggggccca

SEQ ID NO: 29848 - DNA, 379 bp, Homo sapiens
  misc_feature (1)...(379): n = A,T,C or G
ctcccatgtagctggactacaggcgcccgccaccacgtccagccaatttcttgtatttttagtagagatggggcttcaccgcgttagccaggatggtctcgatctcccgacctcatgatccgcccgccccagcctcccaaattgctgggactacaggcgtgagccactgcgcgcggccctgggccccctgttttattgggggtcactcaataccaccctccctctaataagcacagtgtttctgggttttacctgcccaccaatgctgaaagatccctccaggatttctggagggtgagaaagaccctactccttccaacaagaagcagagccttagcgtggcacaatcagaaaggaacatgctgcatcaagagtggtn

SEQ ID NO: 29849 - DNA, 384 bp, Homo sapiens
  misc_feature (1)...(384): n = A,T,C or G
tctgcccaggctttgcttacactcactgggctcgctctgcctgctcggcccagcagggtgctctcagctgatccccagcccagatcccacgaccactgccactccgtgctcagcccatggcgggactgggtataccgcatgtggcttccacagctggactccagcattcagatgaggggaacgtggtggaacccagaaactcggagacggcagcaaccgtggagccccaagggggtgtcatagcttctgcctggggagtcccgaggtctgagccaccagggaatgccacagccctctcttgttcctgccgctcacagctccctgaatgggggtgtgttagagcttgtttattcctgctgcgcatggctttgtgaatgggggtgn

SEQ ID NO: 29850 - DNA, 369 bp, Homo sapiens
caggagcaaggatggagaggctggtgatcaggatgcccttctctcatctgtctacctacagcctggtttgggtcatggcagcagtggtgctgtgcacagcacaagtgcaagtggtgacccaggatgaaagagagcaactgtacacaactgcttccttaaaatgctctctgcaaaatgcccaggaagccctcattgtgacatggcagaaaaagaaagctgtaagcccagaaaacatggtcaccttcagcgagaaccatggggtggtgatccagcctgcctataaggacaagataaacattacccagctgggactccaaaactcaaccatcaccttctggaatatcaccctggaggatgaagggtgttaca

SEQ ID NO: 29851 - DNA, 191 bp, Homo sapiens
tggagactaaaattctcaggaaaatgagatccgtgttagattagaagtcctgatgtgaaatgggaggactcaggaaggaggatcgtctttacctgaggatttctagccagaggtcccagatgcctgggctgagaacccagcgataagggggcgttcccaaagcagacacagggataaggtcgacgcggccg

SEQ ID NO: 29852 - DNA, 364 bp, Homo sapiens
tttgaagtcatgtttttctgagttcaagctgttggaactgaccaccctccagcctgccttagtactgcggcaagagcgtaggttcaatgtgttttcaagagaaaggaaagaatatgttgttaaagtccattgggcctcccaggcccctccaggacaatggatttcatcatgtcgaccccacctcttgggtgggctcctcctttccagtgaaactacacctgaagccctagagatggcagaatcaggagcaagcttctgcatggaaacaggattccatttagctggctcagtcagggaacttgttttgcttttgctttaaaagatgcagcttcaaccccttccccctactcccgacttggagggg

SEQ ID NO: 29853 - DNA, 241 bp, Homo sapiens
gggtgacagagcgagactccgtctcaaaaaaataaaataaaaaaagattggagtaatacttgaatctccatatcaaataggtgggctaaaactcatttcaaatttttaaccccaaaatcttgatacctagtattatttgaatttctttttcctttactcattcaccataattgtttgttgtaactattgtattcttactgaggattttttttttcatttctaggggaagtcgacgcggccg

SEQ ID NO: 29854 - DNA, 366 bp, Homo sapiens
ggaaatttaattatcattgctataattaggagggaacaaagaaaataaaatgaaatcaaagtacttttattaaattcttgctatataattgaccaaggctccgagcctagacctgctctatttgttaaagaaatatgggggcagtgtgggaggagaattagaagtactggaaaagtgttaaaatgttaaagacatactgactgtttttaatatattaagaagaaatgaaagaaaactgaatgaaaaggaaagggaataactttcttattaaatattatttcaatgctatttaatgtcacattcatgtactacctaaaatcatcactttgccaatcacggtagacatcacacacttttgagatacac

SEQ ID NO: 29855 - DNA, 367 bp, Homo sapiens
  misc_feature (1)...(367): n = A,T,C or G
cgtttccattattcaaggtatgacatgcaataatttataattttactgaggcacaaatttgaatcatgcaggcaaagctggtgtgcagcagcttaatgaggaagtcatgcatctacacatcaacatggctttgctgcagtacctatcaggaagcaaaataaacatctgtggaagaaaaatctcctgtcttctcccccagctagaaagctaactactggtgctgtatttgtacttttaaacttggggatctgcatagttctaatgacttagcttttaagaataccacaggcctaccatatttccatttttctttctataacctttgccagagttaaaatactaatgatgaagaattgcaacttcagtn

SEQ ID NO: 29856 - DNA, 377 bp, Homo sapiens
tcgctctgtagcccaggctggagtgcagtggtgcgatcttgagtcactgcaacctctgcctcccagtcccggttcaagcagttctccagcctcagccccccgaatagctgggagtacaggcacgtgcaccatgcccagctaatttgtgtatttttagtagagacagggcttcaccatgttggccaggctggtcttgaactcctgacctcatgatccacccgcctcggcttcccaaagtgctgggattacaggcgtgagccaccacgcccagccgcaagcttttgtttatgccccttcctccatcttcagagccaccatagcctcttcagatctctgactcttctttcttcccttccatttataaggacccttatgag

SEQ ID NO: 29857 - DNA, 297 bp, Homo sapiens
gcattttaatatcattgtccattgaatgttctgtcagactattatcaagctgaggggtggagttcaaaggtaaagaattggcatggcactgagctgcagccgcctgcaagtttgttaatttgcagccctgggaggaatttttgaagcttgaagcacttttgtttgtgcatgaagactccgcactgctattggggcatttgggtgcctctccattcgtcccattaaagttggggggctggacgttgacttgcactgaatacgagctccgtcctgggcagcaagtcgtcgacgcggccg

SEQ ID NO: 29858 - DNA, 366 bp, Homo sapiens
  misc_feature (1)...(366): n = A,T,C or G
ggaacagctctttggactaacagttaaatttacaaggggatttagagggttctgtgggcaaatttaaagttgaactaagattctacgtatcttttggaggtttttcacttagatttgcacttagtcatttagaaaagaacaagcgacttgttcttgttattacacgtgacaaaaatactatttacaaatgatatggtttggttctgtgtccccacccaaatcttatctttaattataataattctcgtgtgtcaagggcaagaccaggtggagataactgaatcatgggggcagtttcccctacgctgctctcatgatagtgagtgagttctcaggagatctgatggttttataaggggctttccn

SEQ ID NO: 29859 - DNA, 378 bp, Homo sapiens
  misc_feature (1)...(378): n = A,T,C or G
ctacgagcacagcatgaacctgaatggcaatttagcagctgcatttcaaaaatcgagtccaactagagatacactcccaagagcctgcctctgaagtgctaacctgcaaagatttggaaacacatttcttcactactgtggaatgtgtacattgtgtcgtctgtggatacattagtaggtctctctcttaagtacctaaggggaagtttctaaacatcagcctcactcaccaatgtcctaagagcagagtgttaatagtgcactaacaacatcctggacagctgatatggtatcttacatctccagaatggtaccaaagcagttactgggggattaaaaatgagaatttgacagctgttgtaagatttcattttactn

SEQ ID NO: 29860 - DNA, 353 bp, Homo sapiens
  misc_feature (1)...(353): n = A,T,C or G
gctccatctaaaaaaggggaaaaagaagggactttttttttcccaaggccattcttatacctttaaaaacagcaaatttatagaccgtaaacaaatcaagggtttcctttgatgggaggacggataaatgcaaaggggcacatgaaaactttctggggggacaaaaatgttgaataaaggggacaaccataaaactctataggcttactaaaaattattgaactggacccccacaggccaggggcgggggttcacccctgtaatcccacccctttggaaggctgaggggggggatcacctgagggcggaactttgaaaccagcctgaccaacatggaaaaaccctgtctttan

SEQ ID NO: 29861 - DNA, 343 bp, Homo sapiens
ctcatggggaatgtggggaaaattctacgctgacaagagaatgtctgtactatccagccacacagagacaatgtaaacctgtggtgatcaatgatgtttagtcaagaaagtatccctggcgctgagatttacatgtacactttttttccagcactattgacgtaataattgacaatacttgtggtcaaaaaatgacttgatatgatttcacttttcttaaatgtgttaagacttgtctgaggtccagtatatgatctatcctggagaatgctccacctacaattgagaaaaacatatattatgctgctgttggatgaaatattctgtacgtctgttagcactg

SEQ ID NO: 29862 - DNA, 352 bp, Homo sapiens
agcgcttaggactgcacatttacatttcccaaatgatctgggtagatggggacaggtgaagacttggggaaacggaaatatacgaatgacatgagacatgcatatctagtgtcaatccattcgactgggcacaggacagcagactgctgacagtgctatgtaagattatgagtgatcctccctctattttgcaaacagtctgtaagtaactgataaaactttaaaatatgcaaattttaaaattatatagtttgatttactcatcaaattatcatgtatgctgttatttaagtatgaataaaggctttttttaaattggcaaaaaaaaaagtcgacgcggccgcgaattcca

SEQ ID NO: 29863 - DNA, 342 bp, Homo sapiens
gttggatcctccatatcttgcgtatatacatgggctcaattattatgttaggataatcaaataagaatactagttcaatgattagcactgagtggttgttaggcagtcatgtgctcaacactgatgtcacctctttctgtaagcatactgagtagagacattttttaggtttaaattgacttaaatgaaagtgaataaaaaggccttttcaaaagaatgggtttgaaaaacctcagtaccctttaatacatggacatttctttcctttcttcatttaatataacatgtgtctgttgtaactgtgtttcttaaatgttattttaagggtatatgttctttaat

SEQ ID NO: 29864 - DNA, 343 bp, Homo sapiens
gtcgacgcggccgcgcgcgaagtcaagagatcgagaccatcctggccaacatggtgaaaccctgtctctactaaaaatacaaaaattagctgggcatggtggcatgcgcctgtagtcccagcttcttggaaggctgaggcaggagaatcgcttgaacccaggaggcagaggttgcagtgagccgagatcacgccactgcactacagcatggtgacagagtgagactccgtctcaaaaaagaaaaaaaattcttcactacacactaatgacccactacacaacccaagaactagatcccaagctttcatattaggattttttgtgggctgtttctgcccttttt

SEQ ID NO: 29865 - DNA, 345 bp, Homo sapiens
  misc_feature (1)...(345): n = A,T,C or G
ggttttgagacagctcatgtaatggaaagctcttaagaactaggtttagaaggtgcagagaccagggcaacttcagggatccaggtagcaggaaggaatcggtagcctctttggtatggccactgtggtggtagacactgtctaccttgtttgctgagtcttctggctttcttccactcttcctgctcttggacatcagactccaggttcttcagcctttggaatctaggacttgcaccagtgggttggttgccaggggctcttttgggnnnnnnnnnnnnnnnnnnnnnnnnnnnnnnnnnnnnnnnnnnnnnnnnnnnnnnnnnnnnnnnnnnnnnnnnnnnn

SEQ ID NO: 29866 - DNA, 292 bp, Homo sapiens
gccaaatgcgacgcgagcggtcgaggggatataagaccttcttcaacacactctaccataacaacattccccttttcatcttttctgcgggcattggtgatatcctggaagaaattatccgacagatgaaagtgttccaccccaacatccacatcgtgtctaactacatggattttaatgaagatggttttctccagggatttaagggccagctgatacacacatacaacaagaacagctctgtgtgtgagaactgtggttacttccagcaacttgagggtcgacgcggccg

SEQ ID NO: 29867 - DNA, 287 bp, Homo sapiens
ccgcagtctattaacataacggagctgaatgtgccgcacctataaatgctcaagaaccatctggaccatgaagcggagttcttgtccacgctcattgctcacctcaaagtggcacagaccaagtatggggaagccaaggactgcctgaacgtgctgaacaagagcaacgaggggaaagaattactcgtcacactgacgagttctatgtatgtccctgggaagctgcatgatgtggaacacgtgctcatcgatgtgggaactgggtactatgtaggtcgacgcggccg

SEQ ID NO: 29868 - DNA, 379 bp, Homo sapiens
atttgtcactgctttgtaatagaaatatataagtatttttaacttgaatttcaaagaatttaagattttttattaaagctctagtccaagtttccagctgttaaatttttaaaaaatataatttgggtctctgatagaacttagctgggctaagctacttggataaccttacaggatagtgaggttcaaacagagatcatttcctgaacatggctgatctttaagagaacaatttcctcacccaaagttatgcaggatactgccagatctccaatacaaaaaacctgccagaatttctagacaattgtttacaatccatgttaaaaaccttgtaccaccagaggcaaagcagataaagtaaacttgtttctagtctaga

SEQ ID NO: 29869 - DNA, 236 bp, Homo sapiens
ggcaacctcatgcttgtggaggtgattccaaaagagccgctcagcttcagcgtcttccactacaagaatcccaagctgcagcacacagtccaggccaaatcccagcaagacaaacgcctctgggttctgcacctaaagagactgattctggagaaccatgcagccaagattccagctaaggccaagcaagcaatccttgaaatggatgccattcatcatccaggtcgacgcggccg

SEQ ID NO: 29870 - DNA, 388 bp, Homo sapiens
  misc_feature (1)...(388): n = A,T,C or G
gacgtgtacgcgttgacgcaagnactttatatttccttaatcttatgtaagattatagctgttgactttagctatatatttgcaagacaaaatttcaaggtgtttttaaatgtagactgtttaagaactatgaaggctggccaggcatggtggntaatattctcctcccactatttttttcacctgcatgctacatgtaaaagatgaggtgtggtgatcaagaccggcctggcccagtagtcgcacatccttctttttttgactttacgctaatgatcttagccgcgacctactcaccctcccaatcaagaggggggagattccttcattttccaccttaattagccctgttttaattcaggtttggaacaacgaaaaaaaccataat

SEQ ID NO: 29871 - DNA, 383 bp, Homo sapiens
  misc_feature (1)...(383): n = A,T,C or G
tatctcctaaaatgatcagcaacttatgcctgcacttcattaaaattatcatgttcatctagggtttcatctcctgagataagggtttaagtctgtatagttagcttacttttggggacttttgtctcatgtattattgggacacattgcagaatctttcttctaattggtttttggatataactaccaatactaatcagctgtgggactcaccttatacttagttactaaagggcacctccagtgctgattgggtcttcttgtttgtagcataattccttcttttggctantgctgtttggctcactactaattttattcatgctgttcttcttacaaagataaaaacagacacanctatgtgctctataaatgaacacatn

SEQ ID NO: 29872 - DNA, 388 bp, Homo sapiens
  misc_feature (1)...(388): n = A,T,C or G
aactccaccacatacacggtcatacagagatactgttatggcatctttgacgaggcttatgggctggactttgacaatctgatctgtcaaacaccttaaaatggccagaagtatggtcgcacaagctctggagccatacatgacagtgacctgaccaacggtgcagaagggatgctggccacaagctccaatgggtctcactacagcggctccagggtggagactacggtgtcctacgtcggggaggacgacgaggaggacgatgacttcaacgagaatgacgaggacgactgacgtcctccccacttcagattcggcttcaggaaaacgtttagcgaaaagaaactttctttttaaagtgggctttccgggcccttttggcctaccn

SEQ ID NO: 29873 - DNA, 379 bp, Homo sapiens
  misc_feature (1)...(379): n = A,T,C or G
gcagacctttggcggcagcaccacagttctccaggtgttctgaactgggaagatggggaagagggcacatttgttggggtgtgtctgtgttgtgtttaagagctaggatgttttccatgcgttcttttggtttcatttttgaatactgttttccgtaagtgaagatagaagagttgtccagaagagaaggagctgtgtagattctgaaagaagtatttgtctgtgaggcacaacagtattgttaaattaattttgacctttgtttgaggggagcattttccagtgattggctattttaagagtgccaatctaataacccctttaaaagcacttagagtaataggataaaattagacttttaaaatatcactttttttgn

SEQ ID NO: 29874 - DNA, 384 bp, Homo sapiens
attttttcaatctgtgttttgaattgttttagtgtgtgttatttaaaatattacatatgcagctgggagaactacacctttgtgcacatagatttatatattaatttgtagaaaatattttctttatatatttccttaccatacaaggtgccttgttcatcaggaaaacttttgttttgtattttgacaagaaaggcaccttcagagtttctttttaagtataggtgacaagggtataaatgttacacttactttcagagctctttttagatctaaagaagtcagttcaaaaatggaaatcaacaatgttaggagaaatctgaattctgttaacttagtaagtattatgtatagcatctgcttttaaccatttccattcttatg

SEQ ID NO: 29875 - DNA, 383 bp, Homo sapiens
ttcaccacatccaaggtcatctagcttttctcttatgttatcttttaggagttttatagttttgccttttacatttagatctgtaatccattttgagttaatttgtgtagagggtgtacaagtctgtgcttaagttcatttttttttttttttttggcttgcgtaaaaaacagaaggtccccgttccggaacttttccatcggcttactattaggaaaggactacaaggctgttgggcgggaactacaaggccaaaaagaaaatgtgggcttaaagccaaactttttaccttttaagccaaacctagttagggaaaggggactgggcccatataatctaaagagggatttgaccctttttatcttcgcagctactaccccgcg

SEQ ID NO: 29876 - DNA, 364 bp, Homo sapiens
tttatttactcttttagtttttactttttgatttcaagagaaattttacaattatgtattctaaattcaaatctgttctccttgttctcttctaaataggcaaggtatgagtcaaacttagagactgcagcttaaatttagagaacacattggtgcaattccacatcaaagattttacatgaaaattaagaggatgttggcagtttactaaatgtgagttaatataagtctatagagctctgccatattctttatttttccatatttccctaaatgtatcctatccttgaaaaacaaaatccgtaatactcatcaaggaatcgtgaaaaatgtcaagcaatattttctgtaggtgatttttttt

SEQ ID NO: 29877 - DNA, 411 bp, Homo sapiens
cttttttattgctcttgatgctctactcaatgtactgtccatatcttttgtatttacttcaaaggattctggatcagcagtataaataagattctcagcatctgctttacaaatggtgttagctacatgtcgacacagcatctttagccagttttcttttggaagttcatctgatgtcatctggaaactgagtagcacatttgcctgctctgttggtggcctcacaagcaaggcaaaagcattatggcaatcttctgtctctcttatgtccaataccttcttaatctgagaaagaggcattaggtgaatatgcttaagagaagctgggggtcgggtttggccatgaggactcctataagtgccaataaccttgtgccgctttcttgctatctctaggcaatcattgaagag

SEQ ID NO: 29878 - DNA, 387 bp, Homo sapiens
ctcgggtggaccacctgagattaggcgcacacacgcggggacgcaagatggcccaatcatccagtaaatcccctgagttgctggctcgatactgtgactccttgttgaagaaaagttccaagaacccagaggaggcagaactagaagacacactcaatcaagtgatggttgtcttcaagtacatagaagacaaagacgtatttcagaagttctatgcgaagatgctcgccaagaggctcgtccaccagaacagtgcaagtgacgatgccgaagccagcatgatctccaagttaaagcaagcttgcgggttcgagtacacctctaaacttcagcgcatgtttcaagacattggcgtgagcaaagatctgaacgagcaattcaaaaagg

SEQ ID NO: 29879 - DNA, 380 bp, Homo sapiens
ctcaaatgatcctcccacctcagcatcccaagtagctgggactacaggcacacaccaccacacccagatagttttttattttttatttttgtagagacaggggtctcactatgttgtttaggctggtcttgaactcccgggctcaagcaatcttcatactttggccttccaaagtgctgggattataggtgtgagccactgtgcccacctgatgaatataatatttatattaaaaaaaaaacttcctccactgaaaatttcagctttatatctctatatgcaacctttttagggataatatactttatcattcctaattaattatacaggcaacaaaaataatatataaatagtgatataagcagcactataatgctttt

SEQ ID NO: 29880 - DNA, 384 bp, Homo sapiens
tttttatgtgaattaaacctttcttggcaaccaaattttccgtgatggagtatgtcaaacaccatccatttaactatcagaaatctcaagccacatcacattgctgattatttactacgaacgtatataggggagaagagaggggaacccaggctttataatcattgacctaaatttgacataagctctgccacttactagctgggacacccacatttcatctctcatcttcatttgtaaaataggggtgaacactttcgtagctgaggtaatgtctacaaagaactcagcaatgcttggcccgtgtaaagtgctcagtagtaaccggcagctaatttatcattatctaagaattcacctacaggcatttagaaattaaccttt

SEQ ID NO: 29881 - DNA, 385 bp, Homo sapiens
gttgcaaagtcaattgacttaaaagataaatacaagaacattggagctaaacttgttcaagatgttgccaataacacaaatgaagaagctggggatggcactaccactgctactgtactggcacgctctatagccaaggaaggcttcgagaagattagcaaaggtgctaatccagtggaaatcaggagaggtaggaatgtctgttgtcaccacagtgttctaaacttcagtgtgctttaaggcattgattccttggacctaaggaaagtgtgaacttgaggaaattaatgcttctctcattcctcctcttggcctggagaaatcttaaactgggttttcctttaacaagcttggctgtatggtgggtaggtactgttaggtaatt

SEQ ID NO: 29882 - DNA, 381 bp, Homo sapiens
  misc_feature (1)...(381): n = A,T,C or G
ttaagtttaaaattatataatgataacaaaatattatcaaattgaaaagttacagggaaattagttaacaacatttctttcagttaactttttttcagatttcattggattacaatggaatactgaagaatcagacttcttcctgaaacactgagactggaaaaaacatttaaccttatttttaatacaaagagaaggataggaactattttgtgtggttgttgtaggaaccaaagaaaatgacacataaagcacctaaataattgcctggtatatagctattgctgaatacatccaaactttccttaatttttaaaatatgtccatcggttcatttgaaaatagagaatatctagcataaatatttttgaagctattctn

SEQ ID NO: 29883 - DNA, 383 bp, Homo sapiens
  misc_feature (1)...(383): n = A,T,C or G
ttccaaagtagttgtgccattttgtattcctaccagccatatttgtaagttcccattactccatataattacaagcacttgaaattatcagacttttaatttttgccaatcaggtgtgtaaaatggcatttcactgtcgtcttaatctgcatttcaatcattacttttaggttgaccaattattattattattattattttttgagacagagtttcgctgtgttgcccaggcttgtggcacaatttcacctcactgcaacttccgcctcccgggttcaagcaattcccctgcctcagcctcctgaggaactggcntaagnngcacaccaccacacctggctacanttttgatttttagtagagactgggtttcaccgtgttgn

SEQ ID NO: 29884 - DNA, 345 bp, Homo sapiens
ttatgtcttacttgccaaatttttctgaatgtgacctttttttgctgatttgctgggtttgggattaactagcattattttgccacctttatattgtatttataaaaaaaaaagtactatcaatcaatcatactactttggattgttgtgctggggtaatggggatttaacatcaataaatatttgccaaataatgaataaaaaaataaaaataaaatatgttcacccgggccgaaattccccaattttgaaagggaaattccggaaaacccccggaggtgccttttagtgtgggttgggcccccatcacaattttttttttttaacacgcgtgtggcctttttg

SEQ ID NO: 29885 - DNA, 376 bp, Homo sapiens
cagaaattgccatgagaggcacccatgtcagaagtgaccaacaagacctgccctcagagagactgtatctgaaggacaggtgcatgaggttgcagaagtgttggggatcataaccactagaactgagccaaggctgtttcttgagggctgtggacctcagttaggtccttaccctcacagagcctgtgtttgctcatctttaatggggtgttcataatgtccacttttcacaagctgttatgagactcaaattaggtcagggacatgaaagctcttttgcaaatgattaagccctatacaaatgttaggcattactgcttaagtatatttgtcaaattaatcttgtttcttgatgggtacacctcctacagacagt

SEQ ID NO: 29886 - DNA, 369 bp, Homo sapiens
agaggacagagttgtctctgagcagcctcaagtgggcacacttgaagaaaggaatgacgtcgtggaagcactgacaggcagtgcagcctcgaggctccgcgggggcacttcctccagacgcctctcttccacaccccttccaaaagcaaaaagaagcctcgaaagtgaaatgtatctggaaggtctgggcagatcacacattgcttcccccagtccttgtcctgacagaatgcccctaccatcacccactgagtctaggcacagcctctccatccctcctgtctccagccctccggagcagaaagtgggtctttatcgaagacaaactgaacttcaagacaaaagtgaattttcagatgtggacaagct

SEQ ID NO: 29887 - DNA, 376 bp, Homo sapiens
tgcagttttgatgcctggagcaaattcgaatgcctttggggtcagagcagcttgtggcgaataataatacggaaagagaatgaggaaattttgcccagcttagatatacttgcccttcagacagtaattcaaatgaaaaatgttttaagattctgcattaccctgggggttattgagagagttagaattaatctacattagtctggaagagtctggagggtcatctagacccactattacagtgcttttcaaggggaaacctgggccatgttgaccgtgatctgcattaagatacattttttcattgagacctggtacagacagtcataatgtatttaacattatataacataatgtattaacattaactcacctt

SEQ ID NO: 29888 - DNA, 368 bp, Homo sapiens
caacacaatccctacctttaaggggcaaagggaattaatattattgatcacttaccataatccaggaaacatgcaagctgctttacatacattatgtgattgaatcttaaagacagatattatgttctcttttatacatgaggaagcttagaaaggtttaataacttgtccattatcacataagcaggtagatggcaaaacaagaaatcactcttctgcctctggctctattacaccttactacacaaagacaggcacatgcattcctcctgcagaacctctcagagctgagcttcatttccgctctgatcagtgacctgctaatactgacactgtacctacagaggagcagaactcaatagccagaa

SEQ ID NO: 29889 - DNA, 377 bp, Homo sapiens
cggacatggtgaaaaacaggttaatcaagctagactcaagtcgtggccaagagactcacctcagcatagaggtcggaagggtgggccaggctgccattacaattgctggcagtctctctgcagcagctaagagggacactctggtttttggtttctttgaaccaatctgtattttcccagtctgagtagttgtgaattccacaacaatgcagctaaaggagaagagaataagtattatttctcacaaaaaccaaatacctgaagttccatgtactacagagctttaaaataagctactctagaccagtgatgtccgatacaactttctataatggaaagtctgcatgatccaatatagcagccactagccacatgaa

SEQ ID NO: 29890 - DNA, 375 bp, Homo sapiens
ggctggctttcaagctggaaatgaatgaaatcagggatgcattttctgaaaaactaaaggagataatgtttgtaactgagtgtcctatttctgtttcatagttgctaaccacatgagcccttccaccaatctttttattcggcatagtttctgaatagatgctgttcaatggagttatttgtaactaggggtggtgagatgcagaaggaaggacctggggaaatggcttcttccttgaagtctgagtccatgctcctcttccactgttcttatggccttttctctgccatggaggcagaggtagctggtgcagaatgtcaggtgctgtcatcattcacaggcccagggatgcagacaaaggtgagtgatgggggt

SEQ ID NO: 29891 - DNA, 369 bp, Homo sapiens
gaagaggccatctgttgaacagagaccactggattcaaagatggagagacattatctgagctcccagatccagctcagcctaagccctaaccagacttgccaattattacacacattaacttggtttttttgcttaaggttactgaaatcatatttccaacacctgcatccaagagtcctatataccacaaggggggtaaacacacaaataattattttagtaacactcaccaataattatttgagttgaaaaaaatgctgttctataatgtagacccacataattcatacaaatgttaacccacatgattcaagttacatttgtcattctccaactgcccaccatttcctttcataatgcccacactt

SEQ ID NO: 29892 - DNA, 378 bp, Homo sapiens
tccttctgggctcactgagggtctacctgttttggggaggctgctgcgacaaagagttccctcagcctccggccttgtgtgtccgactcggcagcagtggtgtgtgtttattgccaagtgcgaagcagttcccctcggggcgccgggggtggggagggctgggcgaccaagccggaagaacggggaaaggcgggaccggcggccgcgccagtatctagcgtatctcctgccgttagggcaccctcttttcttgctaaaacaccgactcttcctttcccgtcagcttccatgtggaggtgtatgtgcgcttcccagggatcttgagagtgaagatctcgaaggatttcataggcatattcttttctttgctatgtcatg

SEQ ID NO: 29893 - DNA, 258 bp, Homo sapiens
tggaaaacaggctgcttcttgagaagtcatccggtcatgaggaagtcggctctggaaagctgcgccctccacacctgatgcttggccgtctccataccctccagaactgtcgtcttgaagtcctcctgcttgccccgatggttcttcaggctcactttcattttcttcctcaggtggggcttgagggggtggtgggggaagcttcttttccttctctgctttggcatttctctcttcttctgaatgtcgacgcggccg

SEQ ID NO: 29894 - DNA, 372 bp, Homo sapiens
gtgaggattcactatataggctttatcaggcaaggttgccttcatattgataaaaataccttatctcacttgtaatacataaacattattccagtagaagaggtacattttctctcctttttgtcttcttgcctgtataatcaccataataagttataatgaaatagctcttacataatcaaaggagaaaagaaggacgaaaccaacatgccacagcctagacaattccatccagcactgctgcctccagatctgttttctggctctctccacccagcactgctgccctcggatctatgttatatggctctctcctcgccccactcttgggacttgcttagatgatgggatatgaatattattagacagtag

SEQ ID NO: 29895 - DNA, 374 bp, Homo sapiens
tttttttaaaactttttacatattagtggttatgatccaatgtgtcatgagtgaatttaactgtaaggtggtttaaatcaaatatgcaatgtttacttgaattgtatttctattagcagattttgactatgtttacaggacggtttaaattaaggattatcaggcatgtgagatctttcagttatctttaaagtagatgtatattaagggcttagatttaggatctacatattctgggcattgaataggcagtaacttacaaataagttttgcttaccttttgttctagggactagcactgctatcaatggaaagtatttttaactaatctgttattaagaaagtcatatttttgcatttcagccaaaataaag

SEQ ID NO: 29896 - DNA, 366 bp, Homo sapiens
caagcatcctgcccgccctgctggtgaccatcctgatcttcatggaccagcagatcactgccgtcattgtcaaccggaaggagaacaaactgaagaaggctgccggctaccatctggacctgttctgggtgggcatcctcatggctttgtgctcctttatggggctcccctggtacgtggctgccacggtcatctccatcgcccacatcgacagcctcaagatggagacagagaccagtgcccctggggagcagccccagtttctgggagtcagggaacagagagtaaccggcatcatcgtcttcatcctgacgggaatctctgtcttcctggctcccatcctaaagtgtatccccctgccggtgc

SEQ ID NO: 29897 - DNA, 345 bp, Homo sapiens
gaaagataaccattctacttggagaagtcaggaaaagtttcagagataaggtaacatgaattcatcattgaaaagaattaatagaggtttgataaatagacagagaaaggtaggaagagcattttagacacagagaatactgtctagcaagatccaggaataaaaaaagaactggcatataatggtttgacaaacaatcaggtatggcttgagcacaaagcatgtatggtagagacagaaaaagatagtgaccaaggggaagcctgggaatgaaggcaggagtcagactgtgaaaggcctttatattgcactcagtacaatttttgtaaaataaatgaactgtca

SEQ ID NO: 29898 - DNA, 355 bp, Homo sapiens
  misc_feature (1)...(355): n = A,T,C or G
attttttagaaaatcatgtcatccactaatagagggaggtttaacttccttcttctaatctggattctctctttctctcttccacttctctcatttctaactctctttctcacctaattgccctggctaaaatttctagtaaaatgttgaatagaagtggtgagagaaaacatccatatcatgtttctgatattacagggaaagcttccagtctttcacagttaagtatgatgttagctgtgggtttttcatagatgccttttattaggcttaggaagttcccttctatttctagtttgttgaaagcttttatcacaaaaggatgtgagatttggttaaatcctttttctatatn

SEQ ID NO: 29899 - DNA, 350 bp, Homo sapiens
cgctgttcataagtttattatctatatctgaaaaaatcatagaaaattgctgggtttagctctcagcagcccgctcctgagctctgaggaagcttgccttcttttgagctacccgatccttcttctgagcaagggacattttgggacggttccacctcttctttttaacttctttcttgggcttcttttcatagactggattctctcgtatagcagcatgagctttcttatacatctcctccatcatgtctggagttacgctgttctttatgtattgagagaactgtttcttgtaagcatcttcatcttcttccattaagtagcgcatgtaatctgcgtcgacgcggccg

SEQ ID NO: 29900 - DNA, 368 bp, Homo sapiens
ggcatttcttacaattttatttaacactgttttggccaagcagcacttggcaaacacacatacacactgtggcttactgtaacaaatgcacgatttgtaggacataatacacaatacaagaaaagtataacaaaagagtgtcatctaaaaattccaaatgacccccatctttctttggggctcatcttattccccttccttccctaaacctgacgaaaacccatcccttcacacttccctaggaggtctctgcattcgtgctaaagacagataaagtggagggtgaggatttgaggtgggggaagagataacactccaagacctggtctctggaatgtgtctactcctccccagtctgtcagaggcag

SEQ ID NO: 29901 - DNA, 376 bp, Homo sapiens
gttttttcactgacccgctgaggcaggagaattgcttgaacctgggaggcggaggttgcagtgagccaggatcgtgccactgcactccagcctgggtgacacagcgagactctgtctcaaaataaaaaagaaatatatgaaaataatctgtcctcaaatagatgcgtagttggaaaagggaggagcatgttcatagctttttcatgttaatagccttttcagataattgtagatcttctttgatacaacaccaaaacttggcaagtgataatttcttaaaggttaattgtcatatgtaatctgaaggctgatcagtaaacctttttgtattctgttacattaaaattcatttctcttgcatgattttgaaatacca

SEQ ID NO: 29902 - DNA, 375 bp, Homo sapiens
tcagccttttaaccagtagactccagcactgggatgcactgtggcttacatgtcctgagtgcagggccactacattgcaaccatactagggtctacgtgaatggttcctctggagttgtacaaggtacagcctatttgaacttggctgactatgagtttaaaggaatctttatactccatgttgtacgatttaatggtttttaaggattttgagtgtaaacaagacagaaatagaatccaaatcagcctatggttgtgaattgaaacactgataaaggttttgggtctctcctgggctgttagaggtttttggtactgaatagagctctttgggctcagagaattatgaagcagctattagttagagttggagaa

SEQ ID NO: 29903 - DNA, 366 bp, Homo sapiens
gggtggtggaggctgtggtgctggttgtggttgtggcggcggctgcggctgctgttgcggctgctgctggggtggtggtgggggtggaggctgctggggctgaggctgcggctggttactgggaggcctctccaccacgcagctctgaggtgacttgatgctgcagttggcagcaggctggacgctgctctgctgcatcatgctgcagctgctgcccatgctggccatctgctgagtgaccacacagctgctctgagcgaggctgctggtggaccacaaccctccctgagagcagctgcgtggtcactgaagccggtgtccaccacctgctgagagtgggctgttacggaacgcacatccatcatg

SEQ ID NO: 29904 - DNA, 236 bp, Homo sapiens
aaaaaattagaatgtaaataaaacagactctatttgacatttattgaacctaattttgccaccttgccaccttcatccaggcccaattccttctactctgtttttcctgagaaagctttactttcttgtctctttgatatattttgtaataataatgttaacatttgtatgggggtttgtaattaagaaaatatttccacatacaaatgttaacattattattgtcgacgcggccg

SEQ ID NO: 29905 - DNA, 236 bp, Homo sapiens; identical to SEQ ID NO: 29904

SEQ ID NO: 29906 - DNA, 357 bp, Homo sapiens
  misc_feature (1)...(357): n = A,T,C or G
gagagattcagttagcctcagaagtccatttcattttctctgtatggaatttattttatactcctttgacaaaagtgaaaatccaaattaatatgaaatgtgaagaaactaataaagacagggaattagaaaacaagaggtgaccttaaagtttttctagttcaattctttattttatatgtgtggaaatggaagtccagaggagttaagcaacttttctgaggtcacacagtgtgtaagtgagggaattgtcgtgacagcccagacattctcatgctgaggcagtattctgttgaccaaatcataccgtgttcaaggattcacttcttcttttggcacaacatgatttcaaaaatn

SEQ ID NO: 29907 - DNA, 366 bp, Homo sapiens
ggggggttcttttttttccgttttgtttttgtttggggggaggggggttttgtttggattctttttgtcgtcattgctggtgactcatgcctttttttaacgggaaaaacaagttcattatattcatattttttatttgtattttcaagactttaaacatttatgtttaaaagtaagaagaaaaataatattcagaactgattcctgaaataatgcaagcttataatgtatcccgataactttgtgatgtttcgggaagatttttttctatagtgaactctgtgggcgtctcccagtattaccctggatgataggaattgactccggcgtgcacacacgtacacacccacacacatctatctatcg

SEQ ID NO: 29908 - DNA, 343 bp, Homo sapiens
gtttaccttaggtttgggggatccagccctagggctggagctgtttccctaacttctagtctttgccctgaaggaggaagaaacttctttctggctggccttggatccaccccttggtctctggccgccacttatcgactgtagatagttttctgggggctacattgaaagacccaacttgcttattctatttctggcctagagacctactcttacggaagctattttgaggcctttgtagcttcatttacctaagcatgatattttataacaaaaaaaaatttgtctccttaaacctgtccactggatttctttcatcctctatagctggagatgacagtgc

SEQ ID NO: 29909 - DNA, 355 bp, Homo sapiens
gtcgacgcggccgcgtttttattactaatctatcagggaaaaacacgttgctctttagaaataaatttgtaaactttccagaaacttcgaaatataatctttatgtatgcaaaacttcacatagtaatcacaagaaaatattttggagtacctaattttcaacttttatctaaaagtacaccgataatctagtataatttagcctctttttttttttttggaaagggaattttgcggggccccccgggggggagggaagggacgaattttgggcccatggaacccttggcctccagggttaaagggtttttccggcctaaccctcccaggtagcgggggcttgaaaatcttttga

SEQ ID NO: 29910 - DNA, 383 bp, Homo sapiens
  misc_feature (1)...(383): n = A,T,C or G
cccaacccacactctcacacgatgagcacccaatggaactgcataaagaactcattctaaaaaaagtaaatcctagcagctaagctgcacatatgccactccaaggaaaacacgtgttctgtcctcaacagcaaaggtttaagaattacaagttatgacacttacatgttcatcacatttcagtatcttgcttttcttcttcttctttttattttttccttttggggcgntctcttcagaatttgcccaacattcaacacaactatcaccatcatcctctttgtcttcacagtgatgaacacaagagtcatcacctgcagaaatcaataatccttcttatttatgttcttaagtcagccatgtagtagaaataactgggaaac

SEQ ID NO: 29911 - DNA, 387 bp, Homo sapiens
cgggtaattagaagtcacacagaatacagggcctcaagcctacctcatgtgcccctcacattagttcctgaatcccatgtctccttttttcttggattcattgttcacattgctagagttcaaccccacatgattatttcagtaaagatctgtggatggtacaatttcagaatctttggatatacaaaaataaccatattttgcactctcacttgaaagatagtttttctcagtctgatttttcctcagattgttgtcttccagcaatgatgccaatgagaaacctgatgccacactgattcccattcctttgagcttaacctgtttatctctttggaagcttttaggattttaccttcgtgcccagtgttctaacatttcaccatg

SEQ ID NO: 29912 - DNA, 344 bp, Homo sapiens
gaaggtatgtttaaaaatagaatcttttgggcctgggggtacgcccttgtagtcctagctacttgggcagctgaggtggaggatctccttgagcctaggagttccagactgcactggcgtcactgcactccagcctgggcgacagaatgagaccctgtctctaaaaaaaataataaaatagactattttatagttgaatgtatagttagcaagttatcatctgagccataagtcaaaaattaaatcttaaaaattgtttttatactaaaggtttttcatcttataatatatcttgatattgccatttgtttcggttaaaataatatcatacagcctgatgaata

SEQ ID NO: 29913 - DNA, 348 bp, Homo sapiens
atgttacccaggctggtcttcaactcctggactcaagcgatccacctgcctcggcctcctaaagtgctgggatttcaggtgtgagccactgtgcccagcccgaagaagctttatctgatctgaacctgatttagataaggaggtcctggactttgttccaatgctgcagagagtgagacttctgtggggagaggagtgtcctttgcatttgggaaagatgtgaactactgtggccagagggtgaactatggtagattgcttctaaagatgggagcagcaatgtttcttcccaagcaacattctcctttgaaatgtgactttgccacccatcgcatcaagaggtaaggg

SEQ ID NO: 29914 - DNA, 120 bp, Homo sapiens
  misc_feature (1)...(120): n = A,T,C or G
ttaggacacggactatgatctacacaagtgggtagggcaaaggcttaacaggtgctgagtccaggcactaaatacgtgctcaattagtgggatattttgtagaagacagtaattaatgan

SEQ ID NO: 29915 - DNA, 344 bp, Homo sapiens
ggcttacagaatgatatttgcttctcccatggggattcaaagtaatttttaatgcaacatatttgacaaggaaaaaagggcagattcaatactctactatcactaccaatgaaaaaaggtggtagaacagatactaatcagctatattaaattggccataaacttcactcctactgagatatttctcagtggtcacagataagatggagacttagttaacacggatttttctagctgtgccatatttttttaaagctattaacatttttggctttgaacttttctttttctctttaggttgccaggaattggcagaccatttttgtctaattataacagtactt

SEQ ID NO: 29916 - DNA, 367 bp, Homo sapiens
gccgagtggtggaagaaacgtacgcgcaggcgaatctgtgaggaaatcacgggtcaagaatgttttcagagttctcatagatgggatctgtgaattaggcccagtctctttgatgctaatgtctgagctttgacccactaactcagtgaccatcctttgccattacagggtagtggtaggtgaaatacaagatttcacttcttgccgaaaaaaaaaaaaaaaaaatgtgtcccccgcccggaactcccactttttgaagttggagatccggaaaccccccccgggttcttttaagggggcttgggggcccatttgaaattcttttttttaaaccatggtttgccttttttttggcgccgttttcccg

SEQ ID NO: 29917 - DNA, 345 bp, Homo sapiens
gatcctcacagaaatgttgctggatggtgaatctgtgaggaaatcacgggtcaagaatgttttcagagttctcatagatgggatctgtgaattaggcccagtctctttgatgctaatgtctgagctttgacccactaactcagtgaccatcctttgccattacagggtagtggtaggtgaaatacaagatttcaaatattcaagaaaaaaaaaaacaaaaactggtcccccggcccggaattcccaatttttgaattgtgaaacccggaaaaccccccagggtccctttaactgggccttgggcccccatcaaattttttttttttaaaccacggttggcccttt

SEQ ID NO: 29918 - DNA, 344 bp, Homo sapiens
taactcctaagcggtggggtgaatgtggccgccttagttctgaagctactccagttatgttctgtttcttcaagctgtgatccagaaagatttttgtgcccccagatgcctcttgataggagaggcaacatactccaaatagttgggttcttcagggaagctattagaaactcaggtgacttgttagagcactaacttggtcagagccaaatcctggcaaacgctgcctgaccttcactctgtggttggggcagtgagaaccactgaggtccaatgatgagacttggaggtctggatccagtctctctttgttttaatgtgacttaggtgctgtcaacattagg

SEQ ID NO: 29919 - DNA, 345 bp, Homo sapiens
ctcagtccccaggcatgtatcgacagtgagctgagtacttcagaattggaggatgattctatctccatgggatataaattacaggacctcactgatgttcagatcatggctcgtctgcaagaagaaagtctcaggcaagattatgcttctacttcagcatctgtatcaagacatagttccagtgtgtcattgagttcaggaaaaaaagggacatgtagtgatcaagaatatgaccaatacagtctggaggatgaagaggaatttgatcatttgccaccacctcagcctcgtcttccaagatgttcccctttccaaagaggaattgcccattcacagactttctcg

SEQ ID NO: 29920 - DNA, 367 bp, Homo sapiens
gcggccgcgtcgaccttatatttcaccttttctcacatatccaagttctctctggtcctcctcatgtctcttatacaccaacccaatctagctcccataaaagtcaacacatttaatattctaataaactctttttaagggacttgggattggtatggcaggggcatagaaatggtgggggaggatagtaacaaaatggctaactcggaaatctcaattttttttctgtaattccaggaaagtctcaacacttctgctggggttatgactattctacttattttttcaagaggtaaaagtaatagacttgaaaagaaaatacggctattgggtacatattagtggagaaagaaaagagtgcttcagg

SEQ ID NO: 29921 - DNA, 351 bp, Homo sapiens
cagaggctatgactcaacttctagtgcatacaccgtgggtcattttacataggaggacaaggctactatcacacgcctgtctggcaaggagaatgtaaaacatgcgggaggagaaaccctgagaaggctcctggatgtctacccatgaacccagaggattattgacagcgttgggaacctgaactctgcgctctgccatgatggcgcccgcctcggcttccaaaagtgctggggttacaggcatggaccaccatgcctggtccctgaaaatatatacatatatttttttgagacggagtcttgctctgtggcccaagctggagtgcagtggcgcgatctcggttcactgca

SEQ ID NO: 29922 - DNA, 348 bp, Homo sapiens
atgaaattccctgtattcaataatttggaacaagagtaaacaagcgtaattgctgttggaatggataatagagcaaagtaagcattatccttttttactttgtgccgcatgactaatagaagtatacaaaacatgattaatgccatttgacaaaattttattatatttatatactgtgttaccacatgtccattctccatattttgtgccaaacattctaaatgaataattgagtagaaaagagcttcagcgttttcagaaacttctaggaaactattgaagtgcctgagtggtagatggggagggaggctagtttcttatgttgcattgtaagtgtttttattcaga

SEQ ID NO: 29923 - DNA, 351 bp, Homo sapiens
gctaggactacaagcacatgccaccacgcctgggcaaaatcttcattcacacgaaatcagtgatggggtcattaaaaatgctcggaatccatggatacatattaccctggggttactgactaaaattctttcactagggcaaggtaggctcatgtcagaaatcccaacactttgggaggctgaggtggggggatggctagagcccataagttcaagaccaccctcggcaacatggcttcaccctctacaaaaaataccgatatcagccacgtgtgggagcacatgcccatagtcccagctaccatggagggtgaggcgggaggactgtttgcgcctgcgaggctgaggctg

SEQ ID NO: 29924 - DNA, 350 bp, Homo sapiens
gccaataaagggaaaataagagatgctcatcgacgaattatgcttttaaatcatcctgacaaaggaggatctccttatatagcagccaaaatcaatgaagctaaagatttactagaaggtcaagctaaaaaatgaagtaaatgtatgatgaattttaagttcgtattagtttatgtatatgagtactaagtttttataataaaatgcctcagagctacaattttaaaaaatgatttagcacaagcgaaaaaaaaaaaaaaaaaaaaaaagggtcgccccgcccggaattcccaaatttttaattgctaaatccggaaaacccccggagggccctttaaatggggcttggg

SEQ ID NO: 29925 - DNA, 345 bp, Homo sapiens
ggcggaaacagaccttttggactacaatacgaagaagaaaatgacaggatcctgcaagagtatataggtctgtggatttgatagcacgaagctaagttagctccactctaatggttctattttccttacaaaatagaaggcaagatcatctgttataagtgaagaagaagaaaaggaatctgggaagtctggagagaaagggtgaaacagttaattccgagaggaagagagtaagctacacagagaaacaaagagtattaccagacagtggggaagcacagacgaagttcacagtgctttcaatatgcccaggttggtaccttctttagcactgttcagcagccg

SEQ ID NO: 29926 - DNA, 361 bp, Homo sapiens
ttccaccactttgtggaggagggtcagccaatcccacccaggcaacttggactgttggtgggacacaacttgaggcttcattgttgatacgacatagggccttttatgctgtacctctacaactggagcatgaaaacgatgacgtctagcctctggtatatgaactgtcttaagctgcttctttcaatagggagcttctttttgtacctaaacttttgctaagggtctattaggaggcttaaattcaagtgatagagatcgatggccgcacagctcctgaatcttccaggcagtgcccctgggggcgagatgcgcgtgcagcatgtggagggaatccccaaagcacagcaatgtcctgaag

SEQ ID NO: 29927 - DNA, 341 bp, Homo sapiens
gttttcagtgatttaaatctaccacccagctgtagttgaatctacaatctgctcagggatttatactcaatgccaatttgatatcatgctgggagggactgattgcagaaccttcttgacaagccacataaatctaaaggttagtcattcctcagtcttctctttgggatataacaaagaatagaacgtggggcagttgactgcatgcctcttactaatgacagcacatgtgattaaaagctaatcctcatacagtgctttagcacttacatggacccaactgccttttgtaatcctgtcgagtaaacttgatagagagcaaaaggtcatgataccaacag

SEQ ID NO: 29928 - DNA, 357 bp, Homo sapiens
caagcacctgtagtctcagccacgtgggaggttgaggtgggaggatcgcttcagcctggaaggttgaggctgcagtcagctgcgatagcactactacactccagccttggacaacagagggagaccctgtctcagaaaaaaaaacaaaataaaacaggttagaaattgtaatgaggtctgctgggcaaaattccatataagcaaagtataaattaataaagcaaatcgtgataaattagtacgattgactttctggagtttctgacaataaaagtaaggaaaatgcagaacacaaagacagagagtaaaaagagaaattaggaaagcattctacatgttgaataggaagacactggc

SEQ ID NO: 29929 - DNA, 340 bp, Homo sapiens
gcacgatggggtgggaggattcaggacatgaaagggagggtggacattgagtacttccccgagcaggatggggtgggaggattcaggagatgagagggagggtggacattgagtacttcccccagcaggatggggtgggaggattcaggagatgagagggagggtggacattgagtacttccccgagcaggatggggtgggaggattcaggagatgggatggtctgacttgacccttgagtcagccatgtccgtgctcgtcagtactgctactcgtttgtcaccttgaaaatacttgttcacttattttaacttcagtttttcgctgattgaaaaataca

SEQ ID NO: 29930 - DNA, 355 bp, Homo sapiens
tgtaaaggcagataaaggtggctcgccatgtcgaccatgggtgcagtaacttaaacagagagtactgctgtgtggacggaacccagactgcactcctttctctagctggttgccttaagacagagaccaacactcatggggagagcctgcagtacaaatgcttcacggctgaacagggaaccaccaccaccgatcctgaggctgaaaggggtacaacttaagcccagactaacagactgattctgaactgcgacttgcattcctatggataattctctggagaactttgtcgacacatacactcaaacacaaatctcctgagacataaacagcaagatatgtctctactcagagt

SEQ ID NO: 29931 - DNA, 380 bp, Homo sapiens
aaaatttaaaatgtagcttccatacttgtgcataattccaaagtattttattttttatcaatcagggttaaatagctttttgtacaggcttcaatccatttttcgaagtgtgctgttttttaatgaaagtaactataatcttttcacatcccatggaactgccgtttacacattgcaactttttaaacttaaccatatttttcaaaattaacgtttttggagggagaaaaatccccgcttgctaaatgatactaaaccgttgtttgggctcttataattaggtcctgagattttataaaaatttagtctgtagctttttaggttcttcactagagttggttgtacataaaaataataaagaatataaagtatcccaaaat

SEQ ID NO: 29932 - DNA, 343 bp, Homo sapiens
tcgaattaaaacacacacaacgggtacacacaaatatgaaacattaaattaaattacaacaccagagaaaagtatcctttctaaatggaatacaagaagggaagaaagaaggaagagaagattgcaaaaaaaccccagaaaacaaataacaaaatggcaggcaaaaatcgttacctcacaataatgacattgaatgtaaatggcctaagctctccaatcaaaagacatatagtgggtgcgtagatagaaagcaagagccaaccatctgttgctacaggaaacatacttcattataaagacacatagagaccaaaaacaaagggatggaaaaagatatttcatg

SEQ ID NO: 29933 - DNA, 350 bp, Homo sapiens
  misc_feature (1)...(350): n = A,T,C or G
ggtcaaaggatttgttttttaaatcatgggaaactcaggttaacaaagctattatagattctctgccatgccttcaagagatagagagagcctgatgcgttacatatggcagaaaataaaagactctgattactttgctacctttaaaaaaatctatatttttttgcaaaacagcctagggggatctaccacctacacagcatgaattattcataagtcataggtgcacatgtatgagcaagttatttttgagaaagaaactgcctataatataataaacctgtcaggtctttgggtattgtttaatttgtgtgttgttgctgttttatctggactgcatcttgnggggt

SEQ ID NO: 29934 - DNA, 348 bp, Homo sapiens
  misc_feature (1)...(348): n = A,T,C or G
aaattatgcaacctctaaagagaatcttttgatatttatcaaaacttttaatgcaaataacctcttgacccagcaattcaacttctaggaaattatgctactaatatttttgcacatgtacaaaatgggacaactccatatacaaaataacaaagttggaccctgtttagggctgaattatgtctcccacatccccaccaaaatttaggttattaccctagatcccaataactccaaatgtgaccttattcagaaatgggatggcacgcggncnnnnnnnnnnnnnnnnnnnnnnnnnnnnnnntnnnnnnnnnnnnnnnnnnntnnnnnnnnnnncntntntttttn

SEQ ID NO: 29935 - DNA, 368 bp, Homo sapiens
gccaggctggtctttctgtttcttgacctgggtgcccggttacatgagtgtgttcacactgtcaaaattcatggagctgcacacttatgatttgtgtacttctctgtacatatgttattaatatatttcaataaaaagtttactgagaaacaagctgctccaaaactcagcaaatatcttgttgaaaaaaaaaactgggccttaaagcagtaatttagtttttatttttaatgttctatgaaaattaattttctgtatgaaaaacaatcacttctattgaaatattaccttacataaaaggaaaaatatttaaaatatacatttatactgtaaaatgagaatatacgttatccttacatcattttgcg

SEQ ID NO: 29936 - DNA, 344 bp, Homo sapiens
ggaggagttcagtggggcaaaccgaatgtgtgaggaacagcaaggtggtcagggcaaatagagaggcttgagggcagggaatggtggaaacgggccaatactttaacaacagacaatgtctattggctgtgctgtactcactgcttcaggcaataaaatccatgcccttttttttttaatttaaaaaatttttaaatttatgtggggcctgtttccagacagccagcttacggccagctgagtgctccccaagaagtttttttttttttttattttttgaaacggctttttgtttttcctcccagtttgtggggcaatttttggaagggttaatgggtagattg

SEQ ID NO: 29937 - DNA, 344 bp, Homo sapiens
gttagctctaaggatgcttccaagactttagttgccatcagagaaagactaattagcaacaacagctgattaattagcttattaaactgtaaaaagttagtagacaagttcaaataggatgtattcttctagaaagcttgtatcaagagaaatgatatgattcgcaataaaaccaaaaggaaataaattttttgttttagtctcctcattttccatatgcgtaaggtcaaagtgaatgacaagatttactgatttaaaaaagtatatatatacatatatgtatagtcttaacatatataactagtgtgggtctcatcatgagcaaaggtgcagctgtctttagt

SEQ ID NO: 29938 - DNA, 353 bp, Homo sapiens
cgaccttgcattaaaaacgacctctcctcctgatgagaactgttactggtctaactagaaatgtggggctacattgcgggaacttgagaaatgggggctctccctgcaccgagacagcgcagtgggtgcttggctgataataacacctgtaaagaggccgcaagatagagacttcagtgagatgcgttttcgtccaagttcgtcagagccacctgggcaatgatcttgagtcagtgtctctttggtggttttagcacattccaggaccaccaatactaccatttactatttttctttaacactcagctctcaagttttgaagtctgttcttcgttaaacgtgagaggtcaggg

SEQ ID NO: 29939 - DNA, 350 bp, Homo sapiens
ctgaaatcggagtgtccgtcccagcggagtccccgcgttcgaggtacgccaatacatgtttacacacagaggctgcatcatacagggatagggccccacaaacttcagtgaccatagaccatgagggacatgggccggagagcactgcttcccggagcttcacctgcacctacgtacctgaagggaaaatcatacgtaagagaggcaacagcctgcacgattgcctagttcagatgaagccgactagctcctgagaaatagaatgccagtacagataaaagatttatagagaatggatgaaaggaggaaggtgtccatgtcatggccactgggtctcctccccagcattt

SEQ ID NO: 29940 - DNA, 344 bp, Homo sapiens
tgaaaatggaggtattcttcaaaagatattaagaaattctccctatcaagacttatttatctatccactgatggttgttacatattaaataagcttaactgcccagtttctatttcaactcttccaaagtacttatttgtccagacctttgcgttcccatataaagtgctaaatcaaactcaattatctaattatctatatagaagccacccatacaataactcttagagccctaggcccatgtaaagatttcacactagccccattcttttcttcttctttttccagtctcaccaaggataacatactcttatttctctaatccaggctaagaattctgcagg

SEQ ID NO: 29941 - DNA, 142 bp, Homo sapiens
gtcgacgcggccgcgctgaaagcaatctccgaggctcccctttctggctttcggggagccagagactgaccggacacttggctctgtgtgtgtctgccccaggcctgcacacgcagagccaagtgtccggtcgacgcggccg

SEQ ID NO: 29942 - DNA, 91 bp, Homo sapiens
  misc_feature (1)...(91): n = A,T,C or G
agtacagccatatgtgtaatcattttttagtacaaaatattccctgtagccagacatttatcttcagaataatcacaccacattaaatcan

SEQ ID NO: 29943 - DNA, 302 bp, Homo sapiens
tcgaatccggagagggagcctgagaaacggctaccacatctaggaatacagcagcagacaggattccaggaaccagtgtttgatgaagctaggactgaggagcaagcgatcaagccgctgttcgtggtgaagataggaaaatagtccatgatccagtgccatttggtgaaggaagctaggaacaaggaaggagcgctaacgatttggtggtgaagctaggaaaaaggattccaggaaggagcgagtgccatttggtgatgaaggtagcaagcggcttggcttggcaaccgtcgacgcggccg

SEQ ID NO: 29944 - DNA, 250 bp, Homo sapiens
caggccccaggccaggcacagtggctcatgcctgtaatcccaggattttgggaggccaaggcgaaaggatcacttgagcctgggagttcgagaccagcctcctgagttatgctgagcattttaaattcatcatctatttgctccccactacagccccaatttattaataaaaaacaaacaaacaaacaaaaactctgaggcttataaagtttgttgccctccgtcgacgcggccgcggtcgacgcggccg

SEQ ID NO: 29945 - DNA, 347 bp, Homo sapiens
ggagaaagctgggaaaaggcatggggggttttgacccttccatttttgctcactgaggcctcaaatttctttcaagggaaactatagacctggattaatcactatagcaatccagggaagatgtagggagtgccatccctcccattaacacttgaggaggtatatgcttaatttgctacacgggctcctaagtgcaggcatgatagaagacacaaacacaagaagctgctagaaatgtgcagccaaactgtttccagtgagaagctagagggtatactgatcccaggagatacagctgttggaagtgctcctgcagttcaaccccccacccattctactgttcttag

SEQ ID NO: 29946 - DNA, 114 bp, Homo sapiens
  misc_feature (1)...(114): n = A,T,C or G
agattgaaagcantcggccttaaaaaaaacgaaaagcaaactttgcgtttttgaaagcagccctttgcgggctctcctttccattgaactttacattgctaaagacaaaaaacg

SEQ ID NO: 29947 - DNA, 377 bp, Homo sapiens
cttcagatggccctgccctttatcaggcaaaagcagccaaaggcttggcaaagtcaggagagggaaatcagcgtattctgagctagtctccatggtccagaggatgaccatttccttctaataaaaccaatatttctttggtagcataatacaatatatatcaacaatcccaataattcatatgagcagaatgcactcaaagttcaactttgtaaatgttcacatgcatcctggaaatgagatttaacttcctgcacctacatgaaaaagggtggggacagctgcccaggctggaggactactgatgatgagaaatgacacacaatgtgagcagggaaagggatcatttaacaaaatgtgttagcgttgactgggaa

SEQ ID NO: 29948 - DNA, 314 bp, Homo sapiens
  misc_feature (1)...(314): n = A,T,C or G
ggggaagtcatcatttatttgtcttttacatgaaaacagatttgggggagggtgggagagagaacaaggggaggagccagctgcttcgattttctgaagtcggaatgagggcagctgcttcaagacacagatctgggtccccacagtgacatgatgattgtgactggaccggaagcgggttagtgaagcaccattttctcctaagtcttattccaagctaagcaggcttaaggttacagtggaaagtgagagcacacagaggagcggacatgcagcaaggcgacgcanggcaagcagcgaggtcgacgcggccg

SEQ ID NO: 29949 - DNA, 345 bp, Homo sapiens
ctggacaggagcgtggggctacccgctctcaaggcaagcagcaaagagttattgcacaaacgcaaagaactaggtctcttattcaatgcaaagggatgtggggaaaaccaccttctttttacccccacttttattttataacaagctattctccaatgttttaagaattttgggtgaattctcacatctccagaatacacgggattttttttttccaagaggtctcaaatgggggtacgtgagatgcccgttttctcaagggaagaggcagaagatggtttgagagagagaaatgcatagactaattagagaaaaatgaaaaaaaaaaaaggcttttggggaaag

SEQ ID NO: 29950 - DNA, 358 bp, Homo sapiens
taaagtttatcactgttgccaggataattacagcaggttatgtttggtttcatttttaagagtggaggtgttcatgattctaagctcaggaatcttgtgatcatgtattaaatatgttatctcatactataatgataaaaaagcttaatgatgtgggttgggatggatattaacataaataattgagtccgctgcttctatagcaatgctgtaggatagaacaataatgtaagtgatatatgtaattaaaaaattctagaagccacattaaaaaataaaaataaacagctgaagttaattttaatattttatttaactcaatacatccaaaatgttatcattttaacatgtaattgat

SEQ ID NO: 29951 - DNA, 337 bp, Homo sapiens
ctttggatgggctgtctcacgcggatgtggttaatctgctgaagaacgcctacgggcgcattatcctgcaggttgtagcagataccaatataagcgccatagcagctcagcttgaaaacatgtctacaggctaccaccttggttcgcccactgctgaacaccatccagaagacacagaaacacctccacctaagattattactttggagaaaggctctgaaggcttggggtttagtattgtagggggttatggaagtccccatggagacctgccaatttatgtcaagactgtatttgcaaagggagcagctgcagatgacggccgattaaaacgagg

SEQ ID NO: 29952 - DNA, 341 bp, Homo sapiens
aagggatatgcaatttggttagaaccttcgtgacagagtttaaattaaagagaacttttcttaatacaactgtggaaaaacattcagacctacaagaagttgaaaatgagatcaccaaaacgttaaatatgtgtttttcagcgttacctagttacatccgatctacagttcacgcctctagggagtccaacgcggtggtgatctcactgcaaacaaccttttccctggcctccaatgtgacgctatttgacctggctgataggatgcagaaatgtgtcaactcctgcaagtcctctgctgaggtctgccagctcttgggatctcagaggcggatctttaga

SEQ ID NO: 29953 - DNA, 352 bp, Homo sapiens
gaaagaatcattaggaagaagaatagaacagaaagaacatttaaaaaaaaaaattccttgaagggcagtttggatgtgcctgcccaaatttttaatgggcttcattttaagacaatcagacttctagaaatttaccctacagtgtgcaaggatatacacacaaagctttatacattgcagcatgcattggggtattatcctaatgtaaaatctgaacaaatttagatcagaaacaactgatgaaatatattgtgatatctattcgagatgttgtgcagcttgtagggagaatgaggtagaatgaggagggagaagaacacagcattgacatctactccggactcagcctggg

SEQ ID NO: 29954 - DNA, 379 bp, Homo sapiens
atttatttaatttgttgactctggcttacaattttgtcttctgtttccatatctgggtcattagaagccccttcaatcccatcatcccttttcccttcaaatcagggcaactcagagatagctttcttggctggggggcctgttggcttttccttttctctcgctttttcctcatacatcaggatcatttttaggatggcagatctcttgcccagcatcatcctgagaaagtcagggtagctgaacgtctccccggagccactggacacctctccaattaatttctttagctctaggtgagtcttggggactccaagtttctccagcattccgttcagggacatgaaatcaatatcgccatttccattaaggtcaaact

SEQ ID NO: 29955 - DNA, 351 bp, Homo sapiens
  misc_feature (1)...(351): n = A,T,C or G
cttttccaatggaggcatctgaaggtgaggtaacttgcccaaagtcatatggcaagttggtggatgagctgggactaggacatctctgatcctcggaggtccacatcaggtatgcctctaatcttgatttgcaccccttcctcacactttactttatctaggacaagncttgcctgtgacttgcttttccagcctttcaagtgggactttaaggcaaacagcttggggtctgggaaagaacatctacttatggagtattaactgagcacctattatgtgctgggccctgttccaggagctgccctcatgaaacatacattacagggagtctgtgaccctctggccctggan

SEQ ID NO: 29956 - DNA, 314 bp, Homo sapiens
cacagccgagtccctgtggcagagtggggagaaaaaagggagggagaggcctttccatgttaaaagtgacagaggaggagggggatcttcctcatctgagcaaggtggatgtgaatcagttgagtcattcaatcaacagacatttatcaaactcctgctgtgagcctgatgctctctgcttaatgagtgaaccaaagctacatgcatccttttttgggttcacaagtctatttccaagactagttgttctcctactcctcaagcaggattgtgaaagaaataagatgaaataatgcatgaggtcgacgcggccg

SEQ ID NO: 29957 - DNA, 362 bp, Homo sapiens
gtcgacgcggccgcggcctctcaaaagatttaagttcccagcagtcattgagttagtgagacttcttgagagatgaaccagtggcaagtgagttgggatgtggggaagagaaaactagagggaacttactaatttttcctgaaagatgtgagaggatgtgaagtgaacattcggttgagattgtaatcattttgaggtctttgatgtcatatatgcacatgttttttcatgtgcacctggaggttttgtttgattgatttttcggactttttagttttagtaagactggatgagtagataatcctgggcgacggagggagactccgtcttaaaaaaaaaaaaaataaaaaaaaagggggcgg

SEQ ID NO: 29958 - DNA, 367 bp, Homo sapiens
cacgtgatctattgtctacacagtgaccacacgtgcttgattatctgcgagctatataatatgttttaaaagaatcaggtgagaggaaattccctctcatactcgttcctttttaaaacattgtattatactattctagttaattttgcctttctgtacaacattttaaaataattcttgcgtatatctacaaataaatcttgctgggattttgaaatgaataacattaaatttgtataccaatttggggagaattaacatcattactattcaagtcttccaatctattaacatgggttatttatatcttatttgattttttcattagttttataattttcagcaaacaagtcctatatacatgttt

SEQ ID NO: 29959 - DNA, 249 bp, Homo sapiens
atttccaaaatgtttggaaataaataactggaattttgtcggtcacttgcactgggtgacaagattagaacaagaggaacacatatggagttaaattttttttgttgggatttcagatagagtttggtttataaaaagcaaacagggccaacgtccacaccaaattcttgatcaggaccaccaatgtcatagggtgcaatatctacaataggtagtctcacagccttgcgtgttcggtcgacgcggccg

SEQ ID NO: 29960 - DNA, 350 bp, Homo sapiens
ggtggaaacagagcttttccactacaatacgaagaagaaaatgacaggatcctgcaagtgtatataggtctgtggatttgatagcaggaagctaagttagctccactctaatggttctattttccttacaaaatagaaggcaagatcatctgttaaaagtgaagaagaagaaaaggaatctgggaagtctggagagaaggtgtgaaatagttaatacagagaggaagagagtaagctacacagagaaacaaagagtattaccagacagtggggaagcacagacgaggttcacagtgcttccaatatgcccagtttgttaccttctttagcactgttcagcagcccatgag

SEQ ID NO: 29961 - DNA, 363 bp, Homo sapiens
ctcaaccacggtgttagacactttgggggaaggcaccacactgaaggaattcatgacgcgatcagggtattcttctcggatcttgctgataaggagagtgcccattccaaagcctgtgcccccgcccagtgagtgggtcagctggaagccctgcaggcagtcacagctctctgcctccttccgtaccacatccaggacagaatcaaccagctcggcgccctttgtgtagtggcctttggcccaggtgttacctgccccagactgaccaaatacaaaattgtctggtctaaagatctggccaaaatgacctgagcgaacagagtccatggtcccagggtctagatccaccacgatggcacgagg

SEQ ID NO: 29962 - DNA, 364 bp, Homo sapiens
  misc_feature (1)...(364): n = A,T,C or G
atttgattctcagcttacttgctgttggggtatagcagagctactaattaatgtacattaattttgtatcctgaaactttgctgaatgaatttatcagttctagaagctttttggaggagtctttagggttttctaggtatacagtgatatcaccagcaaacagtgacagcttgacttcatctttaccgatttggatttgctttatttctttctcttgtctgaatgctatggctaggacttccagtactatgttgaagagaagtggtaagagtggacatccttgttttgttcagttctcagagggaatactttcagcttttccccattcagtattatgctggctggggaatatgcatacatggn

SEQ ID NO: 29963 - DNA, 357 bp, Homo sapiens
gattgttcgagaccctgcactccagcatgggtgacagactgagactatgtctcagaaaagaaaaagaaaaacaggaaagattgtcctcatgcataacatcagtgttatgtgtccactttctgaattgcttgacactgagggaatttataagaaagcaagtattatagttcccaccttccagatgctcagtcaagtgacaagttgtaaacatttcagataagatgatgtgcacaatgatggtcgggcatggtggctcatgcctgtaaccccagcactttgggaggccggggcaggcagattgcttaacgccaggaatttgagaacagcctggccggcatggtgaaaccctgtctctac

SEQ ID NO: 29964 - DNA, 368 bp, Homo sapiens
  misc_feature (1)...(368): n = A,T,C or G
gctggcagagggcaatctgaatacactcgtgaccgaaatgaacgagctgcagaagcccttctgaaaaaagtgaagaagctgtttggagagtcccggggggaaaatgaagaaatggagaaggatctccgggaaaaactggctgactacaaaaacaaagttgatgatgcttgggaccttttgagagaagccacagataaaatcagagaagctaatcgcctatttgcagtaaatcagaaaaacatgactgcattggagaaaaagaaggaggctgttgaaagcggcaaacgacaaattgagaacactttaaaagagggcaatgacatactcgatgaagccaaccgtcttgcagatgaaatcaactccatcan

SEQ ID NO: 29965 - DNA, 362 bp, Homo sapiens
atagactatataatcagattgacagcatatagaatatattatcagacaagatgaggaggtacaaaagttactattgctcataatgacttacaggctaaaattagttttaaaatactatattaaattctgaatgcaatttttttttgttcccttgagaccaaaatttaagttaactgttgctggcagtctaagtgtaaatgttaacagcaggagaagttaagaattgagcagttctgttgcatgatttcccaaatgaaatactgccttggctagagtttgaaaaactaattgagcctgtgcctggctagaaaacaagcgtttatttgaatgtgaatagtgtttcaaaggtatgtagttacaga

SEQ ID NO: 29966 - DNA, 357 bp, Homo sapiens
tttcaccatgttggccaggctggtcttgaactcctgacctcaagtgatccccctgcctcagcctcccaaagtgctgggattacaagtgtgagccactgtgcccagcctggggtctcttttataagggtaccaatcccattcatgaaggctcagccgtcctgacctaatcatctcccaaagaccctacttcctaaaaccatcaccttggggattaggtttcaacatgtgcattttgggaagacgcaaacattcagaccatagcaaggagcaaggcttaggagcaggtctcattcctggagctagtagctgaaggggaaggcatctacccaagagagtggtcatctacaatgtccatcc

SEQ ID NO: 29967 - DNA, 365 bp, Homo sapiens
  misc_feature (1)...(365): n = A,T,C or G
tttaggaaaggggtgctatgtaactatcttaataaaatggaatataacagaatatagatatcataaacatgtgtcattagttagtgagagaatttgcgcaaaactgaggtccagagatgttggagaatcagctaccctacccctctatgattgtggaagggggatgctgcctatgagggtctatgaggaatgtctcctggggggtgcacacacatgggtgtgtgtatatggaacaatccattgagtttgtaccttgtacacttgaacaacaacactgttgataccttctatctcaactttttaaaatggggaaaaaaataatttcaaggcagttttagttntatttatttatttttgagactgag

SEQ ID NO: 29968 - DNA, 136 bp, Homo sapiens
gttacagatcaaggcagtaaatatgcagcagaccgtagccattatagacgctatccacggcgcaagggtcctccacgcaattaccaccaaaattaccagaatagtgagagaggggactacaacaagggacagtcga

SEQ ID NO: 29969 - DNA, 344 bp, Homo sapiens
  misc_feature (1)...(344): n = A,T,C or G
tacgtgcaatggcgcaatcttgggtcaccactacctccgccttccgggttcaagtgattctcctgccccagcctctggggtagctggaattacaggcatgcaccaccacgcccacctaagtttgtatttttagtagagacggggtttctccttgttggtcaggctggtcttgaactcccaacctcaggtgatccgcctaatcagcctcccaaagtgataggattacagatgtgagccacccgcacctggcatgttgattttatttcttgtattggcgtaagccctagcccagtgtgagtcaacagaccctgttaccccacccccaacgccatgctatatcaggn

SEQ ID NO: 29970 - DNA, 233 bp, Homo sapiens
aggtgatccgcccgcctccacctcccacagtgctgggattacaggtgtaagccaccgtgcactgccctgaatcaaattttattcccaaatttatgagactggtggactaggagaagggtagtgctattgatagactaggatcttcagtagaagtcattttgtctgccattgatacctagcaatttactgaatacagtggatacttaaccttccttagaccgtcgacgcggccg

SEQ ID NO: 29971 - DNA, 233 bp, Homo sapiens; identical to SEQ ID NO: 29970

SEQ ID NO: 29972 - DNA, 338 bp, Homo sapiens
gtcccttagaggggaccctgagtagcagcatggatgagcaggagctcaagggagagggggagccggtgatgagccccatcagtggatccgagtctcccacaggctggcagtggtaggcagacttgaggacccaggactcgcaggggtcctgggacatggcaggcgaatccacatctcacaccttaattcccagaagctctgggggggccttcccctgtccaactccctgggtttgatagaatgattcaacaaaggaaagaagggaggtcacgtgactcctatccaggccccaggactgggcctcctcagcctctctgcccctccccagcacactggag

SEQ ID NO: 29973 - DNA, 341 bp, Homo sapiens
  misc_feature (1)...(341): n = A,T,C or G
ggggaaaccgcccccatgattcagttatctccacctggccctgcccttgacatgtggggattattgcaattccaggtgagatttgggtagggacacagccaaaccatatcactacccattagttcacccctggcttctccagtattaggatgggtaaggngctctgggcatatttaccctccccacccttatggactctgcatgtttgcttcccatgtacaaaaccttttttggaattatctatactatgtcacccatgaaagctttaagtaccttagatcctaaactctgtagtgtgaatagcactcttatacccttatggcccactctcacaagtgaag

SEQ ID NO: 29974 - DNA, 342 bp, Homo sapiens
tacctttaaaggctttatatagctcacgagctattggtctttgtggctgtagctctaccaatgcattctggcctttagacaaaaacttaggctttttctttgtgacttcacccgcgcttttgtttaagacactaatcaatcgttgaataacggcgggttcactgacagtttggtagtgtaacagcacaggaaatcctttagtgataggaatttcaatattaaagatgaggattcgggctctgaaacgagtgcaagctttaatgggtactttggggccacaaaatatgcagccaacattgattttgatgatatccatcccaaccaaagtaagactaacatgat

SEQ ID NO: 29975 - DNA, 341 bp, Homo sapiens
ggactttcttatcggctcccaatccgcatcatctacactctggttcctcgtgaactgcctggaatccgttgaaggtggaagctggggtcaacctaccaacctttgctcaccttcctaactttctctgggaaaggttcctcccctgccctggatcccagcagagccctgagctcactgtctgttgtatccttctccgtcttccctcctcccatgttagttcaaatagctctctctgtttcacaccacctgtcctcccagtgagctccactcccccagcagggctgcggggatggatagcccagccagtcatactggggtgtctgtctgcgttagtgacccgg

SEQ ID NO: 29976 - DNA, 345 bp, Homo sapiens
gggcgcctgtagtcccagctacttgggaggctgaggcaggagaatggcgtgaacccgggaggcggagcttgcagtgagccgagatcccgccactgcactccagcctgggcgacagagcgagactccgtctcaaaaatgaaatataaaagggaataaaagaaagggggggggaggcaaaaaccaacgggggaattaaaggggaatttttaattttgctggacaacccgggggggggctttggacccctccggaaaacccttggtttaaaaatttcccttatgggggggggggggggggccccccaaaaaatccccaccctttggggggcccggggggggagaacct

SEQ ID NO: 29977 - DNA, 137 bp, Homo sapiens
ctccctttcgatcggccgagggcaacggaggccatcgcccgtcccttcggaacggcgctcgcccatctctcaggaccgactgacccatgttcaactgctggtcgacgcggtcggaaaatccagactacgtctcgaat

SEQ ID NO: 29978 - DNA, 345 bp, Homo sapiens
  misc_feature (1)...(345): n = A,T,C or G
caaacaccagctgcccggtgcctggccctgggccaaattcaacgctcactgcaaacaggtagacaccacgctcaggggctcggaagtagccatgttcagggaagtagctgctgccaatggtgatgtatgtggagttgaacttcactgtctgcagggcagccgtcccttctgaaaagctggcatagaaggccacaggggatcctgaaacataacaggacagtgcttagtgattcatcccttacaccattgggtgggaaattaaaccctgagacctaccgtcctcaccttattagcaatggaaataggtcactatttctagataacctagatattcccaacagcagn

SEQ ID NO: 29979 - DNA, 364 bp, Homo sapiens
gtcgacgcggccgcggacaacactgaaaacagtattggatcagcagcagaccccttctaggttagcagtgacccgtgtcatccaggcattggccatgaagggtgatgttgaaaacatagaagtagttcagaagatgttaaatggactcgaagactccattggactttcaaaaatggttttcatcaataacattgctttggctcaaataaagaataataacatagatgccgcaatagaaaacattgaaaatatgcttacttcagagaataaagtcattgaaccccaatacttcggcttggcatacttattcagaaaagtaatagaggagcagttggaaccagcagttgaaaagataagcatcatg

SEQ ID NO: 29980 - DNA, 383 bp, Homo sapiens
ttcaaatccagggagagaatctttagtgttttctgggccctcataaatacgtttttctcatttgagaaaattgtgactttatgttggtcacttagtttttatagtttatgatgaagaattaaagagaaacaaatgaaaggcaaggtctactcaaatatcagacaactaaaaggctatacagcccctaaatcctttgctatctacttccccagaataatgcataacctaaattccattatttcatttagcagaggtttaagccgttgttgtcaattgtgtgcagtaacgcctctgacttcccttttgtggaattttgtatcgattttggatttttaagtcaaaggagactttaaaatcattttgatttggcacggattcttgag

SEQ ID NO: 29981 - DNA, 357 bp, Homo sapiens
  misc_feature (1)...(357): n = A,T,C or G
gccgcactggcattttccatcatgaacccctgccatgtagtgttgacttgaaggggatttagccatgggattgggaagagcagggagttagggtcagaagacctgagctcaaatcctgattctgccacttacggtgttatcttggggaaacaattttattcctggagtctcagttttaccatctataaaatagggatagtgctatcaatgtcccagtaagggtgtgggatttattttttaatttttatttgtttatttatttttttgagacaggacaggctctggctctgtcgcccaggctggagtgcagtggtgcaatcaaggctcacagcaacctcccctcctgggttcaagtan

SEQ ID NO: 29982 - DNA, 385 bp, Homo sapiens
tgcagacagtggccaagaacaaggaccagggcacctatgaggattatgtcgaaggacttcgggtgtttgacaaggaaggaaatggcaccgtcatgggtgctgaaatccggcatgttcttgtcacactgggtgagaagatgacagaggaagaagtagagatgctggtggcagggcatgaggacagcaatggttgtatcaactatgaagagctcgtccgcatggtgctgaatggctgaggaccttcccagtctccccagagtccgtgcctttccctgtgtgaattttgtatctagcctaaagtttccctaggctttcttgtctcagcaactttcccatcttgtctctcttggatgatgtttgccgtcagcattcaccaaataaacgt

SEQ ID NO: 29983 - DNA, 239 bp, Homo sapiens
ggccagggtcaccaaggtgctgggcaggaccggttctcagggacagtgcacgcaggtgcgcgtggaattcatggacgacacgagccgatccatcatccgcaatgtaaaaggccccgtgcgcgagggcgacgtgctcacccttttggagtcagagcgagaagcccggaggttgcgctgagcttggctgctcgctgggtcttggatgtcgggttcgaccacttggcgtcaacgcggcccgc

SEQ ID NO: 29984 - DNA, 378 bp, Homo sapiens
cctgctttggcctcccaaagtgctgggattacaggcatgagccaccatgcccagccctggcctgtttttttgttcttatttgtttaaaagaacttctgggtttttgccttaatttcattatttatcaagaagttattcaagtgctggttgtttaatttttatgtaattgtatggtttcaagttgttttctttttgttgaattatatttttgtcaagctcgagagttctgtagatgtctattaggactatttggtcaagtggtgagtttaggttctaatgttttggtaattttcttcttcagttatctgtctattagtgcctgtgggatgttgtagtctcccactattggtgtgtcagaatctaaatctcttcataggt

SEQ ID NO: 29985 - DNA, 286 bp, Homo sapiens
aaacaattcaatggttttatctagctcatcttctatgtcagctttcatgttgtaagaaactccgtaagcatccgcctccaggaagtccttttcgtactggccggagtccttcctgctaccgccctccttgtaatcttcgcccttctctttcttctcggccttctctttcttggctcgctctcggtcgtggctcttcttggatatttgctactaccaccaagatctgcacctgcggcggctccacccgggcccgcgccctaggcttcaaggctcgtcgacgcggccg

SEQ ID NO: 29986 - DNA, 382 bp, Homo sapiens
  misc_feature (1)...(382): n = A,T,C or G
gttatttctcatgtaacccttattaggactcattttagccctaaattacctgtggctgtttctttttatttttttgactacttttatattataaatgtgtgttactgtcttatgaattcatggcaatatagttggatagcctggatactttgttagatgagtatttagctgtgtctgcaaatcttaaaagccattagcaaagagtcgtggtatttttttctttatttttaaatgtttgggcaccaaacctaaaagcaaaagattgacgaagcatgtttctcttaaggctacttgtattttacaatacaatattaaattatttaatttgagaacattagttttgcttatatgcactttttaaatatatactattttgaagatn

SEQ ID NO: 29987 - DNA, 384 bp, Homo sapiens
  misc_feature (1)...(384): n = A,T,C or G
ctcgttccctcaggaaacacccagaccctcacgtcctgggtgagcagggtctgggcgacctcagacatgacactgatggcatcccccgtgcgcttccggtcgatgaagatgactcctgccagccagcaggccagcccggcagagccagcccacagtagctcgcgcttggcaatgggcacacagcggcctggcagtacctccatcatcccaagcagatcgagagagctctggtggttggagacaacaacatagggctgcgagggaggggaagggtgagcccctcgcacctccactcggatcccgtacaggtatttgatgtggagcagcattagacgcaagatcnttatgttcctcangttgcgtcctcgcacggcacacacaggg

SEQ ID NO: 29988 - DNA, 388 bp, Homo sapiens
  misc_feature (1)...(388): n = A,T,C or G
gttgcaaagtcaattgacttaaaagataaatacaagaacattggagctaaacttgttcaagatgttgccaataacacaaatgaagaagctggggatggcactaccactgctactgtactggcacgctctatagccaaggaaggcttcgagaagattagcaaaggtgctaatccagtggaaatcaggagaggtaggaatgtctgttgtcaccacagtgttctaaacttcagtgtgctttaaggcattgattccttggacctaaggaaagtgttaacttgaggaaattaatccttctctcattcctcctcttggcctggagaaatcttataactggttttcctttatcaagcttggctgtatggggnggtaggactggtaggtaattttg

SEQ ID NO: 29989 - DNA, 384 bp, Homo sapiens
gcctgtagtcccagctactcgggaggctgaggcaggagaatggcgtgaacccgggaagcagagcttgcagtgagccgagattgcgccactgcagtccgcagtccggcctgggcgacagagcgagactccgtctcaaaataaaaaaaaaaaaaaaaaagttttttgttgggcgggcctaagggctccccccttgaagggcccccttttgggggggccaaacgggtaaatcccccccccccggggttcaaaaacccccgggccaaaggggggaaaccttggttggtcctaacataaaaaaatttatcggggggggggggtttccccttgaatccccaattcttaggaatgtgggggcggaaaatcctttgaacttggggggggggg

SEQ ID NO: 29990 - DNA, 501 bp, Homo sapiens
tggggtccctttgaggtcgatggtgatgctatatatatctattcgatgatgaccatccccacccaaaccacagagatctatataggatccggattcgcatgtcgcggccgcgttggtctaaccaggctttctggcattaacaaggccagaaagcctggttagacatacactctgtgtgtggtttttggggggatttgggaagggatagtgatgctgagaaaacaccaatgaataccaatgatgaagtaacataactagttttaagctatactcagaaaacacaactaaactgagagatgatggcttttttttttttttttttttttggaaaaaaagtttctttttgacccccgggggggggggggggggccaatttggggttcttgggcccttcaatttccagggttaggggattttcccaatggatctttcgcggattttgggaaaaaagggttttcaccccccccccgggtaatttttgtgttctaaaaaacccctttt

SEQ ID NO: 29991 - DNA, 347 bp, Homo sapiens
tgcacccggactatttgttcattttttttactagtgtgcttcttattggtttcaatgattgtgtacgtttatgtttgtgtgtgtgagaggagacagggagaaggtgagaaagggggagaatgacattggagggagagatgccaactctttgttgtcatgtatggttcatatattttctgcagtgcgtgtatgtgtttgctttaatgttttgtttatagtaattttttatgctttggagttcttattttttatattgtcaaacctaatgatacttgatttctttttttaaaatcattttattttttttatccctttaaagcagggaccagaaaactgtggcctgaagt

SEQ ID NO: 29992 - DNA, 385 bp, Homo sapiens
ctattatgtagtaagcttggtattttacacattttattgataatctttagaggtattttattattattattttttgagacagggtctcgctctttcgcccaggctggagtgcagtggcacaatcttggctcactgcaaccttgacctcctaggctaaagcaatccttctatctcagcctcccaagtttctgggaccacaggtgcatgccaccacacctggctatttatttatgtatttagtagaaacagggtctccctatgtttcccaggctggtctcaatctcctggactcaagtgatcctccagccttggcctcccaaagtactgggatacaggtggagtcactgtgcccagcctagagggaagtattattatgcccattctt

SEQ ID NO: 29993 - DNA, 220 bp, Homo sapiens
cgagaattgaagtgggagatgtaaacccttcagaaacacagtatatttctgagcccaaactctgtccagaatgcagagaaggcttattgtgtcagcagcagagggacctgcgtgaatacactcaagccaccatctatgtccataaagttgtggataataaaaaggtgatgaaggattcggctccggaactactcacattcagttccggtcgacgcggccg

SEQ ID NO: 29994 - DNA, 380 bp, Homo sapiens
cttgttacaacatcaagatagatggaattggaaggatgctaccaggagagtacttacatagtgctcaggagtttctcttcttaaaatgtttactgctgaaagatgagcaggaccagggcgttataggcagagccctagccgagaaacctgctggcctctgcctgttttcatttcccactttggttgtgtggcattactttcagaattgcactttcctgcttgtcatgactttttgacacacttgccatgacgtgtgtttctgtgaacatgaagttctgcggtagtgcctccaggggcagaggaaaagaaaaagtgttactgcgttttgtacaaaataaatacagtcatatgtttaataaaacagttctattgtagtaccg

SEQ ID NO: 29995 - DNA, 379 bp, Homo sapiens
gcagtgtaaacagagacgctgggcattgcttgtggacggtgtaggccgctgcaggccaccatgaaccggcttccggatgactacgacccctacgcgggtgaagagcctaacgacgaggagccggctttgagcaggtgggctcccgccccaccctggcccccgaggatttgggtcgaggcctggctttggtcgcctccattcgttgcgcctgccgagcctacgcagaccctatcggctcgggagcctgtcgtgcctgttacttgtgcgaagccaaagggcttttctgatggggtcgcgcagtcccggagggaggcggagccgatgtcgcctgtatgaagagggatttttcggaatcacgggggaccgcgtgtaatcgttg

SEQ ID NO: 29996 - DNA, 364 bp, Homo sapiens
ccgaggtgacaccgtgggctgggggggtggtggagcccacggctggcctggtgactgggaccgaggtgacatcctgtccccaggtggcagctgaacctgaagctggttccgtggccggggccagagtgacatcctgtccctgagtggtggaggagcctgaaccggggctgtggctggagagtacgctgctggtcatactcacagcattcttctcagtaaagctgggcactgaacttctttgggtagccgaagactccttttctccacctggggtagagcttgcatgaccagaacccgtaacaactgttgcgggtttatgggctgtggtagctgtaagcactgtgaggagcagctacaggaagat

SEQ ID NO: 29997 - DNA, 371 bp, Homo sapiens
ggcacgaggaggctttgcagttcaggcgaagaagccaaaaagaaacgaaatagatgcggagccgccagctaagcggcacgccacagcagaggaggtggaggaagaagagagggaccggatcccaggccccgtttgcaaggtaggaggggatgtccccgggctacacctgcggcggcggctctgtgcgccttttcttgggttacttacttgactacagccttgcttaatttcagagtagcccgggtgttaacggtaggtcggttttagcaattctcccggccagactgggcacggagtttgcagctaatccttgtgcacgtggccgtcttcctggaggcggcgggttttaaaacctttacccggcccacggg

SEQ ID NO: 29998 - DNA, 366 bp, Homo sapiens
ggcacgagcagcgccgagcgatgggcatctctcgggacaactggcacaagcgccgcaaaaccgggggcaagagaaagccctaccacaagaagcggaagtatgagttggggcgcccagctgccaacaccaagattggcccccgccgcatccacacagtccgtgtgcggggaggtaacaagaaataccgtgccctgaggttggacgtggggaatttctcctggggctcagagtgttgtactcgtaaaacaaggatcatcgatgttgtctacaatgcatctaataacgagctggttcgtaccaagaccctggtgaagaattgcatcgtgctcatcgacagcacaccgtaccgacagtggtacgagtccc

SEQ ID NO: 29999 - DNA, 366 bp, Homo sapiens
ggcacgagcagcgccgtaatggcgttcttggcgtcgggaccctacctgacccatcagcaaaaggtgttgcggctttataagcgggcgctacgccacctcgagtcgtggtgcgtccacagagacaaataccgatactttgcttgtttgatgaaagcccggcttgaagaacataagaatgaaaaggatatggcgaaggccacccagctgctgaaggaggccgaggaagaattttggtaccgacagcatccacaggcatacatcttccctgactctcctgggggcacctcctatgagagatacgattgctacaagggcccagaatggtgcttagatgactggcatccttctgagaacgcaatgtattct

SEQ ID NO: 30000 - DNA, 367 bp, Homo sapiens
ggcacgagctcactgctctgctccacgtggccagtgaaaggtcctagtgctggtgctcctcaggacgctcccctggtcccccatgtggcccgggctccctgcatgagcccaagaatgctgaaggttcagaggtgcttcccacacatcgctggcaatccggccccagcctcccctctgcacacagatggaacagtctgtgttttcctggcagggtcccgggggcatcaatgggggaggctgggcatcccagggaacctcgtggcttggaggccaagcctcccctgggcctagctgccatcacactgctgagaagtaaataaacccagcctcccagggccacagccagccaccaagccagggaggggac

SEQ ID NO: 30001 - DNA, 375 bp, Homo sapiens
  misc_feature (1)...(375): n = A,T,C or G
ggcacgagaaattaccacaaaattacatatattacccaataaaagaaaattaaggtcaggcatggcagctcacacctgtaatcccagcactttgggaggccaggagttcaagaacagcctgggcaacacggtgaaaccctgtttctaccaaaaaaaaaaattaaccaggcatgggggcacacacctgtggtcccagctacttgggaggctgaaaagggagcatcgcttgaccctgggaggcaaaggttgcagtgagccaaaactgcaccactgcactccatcctgggcaacaaagtgagaccctgtctggggggaaaaaaatttttgaaagaaagaaggaaaaaatttatcccgtggcttttaaaaacaagtaan

SEQ ID NO: 30002 - DNA, 374 bp, Homo sapiens
ggcacgagccaagctttcctcggggtgcttttcaccaaggagccctacctggatgagcagagagctgtgaaatatctttggcttgcagccaacaatggggactcacagagcaggtaccaccttggaatttgctatgagaaaggccttggtgtgcagaggaatctgggagaggccttgagatgttaccagcagtcagccgctctgggaaatgaggccgcccaggagaggctgcgagccctcttttccatgggggctgcagccccggggcccagcgacctgacagttacaggactgaagtctttctccagcccctccctctgcagcttgaacaccctgctagcaggaacctcacgcctaccacatgcctcgagcac

SEQ ID NO: 30003 - DNA, 374 bp, Homo sapiens
ggcacgagagtgaacatagcacctaaaatgcgccggcggacctacaaagctcatggggggattaacccatacatgagctctccctgccacattgagatgatccttacggaaaaggaacagattgttcctaaaccaaaagaggaggttgcccataagaaaaaggtatatctgccctggctcggatatgcttgtgacagccaaaagatttggggttgctgggatgactatcttacgacacctttggaataactatgaaagaaaactattctgaacaacccttttcacctggcttattttggctttcgtaaggtcgctacttgactaataataaatgagtagctttcctgcatcccatcactttaggaggctgaagg

SEQ ID NO: 30004 - DNA, 372 bp, Homo sapiens
ggcacgagagggtgaacagcggaagtgacactgtccttcactggacttcttccagtgcccaagttttcaaatagccaattcatcctcaaaacagttgtgtgaagtaagttttaacattcctattctataggtacaaggaaacttgaggactggaggggtaataagttttgcaagtgttaggtaaagccccagtctcaaagagtgcaaagccagtgccctcatccttggcaactagggcgccccttctgagcaggccatgctgtctctgctgctgtcgctgctgctataccagccagccaagcccaactcttcacttcctgaggaggcagctccagggttaatatgccaaggccagtaaccatctttgtcttg

SEQ ID NO: 30005 - DNA, 372 bp, Homo sapiens
ggcacgagggggcagcctttgaggaaaccagaccttggggatcgccaggcaggattagtggcaggaattgagagaacagagccccacagagctcctcggggaccgtcccccagtcacaagagtatctcaaggaagtagtcttctcccacatcccccaaagataactaccagagggtcagttctctgagcccttctcagtgtagaaaagacaagtgtcaaagcttccccactcaccctgagtttgccttctatgacaatacgtcgtttggcctcactgaggctgagcagaggatgctggacctcccaggatattttgggtcaaatgaagaggatgaaaccacaagtacacttagcgtggagaagctggtgatc

SEQ ID NO: 30006 - DNA, 377 bp, Homo sapiens
  misc_feature (1)...(377): n = A,T,C or G
ggcacgagggacaaggctactatcacaagcctgtggggcaaggtgaatgtggaagatgctggaggagaaaccctgggaaggctcctggttgtctacccatggacccagaggttctttgacagctttggcaacctgtcctctgcctctgccatcatgggcaaccccaaagtcaaggcacatggcaagaaggtgctgacttccttgggagatgccataaagcacctggatgatctcaagggcacctttgcccagctgagtgaactgcactgtgacaagctgcatgtggatcctgagaacttcaagctcctgggaaatgtgctggtgaccgttttggcaatccatttcggcaaagaattcacccctgaggtgcaggcttn

SEQ ID NO: 30007 - DNA, 371 bp, Homo sapiens
ggcacgagggaatgttaactgttggtattttctaatgttaactgttggtattatcttggttctaaggccgaaccaaggatgccaggcatcagtttcaaagtgaaaaccgcaatcaaattaaattagctgtttaggtttttagatggttcaaatggtaggtcagtgattcttaaccctggctgaatattgcagacagtcctcaacttacaatggttcaattaaggatttttcagcttgacaatggtgcaaaaccatacacgttgaatatgctcctcagcttacattggatttatctggacctgaccccatcgtaagtcaaggagcatgtgtacagtcacctggggagatttgaaaaaattcttccccagacc

SEQ ID NO: 30008 - DNA, 379 bp, Homo sapiens
ggcacgagaactggagtataaagattatcattttttatttttcaaattgggaaagaaactctgggagaacaggacacctgtcagtgccacacagctcattgccggtaaaaccgggatttgagcagagatcttctgatacccattggggttcattaccacttacaccacagctggctcaagaacaattttagaaaaacaaaacaaaccccagacattagttactctgaagatacgccaccttgactctgttcagaaagcaacaggcttcacattaaatagaagtccgttatttgtttataaggataagaggaccggagacgctcaaaagaagaaataaaaattagagttctcccctctgcatcacctcacaagtgaaagt

SEQ ID NO: 30009 - DNA, 372 bp, Homo sapiens
ggcacgagggagatttgggttttggcaggcccagagtagttggttgtgatccacaattaccccaggattcccatagcccattagggagctctaggtagtttcaggactgatagagaaattcagatttttttcttggataggtcttgggagctgatatctgcccaaatccttgttggttatactgagtatgctctagatggttcagagcatttgttacctatgtaccaaccctgtccccctaggcccacaacaggtcataataggcctaggagatggaggggaagcaaaatacttcagttgttctgcattcctcaggaacctatgtgaatcatctcatggtaaacttaatgagactttgagattgaagaatta

SEQ ID NO: 30010 - DNA, 373 bp, Homo sapiens
ggcacgagaagcctagcaattgcatctgagaatcattgaaggggtctaaatatggaaaccgagacactgctgtgagtgagactacaaagaccatgctatcagattggctcgctagagaggcgtccagcagtcttccgactctgcccagcccatcctctccttattcccgtagcactgtaacatgcagatacctacactgcattgctctcacatgctgatagtttctcatgcaaaggcctggtgggggaggggctggagggtgttaaaataagttgatgaggtatggcagtaaaggaaagaacctgtgacttaaataagggaaataccagaaatctatattttaggtgaatacaaagcatccaatttagattga

SEQ ID NO: 30011 - DNA, 374 bp, Homo sapiens
ggcacgagcaccatggtgctgtctcctgccgacaagaccaacgtcaaggccgcctggggtaaggtcggcgcgcacgctggcgagtatggtgcggaggccctggagaggatgttcctgtccttccccaccaccaagacctacttcccgcacttcgacctgagccacggctctgcccaggttaagggccacggcaagaaggtggccgacgcgctgaccaacgccgtggcgcacgtggacgacatgcccaacgcgctgtccgccctgagcgacctgcacgcgcacaagcttcgggtggacccggtcaacttcaagctcctaagccactgcctgctggtgaccctggccgcccaccttcccgccgagttcacccctgc

SEQ ID NO: 30012 - DNA, 372 bp, Homo sapiens
ggcacgaggaatctggctgctttcggccaaatccttttctgaagcttttgtaaaacttcccagccttctaagaaggtttgcttctttctacaatttttctcaccacccttaccgaaccccggcagatgggatgacctgcctgcgtctgggaggtacccactctgggtcttttctgcgctgagggctgcacaaatgtcaggatgacctgcttgcggaaaggagcaacccactttgggtctcctgagagctgtactgacgctcagtaaagctcctcttcaccttgttcatgctccagttgtccgtatacctcattgttcctgaatgcaggacaagaacctgggacctgtcaaatggtggggctgaaagagcggt

SEQ ID NO: 30013 - DNA, 380 bp, Homo sapiens
ggcacgagaaccctgggtacatcacttattaagagcaagtgatagtgaagaggccgtgactcagtatgtccttaattcaaagagtcgaagaggctgaggggtcccactccggtagtaaaaactaatataattttcaagatgcccaaatagatataagagctgctctagtcagtgatgcgtgcttgaaaaaccagaagccaacatacgtaagatttgaggattatgaaagtcatcttactaaaatctctcctgaggttactaaactagccagattatctagtcacagtctctggacagcactttgagaattcaatggggagtgtgtctgacagaacacacagattaaagtggaatttatattaggtaaactgtaaccacca

SEQ ID NO: 30014 - DNA, 379 bp, Homo sapiens
  misc_feature (1)...(379): n = A,T,C or G
ggcacgagcaaagtgctggtattacaggcgtgagccaccgttcccagcctcagttatctttaatgctatccagggcttgagttatcagagaagcaaagagcctcttggccggagctctctccctaaaggtgatggagagtgttgggatgtgctggagccgcctgccatctgaggcatgccagaagcccttagacatctccctgaggtcagtcgttggtggtttctgtttcagccccatctgtggggagtctctccccctcagcagtggctctggctgtgatcctgcctgtcctggtacttctcatcatggtgtgcctttgccttatctggaagcaaagaagagcaaaagaaaagcttctctatgaacatgtgacggagn

SEQ ID NO: 30015 - DNA, 365 bp, Homo sapiens
ggcacgaggcgatggcggctgggccgagtgggtgtctggtgccggcgtttgggctacggttgttgttggcgactgtgcttcaagcggtgtctgcttttggggcagagttttcatcggaggcatgcagagagttaggcttttctagcaacttgctttgcagctcttgtgatcttctcggacagttcaacctgcttcagctggatcctgattgcagaggatgctgtcaggaggaagcacaatttgaaaccaaaaagctgtatgcaggagctattcttgaagtttgtggatgaaaattgggaaggttccctcaagtccaagtatgtccgtggttcagaccctgtattaaagcttttggacgacaatgg

SEQ ID NO: 30016 - DNA, 366 bp, Homo sapiens
ggcacgaggattattaacatatgtttttggagggggattttgcgagttgcatttatatgtgggtatcctagatgtcctggggatacccaccaggtgaaagagaagaaagtaagatgggataccttctgcaactttgtcaattctttgtgcttttgctcagcgtaccagggagatggaaaaaattctaatcgaatgtctcataaaaacatttatatgcccataccaaaaaatggcaatcaagcatgctagatttcactcctttttattcctcatgctatttattttccacaagtgatcttttccattactttgaagggtgtgtctaaaaactaattattttcttcttggcactggggctgcaattca

SEQ ID NO: 30017 - DNA, 368 bp, Homo sapiens
ggctcgagagtgaacatagcacctaagatgcgccgccggacctacagagctcatggtcggattaacccatacatgagctctccctgccacattgagatgatccttactgaaaaggaacagattgttcctaaaccaaaaaaagagggtgcccacactaaaaaggtaaataaatagttgctcggttttgtttgtgatagaaaaaagatttgtgggtgctgggaggactatcttaggacacctttggaataactatcaaagaaaactattctgagcaaccctttctacctgccttattttggcttttggaagactggttcttgactaacaataaaagaggagagttctgtaatcccagcacttttggaggc

SEQ ID NO: 30018 - DNA, 371 bp, Homo sapiens
  misc_feature (1)...(371): n = A,T,C or G
ggcacgagggattccactgagccaccctacagccagaagagatatgaggaaattgttaaggaagtcagcacttacattaagaaaattggctacaaccccgacacagtagcatttgtgccaatttctggttggaatggtgacaacatgctggagccaagtgctaacatgccttggttcaagggatggaaagtcacccgtaaggatggcaatgccagtggaaccacgctgcttgaggctctggactgcatcctaccaccaactcgtccaactgacaagcccttgcgcctgcctctccaggatgtctacaaaattggtggtattggtactgttcctgttggccgagtggagactggtgttctcaaacccggtan

SEQ ID NO: 30019 - DNA, 379 bp, Homo sapiens
ggcacgagtgaatgcttcttgcaacacaaagatgacaacccaaacctcccccgattggtgagaccagaggttgatgtgatgtgcactgcttttcatgacaatgaagagacatttttgaaaaaatacttatatgaaattgccagaagacatccttacttttatgccccggaactccttttctttgctaaaaggtataaagctgcttttacagaatgttgccaagctgctgataaagctgcctgcctgttgccaaagctcgatgaacttcgggatgaagggaaggcttcgtctgccaaacagagactcaagtgtgccagtctccaaaaatttggagaaagagctttcaaagcatgggcagtagctcgcctgagccagagaa

SEQ ID NO: 30020 - DNA, 379 bp, Homo sapiens
ggcacgagcggcctaattttatgaacgggcgcaggcttactccgtttacggtgggatcaatttatactggcactgggcgaaaatttactaccactcgacctggaaatacttatatgatatggctctatacccattacaatctccagcctgggcaagtgagactctgtccaaaaaaaaaaaaaaaaaccaaaaaagaaggaaggagaaatttttccccatcccccccggggttgtacagccgggggaaagctaaaaaaacccccggggccttggaacataaggggaggtataaggggttgaaaggggggcagcccttttggaaaagggataaggatttgattgggacccattgttcatgtagggcatgaaaaatgtggaa

SEQ ID NO: 30021 - DNA, 378 bp, Homo sapiens
  misc_feature (1)...(378): n = A,T,C or G
ggcacgagcccatttgtagttggagaggcgtacaaaaacaggctatgggctgcatttggcccatgggccgttatttactgatcttagatattggaggaccagtgctgaaaccactggaacttcagctttaacactagcactgtcattttcagaagccgcatcaaactgctggctgcttctgacaaggtggtcagttacacttggtctttttcaccccccattccccgccccttcgccatttcctgacaaagctgtctctctaacctgtgggtatgtgttctgccgaaaacaagcagccataccacagcagccgtaaccataggactttgaaacaaatgcaatgaatggcatccactagtttcaagtttgaccacatgn

SEQ ID NO: 30022 - DNA, 372 bp, Homo sapiens
ggcacgagacctaaaggagtataaatcgttcttttataaagatacatgcacatgtatgttcactgcaacactattcacaataacaaagacatgaaatcaacccaactgctcatcaatgatagactagataaaaaaaaatgtgctacatgtacaccataggatactatgcagccataaaaagaatgagatcgtgtcctttgcatggacatggatggagctgaaagccattatcttcagcaaactaacacaagaacagaatgccttgggattttttaatgttctctggagacgtgtttgagcttttccagtctggtggtgaaagaatatattgaaagggaaattggcaatgagaactaaattttctagatacca

SEQ ID NO: 30023 - DNA, 379 bp, Homo sapiens
ggcacgaggatggatcaaagaagatcaaaggctgctgggattccatccacgtggtagaagtgcaggagaaatccagcggtcgcaccgcccattacaagttgacctccacggtgatgctgtggctgcagaccaacaaatctggctctggcaccatgaacctcggaggcagccttaccagacagatggagaaggatgaaactgtgagtgactgctccccacacatagccaacatcgggcgcctggtagaggacatggaaaataaaatcagaagtacgctgaacgagatctactttggaaaaacaaaggatatcgtcaatgggctgaggtctgtgcagacttttgcagacaaatcaaaacaagaagctctgaagaatgaccc

SEQ ID NO: 30024 - DNA, 371 bp, Homo sapiens
  misc_feature (1)...(371): n = A,T,C or G
ggcacgagatcataggagagagtataagccgcctctttgaatttgcagggtatgacgtgctcaggttaaatcatgtaggagactgggggacccagtttggcatgctcatcgctcacctgcaagacaaatttccagattatctaacagtttcacctcctattggggatcttcaggtcttttataaggaatctaagaagaggtttgatactgaggaggaatttaagaagcgagcatatcagtgtgtagttctgctccagggtaaaaacccagatattacaaaagcttggaagcttatctgtgatgtctcccgccaagagttaaataaaatctatgatgcattggacgtctctttaatagagagaggggaatcn

SEQ ID NO: 30025 - DNA, 378 bp, Homo sapiens
ggcacgaggagaacccaccatggtgctgtctcctgccgacaagaccaacgtcaaggccgcctggggtaaggtcggcgcgcacgctggcgagtatggtgcggaggccctggagaggatgttcctgtccttccccaccaccaagacctacttcccgcacttcgacctgagccacggctctgcccaggttaagggccacggcaagaaggtggccgacgcgctgaccaacgccgtggcgcacgtggacgacatgcccaacgcgctgtccgccctgagcgacctgcacgcgcacaagcttcgggtggacccggtcaacttcaagctcctaagccactgcctgctggtgaccctggccgcccaccttcccgccgagttcacccc

SEQ ID NO: 30026 - DNA, 377 bp, Homo sapiens
ggcacgagggaacgtctgaggttatcaataagctcctactccagaccccatgggtcatttcacagaagaggacaagggtactatcacaagcctggggggcaaggggaatgtggaagatgctggaggagaaaccctgggaaggctcctggttgtctacccatggacccagaggttctttgacagctttggcaacctgtcctctgcctctgccatcatgggcaaccccaaagtcaaggcacatggcaagaaggtgctgacttccttgggagatgccacaaagcacctggatgatctcaagggcacctttgcccagctgagtgaactgcactgtgacaagctgcatgtggatcctgagaacttcaagctcctgggaaatg

SEQ ID NO: 30027 - DNA, 370 bp, Homo sapiens
ggcacgagtgggatcccgtatcgaaccgtctctgagtggctcgagtccatacgcatgaaacgctacatcctgcacttccactcggctgggctggacaccatggagtgtgtgctggagctgaccgctgaggacctgacgcaaatgggaatcacactgcccgggcaccagaagcgcattctttgcagtattcagggattcaaggactgatccctcctctcaccccatgcccaatcagggtgcaaggagcaaggacggggccaaggaactgattttctgcctccatcccacccatgagggctgcaggcactacaaaagagctgactactgagaattctggaaaacaagagcacgtgaccgtccagggggaagc

SEQ ID NO: 30028 - DNA, 371 bp, Homo sapiens
  misc_feature (1)...(371): n = A,T,C or G
ggcacgagccggaagacaatttttcaatgggtcaaggatgggttcaagatgaaactgttgcaccttagatcatcaagcgttacattctcaaaaggagcatgttgaacaaattcctcacctgcgctgttaaaaataggctccacgctcctaacataatgtaagagaatctaatgccactgctgatttgacagtaggcagagctcaggcagtaatgctcactcacctgccactcacttcctgctgtgcaggccaatctgtaacaggcctccgactggcggcagtccatatatatatacacacacactatggaacattattcatacttaaaaaaggaaactctataacgttgacaacatggatgaaccttaaan

SEQ ID NO: 30029 - DNA, 371 bp, Homo sapiens
ggcacgagacttgaacccaggaggtggaggttacagtgagccaagatcacaccactacactccagcctggatgacagaatgagaccttgtctcaaaacaaaacaaacaaacaaaaaaagcatagcaagtccttttacatgaggatgagttactgtttatcttgagagcatgtatgcaatggattgtatctgccaggctatacaaaaaggaggctttgaccaggcgccatggctcatgcctgtaatcccagcactttgggaggccgaggcgggcaaattatgaggtcaggattttgagaccatcctggctaacatgacgaaaccccgtctctactaaaaatacaaaaaattagccaggcgtggtggcatgca

SEQ ID NO: 30030 - DNA, 376 bp, Homo sapiens
ggcacgagggactaatgtgcggacgccgggagcttctgcgcttgctacagtccgggcgtcgggtccacagcgtcgcagggccctcgcaatggcttgggaaaccgctgaccacacggctcctattcccagtagccccgtgctgctgtcgcccacactacctcttccttgcggcttccggcccccgcagcctcagtacctctgctatctcttttgcagaagtccaggttcaggcccctcctgttgttgctgcaactccctcacccacagcagtacctgaggtggcttctggagagactgcagatgtagtccaaactgctgcagagcagagcttcgctgaactggggctggggtcatacaccccagtgggactgatcca

SEQ ID NO: 30031 - DNA, 370 bp, Homo sapiens
ggcacgagcagcgccgagcgatgggcatctctcgggacaactggcacaagcgccgcaaaaccgggggcaagagaaagccctaccacaagaagcggaagtatgagttggggcgcccagctgccaacaccaagattggcccccgccgcatccacacagtccgtgtgcggggaggtaacaagaaataccgtgccctgaggttggacgtggggaatttctcctggggctcaaagtgttgtactcgtaaaacaaggatcatcgatgttgtctacaatgcatctaataacgagctggttcgtaccaagaccctggtgaagaattgcatcgtgctcatcgacagcacaccgtaccgacagtggtacgagtcccacta

SEQ ID NO: 30032 - DNA, 372 bp, Homo sapiens
ggcacgagctcactgctctgctccacgtggccagtgaaaggtcctagagctggtgctcctcaagacgctcccctggtcccccatgtggcccgggctccctgcatgagcccaagaatgctgaaggttcagaggtgcttcccacacatcgctggcaatccggccccagcctcccctctgcacacagatggaacagtctgtgttttcctggcagggtcccgggggcatcaatgggggaggctgggcatcccagggaacctcgtggcttggaggccaagcctcccctgggcctagctgccatcacactgctgagaagtaaataaacccagcctcccagggccacagccagccaccaagccagggaggggactgtgt

SEQ ID NO: 30033 - DNA, 371 bp, Homo sapiens
  misc_feature (1)...(371): n = A,T,C or G
ggcacgagaaattaccacaaaattacatatattacccaataaaagaaaattaaggtcaggcatggcagctcacacctgtaatcccagcactttgggaggccaggagttcaagaacagcctgggcaacacggtgaaaccctgtttctaccaaaaaaaaaaattagccaggcatgggggcacacacctgtggtcccagctacttgggaggctgaaaagggagcatcgcttgagcctgggaggcaaaggttgcagtgagccaaaactgcaccactgcactccagcctgggcaacagagtgagaccctgtctggggggaaaaaaatttangaaagaaagaaagaaaaaaattaaacggtggcatttaaaaacaag

SEQ ID NO: 30034 - DNA, 377 bp, Homo sapiens
ggcacgagggagccacagcgaggaaccctgtggtcctcaggcaggtgtaccttgagtcagccaggagccctcttttcctgtgtcaaagcctgccctcgggctctgctcacctctggtgaccctccaagatgcccctgccctcagtttcccctcatgatctggcctctgcccccttctctagccacagcctctagtacactttagcaataccaccagactagttagagttccccactcaccaagcaagacatgcagtttcatgcctctgtgccttcgctcatgctgtttcttccgactggaatgccttcccctgctcctcctgccttgtctgcctggcaagttcatctctcacgatcccctcaaaggccccctcctcc

SEQ ID NO: 30035 - DNA, 377 bp, Homo sapiens
  misc_feature (1)...(377): n = A,T,C or G
ggcacgagattatataatattttttctatttcaaaggcttatatatggttcattttttcctttggttttttttatgggattataaataggggaggttaaatttcttttcttttttttttttgaaacaaggtctaccttttgtccccaaatgggagggggagggggggatcacggtttactgcaacctttgcctcccgggttaaagcgattttactgcctcaccctcccgagtacctgggattacaggggcctgccccctcccccagctaaatttttttgtttttttagaaaaaacggggtttcatcatgttggccaggctggtttcgagctcccgacctcaggggatccatccccctcagcctcccatgtagccggn

SEQ ID NO: 30036 - DNA, 371 bp, Homo sapiens
ggcacgagaaaaaggcatgaggggtcgtcttcggaatctgtgccacccggcactaccatttcgagggtgaagctcctcgacaccatggtggacacttttcttcaaaagctggtcgccgccggcagctaccagagattcactgactgctataagtgcttctaccagttgcagcctgcgatgacacagcgaatctatgacaagtttatagctcagttgcagacatctatccgggaggaaatctctgacatcaaagaggaggggaacctacaagctgtcttgaatgccttggataaaattgtggaagaaggcaaagtccgcaaagagccagcctggcgccccagcgggatcccagagaaggatctgcacagtgt

SEQ ID NO: 30037 - DNA, 377 bp, Homo sapiens
ggcacgagagttttttctggtttaaaaaccaaattgtaaatggagtgtgtacttgtagagagtgacaaggtattgtttccctatgtgctgtttgagcagtattttaaccaacttgtattacagatgttacagttccatgttaggaagtcagaaaagacttgtgtttgtctttgttctgctgatgtggagtcatgttttgtggggtcttccatggcacatttacctgttgctccgtccagatgttgagggccagtctaggctgacacatcctacccgaggacaagcctgttctccatttcttcactctcccctccccatatagcaactctcccaggtttagattaccgttttcgacgacagattaaccaaaaatgccc

SEQ ID NO: 30038 - DNA, 361 bp, Homo sapiens
ggcacgagtgccattgggccccccatggacatgggagggccttggggtcagcacttggacaccctaatgggatgggggagtgagaggcctccatgggtcttcactgctgcttggggccctccgatgctgctcacgatacagaggcaaggcagaagcctggatgggcggggagcagggcctcactgaggatgaggcgtgggggcggccttaaaaaccaacagtggctcctttgagagtctggtgagggtcactcactccattcttgctggaccaggaattgtcctcttgttctgcgctgttgagagggtctgatttgggggagtgacaatgttggggggcgatgaggtctcctgggctcttg

SEQ ID NO: 30039 - DNA, 366 bp, Homo sapiens
ggcacgagcgctgtgccacctggtttcaagaccctacccgcttcactggcaccatggatgccttcgtgaagatcgtgaggcacgagggcaccaggaccctctggagcggcctccccgccaccctggtgatgactgtgccagctaccgccatctacttcactgcctatgaccaactgaaggccttcctgtgtggtcgagccctgacctctgacctctacgcacccatggtggctggcgcgctggcccgcctgggcaccgtgactgtgatcagccccctggagcttatgcggacaaagctgcaggctcagcatgtgtcgtaccgggagctgggtgcctgtgttcgaactgcagtggctcagggtggct

SEQ ID NO: 30040 - DNA, 365 bp, Homo sapiens
  misc_feature (1)...(365): n = A,T,C or G
ggctcgaggcgacacaaatcgaggtgagggaagagagaggaaaatcccctgaatccctgcaggattaatttattcaaaaaggaaataaaaaatactcaatatgcaaaagtcttgtgaagaaaatgagggaaaaccacagaacatgccaaaggccgaggaagatcgccctttggaggatgtaccacaggaggcagaaggaaatcctcaaccttccgaagaaggcgtaagccaggaagcagaaggaaaccccagaggagggccgaatcagcctggccagggatttaaagaggacacacccgttaggcatttggaccctgaagaaatgataagaggagtagatgagcttgaaaggcttatggaagaan

SEQ ID NO: 30041 - DNA, 363 bp, Homo sapiens
  misc_feature (1)...(363): n = A,T,C or G
ggcacgagggaatatgaaaagagcctattcgatagctagaagggaatatgaaaggtagaagtgacttcaaggtcacgaggttcccctcccacctctgtcacaggcttcttgactacgtagttggagctatttcttcccccagcaaagccagagagctttgtccccggcctcctggacacataggccattatcctgtattcctttggcttggcatcttttagctcaggaaggtagaagagatctgtgcccatgggtctccttgcttcaatcccttcttgtttcagggacatatgtattgtttatctgggttagggatgggggacagataatagaacgagcaaagtaacctatacaggccagcan

SEQ ID NO: 30042 - DNA, 371 bp, Homo sapiens
ggcacgagattatataaaaaaagcatggaaactgggcattttaattagcaagtacagccttgacacaaataaaggcatggctttggttatgcagtgcatttatttggttttcttgaaataagaaaaaaagatatcttctccatcaccagagttgctgagtttgacagtgtgaatgagatgacctctaaggcctctacttatagatctgcacggttgggcctgggagctgtactacctcagctggtgggtgataacttactcacagtctgtgctgtgtcctgcactgtccattatctgcaggggtggtactgctgtccccaaggaagagaatgctgtccacaaagagccagccatttatactcttaaaagaa

SEQ ID NO: 30043 - DNA, 376 bp, Homo sapiens
ggcacgagggaatgttaactgttggtattttctaatgttaactgttggtattatcttggttctaaggccgaaccaaggatgccaggcatcagtttcaaagtgaaaaccgcaatcaaattaaattagctgtttaggtttttagatggttcaaatggtaggtcagtgattcttagccctggctgaatattgcagacagtcctcaacttacaatggttcaattaaggatttttcagcttgacaatggtgcaaaaccatacacgttgaatatgctcctcagcttacattggatttatctggacctgaccccatcgtaagtcaaggagcatgtgtacagtcacctggggagatttgaaaaaattcttccccagacccattg

SEQ ID NO: 30044 - DNA, 365 bp, Homo sapiens
ggcacgagacggcagctctgtgcagtaggtactattaatattatcacacccactttaaaatggaagaaaccaaggcaggaagtggtggggtcaggagctgaaccctgtaggtctgcctccgggcctgtggtttattgtttcttgcaaatagcgaacagataacaagacaatcccaggccacggtgaatgtcatgcagacccaggctgggcgccatcactgcctgcactggtcactcccctgctgggcctccctgtcctctctgactagaggctcggtggtccctccttcctcatgggggctgcgggtgagctgagctgagctgagctgagctgtgggcagcccagcacgtgcaggagccggaaga

SEQ ID NO: 30045 - DNA, 362 bp, Homo sapiens
ggcacgagggcataacacaattaaggtgttcccaaaactggaaatccaaagcatccgagtgatgctctgaatcatgcgccgtgtggaaggaatgtgctggcaggcgcaaatcgccggctgagtgttccactgaaattaaactcaagtgctgacttctcgttttttacctccccaccccttccctcaaggttggtctccgccagctggacatgtccttgctctgccaactgtacagcctctacgagtcgattcaggagtacaagggggcatgccaggcagcctccagcccagactgcacttacgctctggagaacggcttcttcgatgaagaggaggaatatttccaggagcagaactccctg

SEQ ID NO: 30046 - DNA, 361 bp, Homo sapiens
ggcacgaggtctctgtccacttggatatacaggcttaaagtgtgaaacagacatcgatgagtgcagcccactgccttgcctcaacaatggagtttgtaaagacctaattggggaattcatttgtgagtgcccatcaggttacacaggtcagcggtgtgaagaaaatataaatgagtgtagctccagtccttgtttaaataaaggaatctgtgttgatggtgtggctggctatcgttgcacatgtgtgaaaggatttgtaggtaagatgtttccagtcttcctatgttgtcttaaaatcttgtaaaccaccacaaattagtacatttcttaacatatatattaatgggaatttttggattct

SEQ ID NO: 30047 - DNA, 362 bp, Homo sapiens
ggcacgagcaagtgtcaactccaactcttgtagaggtctcaagaaacctaggaaaagtgggcagcaaatgttgtaaacatcctgaagcaaaaagaatgccctgtgcagaagactatctatccgtggtcctgaaccagttatgtgtgttgcatgagaaaacgccagtaagtgacagagtcaccaaatgctgcacagaatccttggtgaacaggcgaccatgcttttcagctctggaagtcgatgaaacatacgttcccaaagagtttaatgctgaaacattcaccttccatgcagatatatgcacactttctgagaaggagagacaaatcaagaaacaaactgcacttgttgagcttgtgaaa

SEQ ID NO: 30048 - DNA, 357 bp, Homo sapiens
ggcacgagggactggaggtgaggcggtggggcttatgatgcgcaggagcccaacgggggtccgcagtcgggagagcagtgcggggctgcttcctccccacttggtcaataagtcgcccacgtgtccggcctcggtggctcctgccagccgggtgagctctgcagccgctctctgtatagcctaaaaccgtgaaaaggccgggccagcgccaagctgggcgtctttactgtaacacacccgagcacagcccagctcgcctgcccgccaccgccatccagccccagggagccccacacactcctggagcttcagctgccccctctctagtgtttacttgagatccagcttagtcctagg

SEQ ID NO: 30049 - DNA, 368 bp, Homo sapiens
ggcacgaggaaggttttaaataaagatggcaaagcacactttcttcagctgagaaaagattttgatcagaaaagggcaacgattcagtttcaccaacctcagagatttaaggatgagctttggaggatccaggagaagctggaatgttactttggctccttggttggctcgaatgtgtacataactcccgcaggatctcagggcctgccgccccattatgatgatgtcgaggttttcatcctgcagctggagggagagaaacactggcgcctctaccaccccactgtgcccctggcacgagagtacagcgtggaggccgaggaaaggatcggcaggccggtgcatgagtttatgctgaagccgggtgg

SEQ ID NO: 30050 - DNA, 357 bp, Homo sapiens
ggcacgagctcgtgccgacagaatgtcttgctatcagcgacactcacagaaggtgtaacgcggctagctgatatcagtttgcatgatccagtcagtatttctgtcctggacaagagccatgaccagttgaacccaaaggacaaagcggtccaggaggtctgtcctccaccagctggcgacaagctggacagctttgcaataccagagagtctcaagcagcatgtgactgtggttcccagcaaactgaggcttgtctgcctagcggccttcatccttcagaaatgcaagtttgaggaagaccagaagatggttgtctttttctcaagttgcgagctggtggagttccactacagcctc

SEQ ID NO: 30051 - DNA, 357 bp, Homo sapiens
ggcacgagcggcacgaggctggccaagcatctaagaatataatccagccaccctcctgtgttttgcattattataatggtccattgtgtgtcacagaagagaccttcacaaagttgtgtaatgaccatgaagttcttacattcatcaaatataaagtgtttgatgcaaaacgtaagtgaacagtccctcttttaaagctttctggttaagttggtgataagcaagtaataataactgagtttgtgtttttttgttttagcttcagccaaaacactttctgggctattagaatgggagtgcaaaactgatgcagtagaagcccttacggcactgaatcactatcagataagagtgccg

SEQ ID NO: 30052 - DNA, 361 bp, Homo sapiens
ggcacgagggatgaagatgcagcccctggatggtcccagactctcaggacatgcccagctcaggggcttcgagccacaggcctggcctcatatggcatgagggggatctggcataggagccagactgctcttagccccctggctttgtgccaggcctggaggagggcagtcccccatggggtgccgagccaacgcctcaggaatcaggaggccagcctggtaccaaaaggagtacccagggcctggtacccaggcccactccagaatggcctctggactcaccttgagaagggggagctgctgggcctaaagcccactcctgggggtctcctgctgcttaggtccttttgggacccccacc

SEQ ID NO: 30053 - DNA, 377 bp, Homo sapiens
  misc_feature (1)...(377): n = A,T,C or G
ggcacgagcagacagacttgaggtaggaatgactagttggtgtctttatatactacattctaattctcaaagtgtggttttttgtttgtttgtgtgtttccatggccaaaaagttgtaaaaattttaaaacagattttggcttagggtttggaacattttactagagtatagataatgctgtatttgattaatgtaacgtttataaaggctacaacatccatgtttagaatagtggataagaggttggacgctaaagtcacattgcctggttacatcactgtacctcaatttcctcatctttaaaacggcgcttacctcaaagagttaggggaatatctggcacatagcaaatgcctcctgaatgtttgttgttgtn

SEQ ID NO: 30054 - DNA, 377 bp, Homo sapiens
ggcacgagctgtttatgctcattacgaggaggggccctgcagagagcaaatgatgacaggtgggtccacgtttcatgtgctgtggcaattctggaagcaaggtttgtcaacattgcagaaagaagtccggtggatgtgagcaaaatccccctgccccgcttcaaactgaaatgtatcttctgtaagaagcggaggaaaagaactgctggctgctgtgtgcagtgttctcacggccgctgcccaactgccttccatgtgagctgcgcccaggctgccggtgtgatgatgcagcctgacgactggccttttgtggtcttcattacctgctttcggcacaagattcctaatttggagcgtgccaagggggccttgcaaag

SEQ ID NO: 30055 - DNA, 378 bp, Homo sapiens
ggcacgagcggcacgagcctggatgctgtggatccagggaggaagggctatgtctcactggaggactatactgctttcctgattgacaaggagtcagaaaacatcaagtccagtgatgaaatagagaatgccttccaagccctggcagagggcaagtcatatattaccaaagaagacatgaagcaggtccgattctggttgcttcccctactacactgtcatcctaatttgaattctggtcatctcaggcccggtggcctactttgaaaaaacccacccacttgtttttttttttcaaacctcccctttcacaaaatgtcatttgctttggtaaccacttcattttgtcttgacccaactcaaaaacgtactgtggta

SEQ ID NO: 30056 - DNA, 377 bp, Homo sapiens
ggcacgagggcacaatgaagtgggtaacctttatttcccttctttttctctttagctcggcttattccaggggtgtgtttcgtcgagatgcacacaagagtgaggttgctcatcggtttaaagatttgggagaagaaaatttcaaagccttggtgttgattgcctttgctcagtatcttcagcagtgtccatttgaagatcatgtaaaattagtgaatgaagtaactgaatttgcaaaaacatgtgttgctgatgagtcagctgaaaattgtgacaaatcacttcataccctttttggagacaaattatgcacagttgcaactcttcgtgaaacctatggtgaaatggctgactgctgtgcaaaacaagaacctgag

SEQ ID NO: 30057 - DNA, 384 bp, Homo sapiens
  misc_feature (1)...(384): n = A,T,C or G
caaaatccggaacgagacttcaagtttcttataaaatgtaggtaatagtactttcctttaggatttactttctgaggaacggagataatacatgcaaatctttcagagtggtttttaatagacaatacataatggctatcattaatcacaatggttcacgtatgtgtgttttcttgtggacccatcagggttttccaagaatcctgcctgtacccagccaagaatttagggggcaggggaagcctctggggtttcgagttgtcttggatattgatttccatttcttctccctttccataccttacagctggataaaagataatggtgactaaaaaaaacttgtaattnttttcctcaagccttatttttacattntttatttag

SEQ ID NO: 30058 - DNA, 372 bp, Homo sapiens
ggcacgaggttaagggtgtgaccaaagacaaatggaaaaagacaaatgacaaacatactaataaagagcttcggtttctccacaaaaaatacaataataaaataaaatgttatcagaaatctcttgactctcctccacgttagctcactttttccctcaagagggtgaacatgacccttaacagatccagcctcaagtgctggattctcttgggaacttggttaaatggttttttttctttccgaatgtccaagtcaccttccagacctggagcttctgagcaagcaacttaagaattctaatggagaaggaagttccccctggtcgcggaggggccgggcacagcctcaaggctgctgttgattgtccgac

SEQ ID NO: 30059 - DNA, 371 bp, Homo sapiens
ggcacgagatttgtttttggtgataaatttgaactttcaagcaaattttagaattttgggaaacttgtacccattactgtgagtttgacactggagattgatagtaacattagcaaatgtgatttttgagtatctgggtcagtcaataaatcagagttttccaaatgaccagtgtatcctgggccagatgacaaaatcatacttgagttattcaaagttcattaatatgtttcagatttccacattgctctcaacctttaagaaatcacttgctgagttttggtataatatcaaaaaataatacctgtggttatctggaaaggatattaaaatgtacctcacttttccgtaacttttctatctatggccag

SEQ ID NO: 30060 - DNA, 370 bp, Homo sapiens
ggcacgaggaaatatcagggatattaaccctgcttatcacatatatggcaaatatttttttccatacattattggttcttttggctttgaagtctcaagccacgtaagaattgtgtctttttttttttttgaaacggagttttattgttttgccccccaggctggagtgcaggggcccaatctaaattaattgaacccttggcctccggggttaaagcaattttcttgcctaaccctcccaagaagttgaaataacaggggggggcccccgcccccacctaactttttggatttttaccaaaaacggggtttaaccgtgttacccaggagggcccaaatctcctgacctggggacccacctgcctaaccc

SEQ ID NO: 30061 - DNA, 371 bp, Homo sapiens
ggcacgagacaaaatgcaattaaacttgaagaaagcataagaaaagttaagagaaaaaagtaatgaagaaaatgtacagtaggctaggcatggtggctcatgcctgtaattctagctctttggaaggctgagatgggtggatcacttgagcctaggtgtttgagaccagcctgggcaaccaaatgagaccccccatctctagaaaaaatttaaatattagttgggtttcattgtgcatacctccggtcccagctacacagaggctgaggtaaggggatcacttgagcccacgaggttgaggctgcagtgagccatgttcatgccactgcactccaacctgggcctaggtgaaagagtctcaaaaaaaaaaa

SEQ ID NO: 30062 - DNA, 372 bp, Homo sapiens
  misc_feature (1)...(372): n = A,T,C or G
ccggcacgaggaagagagctagcaccatgcttcatacctgaccgctctttacaattcaaccctctattcctcatctttcagcctgtctcctaatggcagaaagtcttgtaaggttgcttgtatgcagagtctcattcctcatccctctgcagtcttgacttttgctccatcactcccctgaaatagccttcatgaaagacactgatgacttacaggtccgaaatctgaaaaccactttttttttaaatggggggggtctcactttgttgcccaggctggagtgcagtggcatagtcacagcttactgcagccttgaactccaagctcaagtgatcctcctgcctcagcctccctagtagctgtggctacaan

SEQ ID NO: 30063 - DNA, 367 bp, Homo sapiens
ggcacgaggcatctttatgttgaatcttcccgttcaggaaaatgatatgtcttcaattcatttttttctcccttattagcttttccattgttttcatgggccttttgcactcttcttcgattcatcactaggtttttaaatttttttactccgggaaagtattattgtttgtgtatatgaaggctcttggtgtatgtacatttaaattttttttattttgcctatgctttttccaacctaattgtcatcccacactgtgagggggggtgtgtgtgtgtgtacatgtgcataggggcctacctcactttattgtgttttctacaaattgaaagttcatggcaaacctgtgtccagcaagtctgtcagc

SEQ ID NO: 30064 - DNA, 365 bp, Homo sapiens
ggcacgagagctgtttcagggctatgaaactgaagagagagaggaaacagagctatctgagaaaattaaactggagtgccagccggagctttccgagacatcccagactctgcctcccaagcccttctcatgtgggcggagtggaaagggacataaaaggaaatccccatttggaagtacagaaagaaagactcctgttaaaaagctggctcctgaattttcaaaagtcaaaacaaaaactcctaagcactctcctattaaagaggaaccctgtggttccttatctgaaactgtttgtaaacgtgaattgaggagccaagaaaccccagaaaagccccggtcttcagtggacaccccaccaagac

SEQ ID NO: 30065 - DNA, 362 bp, Homo sapiens
ggcacgaggtagcatcaagaaacatctgcacattttcccagcagcctgagtaactagtagtgatttgtacagacttctctgcatctgctttttccccccttccttttttcagcacatctagatgattaatagactgaacaggcccttatatatgcattctgacagcctttaggacgggcttggttgacaatacacacataagccagtgttgttatcatgaaacacttcatttgaatgactattacaggctgaacaggatgtcctatgccaagaggttgtgacattttgagagggtggtgctgggagccatgtgggactcttttcccatcacagccaagttgacattttctcagggtgtagga

SEQ ID NO: 30066 - DNA, 367 bp, Homo sapiens
  misc_feature (1)...(367): n = A,T,C or G
ggcacgagaatgaaataaagactgaatctgatgaataaataaaactagtagataacagcttctaagtgtgactttgaagtaacatgaatggtttttatcatatgatacatagaaatgacttcttagtggtaatatatggcaggatttggcaaactagcctgcagtccaaatatggctaaaagctgtttttgtacaaccagtgagccaacaatagtttttacatttgtgaatcgctgaggcaaaatccaaaggaaaatattttgaggccgggtatggtggttcacgtatataatcccagcattttgagaggttgaggtgggaggatggcttgggcccangacttggagaccagcctaggcaacatagt

SEQ ID NO: 30067 - DNA, 368 bp, Homo sapiens
  misc_feature (1)...(368): n = A,T,C or G
ggcacgagagttatcataggtaactgaagtcatattattattgatgaaggatttaatctaggaaactaagaaaaaaatggcacaaacatggagttaataggggaagctggtttccagaataactaagaatcatgtagaatccctggcgttgaagatgaaatggtggagaagggaaaaccttgcccttcactgtcctcacccctactcacagtcacagagtaagaagaagagtttggcaccactggtaggagagatctgtaaggcaatggaaacaattaaataggaaaagtggtttctaggtttccaggaaaatcctgaggaaagagtgctattcttaagttctgttctaaaacaagattattaaatgn

SEQ ID NO: 30068 - DNA, 369 bp, Homo sapiens
ggcacgagccttcctaagttactcttcatgagatttcatccatttactaatactgtatttttggtggactaggcttgcctatgtgcttatgtgtagctttttactttttatggtgctgattaatggtgatcaaggtaggaaaagttgctgttctattttctgaactctttcttttcttttctttttctttttctttttttctttttgagaaggagtcacactctccaggctggagtgcagtggcacaatctcggctcactgcaatttccgtctcccaagttcaagcgattctcctgctttagactatggatttctttaaggaatactggtttgcagttttgttttctggactatatcagcagatggtag

SEQ ID NO: 30069 - DNA, 369 bp, Homo sapiens
ggcacgaggtggctttgcagttcaggcgaagaagccaaaaagaaacgaaatagatgcggagccgccagctaagcggctcgccacagcagaggaggtggaggaagaatagagggaccggatcccaggccccgtttgcaagggaggaggggatgtccccgggctacacctgcggcggcggctctgcgcgccttttcttgggttacttacattgactacagccttgcttaatttcagagtagcccgggtgttaacggtaagtcggttttagcaattctcccggccagactgggcacggagtttgcagctaatccttgtgcacgtggccgtcttcctggaggcggcgggttttaaaacctttacccggcccag

SEQ ID NO: 30070 - DNA, 368 bp, Homo sapiens
ggcacgagcgctgcagatcctcatgaatgctatgccaaaggggtcgatgaatttaaacctcttgtggaagagcctcagaatttaatcaaacaaaattgtgagctttttgagcagcttggagagtacaaattccagaatgcgctattagttcgttacaccaagaaagtaccccaagtgtcaactccaactcttgtagaggtctcaagaaacctacgaaaagtgggcagcaaatgttgtaaacatcctgaagcaaaaagaatgccctgtgcagaagactatctatccgtggtcctgaaccagttatgtgtgttgcatgagaaaacgccagtaagtgacagagtcaccaaatgctgcacagaatccttggg

SEQ ID NO: 30071 - DNA, 365 bp, Homo sapiens
ggcacgagtccttatctgcatctgcctttgtacagaagctccagtgtgaaataacttttttcttgttgtgtaagtaatacatgttcacagtgttctttctatttaagaaaggaaaagaaaaggctgcacaaagaagaaagcgaaaatcccctgtgtcattgctctgagttagtcctgtttagcacgttaccagtgaggcgtttcctttgaaatagaggactcaggcgcgcttgctgagcacttgctgctcatgttttaagcacggtgcagcattttccttcagcccacatcaccctgctctggggcacttgccccgtggtgcaaaggggaaggcgagctttgcagatcaggtgacttttgcagat

SEQ ID NO: 30072 - DNA, 359 bp, Homo sapiens
  misc_feature (1)...(359): n = A,T,C or G
ggcacgaggaggttatcaataagctcctagtccagacgccatgggtcatttcacagaggaggacaaggctactatcacaagcctgtggggcaaggtgaatgtggaagatgctggaggagaaaccctgggaaggctcctggttgtctacccatggacccagaggttctttgacagctttggcaacctgtcctctgcctctgccatcatgggcaaccccaaagtcaaggcacatggcaagaaggtgctgacttccttgggagatgccataaagcacctggatgatctcaagggcacctttgcccagctgagtgaactgcactgtgacaagctgcatgtggatcctgagaacttcaagctcn

SEQ ID NO: 30073 - DNA, 359 bp, Homo sapiens
ggcacgagagggattattggagctcctttctcaaagggacagccacgaggaggggtggaagaaggccctacagtattgagaaaggctggtctgcttgagaaacttaaagaacaagagtgtgatgtgaaggattatggggacctgccctttgctgacatccctaatgacagtccctttcaaattgtgaagaatccaaggtctgtgggaaaagcaagcgagcagctggctggcaaggtggcagaagtcaagaagaacggaagaatcagcctggtgctgggcggagaccacagtttggcaattggaagcatctctggccatgccagggtccaccctgatcttggagtcatctgggtggatgc

SEQ ID NO: 30074 - DNA, 365 bp, Homo sapiens
ggcacgaggctgccctggccgccttcaacgctcagaacaacggctccaattttcagctggaggaaatttcccgggctcagcttgtgcccctcccaccttctacctatgtggagtttacagtgtctggcactgactgtgttgctaaagaggccacagaggcagccaagtgtaacctgctggcagaaaagcaatatggcttttgtaaggcaacactcagtgagaagcttggtggggcagaggttgcagtgacctgcacggtgttccaaacacagcccgtgacctcacagccccaaccagaaggtgccaatgaagcagtccccacccccgtggtggacccagatgcacctccgtcccctccacttggc

SEQ ID NO: 30075 - DNA, 361 bp, Homo sapiens
ggcacgagtgcacgtgggccatctccagcacccccgggcaccgggtcaagctgaccttcatggagatggacatcgagtcccagcctgagtgtgcctacgaccacctaaaggtgttcgacgggcgagacgccaaggcccccgtcctcggccgcttctgtgggagcaagaagcccgagcccgtcctggccacaggcagccgcatgttcctgcgcttctactcagataactcggtccagcgaaagggcttccaggcctcccacgccacaaagtgcgggggccaggtacgggcagacgtgaagaccaaggacctttactcccacgcccagtttggcgacaacaactaccctgggggtgtggactg

SEQ ID NO: 30076 - DNA, 368 bp, Homo sapiens
ggcacgaggaaagaacctgcaattacatcgcagaacagccctgaggcaagagaagaaagtacttccagcggcaatgtaagcaacagaaaggatgagacaaatgctcgagatacttatgtttcatcctttcctcgggcaccaagcacttctgattctgtgcggttgaagtgtagggagatgcttgctgcagctcttcgaacaggggatgactacattgcaattggagctgatgaggaagaattaggatctcaaattgaagaagctatatatcaagaaataaggaatacagacatgaaatacaaaaatagagtacgaagtaggatatcaaatcttaaagatgcaaaaaatccaaatttaaggaaaaatgg

SEQ ID NO: 30077 - DNA, 358 bp, Homo sapiens
ggcacgagctttgtttctactgtgtccattatcatgaaacccagttttcttccagctctcctctagagtagcccagacaaaaaaagaatggttcctgagatagagtacagtgagaatggggctatgaggacccattgttctgaaatagtcatgagcaaatcttcaccctggtaaagagaatctgcagaagctgctgttcacacttaaggcacagtgttaaatgggagggtcacagtatagactctgaacaaacactgaacgtctttgagcttcaatcttctcacccatacaatggggttaagaatatctgacatagttggtataaagatgatgcaagacaacatatgttaaaatgctt

SEQ ID NO: 30078 - DNA, 373 bp, Homo sapiens
  misc_feature (1)...(373): n = A,T,C or G
ggcacgagaactggagtataaagattatcattttttatttttcaaattgggaaagaaactctgggagaacaggacacctgtcagtgccacacagctcattgccggtaaaaccgggatttgagcagagatcttctgatacccattggggttcattaccacttacaccacagctggctcaagaacaattttagaaaaacaaaacaaaccccagacattagttactctgaagatacgccaccttgactctgttcagaaagcaacaggcttcacattaaatagaagtccgttatttgtttataaggataagaggaccggagacgctcaaaagaagaaataaaaattagagttctcccctctgcatcacctcacaagn

SEQ ID NO: 30079 - DNA, 367 bp, Homo sapiens
ggctcgagctatcactacaaggggcccgactggcttgattcgggcgtctcgggtgcctagtgttgttctagaaagggtaccttttcttttattacgaccctcacatggggccagggaaatggccgatcatggcttatgccgctctctggccgagagcatggcacagcccctgcgtgggatcctgttaagctgacctccataccctccccacttatattaagagctggaagctatcaaagcttgcgtcagggagatggaggaagaaactgataaacttaaggagcttcagaaccatgtcaagaagcagatgaatatgattccacctccaggccatgctggcccggtgatcatgtccattgatgagaaa

SEQ ID NO: 30080 - DNA, 367 bp, Homo sapiens
ggcacgaggggagaatagatatcgtgagacaggtgaagtctcagcattggatggccttcctctagcgagcttgaagtgggctcagccctggtcagaagggagggcagtggccccggtgcatgaagggaaacaagcctttgttgaaaatgtcctagattctaatctctgtactggatgctttcttatgttctgtcccccaggcatcacagtccccgtgtgatgtgggtattgttatgttcaagttacaggcaggaaaattgagattctgaggaagtcatgtgccggaggtcatacagctgggaggcatgacgtgctgtgactctagagctttggaatggagcctgtgctctttacactaccttacacc

SEQ ID NO: 30081 - DNA, 370 bp, Homo sapiens
ggcacgagaccaggtgtgctaagagcctacagagagggcagctggccaggtattctgggctgtccccaagggagccaggggccagctatttcctgggtgttttctaccctgacctcataaaattagcttcactcattttatttttttaaaatttataggtgtaaaacaatgcattggatctctgtgggctgttgtggacagatcatcaaggcctattgttgagtgaaaaaaatgcaaaacagcaaacatacgtatttaagtataaatatgtgtataaatgatagaaaaggtctcgggggcatagacatcagattggcagtggtgattagttctcctgggagagacctatggccagagagtagacaaagtg

SEQ ID NO: 30082 - DNA, 370 bp, Homo sapiens
ggcacgagctttcctctcgggatttcttgggtggcctggccttccgagtcttccactgcacacagtacatcagacatggatccaagcccatgtatacccccgaacctgacatctgccatgagctgttgggacatgtgcccttgttttcagatcgcagctttgcccagttttcccaggaaattggccttgcctctctgggtgcacctgatgaatacattgaaaagctcgccacaatttactggtttactgtggagtttgggctctgcaaacaaggagactccataaaggcatatggtgctgggctcctgtcatcctttggtgaattacagtactgcttatcagagaagccaaagcttctccccctggagct

SEQ ID NO: 30083 - DNA, 367 bp, Homo sapiens
  misc_feature (1)...(367): n = A,T,C or G
ggcacgaggagaaaataaaagaaaaactagccaggcacagtggctcacgcctgtaatcccagcgctttgggaggctaaggcaggcagatcacttgagaccagcttgggcaacatggcaaagccccatctctacaaaaaacacaaaaattggctgggcattgtggcgcacacctgtattcccatctactcaggaagctgagatggaagaattaattgagcccacgagttcaaggctgcagtgagtcgtgattgtgccactgcactccagccggggtgacagaagagaccttgtctcgaaaaggaatctgaaaacaatggaaccatgccttcataattctagaaagttattttcaactgataaatctan

SEQ ID NO: 30084 - DNA, 364 bp, Homo sapiens
  misc_feature (1)...(364): n = A,T,C or G
ggcacgagtgttaaatgacatgtatacaaattcttccttaagtgaaagttatgctgcatcgaattgtaactgaaagtatagatccaacaaatagagactgggttctagagagttctggtctatagaaacccaaaactaaaatctctcataactcaagtatggaatactttttttaaagaaattcttatcatgggtgttgtaataatgaagacgaatttgactttatgcagtgttctgcagcatgcctcccccacatctcatagcaccaggttgtgtctgacctgacataccctgcagctctcagctggctgcagtaacattttgtgggagaaagaggagctggagttacagaaatgattgtctn

SEQ ID NO: 30085 - DNA, 363 bp, Homo sapiens
ggcacgagcttgccttccttcctctctgccctcctcactgcgttgtctttggtccttgtatttgccccattataacccaaactggctgtcccagcttcagctgtcatgtctgcacttacgtgtctgaagctggaggcaggaggagaagaggttttcctcagtgcccttgtttcttttatccaaaagcaaaacttccccagaaacctcctggcagactcccctagttcaaggaaagctgggaagacaagtatgtagtggaaagagatgggaaagccaagatggacctagaccagtgatttttctcttggggtgtggcacactcctgctccaaacagaactgaggctctggtataaatgagtttc

SEQ ID NO: 30086 - DNA, 363 bp, Homo sapiens
ggcacgagaggggaaacttttttttggagaaggcgtcttgctttgtcacccacgctggaatgcagtggcgggatctcagctcaccgcaacctccacctcctgggttcaagtgattttcctgcctcagcctcccaagtagctgggaatacaggcacgccaccatgcccagctaatttttgtattttcagtagaaacgggatttcaccacgttggccaggctggtctcgaactcctgaccgcaagtgatccacccgcctccgcctcccaaagtgctgggattacaggcgtgagccaccgtgcccggcccaaaggggaaactcttgtgggaggagcagaggggctcacatctcccctctgattccc

SEQ ID NO: 30087 - DNA, 363 bp, Homo sapiens
ggcacgagggccgagcaagaggcgccatcatgggagtggacattcgccataacaaggaccgaaaggttctgcgcaaggagcccaagagccaggatatctacctgaggctgttggtcaagttatacaggtttctggccagaaaaaccaactccacattcaaccaggttgtgttgaagaggttgtttatgagttgcaccaaccggccgcctctgtccctttcccggatgatccggaagatgaagcttcctggccgggaaaacaagacggccgcggttgtggggaccataactgatgatgtgcgggttcaggaggtacccaaactgaaggtatgtgcactgcgcgtgaccagccgggcccgcagtc

SEQ ID NO: 30088 - DNA, 364 bp, Homo sapiens
ggcacgagaggaaaccaaatccactgcagaaacaggcatagatttatgtaactgtggtaggggcccattaaagatcttgtgttactgatttactaattgtgctactgatttattactaattcattagctgtgacatacactttcagcaagtgactaaaaccttatgacccagagtaaaataattttatatcatgacccaggtagctgtgtgatatgtgtaataagtgggcgtgagtgtctaactaaagattcaccgagcaacacttaacttctactatatgcaacagcctcttatgtttactattctgttctgttctaattcattttctaagaaaatgctggtcatgaaccactgtgttgattt

SEQ ID NO: 30089 - DNA, 372 bp, Homo sapiens
ggcacgagcagacagacttgaggtaggaatgactagttggtgtctttatatactacattctaattctcaaagtgtggttttttgtttgtttgtgtgtttccatggccaaaaagttgtaaaaattttaaaacagattttggcttagggtttggaacattttactagagtatagataatgctgtatttgattaatgtaacgtttataaaggctacaacatccatgtttagaatagtggataagaggttggacgctaaagtcacattgcctggttacatcactgtacctcaatttcctcatctttaaaacggcgcttacctcaaagagttaggggaatatctggcacatagcaaatgcctcctgaatgtttgttg

SEQ ID NO: 30090 - DNA, 372 bp, Homo sapiens
ggcacgagtgcctttgagctcccccacagctctgaaactccagcttgggagcagggagagtgcaatctgtgacctgtaaaggggcgctgggcaaaagggcccgagagaaggcgtcctttccattcccttcccatctcaagctgagttcagaaatgacacgaaataatttaatcaactatcagtcaaggtcgggctcacgcctgtaatcccagcaatttgggaggccgaggtgggcggatcacctgaggacaggagttcgagaccagcctgaccaacatgacgaagccccgtctctactaaaaatacaaaaattagccagcggtggtggtgcgcacctgtagtctcagctacttgggaggctgaggccagaga

SEQ ID NO: 30091 - DNA, 373 bp, Homo sapiens
ggcacgagcggcacgagcctggatgctgtggatccagggaggaagggctatgtctcactggaggactatactgctttcctgattgacaaggagtcagaaaacatcaagtccagtgatgaaatagagaatgccttccaagccctggcagagggcaagtcatatattaccaaagaagacatgaagcaggtccgattctggttgcttcccctactacactgtcatcctaatttgaattctggtcatctcaggcccggtggcctactttgaaaaaacccacccacttgtttttttttttcaaacctcccctttcacaaaatgtcatttgctttggaaaccacttcattttgtcttgacccaactcaaaaacgtactg

SEQ ID NO: 30092 - DNA, 363 bp, Homo sapiens
ggcacgagacaataccactattatcccttgcttttatgtaggatagtgtgaatgacagataccatgttgtcctccaagccactactctcttctcatgggctgtggctttctttggattaacctgaactcttgctgtaaaatgaatgtccgttccccaagatccctgccccctggagatttctaggtgcttttggtaaacaggtccttgtctgccttgactctgctattatcctcagtcatgtacaaaatctctatctttcctggagttgtcccagggcagactcaggctaggagtcatgcttctgaagaataatgtatgaaaatgattttgaaaaaggagtgattgactaagcgttcatctat

SEQ ID NO: 30093 - DNA, 364 bp, Homo sapiens
ggcacgaggagacatggcatgaagccagagagtgagagacattaactcattagactggaacttgaactgattcacatctcatttttccgtaaaaatgatttcagtagcacaagttatttaaatctgtttttctaactgggggaaaagattcccacccaattcaaaacattgtgccatgtcaaacaaatagtctatcaaccccagacactggtttgaagaatgttaagacttgacagtggaactacattagtacacagcaccagaatgtatattaaggtgtggctttaggagcagtgggagggtaccagcagaaaggttagtatcatcagatagcatcttatacgagtaatatgcctgctatttg

SEQ ID NO: 30094 - DNA, 364 bp, Homo sapiens
ggcacgagccctgacgcaccgccgtgatgcccagggaagacagggcgacctggaagtccaactacttccttaagatcatccaactattggatgattatccgaaatgtttcattgtgggagcagacaatgtgggctccaagcagatgcagcagatccgcatgtcccttcgcgggaaggctgtggtgctgatgggcaagaacaccatgatgcgcaaggccatccgagggcacctggaaaacaacccagctctggagaaactgctgcctcatatccgggggaatgtgggctttgtgttcaccaaggaggacctcactgagatcagggacatgttgctggccaataaggtgccagctgctgcccgtgc

SEQ ID NO: 30095 - DNA, 370 bp, Homo sapiens
ggcacgagaatggatcatgcctgtaatgccaggactttgggaggccaaggtgggcaaattaacagcctggccaccatggggaaaccccatttttactaaaaatacaaaaaaaattagcccggggtgggggcacatatgtgcaattccagctactccggaggctgaggtgggatcacttgaatcccggaggcggaggttgcagagaaccaagatcccaccattgcactcccaatttgggtggaagagtaacacaccgcctcaaaaaataaaaataaagactggggctatgaagagaggctcacccctcttcctggaaaaattggtctgataatggcaaattaacctggactttgacataaacaatatgaag

SEQ ID NO: 30096 - DNA, 370 bp, Homo sapiens
ggcacgagcgagagagcacactttccattagagcctggtaatacccatatcacctctgctctgaggctgggcctgcagctgtgtagtctttggaagaggtagcccctgaacgcagagcctaagagaagcaagtcggccctgacgccaggccccagtgggcgcctcacactcagaacctcataccccagagcaaaccgatggtcagggagagggctagagctcacacccagctcggaatagatcttccctgatgacatttcatgccctctaaggcagtttttaaatgaaggtacacacatccaggggtgttcacaggctttcacagcaagggtacctatttcatggcaaaataggcagttttaaaagaata

SEQ ID NO: 30097 - DNA, 369 bp, Homo sapiens
ggcacgagggcggagcctccttaaggaaggtgcaagaggttggcagcttcgattgaagcacatcgaccggcgacagcagccaggagtcatgagcgacagcggcgagcagaactacggcgagcgggtacgtaaagctgcggtagggggtggctgtgtggtcctaactccttgcatctttttctaggcccgtcggcctcgggccaggaggcaggggcgttttaggctccgaagtctgaagccgggagggcaggcaagggagacagcatttaaccaaaaaaagcctttgtggatagtgccttattgcctttggtcgtgaaggagggaggcccccggcgggtttatgtggcttctgcccgagacggccgtttt

SEQ ID NO: 30098 - DNA, 377 bp, Homo sapiens
ggcacgagggcaatgtctggagacattgttggttgtggtgcggtgacataactattggcatcgagtggatggagggcaggtgtgctactaatcgccctctattgcacagggtggcccttaccacagagaactatgcagctctaaacatgcgcagccccaaggctgagaattgttgatctaggggaagatgtgatttcattcttcatgcttgtaaattattatttaagctgtgaataccctctcttttcccactgaagttgtggttgtaagattctcagagttgagcagactcggcaacattacagaaaaaaaatcaagatgtaaaaaggatttagacgtctggacgtggtggctcatacctgtaatcccagcacttt

SEQ ID NO: 30099 - DNA, 373 bp, Homo sapiens
  misc_feature (1)...(373): n = A,T,C or G
ggcacgaggggaaaagaaattattgaggttcagaaggatccagaagcactggctcaattaatgctgtccataccactaaccaatgatggaaaatatgtactgttaaacgatcaaccagatgacgatgatggaaatccaaatgaacatagaggcgcagaatccgaagcataactcacttgcgcctgtgggggaagagcaaacaggaaggagagctacctcctaagggttttaacgtctctgacatacaggcacactgacctgatttccgaaggctgacaatcgtttgtggaatgtaatcttgatgccttgatactgagacttgggagggaaactaagaaatggttgacagcgttcccacccatctacaatgttn

SEQ ID NO: 30100 - DNA, 369 bp, Homo sapiens
ggcacgagtcgaaatatcagtgtgtgaagctgaatgatggtcacttcatgcctgtcctgggatttggcacctatgcgcctgcagaggttcctaaaagtaaagctttagaggccaccaaattggcaattgaagctggcttccgccatattgattctgctcatttatacaataatgaggagcaggttggactggccatccgaagcaagattgcagatggcagtgtgaagagagaagacatattctacacttcaaagctttggtgcaattcccatcgaccagagttggtccgaccagccttggaaaggtcactgaaaaatcttcaattggattatgttgacctctaccttattcattttccagtgtctgtaa

SEQ ID NO: 30101 - DNA, 363 bp, Homo sapiens
ggcacgagggggtgtctgcatttagtccagacactgcttggctcgctccccgaggcctcctgtttctgacttcctgcataactgtgagctgaagggtttcctcatctccccatcttaccccatcatactgatttctttcttgggcactggggctacttggcgccaagaatcatgttgtttgggatggagatgcctgcctcttgtctgtgtgcggtgtacttatatgtctatatggatgagcctggcatgaacagcactgtgcctgggtcatttggacaaatctcctcccaccccccaatccactgcaactctgctgttcacacattacccttggcaagcggtggaggggggcagggacacact

SEQ ID NO: 30102 - DNA, 368 bp, Homo sapiens
  misc_feature (1)...(368): n = A,T,C or G
ggcacgagatcattcttgtgttttagtctttgccagactcaaagtgcctatatttcatcccatgagtctgcaaacctgctttgtggtaacctgcctggctacttgccattcattaactgcttcttgacccatgttgattccctctgtcacttactctgaaaagacctgttagaaataagcttgtgatctgcttgagactttggcaatactggtttagccagaatagagaaatccttaagtagcacagcaatcctttctgaatcttctatttggtgcttctttgatctctgggactctcccacctaacatccctctccaatttaagtaatcaaaatagaaagaggggcccaggcaaggtggcccacgcn

SEQ ID NO: 30103 - DNA, 364 bp, Homo sapiens
  misc_feature (1)...(364): n = A,T,C or G
ggcacgagagcaaattggtgttttccaggggctggagggagggaggaatggggagtgactgcttaacgggcagagagttttcttttggggtgatgaaatgttttggaactaaatagagggggcgtttgcacaacattgcaaatggactaaacgtcattgagagagttaattttacattatgtggatttcaacttactaaaaatgaatgccagagtggcaggtgaacctcctcacttcacacccaccctcctctgcatcctgcagataggcccttcacccttatggtctgcaagactgagagagacatgccttctccatacctgtcactgtangagttcctgtgggaacagctatgtttcctgag

SEQ ID NO: 30104 - DNA, 369 bp, Homo sapiens
  misc_feature (1)...(369): n = A,T,C or G
ggcacgaggcaaaaaaagagggaccatatgatgtggtggttctaccaggaggtaatctgggcgcacagaatttatctgagtctgctgctgtgaaggagatactgaaggagcagaaaaaccggaagggcctgatagccgccatctgtgcaggtcctactgctctgttggctcatgaaataggttttggaagtaaagttacaacacaccctcttgctaaagacaaaatgatgaatggaggtcattacacctactctgagaatcgtgtggaaaaagacggcctgattcttacaagccgggggcctgggaccagcttcgagtttgcgcttgcaattgttgaagccctgaatggcaaggaggtggcggctcaan

SEQ ID NO: 30105 - DNA, 370 bp, Homo sapiens
ggcacgagggtctcaagaaacctaggaaaagtgggcagcaaatgttgtaaacatcctgaagcaaaaagaatgccctgtgcagaagactatctatccgtggtcctgaaccagttatgtgtgttgcatgagaaaacgccagtaagtgacagagtcaccaaatgctgcacagaatccttggtgaacaggcgaccatgcttttcagctctggaagtcgatgaaacatacgttcccaaagagtttaatgctgaaacattcaccttccatgcagatatatgcacactttctgagaaggagagacaaatcaagaaacaaactgcacttgttgagcttgtgaaacacaagcccaaggcaacaaaagagcaactgaaag

SEQ ID NO: 30106 - DNA, 371 bp, Homo sapiens
ggcacgaggttaagggtgtgaccaaagacaaatggaaaaagacaaatgacaaacatactaataaagagcttcggtttctccacaaaaaatacaataataaaataaaatgttatcagaaatctcttgactctcctccacgttagctcactttttccctcaagagggtgaacatgacccttaacagatccagcctcaagtgctggattctcttgggaacttggttaaatggttttttttcttcccgaatgtccaagtcaccttccagacctgcagctcctgagcagccaacttaggacttctaatggagagtgaagttcccctggttcgcggaggggccggccacagcctcaaggctgctgttgattggtccc

SEQ ID NO: 30107 - DNA, 366 bp, Homo sapiens
ggcacgagatttgttgctggggataaatttgaactttcaagcaaattttagaattttgggaaacttgtacccattactgtgagtttgacactggagattgatagtaacattagcaaatgtgatttttgaggatctgtgtcagtcaataaatcagagttttccaaatgaccagtgtatcctggtgcagatgacaaaatcatacttgagttattcaaagtgcattaataggtttcaaattttcacattgctctcaacctttaagaaatcacttgctgagttttggtataatatcaaaaaataatacctgtggttatctggaaaggatattaaaatgtacctcacttttccgtaacttttctatctagg

SEQ ID NO: 30108 - DNA, 366 bp, Homo sapiens
ggcacgaggaaatatcagggatattaaccctgcttatcacatatatggcaaatatttttttccatacattattgtttcttttggctttgaagtctcaagccacgtaagaattgtgtctttttttttttttgaaacggagtttttttgttttgccccccaggttgaagggcaggggggcaatttaagctatttgaaccctttgcctccggggttaaagcaattttcctgcctaaccctccaaagaattggaaataacgggggggggcccccgcccccagttaatttttggaattttaaccaaaaacggggtttaaacgggttacccaggagggccccaatctccggacctggggatccacctgcccg

SEQ ID NO: 30109 - DNA, 364 bp, Homo sapiens
ggcacgagggagcaatttcttatcaagtgggttggctgattccattcttctgttaccgactttttgacttcgtcctcagttgcctgggtgctattagttctctcacctatttgccaagaatcaaagaatatctggatcaactacctgattttccctacaaagatgacctcctggccttggactccagctgcctcctgttcattggtcttgtggtctttgccttattcatcatttttaaggcttatctaattaactgtgtttggaactgctataaatacatcaacaaccgaaacgtgccggagattgctgtgtaccctgcctttgaagcacctcctcagtacgttttgccaacctatgaaatggg

SEQ ID NO: 30110 - DNA, 363 bp, Homo sapiens
ggcacgaggcatctttatgttgaatcttcccgttcaggaaaatgatatgtcttcaattcatttttttctcccttattagcttttccattgttttcatgggccttttgcactcttcttcgattcatcactaggtttttaaatttttttactccgggaaagtattattgtttgtgtatatgaaggctcttggtgtatgtacatttaaattttttttattttgcctatgctttttccaacctaattgtcatcccacactgtgagggggggtgtgtgtgtgtgtacatgtgcataggggcctacctcactttattgtgttttctacaaattgaaagttcatggcaaacctgtgtccagcaagtctgt

SEQ ID NO: 30111 - DNA, 368 bp, Homo sapiens
ggcacgaggtagcatcaagaaacatctgcacattttcccagcagcctgagtaactagtagtgatttgtacagacttctctgcatctgctttttccccccttccttttttcagcacatctagatgattaatagactgaacaggcccttatatatgcattctgacagcctttaggacggtcttggttgacaatacacacataagccagtgttgttatcatgaaacacttcatttgaatgactattacaggctgaacaggatgtcctatgccaagaggttgtgacattttgagagggtggtgctgggagccatgtgggactcttttcccatcacagccaagttgacattttctcaggttgtaggatcattg

SEQ ID NO: 30112 - DNA, 363 bp, Homo sapiens
ggcacgagtgcctgatgtgcaagagctcatcactcaagtgcgggcagagaagtgctccctgcaggccgcagccatccttgatgcaaacgacgctcatcaaacagagacctcctcctcccaagtcaaggacaataagcctctggttgaacggtttgagacattctgcctggacccttcccttgtcaccaagcaagccaaccttgtgcacttcccaccaggcttccagcccattccctgcaagcctttgttctttgacctggccctcaaccatgtggctttcccaccccttgaggacaagttggaacagaagaccaagagtggcctcactggatacatcaagggcatctttggattcaggagcta

SEQ ID NO: 30113 - DNA, 361 bp, Homo sapiens
ggcacgaggggagagaccctttgaagtcaaggacaccgaggaagaggacttccacgtggaccaggcgaccaccgtgaaggtgcctatgatgaagcgtttaggcatgtttaacatccagcactgtaagaagctgtccagctgggtgctgctgatgaaatacctgggcaatgccaccgccatcttcttcctgcctgatgaggggaaactacagcacctggaaaatgaactcacccacgatatcatcaccaagttcctggaaaatgaagacagaaggtctgccagcttacatttacccaaactgtccattactggaacctatgatctgaagagcgtcctgggtcaactgggcatcactaaggtc

SEQ ID NO: 30114 - DNA, 366 bp, Homo sapiens
ggcacgagaacccgggcgccgccaagatgccggcttaccactcttctctcatggatcctgataccaaactcatcggaaacatggcactgttgcctatcagaagtcaattcaaaggacctgcccccagagagacaaaagatacagatattgtggatgaagccatctattacttcaaggccaatgtcttcttcaaaaactatgaaattaagaatgaagctgataggaccttgatatatataactctctacatttctgaatgtctgaagaaactgcaaaagtgcaattccaaaagccaaggtgagaaagaaatgtatacgctgggaatcactaattttcccattcctggagagcctggttttccactta

SEQ ID NO: 30115 - DNA, 362 bp, Homo sapiens
  misc_feature (1)...(362): n = A,T,C or G
ggcacgagtgctgaaacattcaccttccatgcagatatatgcacactttctgagaaggagagacaaatcaagaaacaaactgcacttgttgagctcgtgaaacacaagcccaaggcaacaaaagagcaactgaaagctgttatggatgatttcgcagcttttgtagagaagtgctgcaaggctgacgataaggagacctgctttgccgaggagggtaaaaaacttgttgctgcaagtcaagctgccttaggcttataacatcacatttaaaagcatctcagcctaccatgagaataagagaaagaaaatgaagatcaaaagcttattcatctgtttttctttttcgttggtgtaaagccaan

SEQ ID NO: 30116 - DNA, 359 bp, Homo sapiens
  misc_feature (1)...(359): n = A,T,C or G
ggcacgaggataacattaaacagctgaaagagatgaaatttacttatcttattaattatatccaagatgagatcaacacaatcttcagtgattatatcccatatgtttttaaattgttgaaagaaaacctatgccttaatcttcataagttcaatgaatttattcaaaacgagcttcaggaagcttctcaagagttacagcagatccatcaatacattatggcccttcgtgaagaatattttgatccaagtatagttggctggacagggaaatattatgaacttgaagaaaagatagtcagtctgatcaagaacctgttagttgctcttaaggacttccattctgaatatattgccagn

SEQ ID NO: 30117 - DNA, 362 bp, Homo sapiens
ggcacgaggtattcctcacacagatcttggcggttcaatctggaaacttggtgtgctgcgtgtgaatacagatgctgggaagcttatcctgggatgccatctctctgacccctaatgcttggctgaactcttctgctgcactcggtctttcctctgtaaatcacagcattgcatcactatacgctggagtctggccctaggacacctttctaaaaagactccctgtggtgttcagaatcactcctacagtcaggttctccacaatggatctcagtgctgcaagtcaccgcatacctctaagtgatggaaacagcattcccatcatcggacttggtacctactcagaacctaaatcgacccct

SEQ ID NO: 30118 - DNA, 360 bp, Homo sapiens
ggcacgaggaagcaatgagttctcactatgttgccaaagctgggctcaaactcctggcctcaagcaaccctcctgccttggcctcccaaaacgctagaattacaggcataaaccactggctgaaaaaattttaaaaaaatgtttttaatgctaatgtcatgaagcataaagagaagctaaagaacggtcccagattaaaggagactaaagaaacatgacaactaatgtaatttgtgatccttggctgaaggggaaaaaaaaaacaaataataaaagtttattgacaaaattggaatatgaataggaaattattggatcaatgctaaatttcttgaatttgataactatacttaaattagt

SEQ ID NO: 30119 - DNA, 357 bp, Homo sapiens
ggcacgagaaattattttgctttcagtgtaaatcttcgcagtgttctaaacaaagttcagtcttctgctcgcccctttccctcactgatgtctgcacttggttgagggctcctggagcctcacaggctctgctgttctccacttttcacctgccatccacgccctgcaagctcatgcaaacaccctttcttcctcctgcggcagagttgttcaagttgcctgggcaggggcttaaacagtgccagcccctgccatcccaaagctattgttaagccccccaggcgtcctccacccacgcccactagcctgccatgtccacagttccttgggctgctgaggggctagtgcagtggtcct

SEQ ID NO: 30120 - DNA, 358 bp, Homo sapiens
ggcacgagcagagctgcagcagcgcaatcgagtgtgccccccacatctgaagacctgctatcccctggagtccaggccttccctgagcctgggcaccatcacagatgaggagatgaaaactggagacccccaagagaccctgcgccgagccagcatgcagccaatccagatagccgagggcactggcatcaccacccggcagcagcgcaaacgggtctccctagagccccaccagggccctggaactcctgagtctaagaaggccaccagctgtttcccacgccccatgactccccgagaccgacatgaagggcgcaaacagagcactactgaggcccagaagaaagcagctccagct

SEQ ID NO: 30121 - DNA, 356 bp, Homo sapiens
ggcacgagtgaaatttcttgccaggaatgttgtgataagttcttttcagttttgaaattcctgtccaactttgtgcaagggaaaaagcattgatccataaatcaggaggccttgattctatggtttggtaactttctgtgtatcattgaagctttatggattttagtttcctgctctctaaaaaatgagtaataatatttgtcttgccatggagatggagtagataaaattacaaagacacgtaaatgctgcatctgcaaggaattattattctgatgattggtttatatagctgctgcaaagagttaattcattctttccttaaagattccaaatctatgcaagacggctggggg

SEQ ID NO: 30122 - DNA, 361 bp, Homo sapiens
ggcacgaggagacatatacagcctgttagacctgaaggcagatggctcttcttaaggccaataaggatctcatttccgcaggattgaaggagttcagcgttctgctgaatcagcaggtcttcaatgatcctctcgtctctgaagaaaacatggtgactgtggtggaggactggatgaacttctacatcaactattacaggcagcaggtgacaggggagccccaagagcgagacaaggctctgcaggagcttcggcaagagctgaacactctggccaaccctttcctggccaagtacagggacttcctgaagtctcatgagctcccgagtcacccaccgccctcctcctatctcagggaccg

SEQ ID NO: 30123 - DNA, 380 bp, Homo sapiens
  misc_feature (1)...(380): n = A,T,C or G
ggcacgagatcttggtggagaaggctcaggatgagatcccagcactgtccgtgtcccggccccagaccggcctgtccttcctgggccctgagcctgaggacctggaggacctgtacagccgctacaagaagctgcagcaagagctggagttcctggaggtgcaggaggaatacatcaaagatgagcaaaagaacctgaaaaaggaatttctccatgcccaggaggaggtgaagcgaatccaaagcatcccgctggtcatcggacaatttctggaggctgtggatcagaatacagccatcgtgggctctaccacaggctccaactattatgtgcgcatcctgagcaccatcgatcgggagctgctcaagcccaacgcctcn

SEQ ID NO: 30124 - DNA, 362 bp, Homo sapiens
  misc_feature (1)...(362): n = A,T,C or G
ggcacgagcgtggacaaggagaacctcaccatgccgggcctcaggttcgacaacatccagggagatgcagttaaagacttgatgcttcgctttctgggtgaaaaagctgcagcaaagagacaagtcctaaatgccgactcagtggaacaatcttttgttggattgaaacagctaatcagctgcagaaactggagggcagcagtggacctgtgcggacgtctcctcacagcccacggccagggctacggcaagagcgggctgctcaccagccacacgacagattcactgcagctctggtttgtcaggctggcactactagtgaagttgggccttttccagaatgctgagatggaatttgaacn

SEQ ID NO: 30125 - DNA, 361 bp, Homo sapiens
ggcacgagagaatatcttcctcactcagaatggaaaagtgaaattgggagactttggatctgcccgtcttctctccaatccgatggcatttgcttgtacctatgtgggaactccttattatgtgcctccagaaatttgggaaaacctgccttataacaataaaagtgacatctggtccttgggttgcatcctgtatgaactctgtacccttaagcatccatttcaggcaaatagttggaaaaatcttatcctcaaagtatgtcaagggtgcatcagtccactgccggctcattactcctatgaacttcagttcctagtcaagcagatgtttaaaaggaatccctcacatcgcccctcggct

SEQ ID NO: 30126 - DNA, 363 bp, Homo sapiens
  misc_feature (1)...(363): n = A,T,C or G
ggcacgagacaaagcatccactgccctgccctcatagagcttatagcctaacacaaagcaacagcagacattaggcatttgttcataaaacctttcccacaaagacttacaggcaggaaaattaggtattaatcaaatcacagaacctcccaaatgctaagtgaggagtttaccctttgagcatatcccattaaaagcctcagttttctcatctgagaaaggggacggtacctgccttttcatgtgaaacctaacgagataatgtggaggcagctcttaacacagggtcccccacataattggtgcataagtttccagctgatgtgagaaaaatacagaaaccccaatctaaatctatctctn

SEQ ID NO: 30127 - DNA, 356 bp, Homo sapiens
ggcacgagcacaccctgaagactgctaatttttgcatgcatatgattttcacatgaatggatgaaaatactaaaatctcttccccctggaattgtctaattgccccgaccctactctaacagcaactagtgggtgggggcggtggagactcctgccattctctgtggcaccccacttccctggaagctcagtcggcctccgtctgctcacgtattggcacggttgtcttccaaacccattgatgccggaacatgggtcaggaagaatacagtcagctctctggtgctttccatagcgttcctttttgccaggcttctgagatttttaaataacggaagcaacatctgcctctgaat

SEQ ID NO: 30128 - DNA, 363 bp, Homo sapiens
  misc_feature (1)...(363): n = A,T,C or G
ggcacgagccacgggcgggtctggaaaaaaattactgccgtaaccctgatggtgatgtaggtggtccctggtgctacacgacaaatccaagaaaactttacgactactgtgatgtccctcagtgtgcggccccttcatttgattgtgggaagcctcaagtggagccgaagaaatgtcctggaagggttgtaggggggtgtgtggcccacccacattcctggccctggcaagtcagtcttaaaacaaggtttggaatgcacttctgtggaggcaccttgatatccccagagtgggtgttgactgctgcccactgcttggagaagtccccaaggccttcatcctacaaggtcatcctgggtgccn

SEQ ID NO: 30129 - DNA, 363 bp, Homo sapiens
ggcacgagttttgtcccactttaaattgttttttcttcttaacattgaattttaagaattcattgtatcttttaatattctgaatgctagttatttgtcagatacatgttttgcaaaccatttatctgtatttggtttctttttgttatcttagcagtgtatcctgaagaatagttttaaattttgatgtaatccaaaatatttcggttgtttgtgttctttgttatcctgtctatttttgttggtgttgttttatagatatgggggtctcactacgttgcccaggctggtcttgatctcctgaactcaagtgatcctcccacctcagcctcccatccttgtctacctaattaggctttgtgt

SEQ ID NO: 30130 - DNA, 361 bp, Homo sapiens
ggcacgaggatgaatgtgaaggtgctggactttgagcactttctgcccatgctgcaaacagtggccaaaaacaaggacccgggcacctattaggattatgtcgaaggacttcgggtgtttgacaaggaaggaaatggcaccgtcatgggggctgaaatccggcatgttcttgtgacactgggtgagaagatgacagaggaagaagtcgagatgctggtggcatggcatgaggacagcaatggttgtatcaactatgaagcgtttgtgaggcatatcctgtcggggtgacgggcccatggggcggagctcgtacgcatggcgctgaatgggtgaagaccttcccagtctcccctgagacccg

SEQ ID NO: 30131 - DNA, 367 bp, Homo sapiens
  misc_feature (1)...(367): n = A,T,C or G
ggcacgaggagaaagccctaggacttcgtgggcttctgcatttattgcagcattaaaatgcaagggcaaaacaaggtacaaaggccctaccagggactgggggccgggagagtggggatttaatgtttaatggttacagagtctcaacttgagaaatgacaattgttctaaggatagatgctggcaatggttacataacagtgtgaatgtacttaatgctgctgaactgtgtacttaaaaatggctgagatggtagattttatgtacattgcagtggctcatgcctataaccccagcacttanagaggcagagatgggaggacagctcgagcccaggaactcaagaccagcctgggcagcaaagctg

SEQ ID NO: 30132 - DNA, 368 bp, Homo sapiens
ggcacgagggtgcgacgaaggagtaggtggtgggatctcaccgtgggtccgattagccttttctctgccttgcttgcttgagcttcagcggaattcgaaatggctggcggtaaggctggaaaggactccggaaaggccaagacaaaggcggtttcccgctcgcagagagccggcttgcagttcccagtgggccgtattcatcgacacctaaaatctaggacgaccagtcatggacgtgtgggcgcgactgccgctgtgtacagcgcagccatcctggagtacctcaccgcagaggtacttgaactggcaggaaatgcatcaaaagacttaaaggtaaagcgtattacccctcgtcacttgcaacttgg

SEQ ID NO: 30133 - DNA, 362 bp, Homo sapiens
ggcacgagtgcctgtacttgtcagaactagaggaaatagccaagactaatgaaaaagattactctaacccttaaaagacttttaaattcactactagaggggtcattttaaaaatacatccatgttttaacttatttgagccttctttatgagtaaatgattcctccttgttctgtctttcaaaccagctaaatatttgtcacaaaagtgcttttttctcactgttgcctattttcatatatcaggttttaaatagttttaattttttaataaaattttctctacgttctatatgcaattggtatatatctatttgaatagctgaaggactaaaatacttttttaagagataacttcaggaa

SEQ ID NO: 30134 - DNA, 364 bp, Homo sapiens
ggcacgaggtggctcacacctatagtcccagaactttgggaagctgaggtgggaggattgcttgcacttaggagactgagaacagcctgggcaacatggcgaaaccccatctctacaaaaaatacaaaaattagctgggcattgtggtatgtgcctttagtctcagctactcgggaggctgaggtgggaggatcgcctgagcccggggaggtcaaggctgtggtgagccatgactgtgccattgtactgcagcctgggtgaaaaagcaagaccctgtgtcaaaaatagtaataataataaaataaaaataaagcttgagccaccgcgcccagcctaagaaggaactctttttaaaaacaattac

SEQ ID NO: 30135 - DNA, 371 bp, Homo sapiens
ggcacgagatggtgtttttaagggaattaggcagaacagatttctagattgggtaggccactgcattctcttttgtttgcaaattggtcaacaaaatttgcaaagtgatttcaggagagagcagctttgaggaatgtggaaaatcataattgccgtctggaccattgattgattgtgaccagtagcagaagggtgcctgttacatagagaggctccttctgtccaaatgaatttctgtatactcttctataaataaaagggaggaatatattctgctggaagcccatgaaccatcgctgaggttctgatacaacatagagttttttccaaggagtgaatgtggtttaattactggactctcttagcacagg

SEQ ID NO: 30136 - DNA, 365 bp, Homo sapiens
ggcacgagcaaacagacaccatggtgcacctgactcctgtggagaagtctgccgttactgccctgtggggcaaggtgaacgtggatgaagttggtggtgaggccctgggcaggctgctggtggtctacccttggacccaaaggttctttgagtcctttggggatctgtccactcctgatgctgttatgggcaaccctaaggtgaaggctcatggcaagaaagtgctcggtgcctttattgatggcctggctcacctggacaacctcaagggcacctttgccacactgagtgagctgcactgagacaagctgcacgtggatcctgagaacttcaggctcctgggcaacgtgctggtctgtgtgctg

SEQ ID NO: 30137 - DNA, 373 bp, Homo sapiens
ggcacgaggaacaatgccactgcacagtcgctggtccttattgatgaatttggaaagggaaccaacacggtggatgggctcgcgcttctggccgctgtgctccgacactggctggcacgtggacccacatgcccccacatctttgtggccaccaactttctgagccttgttcagctacaactgctgccacaagggcccctggtgcagtatttggattggccaagggtttcaggacaggaaggaggtttgcgaaggtgttgcgaaggccagccatgcctcccacacagctgcccaggctgggcttcctgacaagcttgtggctcgtggcaaggaggtctcaaacttgatccgcagtggaaaacccatcaagcct

SEQ ID NO: 30138 - DNA, 368 bp, Homo sapiens
  misc_feature (1)...(368): n = A,T,C or G
ggcacgaggtggggcctttgggaaattgtgagggcagagccctcatgaatgggattagtgccgttacgaaggggaccccagggacctaggtagccccctttcaccatctgaggatacagcaggaaggcactatctgtaagaaagcaggcccacaccagacactgaatctgctggtgccttgatcttcaacttcctagtctccagacttgtgagaaataaaattcttttgtttataagctactcattctatggcatttgttgtagcagcccaaacagactaaggtaacatattaggcataccatagcatacctgctgaaaaccaaaaagaaaggtattggtgagtagccagggagaaaatacatatacn

SEQ ID NO: 30139 - DNA, 368 bp, Homo sapiens
  misc_feature (1)...(368): n = A,T,C or G
ggcacgagaaaggaaattatacgtgctaatccaaggtggattattttattaaattgagatgaggtcttgatattgttgcccaggctggtctggaactcctgagctcaagcagttctcctaccttggcctcccaaagcgctggcattacaggcgtgggccaccacacctggccttcaaggtggatttaaaaaagaaatttaagagtctctctcacccaggctggagtgcagtggcatgatcttggttcactgcaacctctgcctgctgagttccagcagtccttgagcctcagtattgagtagctgggactacatgcacgtgcacactgccacgcctggctaagttttgtatttttaacagagatgggn

SEQ ID NO: 30140 - DNA, 368 bp, Homo sapiens
ggcacgagtcacgaggtataattaggggccttgaaaatatgacaaactctgagggaaacaaagacaatgtggaaagaataacttaattttaattccatctccagagagatttgaggtgtatttaagatgaaaaacaggatactacaaagaaacggaaaactcaggagttcaagaccagcctaggcaagatggcaacatcccgtctctacaaaataatttttaaaaattagccaagcatggtggcatgtgcctgtggtcctagctacttgggaggctgaagtgggaagatcacttgagcccaggagttcaaggcttcagtgagccatgatggtgccactgcactccagcctgggggacagagtgagacc

SEQ ID NO: 30141 - DNA, 372 bp, Homo sapiens
ggcacgagagtatattaggataagccacatttgtaacagctaacggagaaaacataactgaatgtcagtgttacacagtgaactttgtagagcagtgattcccaattctgagatgttgtaagaggaatgtcagaattcctaaaacactcatcctccaacctttcaaattcagtgctgtggtgagccattgttactgataagggtatatcccacttgtgatttctttgttttgggtcaagaaaagcttttgtagaagccagtgtaaaatggcatgcatataattaatttcctcatcttttcctcataaaatcagaggtccttttatcgatggtggtttgaaagtctggggtattcagatttggcagcagaaag

SEQ ID NO: 30142 - DNA, 363 bp, Homo sapiens
ggctcgagaaccccacacgcctttggcacaatgaagggggtaacctttatttcccttctttttctctttagctcggcttattccaggggtgtgtttcgtcgagatgcacacaagagtgaggatgctcatcggtttaaagatttgggagaagaaaatttcaaagccttggtgttgattgcctttgctcagaatcttcagcagggtccatttgaagatcatgtaaaattagtgaatgaagtaactgaatttgcaaaaacatgtgttgctgatgagtcagctgaaaattgtgacaaatcacttcataccctttttggagacaaattatgcacagttgcaactcttcgtgaaacctatggtgaaatg

SEQ ID NO: 30143 - DNA, 367 bp, Homo sapiens
ggcacgagtccacccccacacaaggctcggtgctcttcggcacggtcaacggtatgatagggctggtgacctcactgtcagagagctggtacaacctcctgctggacatgcagaatcgactcaataaagtcatcaaaagtgtggggaagatcgagcactccttctggagatcctttcacaccgagcggaagacagaaccagccacaggtttcatcgacggtgacttgattgagagtttcctggatattagccgccccaagatgcaggaggtggtggcaaacctacagtatgacgatggcagcggtatgaagcgagaggccactgcagacgacctcatcaaggttgtggaggagctaactcggatcca

SEQ ID NO: 30144 - DNA, 362 bp, Homo sapiens
ggcacgagctggaagagaaagatgccatgttcctggtacaagtaaaaatgaaagccacctcagtggatctgagaaacacatactgccaaagaaagtagagaaagggcagaattggaatggatttagttactgtgggtctgtctagacattatttgagggctagcgctggcttcactcacctctatgccatgcgtggctagtgccagtggctggcacatagcagcatatgagctgaatgagtataaagcagtctaatttttaggcagtaaaagttttgtttcattttatttttacctgggtagcacagacattgaaatgtgttaatcaacaaatgcagagtatgagattaaaaactaatgaca

SEQ ID NO: 30145 - DNA, 363 bp, Homo sapiens
ggcacgagacaaagcagccactgccctgccctcatagagcttatagcctaacacaaagcaacagcaaacattaggcatttgttcataaaacctttcccacaaagacttacaggcaggaaaattaggtattaatcaaatcacagaacctcccaaatgctaagtgaggattttaccctttgagcatatcccattaaaagcctcagttttctcatctgtgaaaggggacggtacctgccttttcaggtgaaacctagtgagataatgtgtatgcagctcttagcacagtgtcccccacataattggtgcataagtttccagctgatgtaagaaaaatacagaaaccccaatctaaatctatctctg

SEQ ID NO: 30146 - DNA, 367 bp, Homo sapiens
ggcacgaggagactgcatagggccggcgtggtggtgggtgcctgtaatcccaactacttgggaggctgaggcaggagaatcgcttgaacccgggaggcagaggttgcagtgagccaagatcatgccattgcactccagcctgggtgacagagtgagactccatctcaaaaaacaaacaaacaaaatatttgtaagatattctaacagtaataattctcaatcttatcagaaagcttttccataacacatgaacccaaattttatctcaagctcaacaaataaaatcagctgggcatggtagatcaggctgggaatcccaacacttagggaagccaaggcagggggattgcttgagcccaggctggag

SEQ ID NO: 30147 - DNA, 366 bp, Homo sapiens
ggcacgagcaaagccccgggaccgcttaacctgggagggcctgtataacgttctgatgtaccggctctaacactacgtgaccaaacccaacttatatgatgaggacgatggggatgaaaaagaagatgactacgtggataaagatgacgttcctgggccctgaactgggggcagcctccgagaccctgagccagagcacgctgggcccagctttggagtcactaacaggggccctgcctcctggacaattgccttggcacatttgagaggccccctaagcgacgacgctggcctctgtgtcacctggagacggtgaactccaatgggaccagcgaccgcacaagctcccctgtagaagtcatgccc

SEQ ID NO: 30148 - DNA, 362 bp, Homo sapiens
ggcacgagtgggactagaggagtaactggatatttcaccttcaccttatacctggagactcccaagccctccatctccagcagcaacttaaaccccagggaggccatggaaactgtgatcttaacctgtgatcctgagactccggacacaagctaccagtggtggatgaatggtcagagcctccctatgactcataggtttcagctgtccgaaaccaacaggaccctctttctatttggtgtcacaaagtatactgcaggaccctatgaatgtgaaatacggaactcagggagtgccagccgcagtgacccagtcaccctgaatctcctccatggtccagacctccccagaattcacccttc

SEQ ID NO: 30149 - DNA, 368 bp, Homo sapiens
ggcacgaggaagggcatgaccgccatggccaccgagaggttggccagcgccatggacacgatcaggaagaagttgcctatgaagaaagggcctgtgaaggcggcaaatttgccacagtagaagtgacagataagcctgtggatgaggctctacgggaagcaatgcccaaggtcgcaaagtatgcggggggcaccaatgacaagggaattgggatggggatgacagtccctatttcctttgctgtgttccccaatgaagatggctctctgcagaagaaattaaaagtctggttccggattccaaaccaatttcaaagcgacccaccagctcccagtgacaaaagcgttaagattgaggaacgggaaggc

SEQ ID NO: 30150 - DNA, 363 bp, Homo sapiens
  misc_feature (1)...(363): n = A,T,C or G
ggcacgagggtgaaggggccgaagaaggttgagaagggcgacaaagatgctgaattagtggcccaatggaactattgtactctaagtcaggaaatattaagacgaccaatagttgcctgtgaacttggcagactttataacaaagatgccgtcattgaatttctcttggacaaatctgcagaaaaggctcttgggaaggcagcatctcacattaaaagcattaagaatgtgacagagctgaagctttctgataatcctgcctgggaaggggataaaggaaacactaaaggtgacaagcacgatgacctccagcgggcgcgtttcatctgccccgttgtgggcctggagatgaacggccgaccn

SEQ ID NO: 30151 - DNA, 367 bp, Homo sapiens
ggcacgagcggcacgagggagtattatgattagcctgaatacagacccatggattgccctggggatcctcacaggcctctaaggtttgaatattggccctcacagagtcacaatggcacatgctgatgaatatgttggaacagaatccagaggatctcctaacttggccccacccacctcagctcctgctggtacggatattattacagtctcgactacctcgtctatccagtccctggcttatacttaaggcaacactagctgcttaacaaataaaccccagattttcggtagcttcacacaattaaaatttctcattaatattacaatccattgtgggtattcctatttggtacacaaatttctt

SEQ ID NO: 30152 - DNA, 362 bp, Homo sapiens
ggcacgaggtggctgagtttagaattgaaacttctttgggtccagtggtgctcacaaggctcaaatgtagtatgtcttttgtaagtgaaagtgaagttcaactgatttgtaagttttaaaaccttggtgtttactttttaaaattttgagggataccgtgtatgtatcaaacaagtttgtagtctttctataacatgaaattatgattattccgccagattttgaagtaactcgaattaatattttggacttgatgttatattagttttctttaccttcaagcttttacaaattatgtttaggatgctacggtaatatttatgttggtagatttgacttaataacttaatatattatctacg

SEQ ID NO: 30153 - DNA, 363 bp, Homo sapiens
ggcacgagaaatgaaaatgtatgacaacgtatctggttcaagcaaggctatgaggaaacagacattctaatacattgctggtgggaatgcaaactgatacaacctttctgaggagcagtttggcaacatttaacaaaactattggtgcctcgacctgttcacctaacacttcaaggaaacctgccttaaaagatagacttctaggcctgtaatcctagcgcttcggggggccgaggcgggtggatcacctgagatcaggagttcgagaccagcctcggcaacatggtgaaagcctgtctctactaaaaatacagaaatcagctgggcgcagtgatgcatggccgtaatccaaactacttggga

SEQ ID NO: 30154 - DNA, 364 bp, Homo sapiens
ggcacgaggttgcatgagaaaacgccagtaagtgacagagtcaccaaatgctgcacagaatccttggtgaacaggcgaccatgcctttcagctctggaagtcgatgaaacatacgttcccaaagagtttaatgctgaaacattcaccttccatgcagatatatgcacactttctgagaaggagagacaaatcaagaaacaaactgcacttgttgagctcgtgaaacacaagcccaaggcaacaaaagagcaactgaaagctgttatggatgatttcgcagcttttgtagagaagtgctgcaaggctgacgataaggagacctgctttgccgaggagggtaaaaaacttgttgctgcaagtcaag

SEQ ID NO: 30155 - DNA, 365 bp, Homo sapiens
ggcacgaggaagcaatgagttctcactatgttgccaaagctggtctcaaactcctggcctcaagcaaccctcctgccttggcctcccaaaacgctagaattacaggcataaaccactggctgaaaaaattttaaaaaaatgtttttaatgctaatgtcatgaagcataaagagaagctaaagaacggtcccagattaaaggagactaaagaaacatgacaactaatgtaatttgtgatccttggctgaaggggaaaaaaaaaacaaataataaaagtttattgacaaaattggaatatgaatagtaaattattgtatcaatgctaaatttcttgaatttgataactatacttaaattagtaagag

SEQ ID NO: 30156 - DNA, 364 bp, Homo sapiens
  misc_feature (1)...(364): n = A,T,C or G
ggcacgagcagagctgcagcagcgcaatcgagtgtgccccccacatctgaagacctgctatcccctggagtccaggccttccctgagcctgggcaccatcacagatgaggagatgaaaactggagacccccaagagaccctgcgccgagccagcatgcagccaatccagatagccgagggcactggcatcaccacccggcagcagcgcaaacgggtctccctagagccccaccagggccctggaactcctgagtctaagaaggccaccagctgtttcccacgccccatgactccccgagaccgacatgaagggcgcaaacagagcactactgaggcccagaagaaagcagctccagcttctacn

SEQ ID NO: 30157 - DNA, 361 bp, Homo sapiens
ggcacgagtgaaatttcttgccaggaatgttgtgataagttcttttcagttttgaaattcctgtccaactttgtgcaagggaaaaagcattgatccataaatcaggaggccttgattctatggtttggtaactttctgtgtatcattgaagctttatggattttagtttcctgctctctaaaaaatgagtaataatatttgtcttgccatggagatggagtagataaaattacaaagacacgtaaatgctgcatctgcaaggaattattattctgatgattggtttatatagctgttgcaaagagataattcattctttccttaaagattccaaatctatgcaagacggctggggggagag

SEQ ID NO: 30158 - DNA, 363 bp, Homo sapiens
ggcacgaggcaacttcacgggccctgggagtctatgggctttttccctgtctcagacaggatgtcatatttgttgcagacgcagcaaatgcaatattgatgtcacttgaagacaagtctctgaatgttcgagccaaagcagcctggtccctgggcaacctgacagacactctgattgtcaacatggaaacaccagacccaagtttccaggaagagttctctggtctcctgctcttgaaaatgttacgatcagctatagaagcatccaaggataaagacaaggtaaaaagcaatgcagtccgggcccttggaaatttgcttcattttctgcaaccctctcatatagaaaaacccacatttgcag

SEQ ID NO: 30159 - DNA, 364 bp, Homo sapiens
ggctcgagcaaattccagaatgcgctattagttcgttacaccaagaaagtaccccaagtgtcaactccaactcttgtagaggtctcaagaaacctaggaaaagtgggcagcaaatgttgtaaacatcctgaagcaaaaagaatgccctgtgcagaagactatctatccgtggtcctgaaccagttatgtgtgttgcatgagaaaacgccagtaagtgacagagtcaccaaatgctgcacagaatccttggtgaacaggcgaccatgcttttcagctctggaagtcgatgaaacatacgttcccaaagagtttaatgctgaaacattcaccttccatgcagatatatgcacactttctgagaagg

SEQ ID NO: 30160 - DNA, 369 bp, Homo sapiens
ggcacgagggaaaccccagcgcagcttctcttcctcctgctactctggctcccagataccaccggagaaattgtgttgacgcagtctccaggcaccctgtctttgtctccaggggaaagagccaccctctcctgcagggccagtcagagtgttagcagcagctacttagcctggtaccagcagaaacctggccaggctcccaggctcctcatctatggtgcatccagcagggccactggcatcccagacaggttcagaggcagcgggtctgggacagacttcactctcaccatcagcagactggagcctgaagattttgcagtgtattactgtcagcagtatggtagctcacccgttcggccaagggag

SEQ ID NO: 30161 - DNA, 356 bp, Homo sapiens
ggcacgaggagacatatacagcctgttagacctgaaggcagatggctcttcttaaggccaataaggatctcatttccgcaggattgaaggagttcagcgttctgctgaatcagcaggtcttcaatgatcctctcgtctctgaagaaaacatggtgactgtggtggaggactggatgaacttctacatcaactattacaggccgcaggtgacaggggagccccaagagcgagacaaggctctgcaggagcttcggcaagagctgaacactctggccaaccctttcctggccaagtacagggacttcctgaagtctcatgagctcccgagtcacccaccgccctcctcctagctcaag

SEQ ID NO: 30162 - DNA, 356 bp, Homo sapiens
ggcacgagcgtggacaaggagaacctcaccatgccgggcctcaggttcgacaacatccagggagatgcagttaaagacttgatgcttcgctttctgggtgaaaaagctgcagcaaagagacaagtcctaaatgccgactcagtggaacaatcttttgttggattgaaacagctaatcagctgcagaaactggagggcagcagtggacctgtgcggacgtctcctcacagcccacggccagggctacggcaagagcgggctgctcaccagccacacgacagattcactgcagctctggtttgtcaggctggcactactagtgaagttgggccttttccagaatgctgagatggaatt

SEQ ID NO: 30163 - DNA, 356 bp, Homo sapiens
ggcacgagagaatatcttcctcactcacaatggaaaagggaaattgggagactttggatctgcccgtcttctctccaatccgatggcatttgcttgtacctatgtgggaactccttattatgtgcctccagaaatttgggaaaacctgccttataacaataaaagtgacatctggtccttgggttgcatcctgtatgaactctgtacccttaagcatccatttcaggcaaatagttggaaaaatcttatcctcaaagtatgtcaagggtgcatcagtccactgccgtctcattactcctatgaacttcagttcctagtcaagcagatgtttaaaaggaatccctcacatcgcccct

SEQ ID NO: 30164 - DNA, 359 bp, Homo sapiens
ggcacgagacaaagcaaccactggcctgccctcatagagcttatagcctaacacaaagcaacaggaaacattaggcatttgttcataaaacctttcccacaaagacttacagggcggagaattaggtattaatcaaataacagaacctcccaaatgcttagggaggattttaccctttgagcatattccattaaaagcctcagttttctgatctgagaaaggggacggtacctgccttttcaggtgaaaactagtgagagaaagtgcatgcagctcttaacacagtgtgccccacataattggtgcataaggttccagctgatgtgtgaaaaatacataaaccccaatctgaatctatg

SEQ ID NO: 30165 - DNA, 372 bp, Homo sapiens
ggcacgagtttttagctagagtttttcctcgcttttaatgacctcagccccgcctgcagtggctagaagccagcaggtgcccatgtgctactgacaagtgcctcagcttccccccggcccgggtcaggccgtgggagccgctattatctgcgttctctgccaaagactcgtgggggccatcacacctgccctgtgcagcggagccggaccaggctcttgtgtcctcactcaggtttgcttcccctgtgcccactgctgtatgatctgggggccaccaccctgtgccggaggcctctgggctgcctcccgtggtgtgagggcggggctggtgctcatggcacttcctccttgctcccacccctggcagcaggg

SEQ ID NO: 30166 - DNA, 372 bp, Homo sapiens
  misc_feature (1)...(372): n = A,T,C or G
agcacgaggtctcgtgctgtgtcggacctgcagcccctggccttccgccaccatggagtacctcatcggtatccaaggccccgactatgttcttgtcgcctccgaccgggtggccgccagcaatattgtccagatgaaggacgatcatgacaagatgtttaagatgagtgaaaagatattactcctgtgtgttggagaggctggagacactgtacagtttgcagaatatattcagaaaaacgtgcaactttataagatgcgaaatggatatgaattgtctcccacggcagcagctaacttcacacgccgaaacctggctgactgtcttcggagtcggaccccatatcatgtgaacctcctcctggctggctn

SEQ ID NO: 30167 - DNA, 357 bp, Homo sapiens
ggcacgaggatggcggtggagtcgcgcgttacccaggaggaaattaagaaggagccagagaaaccgatcgaccgcgagaagacatgcccactgttgctacgggtcttcaccaccaataacggccgccaccaccgaatggacgagttctcccggggaaatgtaccgtccagcgagttgcagatctacacttggatggatgcaaccttgaaagaactgacaagcttagtaaaagaagtctacccagaagctagaaagaagggcactcacttcaattttgcaatcgtttttacagatgttaaaagacctggctatcgagttaaggagattggcagcaccatgtctggcagaaaggggacg

SEQ ID NO: 30168 - DNA, 361 bp, Homo sapiens
ggcacgagcacaccctgaagactgctaatttttgcatgcatatgattttcacatgaatggatgaaaatactaaaatctcttccccctggaattgtctaattgccccgaccctactctaacagcaactagtgggtgggggcgggggagactcctgccattctctgtggcaccccacttccctggaagctcagtcggcctccgtctgctcacgtattggcacggttgtcttccaaacccattgatgccggaacatgggtcaggaagaatacagtcagctctctggtgctttccatagcgttcctttttgccaggcttctgagatttttaaataacggaagcaacatctgcctctgaattagct

SEQ ID NO: 30169 - DNA, 357 bp, Homo sapiens
ggcacgagaggatgttcgtcgtggcaacgttgctggtgacagcaaaaatgacccaccaatggaagcagctggcttcactgctcaggtgattatcctgaaccatccaggccaaataagcgccggctatgcccctgtattggattgccacacgggtcacattgcatgcaagtttgctgagctgaaggaaaagattgatcgccgttctggtaaaaagctggaagatggccctaaattcttgaagtctggtgatgctgccattgttgatatggttcctggcaagcccatgtgtgttgagagcttctcacactatccacctttgggtcgctttgctgttcgtgatatgagacagacagttgg

SEQ ID NO: 30170 - DNA, 363 bp, Homo sapiens
  misc_feature (1)...(363): n = A,T,C or G
ggcacgagatgaactactgcaggaatccagatgccgataaaggcccctggtgttttaccacagaccccagcgtcaggtgggagtactgcaacctgaaaaaatgctcaggaacagaagcgagtgttgtagcacctccgcctgttgtcctgcttccagatgtagagactccttctgaagaagactgtatgtttgggaatgggaaaggataccgaggcaagagggcgaccactgttactgggacgccatgccaggactgggctgcccaggagccccatagacacagcattttcactccagagacaaatccacgggcgggtctggaaaaaaattactgccgtaaccctgatggtgatgtangtggtn

SEQ ID NO: 30171 - DNA, 366 bp, Homo sapiens
ggcacgagatcattcttgtgttttagtctttgccagactcaaagagcctatatttcatcccatgagtctgcaaacctgctttgtggtaacctgcctggctacttgccattcattaactgcttcttgacccatgttgattccctctgtcacttactctgaaaagacctgttagaaataagcttgtgatctgcttgagactttggcaatactggtttagccagaatagagaaatccttaagtagcacagcaatcctttctgaatcttctatttgattcttctttgatctctgaggctctcccacctaacatccctctccaatttaagtaatcaaaatagaaagaggggcccaggcaaggtggcccacg

SEQ ID NO: 30172 - DNA, 357 bp, Homo sapiens
ggcacgagccacgggcgggtctggaaaaaaattactgccgtaaccctgatggtgatgtaggtggtccctggtgctacacgacaaatccaagaaaactttacgactactgtgatgtccctcagtgtgcggccccttcatttgattgtgggaagcctcaagtggagccgaagaaatgtcctggaagggttgtaggggggtgtgtggcccacccacattcctggccctggcaagtcagtcttagaacaaggtttggaatgcacttctgtggaggcaccttgatatccccagagtgggtgttgactgctgcccactgcttggagaagtccccaaggccttcatcctacaaggtcatcctgg

SEQ ID NO: 30173 - DNA, 358 bp, Homo sapiens
ggcacgagttttgtcccactttaaattgttttttcttcttaacattgaattttaagaattcattgtatcttttaatattctgaatgctagttatttgtcagatacatgttttgcaaaccatttatctgtatttggtttctttttgttatcttagcagtgtatcctgaagaatagttttaaattttgatgtaatccaaaatatttcggttgtttgtgttctttgttatcctgtctatttttggtggtggtggtttatagatatgggggtctcactacgttgcccaagctggtcttgatctcctgaactcaagtgatcctcccacctcagcctcccatccttgtctacctaattaggctg

SEQ ID NO: 30174 - DNA, 362 bp, Homo sapiens
ggcacgagacagaggcagccaagtgtaacctgctggcagaaaagcaatatggcttttgtaaggcaacactcagtgagaagcttggtggggcagaggttgcagtgacctgcacggtgttccaaacacagcccgtgacctcacagccccaaccagaaggtgccaatgaagcagtccccacccccgtggtggacccagatgcacctccgtcccctccacttggcgcacctggactccctccagctggctcacccccagactcccatgtgttactggcagctcctccaggacaccagttgcaccgggcgcactacgacctgcgccacaccttcatgggtgtggtctcattggggtcaccctcaggg

SEQ ID NO: 30175 - DNA, 366 bp, Homo sapiens
ggcacgaggatgaatgtgaaggtgctggactttgaccactttctgcccatgctgaagactgtggccaagaacaaggaccagggcacctatgaggattatgtctaaggacttcgggtgtttgacaaggaaagaaatggcaccgtcatgggcgctgaaatccagcatgttcttgtcacactgggtgagaagatgacatacgaagaaatctagatgctggtggtatggcatgaggacaggactggatggatcaactatgaagcgtttgggaggcatatcctgtctgggggaagggcccatggggcggagctcgtccgcatggcgctgaatggctgaagagcttaccagtcttcccagagaccgtgcctt

SEQ ID NO: 30176 - DNA, 361 bp, Homo sapiens
  misc_feature (1)...(361): n = A,T,C or G
ggcacgaggagaaagccctaggacttcgtgggcttctgcatttattgcagcattaaaatgcaagggcaaaacaaggtacaaaggccctaccagggactgggggccgggagagtggggatttaatgtttaatggttacagagtctcaacttgagaaatgacaattgttctaaggatagatgctggcaatggttacataacagtgtgaatgtacttaatgctgctgaactgtgtacttaaaaatggctgagatggtagattttatgtacattgcagtggctcatgcctataaccccagcacttaaagaggcagagatgggaggacagctcgagcccaggaactcaggaccagcctgggcagcn

SEQ ID NO: 30177 - DNA, 362 bp, Homo sapiens
ggcacgagggtgcgacgaaggagtaggtggtgggatctcaccgtgggtccgattagccttttctctgccttgcttgcttgagcttcagcggaattcgaaatggctggcggtaaggctggaaaggactccggaaaggccaagacaaaggcggtttcccgctcgcagagagccggcttgcagttcccagtgggccgtattcatcgacacctaaaatctaggacgaccagtcatggacgtgtgggcgcgactgccgctgtgtacagcgcagccatcctggagtacctcaccgcagaggtacttgaactggcaggaaatgcatcaaaagacttaaaggtaaagcgtattacccctcgtcacttgcg

SEQ ID NO: 30178 - DNA, 369 bp, Homo sapiens
  misc_feature (1)...(369): n = A,T,C or G
ggcacgaggtggctcacacctatagtcccagaactttgggaagctgaggtgggaggattgcttgcacttaggagactgagaacagcctgggcaacatggcgaaaccccatctctacaaaaaatacaaaaattagctgggcattgtggtatgtgcctttagtctcagctactcgggaggctgaggtgggaggatcgcctgagcccggggaggtcaaggctgtggtgagccatgactgtgccattgtactgcagcctgggtgaaaaagcaagaccctgtatcaaaaatagtaataataataaaataaaaataaagcttgagccaccgcgcccagcctaagaaggaactctttttaaaaacaattacatatn

SEQ ID NO: 30179 - DNA, 370 bp, Homo sapiens
ggcacgaggagggaagacgggggatggaaggaggggtcagagaaagggagggagctgcagctcaccctgttctccccactccccagttcataggcacagcctcccttatcgtgtgtgtgctggccattgttgacccctacaacaaccccgtcccccgaggcctggaggccttcaccgtgggcctggtggtcctggtcattggcacctccatgggcttcaactccggctatgccgtcaaccctgcccgggactttggcccccgcctttttacagcccttgcgggctggggctctgcagtcttcacgtgagtacagcccccacccagctcaccccagcctgcctctcctctgccctgccccccatgtccctg

SEQ ID NO: 30180 - DNA, 365 bp, Homo sapiens
ggcacgagatggtgtttttaagggaattaggcagaacagatttctagattgggtaggccactgcattctcttttgtttgcaaattggtcaacaaaatttgcaaagtgatttcaggagagagcagctttgaggaatgtggaaaatcataattgccgtctggaccattgattgattgtgaccagtagcagaagggtgcctgttacatagagaggctccttctgtccaaatgaatttctgtatactcttctataaataaaagggaggaatatattctgctggaagcccatgaaccatcgctgaggttctgatacaacatagagttttttccaaggagtgaatgtggtttaattactggactctcttag

SEQ ID NO: 30181 - DNA, 371 bp, Homo sapiens
ggcacgagctgccttatgtgtctgtcaccagccttcggagtcaagagtataagattgtgctaaggaagagttattgggactctgcctatgatgacgatgtcatggagaaccgggttggcctgaacctgctttatgctcagacggtatcagatattgagcgtgggtggatcttggtcaccaaggaacagcaccggcaactcaaatctctgcaagagaaagtctccaagaaggagttcctgagactggcccagacgctgcggcactatggctacttgcgctttgatgcctgtgtggctgacttcccagaaaaggactgtcctgtggtggtgagcgcgggcaacagtgagctcagcctgcagctccgcctgcct

SEQ ID NO: 30182 - DNA, 367 bp, Homo sapiens
ggcacgaggaacaatgccactgcacagtcgctggtccttattgatgaatttggaaagggaaccaacacgggggatgggctcgcgcttctggccgctgtgctccgacactggctggcacgtggacccacatgcccccacatctttgtggccaccaactttctgagccttgttcagctacaactgctgccacaagggcccctggtgcagtatttggattggccaagggtttcaggacaggaaggaggtttgcgaaggtgttgcgaaggccagccatgcctcccacacagctgcccaggctgggcttcctgacaagcttgtggctcgtggcaaggaggtctcaaacttgatccgcagtggaaaacccatc

SEQ ID NO: 30183 - DNA, 373 bp, Homo sapiens
  misc_feature (1)...(373): n = A,T,C or G
ggcacgaggtggggcctttgggaaattgtgagggcagagccctcatgaatgggattagtgccgttacgaaggggaccccagggacctaggtagccccctttcaccatctgaggatacagcaggaaggcactatctgtaagaaagcaggcccacaccagacactgaatctgctggtgccttgatcttcaacttcctagtctccagacttgtgagaaataaaattcttttgtttataagctactcattctatggcatttgttgtagcagcccaaacagactaaggtaacatattaggcataccatagcatacctgctgaaaaccaaagagaaaggtattggtgagtagccagggagaaaatacatataccatcan

SEQ ID NO: 30184 - DNA, 372 bp, Homo sapiens
ggcacgagaaaggaaattatacgtgttaatccaagggggattattttattaaattgagatgaggtcttgatattgttgcccacgctggtctggaactcctgagctcaagcagttctcctaccttggcctcccaaagcgctggcattacaggcgtgggccaccacacctggccttcaaggtggatttaaaaaagaaatttaagagtctctctcacccacgctggagtgcagtggcatgatcttggctcactgcaacctctgcctcctgagttccagcagtccttgagcctcagtattgagtagctgggactacatgcacgtgcacactgccacgcctggctagtttttgtatttttagcagagatgggatttt

SEQ ID NO: 30185 - DNA, 373 bp, Homo sapiens
  misc_feature (1)...(373): n = A,T,C or G
ggcacgagctggaagaaagcagatgtttcgttaattttcatatgcaaatatttatttgaagccagaggatatcaccatagtaattgaagaactggaaccggagcgcattgttaaaaagctacataattaactcatcatcataaatggttttaataaatgcatttcaaaatgggagactctaggaagcagttttgactctggcagcaaatgaatgaaagatgatgagcggaaacttatctgatggcctccagccatacagatccaccttgggcggagcatcagaaaccagtcaagttcagccaggcacggtggctcacgcttgtaatcccagcactttgggaggctgaggcgggtgaatcacgaggtcaagagn

SEQ ID NO: 30186 - DNA, 372 bp, Homo sapiens
ggcacgagcagatccaggcagccttccgggagccacggcttcttgtggttactgaccccagggctgaccaccagcctctcacggaggcatcttatgttaacctacctaccattgcgctgtgtaacacagattctcctctgcgctatgtggacattgccatcccatgcaacaacaagggagctcactcagtgggtttgatgtggtggatgctggctcgggaagttctgcgcatgcgtggcaccatttcccgtgaacacccatgggaggtcatgcctgatctgtacttctacagagatcctgaagagattgaaaaagaagagcaggctgctgctgagaaggcagtgaccaaggaggaatttcagggtgaatgga

SEQ ID NO: 30187 - DNA, 371 bp, Homo sapiens
ggcacgagagaaaaataaaattaattgaaggcagcaaaaggcacagtaggtcaagaagcaggtctcgatcccggaccagaagttcctctaggtctcgtagccgatcccgttcccgtagtcgcaaatcttacagccggtcaagaagcaggagcaggagccggagccggagcaagtcccgttctgttagtaggtctcccgtgcctgagaagagccagaaacgtggttcttcaagtagatctaagtctccagcatctgtggatcgccagaggtcccggtcccgatcaaggtccagatcagttgacagtggcaattaaactgtaaataacttgccctgggggcctttttttaaaaaacaaaaaccacaaaaattc

SEQ ID NO: 30188 - DNA, 370 bp, Homo sapiens
ggcacgagggactaatgtgcggacgccgggagcttctgcgcttgctacagtccgggcgtcgggtccacagcgtcgcagggccctcgcaatggcttgggaaaccgctgaccacacggctcctattcccagtagccccgtgctgctgtcgcccacactacctcttccttgcggcttccggcccccgcagcctcagtacctctgctatctcttttgcagaagtccaggttcaggcccctcctgttgttgctgcgactccctcacccacagcagtacctgaggtggcttctggagagactgcagatgtagtccaaactgctgcagagcaaagcttcgctgaactggggctggggtcatacaccccagtgggact

SEQ ID NO: 30189 - DNA, 379 bp, Homo sapiens
ggcacgagggagatttgggttttggcaggcccagagtagttggttgtgatccacaattaccccaggattcccatagcccattagggagctctaggtagtttcaggactgatagagaaattcagatttttttcttggataggtcttgggagctgatatctgcccaaatccttgttggttatactgagtatgctctagatggttcagagcatttgttacctatgtaccaaccctgtccccctaggcccacaacaggtcataataggcctaggagatggaggggaagcaaaatacttcagttgttctgcattcctcaggaacctatgtgaatcatctcatggtaaacttaatgagactttgagattgaagaattaagatatt

SEQ ID NO: 30190 - DNA, 380 bp, Homo sapiens
  misc_feature (1)...(380): n = A,T,C or G
ggcacgagaagcctagcaattgcatctgagaatcattgaaggggtctaaatatggaaaccgagacactgctgtgagtgagactacaaagaccatgctatcagattggctcgctagagaggcgtccagcagtcttccgactctgcccagcccatcctctccttattcccgtagcactgtaacatgcagatacctacactgcattgctctcacatgctgatagtttctcatgcanaggcctggtgggggaggggctggagggtgttaaaataagttgatgaggtatggcagtaaaggaaagaacctgtgacttaaataagggaaataccagaaatctatattttaggtgaatacaaagcatccaatttagattgagtttcca

SEQ ID NO: 30191 - DNA, 374 bp, Homo sapiens
ggcacgagcaaatctgaagataggcaatgtcaaacccatgaaaatgggagattaatgagctttatttggccgtgcatggtgcctcatgcctgtaatgaggcagatggcttgagtccaggagttcaagactagcctgggcaatgtggcaaaaccgcgtgtttacaaaaaatacaaaaattagccaggcatggtggtgcatgcctgtagtcccagctgtttgggaggctgaggcaggaggatctttgagcctaggatgctaaggttgcagtgagccaagatggcaccattgcactctatcctgggcagcagagcgagaccctgtctcaaaaaatacatttatttttttcattttcagttaacagtgtactcttata

SEQ ID NO: 30192 - DNA, 373 bp, Homo sapiens
ggcacgagaaaatacttctcagtaccagggcgtggtggtgtactccatggcagacatccctttggtgagtagagatggtagctgttacagaactcaagtactcttattcaagaagggtatgtcttcaatctgagtgcttgagagaataaattctcagcacgttttgaatcccagaaagaccagaactgtattttttccgtctttgttatttccagccctcaatatgggcatattgaatgacttcagtgagttagtgtctcttcttttgaatcccagggttttggggtggcagccaaatctacacaagactgcagaaaagttgaccccatggcgattgtggtatttcatcaagcagacattggggaatatgtgc

SEQ ID NO: 30193 - DNA, 381 bp, Homo sapiens
  misc_feature (1)...(381): n = A,T,C or G
ggcacgagcaccatggtgctgtctcctgccgacaagaccaacgtcaaggccgcctggggtaaggtcggcgcgcacgctggcgagtatggtgcggaggccctggagaggatgttcctgtccttccccaccaccaagacctacttcccgcacttcgacctgagccacggctctgcccaggttaagggccacggcaagaaggtggccgacgcgctgaccaacgccgtggcgcacgtggacgacatgcccaacgcgctgtccgccctgagcgacctgcacgcgcacaagcttcgggtggacccggtcaacttcaagctcctaagccactgcctgctggtgaccctggccgcccacctccccgccgagttcacccctgcggtgcan

SEQ ID NO: 30194 - DNA, 378 bp, Homo sapiens
ggcacgaggaatctggctgcttttagccaaatccttttctgaagcttttgtaaaacttcccagccttctaagaaggtttgcttctttctacaatttttctgaccacccttaccgaaccccggcagatgggatgacctgcctgcgtctgggagggacccactctgggccttttctgcactgagggctgcacaaatatcaagatgacctgcttgcggaaaggagcaacccactttgggtctcctgagagctgtactgtcgctcactaaagctgctattcaccttggtcatgctccagttgtccgtatacctcattgtgcctgaatgcaagacaagaacctgggaccctgcaaatggtggggctgaaagaacggaacacaa

SEQ ID NO: 30195 - DNA, 380 bp, Homo sapiens
ggcacgagaactggaagcaaggtaatgagtgtgacatgttgagtttgaagtcctgttacacagctgggtggagaggtccagcaataagcagttaagaaaactgggccagtgcctaggaggagtgccagggctccttcccccacatttactggtcctcggttcccttcaacacatagtatgttgggaaagcagtagcggcagtagaagtggtagtagcagcagcagtagtaataataagtgtagccacttattgaactcttgccatgtgccaggcactgtgctaaggagattttatatatgtatatctcccctaactcttacaaaaacccaaagaggtaaatcccatattatctagagaggttaaataacttgcctgtggg

SEQ ID NO: 30196 - DNA, 374 bp, Homo sapiens
ggcacgagggcatgcaagtccgctatgttcaccatgaagactatcagttctgttattccttccggggcaggcctgggcacaaaccctccatcctcatgctccacggattctctgcccacaaggatatgtggctcagtgtggtcaagttccttccaaagaacctgcacttggtctgcgtggacatgccaggacatgagggcaccacccgctcctccctggatgacctgtccatagatgggcaagttaagaggatacaccactttgtagaatgcctgaagctgaacaaaaaacctttccacctggtaggcacctccatgggtggccaggcggctggggtgtatgctgcttactacccatcggatgtctccagcctg

SEQ ID NO: 30197 - DNA, 380 bp, Homo sapiens
ggcacgaggggacggtactgtcccaggtatattcgaaagtccataatggttcagaaatactgttttcctatttccaagacctagtgattacacttcctttcgagttaaggaaacataaactaatagatgtaatctcgatgtatagggaactgttgaaagatttatcaaaagaagcccaagaggtatttaaagccattcagtctctcaagaccacagaggtgctacgtaatcttcaggaccttttacaattcattttccaactaatagaagataacattaaacagctgaaagagatgaaatttacttatcttattaattatatcccagatgagatcaacacaatcttcagtgattatatcccatatgtttttaaattgttg

SEQ ID NO: 30198 - DNA, 373 bp, Homo sapiens
ggcacgagaaccctgggtacatcacttattaagagcaagtgatagtgaagaggccgtgactcagtatgtccttaattcaaagagtcgaagaggctgaggggtcccactccggtagtaaaaactaatataattttcaagatgccaaaatagatataagagctgctctagtcagtgatgcgtgcttgaaaaaccagaagccaacatacgtaagatttgaggattatgaaagtcatcttactaaaatctctcctgaggttactaaactagccagattatctagtcacagtctctggacagcactttgagaattcaatggggagtgtgtctgacagaacacacagattaaagtggaatttatattaggtaaactgta

SEQ ID NO: 30199 - DNA, 372 bp, Homo sapiens
ggcacgaggttgtttttcgtataagcccttagagtgtggaggtggtttctgtcagtttctcgccaagatctttccacattaggaagtgattattaataattcatgaattatggcttaattcatactacattatatacttactgaagaaagatttttttgctttgcttatactggaggtgttagtggataatagtgttgactagcatccctagtgtgaaagagttgtcaaacttgaaatatgtttgtaaaaataaacacgatttccgtttaatcttaggcctttagtagccataatcaaggtagaggaatagcagcccttatatttgaagaacttcagttttccaggcactttctcatcatctcatttaatcc

SEQ ID NO: 30200 - DNA, 380 bp, Homo sapiens
ggcacgagccgtgagaccattatgcaagtgtgccacgaccgaggctatttggtgacccatgactatcttgacccaaccctcgaggatttaaaagcccaatttggggaaaagccgagtgaggggcggccgcggcgcacggacctcaccgtgctggtggcccacaacgatgaccccaccgaccagatgtttgtgttctttccagaggagcccaaggtgggcatcaagaccatcaaggtgtactgccagcgcatgcaggaggagaacatcacacgggctctcatcgtggtgcagcagggcatgacacccttcgccaagcagtccctggtcgacatggcccccaagtacatcctggagcagtttctgcagcaggagctgctcac

SEQ ID NO: 30201 - DNA, 373 bp, Homo sapiens
  misc_feature (1)...(373): n = A,T,C or G
ggcacgagcaaagtgctggtattacaggcgtgagccaccgttcccagcctcagttatctttaatgctatccagggcttgagttatcagagaagcaaagagcctcttggccggagctctctccctaaaggtgatggagagtgttgggatgtgctggagccgcctgccatctgaggcatgccagaagcccttagacatctccctgaggtcagtcgttggtggtttctgtttcagccccatctgtggggagtctctccccctcagcagtggctctggctgtgatcctgcctgtcctggtacttctcatcatggtgtgcctttgccttatctggaagcaaagaagagcaaaagaaaagcttctctatgaacatgtgn

SEQ ID NO: 30202 - DNA, 371 bp, Homo sapiens
ggcacgagggagccacagcgaggaaccctgtggtcctcaggcaggtgtaccttgagtcagccaggagccctcttttcctgtgtcaaagcctgccctcgggctctgctcacctctggtgaccctccaagatgcccctgccctcagtttcccctcatgatctggcctctgcccccttctctagccacagcctctagtacactttagcaataccaccagactagttagagttccccactcaccaagcaagacatgcagtttcatgcctctgtgccttcgctcatgctgtttcttccgactggaatgccttcccctgctcctcctgccttgtctgcctggcaagttcatctctcacgatcccctcaaaggccccc

SEQ ID NO: 30203 - DNA, 366 bp, Homo sapiens
  misc_feature (1)...(366): n = A,T,C or G
ggcacgagggacatttggtgccatcttcagaagatccaggagtcctgggaatcgtgtatgactcagttgctttccctgagcaggacgggagcccccctggcctcagagtgactgtgatgctgggaggttcctggttacagacactggaggctagtggctgtgtcttatctcaggagctgtttcaacagcgggcccaggaagcagctgctacacaattaggactgaaggagatgccgagccactgcttggtccatctacacaagaactgcattccccagtatacactaggtgactggcaaaaactagagtcagctaagcaattcctgactgctcacaggttgcccctgactctggctggagcctccn

SEQ ID NO: 30204 - DNA, 365 bp, Homo sapiens
ggcacgaggtagcagcaggtggcaggctgttaaaagacaggctgcctgaggagcctggagcaggtggaaacaggtggaagaaaccggccacagccctgctttaccgggctcacctctagggcattccagcaagaggctgatgcaggagaatggccagcaccaaaggacatttaaaagagtttttgggtttttttgtttgtttgttgtcggtgtttggtttttttttttttttgggccccttggaggtgcctctacgcaggataaatattcgggagattcgctacgccattttaagaattttaagggccctaaacagggggaaactgcttaaaaattgcccccctttctagccgtaacctaacaag

SEQ ID NO: 30205 - DNA, 367 bp, Homo sapiens
ggcacgagctaaatattgaaaagaagtcagttctctttgtactcctgggaagacaggaaaaaaaaaaaaaaggggggttctttcctattaatcaaaaagggggggcaatcccaaaaaaaacccctttaaaactgggcgggctgaccctacatttcacaggaaaaagcaaagggcaaaaaatacccagggcatttttaaaaaaaaacaacagggcaaacgggactggcctacctgttttaaaacttgcttaaaaaagggcggatgggcaacccgcccaagggaacaaaataaaaaagtccaaaaccggggccccttcttgtatggaaactgggggggggggcccccatgaaatccccttcagcgggag

SEQ ID NO: 30206 - DNA, 365 bp, Homo sapiens
ggcacgagaactggtttgaaagatgctgggcagtgcatcaatccctatattacagttagtgtaaaggatctgaatggcatagacttaactcctgtgcaagatactcctgtggcttcaagaaaagaagatacatatgttcattttaatgtggacattgagctccagaagcatgttgaaaaattaaccaaaggtgcagctatcttctttgaattcaaacactacaagcctaaaaaaaggtttaccagcaccaagtgttttgctttcatggagatggatgaaattaaacttgggccaattgtaatagaactatacaagaaacccactgactttaaaagaaagcaattgcaattattgaccaagaaacc

SEQ ID NO: 30207 - DNA, 364 bp, Homo sapiens
ggcacgagacttcttacaatgctgtgaatgagaggctcctcagaactggagcatttgtataataattcatcctgttcatcttcaattttaacatcatatataatttcaattctatcaattgggcctttaaaaatcatataaaaggatataaaatttgaaaagagaaacctaattggctatttaatccaaaacaactttttttttccttcaatggaatcagaaagcttgtcaatcactcatgtgttttaaagtaattacttttaaaatggtgcatttgtgcttctgaactattttgaagagtcacttctgtttacctcaagtatcaattcatcctccatacatttgaattcaagttgttttttgt

SEQ ID NO: 30208 - DNA, 364 bp, Homo sapiens
ggcacgagctggaatattctgtccctctcagggctgcatttgatatgcactttaaatgtattttgcctataatttaaaagataggatggggctgggcactgtggctcacacctgtaatcccaacactttgggtggccacagaaggcagatcgcttgaggtcaggagtacgaaaacaacctggccaagatggtgaaatcccatctccaataaaaatacaaaaattagtcaagtatggtggcaggcacttgtaatcacagctacttgggaggctgtggcacaagaatcgcttgaacccgggaggaggaggtttcagagagccgagattgcgccactgccctgcagcctgggtaacaaaggaagact

SEQ ID NO: 30209 - DNA, 364 bp, Homo sapiens
  misc_feature (1)...(364): n = A,T,C or G
ggcacgagctgtcaaccccacacgcctttggcacaatgaagtgggtaacctttatttcccttctttttctctttagctcggcttattccaggggtgtgtttcgtcgagatgcacacaagagtgaggttgctcatcggtttaaagatttgggagaagaaaatttcaaagccttggggttgattgcctttgctcagtatcttcagcagtgtccatttgaagatcatgtaaaattagtgaatgaagtaactgaatttgcaaaaacatgtgttgctgatgagtcacctgaaaattgtgacaaatcacttcataccctttttggagacaaattatgcacagttgcaactcttcgtgaaacctatggtgn

SEQ ID NO: 30210 - DNA, 365 bp, Homo sapiens
ggcacgagcgcaggggcaagagagtagagagggacgccttaaagagcagagccacagcctccaatgcagagaaagtgccaggcatcaaccccagtttcgtgttcctgcagctctaccattcccccttctttggcgacgagtcaaacaagccaatcctgctgcccaatgagtcacagtcctttgagcggtcggtgcagctcctcgaccagatcccatcatacgacacccacaagatcgccgtcctgtatgttggagaaggccagagcaacagcgagctcgccatcctgtccaatgagcatggctcctacaggtacacggagttcctgacgggcctgggccggctcatcgagctgaaggactgccag

SEQ ID NO: 30211 - DNA, 364 bp, Homo sapiens
ggcacgaggtgagtgagacctggagtacagacgtcttgggaagtgactttgaccctaatattgatgaagatcgcttgcaagaaattgcaggtgctgcagcagagaacatgttaggcagtttgctgtgcctcccaggttcagggtcagtgcttcttgacccctgcactggttctaccatatcagagacaacaagtgaagcttggagtgtagaggtattgccaagtgactcagaggccccagacctaaagcaggaggagcgtctgcaagaactggagagctgttctggactgggtagcacatctgatgatacggatgtcagggaggtcagttcccgccccagcacaccaggcctcagtgttgtgtc

SEQ ID NO: 30212 - DNA, 369 bp, Homo sapiens
ggcacgagccaagtgtcaactccaactcttgtagaggtctcaagaaacctacgaaaagtgggcagcaaatgttgtaaacatcctgaagcaaaaagaatgccctgtgcagaagactatctatccgtggtcctgaaccagttatgtgtgttgcatgagaaaacgccagtaagtgacagagtcaccaaatgctgcacagaatccttggtgaacaggcgaccatgcttttcagctctggaagtcgatgaaacatacgttcccaaagagtttaatgctgaaacattcaccttccatgcagatatatgcacactttctgagaaggagagacaaatcaagaaacaaactgcacttgttgagcttgtgaaacacaag

SEQ ID NO: 30213 - DNA, 363 bp, Homo sapiens
ggcacgagttatttttccctttacactgtccaattgtgcttcttacttttttttcatgtatttacaaactctagttaggatcctgattacagcatagttccttgataatattaagatatgtaaggtatcttcattgttggcctcaggctatctttgctatgacttgcatttgtccaacgtcaaaacataggaaacaggtaataaagcttttggtggtatccagccactgtaatgaagacaggaatgtgatttgagctgggaggaataaatttccatcttacttcacttttatattcctttttattatcaggcagcattacccaaagccatgggttttgttttcagaaaagtagaacttagaat

SEQ ID NO: 30214 - DNA, 364 bp, Homo sapiens
ggcacgaggccatggagaatgatgtggataaacgcacatctgaaaactatacaaaatttggctacatttgtggagctcctgggacttcaccattttatggattcctttaaggttgtcgggagctttgatgaagtcccaccaacctcagatgaaaatgtcactgtgactgagacaaaattcaacaacattcttgttcgggtatatgtgccaaagagaaagtctgaagcactaagaagggggttgttttacatccatggtggaggctggtgcgtgggaagtgctgctctaagtggttatgacttgctgtcaagatggacagcagacagacttgatgctgtcgtcgtatcaaccaactacagattag

SEQ ID NO: 30215 - DNA, 366 bp, Homo sapiens
agcacgaggatatttttaatgtctggcatagcacaagacagctggattttcacatctgcttcacatattccaccaaccctcaaagctgtgatggcgttacaggtcctgtatcaaaatacgcaagagggatgtcccttggtctttctccacttctgtcccctaataactttgctccagccccttaacaaaattagtcttttgttccaccctacttctcttgatctatccagatacaacaaacattatatatatcagccgctgttaaaacaagaagagtcagtcttttttttgtgacaagggctcctctgtcacccaggctggagtgtgagggcactatcatggcttactgcagccctgacctcctgg

SEQ ID NO: 30216 - DNA, 368 bp, Homo sapiens
  misc_feature (1)...(368): n = A,T,C or G
ggcacgagatgcttacttcagagaataaagtcattgaaccccaatacttcggcttggcatacttattcagaaaagtaatagaggagcagttggaaccagcagttgaaaagataagcatcatggcggagagattggccaatcaggttgcaatttataaacctgtcactgattttttccttcaacttgtggatgcaggcaagggggatgatgccagagctctcctacagagatgtggagcaattgctgaacaaaccccgattttgttggtgttcctccttaggaattctaggaaacaaggaaaggcatcaactgtgaaatctgtgttagaattgattcctgaattaaatgaacaggaagaagcatacaan

SEQ ID NO: 30217 - DNA, 367 bp, Homo sapiens
ggcacgagtgttttgtaggccgggcgcagtggctcacgcctggaatcccagcctcctgagtggctggaattacaggtgcaagccaccacacctgtttccagatttttctcaatcatacacatgcttcttaacttgcaatgaagaataagttcttattctgataaacccatcgtaagttgaaaatatcctaagttgaaaatttattaatacatgtaatttactgaacatcatagcttagcctaccgtgccttaaatttatttgctcagaacacttacattatgctacagtcaggcaaatcatctaacaccgagcctattttatactaaagtgttgaatagctcatgtgatctgttgaatactgtacag

SEQ ID NO: 30218 - DNA, 365 bp, Homo sapiens
ggcacgagctgcacgaggggcataaggctacttcagaatgtggaatgtattcaggggtaacttgagcctgcctgtggacgtgaccttggcactgtttgctgggggggcccacagcacagaaggctgggattttctttatagcaaatatcagttttctttgtccagtactgataaaagccaaattgaatttgccctctgcagaacccaaaataaggaaaagcttcaatggctactagatgaaagctttaagggagataaaataaaaactcaggagtttccacaaattcttacactcattggcaggaacccagtatgatacccactggcctggcaatttctgaggaaaaactggaacaaacttgtat

SEQ ID NO: 30219 - DNA, 372 bp, Homo sapiens
ggcacgagggcaatgtctggagacattgttggttgtggtgcggtgacataactattggcatcgagtggatggagggcaggggtgctactaatcgccctctattgcacaggggggcccttaccacagagaactatgcagctctaaacatgcgcagccccaaggctgagaattgttgatctaggggaagatgtgatttcattcttcatgcttggaaattattatttaagctgtgaataccctctcttttcccactgaagttgggggtgtaagattctcagagttgagcagactcggcctcattacagaaaaaaaatcaagatgtaaaaaggatttacacgtctggacgtggtggctcatacctgtaatcccacc

SEQ ID NO: 30220 - DNA, 371 bp, Homo sapiens
ggcacgaggggagaatagatatcgtgagacaggtgaagtctcagcattggatggccttcctctagcgagcttgaagtgggctcagccctggtcagaagggagggcagtggccccggtgcatgaagggaaacaagcctttgttgaaaatgtcctagattctaatctctgtactggatgctttcttatgttctgtcccccaggcatcacagtccccgtgtgatgtgggtattgttatgttcaagttacaggcaggaaaattgagattctgaggaagtcatgtgccggaggtcatacagctgggaggcatgacgtgctgtgactctagagctttggaatggagcctgtgctctttccactaccttacacctccc

SEQ ID NO: 30221 - DNA, 365 bp, Homo sapiens
ggcacgagaccaggtgtgctaagagcctacagagagggcagctggccaggtattctgggctgtccccaagggagccaggggccagctatttcctgggtgttttctaccctgacctcataaaattagcttcactcattttatttttttaaaatttataggggtaaaacaatgcattggatctctgtgggctgttgtggacagatcatcaaggcctattgttgagtgaaaaaaatgcaaaacagcaaacatacgtatttaagtataaatatgtgtataaatgatagaaaaggtctcgggggcatagacatcagattggcagtggtgattagttctcctgggagagacctatggccagagagtagaca

SEQ ID NO: 30222 - DNA, 365 bp, Homo sapiens
  misc_feature (1)...(365): n = A,T,C or G
ggcacgagctttcctctcgggatttcttgggtggcctggccttccgagtcttccactgcacacagtacatcagacatggatccaagcccatgtatacccccgaacctgacatctgccatgagctgttgggacatgtgcccttgttttcagatcgcagctttgcccagttttcccaggaaattggccttgcctctctgggtgcacctgatgaatacattgaaaagctcgccacaatttactggtttactgtggagtttgggctctgcaaacaaggagactccataaaggcatatggggctgggctcctgtcatcctttggtgaattacagnactgcttatcagagaagccaaagcttctccccctg

SEQ ID NO: 30223 - DNA, 369 bp, Homo sapiens
ggcacgaggtcactttcaggtcggcccgcctgaactctcagaggctagtgttcaacaggccctttctgatgttcattgtggataacaacatcctcttacttggcaaagcgaaccgcccctgaggtggggcttctcctgaaatctacaggcctcagggtgggagatgaaaggggctaagctatggcccatctgtatgctggtagctagagatttacacaggtttagttgactaatgaggcattacaaataatattactctatgatgattgcttgcacccacacaaatgctacatacaggtgccttggggaaatgtggagaacattcaatcttgccgtcactattcatcaatgaagagtaacactgagatc

SEQ ID NO: 30224 - DNA, 370 bp, Homo sapiens
ggcacgagccaatttcccccaatctctagccctaagcaaccactactctacaaatgcacaaatctctatatagatttatcttgggctaattttaagtatatgaagtaaaatagagaaaatcaattattttgaaatacagttctatcctcagagcccaattaaggactctgattttaaaaataatactcttagcccttcatattcaccttttctgcatccgaggattcaagcaaccatggattgaaaataaatagtataggccaggcgcagtggcccatgcctataatcccagcactttggaaggccaaggagataggatcacctgagcccaggagttcaagacgagcctgaacaacatagtgagaccccg

SEQ ID NO: 30225 - DNA, 368 bp, Homo sapiens
ggcacgagtgttaaatgacatgtatacaaattcttccttaagtgaaagttatgctgcatcgaattgtaactgaaagtgtagatccaacaaatacagactgggttctagagagttctggtctatagaaacccaaaactaaaatctctcataactcaagtatggaatactttttttaaagaaattcttatcatgggtggtgtgataatgaaaacgaatttgactttatgcagtgttctgcagcatgcctcccccacatctcatagcaccaggttgtgtctgacctgacataccctgcacctctcagctggctgcagtaacattttgttggagaaagaggagctggagttacagaaatgattgtatcttgg

SEQ ID NO: 30226 - DNA, 368 bp, Homo sapiens
ggcacgagcttgccttccttcctctctgccctcctcactgcgttggctttggtccttgtatttgccccattataacccaaactggctgtcccagcttcagctgtcatgtctgcacttacgtgtctgaagctggaggccggaggagaagaggttttcctcagcgcccttgcttcttttatccaaaagcaaaacttccccagaaacctactggcagactcccctagttcaaggaaagctgggaagacaagtatgtaatggaaagagatgggaaagccaagatggacctaaaccagtgatttttctcttggggtgtggcacactactgctccaaacagaactgaggctctggtataaatgagattatcagc

SEQ ID NO: 30227 - DNA, 368 bp, Homo sapiens
ggcacgagaggaaaccaaatccactgcagaaacaggcatagatttatgtaactgtggtaggggcccattagagatcttgtgttactgatttactaattgtgctactgatttattactaattcattagctgtgacatacactttcagcaagtgactaaaaccttatgacccagagtaaaataattttatatcatgacccaggtagctgtgtgatatgtgtaataagtgggcgtgagtgtctaactaaagattcaccgagcaacacttaacttctactatatgcaacagcctcttatgtttactattctgttctgttctaattcattttctaagaaaatgctggtcatgaaccactgtgttgattttatg

SEQ ID NO: 30228 - DNA, 367 bp, Homo sapiens
ggcacgagacaataccactattatcccttgcttttatgtaggatagtgtgaatgacagataccatgttgtcctccaagccactactctcttctcatgggctgtggctttctttggattaacctgaactcttgctgtagaatgaatgtccgttccccaagatccctgccccctggagatttctaggtgcttttggtaaacaggtccttgtctgccttgactctgctattatcctcagtcatgtacaaaatctctatctttcctggagttgtcccagtgcagactcaggctaggagtcatgcttctgaagaataatgtatgaaaatgattttgaaaaaggagtgattgactaagcgttcatctattacc

SEQ ID NO: 30229 - DNA, 368 bp, Homo sapiens
ggcacgaggagacatggcatgaagccagagagtgagagacattaactcattagactggaacttgaactgattcacatctcatttttccgtaaaaatgatttcagtagcacaagttatttaaatctgtttttctaactgggggaaaagattcccacccaattcaaaacattgtgccatgtcaaacaaatagtctatcaaccccagacactggtttgaagaatgttaagacttgacagtggaactacattagtacacagcaccagaatgtatattaaggtgtggctttaggagcagtgggagggtaccagcagaaaggttagtatcatcagatagcatcttatacgagtaatatgcctgctatttgaagg

SEQ ID NO: 30230 - DNA, 364 bp, Homo sapiens
ggcacgaggcaaaaaaagagggaccatatgatgtggtggttctaccaggaggtaatctgggcgcacaaaatttatctgagtctgctgctgtgaaggagatactgaaggagcagaaaaaccggaagggcctgatagccgccatctgtgcaggtcctactgctctgttggctcatgaaataggttttggaagtaaagttacaacacaccctcttgctaaagacaaaatgatgaatggaggtcattacacctactctgagaatcgtgtggaaaaagacggcctgattcttacaagccgggggcctgggaccagcttcgagtttgcgcttgcaattgttgaagccctgaatggcaaggaggtggcggt

SEQ ID NO: 30231 - DNA, 376 bp, Homo sapiens
ggcacgaggagacaccgctcctccaggtctccataaattgtctttgggggattccaccacacccaatgctctggagccacaaggagtgtcccttcttccccagcagagccgtgggagggtccttgtctgctctcctttgaaccttggcagcccttggatggagggctccctttccctccccttttttttttctttgttcctgggaaaggttaatctccgggagttcttcctggttcatgggttctggggggtttggggtgggagggaatgcaaatgggagttgggggagggaggatacagttcaggataccccaccctggagtcagggccagggaggcatggccccacttgtatccaaaagttcccaggggtgatt

SEQ ID NO: 30232 - DNA, 372 bp, Homo sapiens
ggcacgagtgaatgcttcttgcaacacaaagatgacaacccaaacctcccccgattggtgagaccagaggttgatgtgatgtgcactgcttttcatgacaatgaagagacatttttgaaaaaatacttatatgaaattgccagaagacatccttacttttatgccccggaactccttttctttgctaaaaggtataaagctgcttttacagaatgttgccaagctgctgataaagctgcctgcctgttgccaaagctcgatgaacttcgggatgaagggaaggcttcgtctgccaaacagagactcaagtgtgccagtctccaaaaatttggagaaagagctttcaaagcatgggcagtagctcgcctgagc

SEQ ID NO: 30233 - DNA, 373 bp, Homo sapiens
  misc_feature (1)...(373): n = A,T,C or G
ggcacgagcccagatggaagagtgacgggtgaagcagatgttgagtttgctactcatgaagaagctgtggcagctatgtccaaagacagggccaatatgcagcacagatatatagaactcttcttgaattcaacaacaggggccagcaatggggcgtatagcagccaggtgatgcaaggcatgggggtgtctgctgcccaggccacttacagtggcctggagagccagtcagtgagtggctgttacggggccggctacagtgggcagaacagcatgggtggctatgactagttttgttaggaacatttgagttacttcaatcattttcacaggcagccaacaagcaattaagagcagttataatagaggaagn

SEQ ID NO: 30234 - DNA, 372 bp, Homo sapiens
  misc_feature (1)...(372): n = A,T,C or G
ggcacgagattgtaaccaatacttctgagggccacctgtatgtggtgtccaacgctggctgctgggagaaagatttggccctcatgcaggacaaggtcagggagcttcagaaccagggcagagatgtgggcctggaggtgttggataatgccctgctagctctgcaaggccccactgcagcccaggtactacaggccggcgtggcagatgacctgaggaaactgcccttcatgaccagtgctgtgatggaggtgtttggcgtgtctggctgccgcgtgacccgctgtggctacacaggagaggatggtgtggagatctcggtgccggtagcgggggcagttcacctggcaacagctattctgaaaaacccan

SEQ ID NO: 30235 - DNA, 379 bp, Homo sapiens
  misc_feature (1)...(379): n = A,T,C or G
ggcacgagcactgatgccaaaaactctgatactgctcatattaagtccatagaaattacttcgatccttaatggacttcaagcttctgaaagttctgctgaagacagtgagcaggaagatgagagaggtgctcaagacatggataataatggcaaagaggaatctaagattgatcatttgaccaacaacagaaatgatcttatttcaaaggaggaacagaacagttcatctttgctagaagaaaacaaagttcatgcagatttggtaatatccaaaccagtgtcaaaatctccagaaagattaaggaaagatatagaagtattatccgaagatactgattatgaagaagatgaagtcaccaaaaagagaaaggatgtcn

SEQ ID NO: 30236 - DNA, 372 bp, Homo sapiens
ggcacgaggatggatcaaagaagatcaaaggctgctgggattccatccacgtggtagaagtgcaggagaaatccagcggtcgcaccgcccattacaagttgacctccacggtgatgctgtggctgcagaccaacaaatctggctctggcaccatgaacctcggaggcagccttaccagacagatggagaaggatgaaactgtgagtgactgctccccacacatagccaacatcgggcgcctggtagaggacatggaaaataaaatcagaagtacgctgaacgagatctactttggaaaaacaaaggatatcgtcaatgggctgaggtctgtgcagacttttgcagacaaatcaaaacaagaagctctgaaag

SEQ ID NO: 30237 - DNA, 371 bp, Homo sapiens
ggcacgagccacattcactttcaactttaacaatgaaccttgggtcaaaggacggcatgagacttacctgtgttatgaggtggagcgcatgcacaatgacacctgggtcctgctgaaccaacgcaggggctttctatgcaaccaggctccacataaacacggtttccttgaaggccgccatgcagagctgtgcttcctggacgtgattcccttttggaagctggacctggaccaggactacagggttacctgcttcacctcctggagcccctgcttcagctgtgcccaggaaatggctaaattcatttcaaaaaacaaacacgtgagcctgtgcatcttcactgcccgcatctatgatgatcaaggaagag

SEQ ID NO: 30238 - DNA, 377 bp, Homo sapiens
ggcacgagatcataggagagagtataagccgcctctttgaatttgcagggtatgacgtgctcaggttaaatcatgtaggagactgggggacccagtttggcatgctcatcgctcacctgcaagacaaatttccagattatctaacagtttcacctcctattggggatcttcaggtcttttataaggaatctaagaagaggtttgatactgaggaggaatttaagaagcgagcatatcagtgtgtagttctgctccagggtaaaaacccagatattacaaaagcttggaagcttatctgtgatgtctcccgccaagagttaaataaaatctatgatgcattggacgtctctttaatagagagaggggaatccttctat

SEQ ID NO: 30239 - DNA, 378 bp, Homo sapiens
ggcacgagtatgatggagggtggtcgcagcaaagggtttggttttgtatgtttctcctccccagaagaagccactaaagcagttacagaaatgaacggtagaattgtggccacaaagccattgtatgtagctttagctcagcgcaaagaagagcgccaggctcacctcactaaccagtatatgcagagaatggcaagtgtacgagctgttcccaaccctgtaatcaacccctaccagccagcaccttctttaggttacttcatggcagctatcccacagactcagaaccgtgctgcatactatcctcctagccaaattgctcaactaagaccaagtcctcgctggactgctcagggtgccagacctcatccattccaa

SEQ ID NO: 30240 - DNA, 377 bp, Homo sapiens
ggcacgagtgggatcccgtatcgaaccgtctctgagtggctcgagtccatacgcatgaaacgctacatcctgcacttccactcggctgggctggacaccatggagtgtgtgctggagctgaccgctgaggacctgacgcaaatgggaatcacactgcccgggcaccagaagcgcattctttgcagtattcagggattcaaggactgatcccttctctcaccccatgcccaatcagggtgcaaggagcaaggacggggccaaggaactgattttctgcctccatcccacccatgagggctgcaggcactacaaaagagctgactactgagaattctggaaaacaagagcacgtgaccgtccagggggaagcagccatt

SEQ ID NO: 30241 - DNA, 377 bp, Homo sapiens
ggcacgagccggaagacaatttttcaatgggtcaaggatgggttcaggatgaaactgttccaccttagatcatcaagcattacattctcaaaaggagcatgttaaacaaattcctcacctgcgctgataaaaataggctccacgctcctaacagaatgtaagagaatctaatgccactgctgatttgacagtatgcagagctcaggcagtaatgcttactcacctgccactcacttcctgctgtgcaggccaatctgtaacaggcctccgactggcggcagtccctatatatatacacccacaccatggaacattattcattctttaagaaagaaactctataacgttgaccacatggatgaacctttagaacattt

SEQ ID NO: 30242 - DNA, 376 bp, Homo sapiens
ggcacgaggacctgttcacggatggggggactggggctgctttacagtttgatacgtgtagataattaagcattttgtgatggttggacacactggagaaaaggcagtaagaattatttactgaaacatctaggagcttactgaaatatgaaaaggcaaattttatacaaattatttttcctttttcctttctttcttgtccaagttcaggttaaaatcttagaaaattaaatgaaaggtcatttacagttccaaagaagaatattaaacatttttcacttaagttgagatttttgctttaaagagcttttaatgagtttttctgttatcataattttggtccggttattcacttgagttggtgcttatactgttg

SEQ ID NO: 30243 - DNA, 377 bp, Homo sapiens
ggcacgagacttgaacccaggaggtggaggttacagtgagccaagatcacaccactacactccagcctggatgacagaatgagaccttgtctcaaaacaaaacaaacaaacaaaaaaagcatagcaagtccttttacatgaggatgagttactggttatcttgagagcatgtatgcaatggattgtatctgccaggctatacaaaaaggaggctttgaccaggcgccatggctcatgcctgtaatcccagcactttgggaggccgaggcgggcaaattatgaggtcaggattttgagaccatcctggctaacatgacgaaaccccgtctctactaaaaatacaaaaaattagccaggcgtggtggcatgcacctgta

SEQ ID NO: 30244 - DNA, 378 bp, Homo sapiens
ggcacgaggattgatgaagtaaaggtgtggcctcagcagccctccggagagctgtttgagattgaaatagacaccctggaaaccacctgccatgtgctggaccccacccctgtggcaagatgcagcgtgaggcagctgaaggagcatgctgtcgaaggagactgtgatttccagctgttgaaactagatggcaagttttccgtggtatacgcaaaatgtgattccagtccagactcagccgaggacgtgcgcaaggtgtgccaagactgccccctgctggccccgctgaacgacaccagggtggtgcacgccgcgaaagctgccctggccgcctttaacgctcagaacaacggcttcaattttcagctggaggaaatt

SEQ ID NO: 30245 - DNA, 371 bp, Homo sapiens
  misc_feature (1)...(371): n = A,T,C or G
ggtacgagaccacctctcaatcacctttgagggcttaagagtagcacatcaaaaggactccaaaatcccatacccaactcttaagagatttggcctggtacttctgaaagaattttcatgaggggtcttaattggctggaaaagcaccagctgacgttttggaacaatctatccatgtggctgcctccatatgcatctgggcatttcatcttcagtcccctcattaaactgtaccattaggatgtgtggagagaggagaaatgatttatcacccacatttacactactatgcctggaagggggacatctttgaagaacaggaattatggctgtggacactgtcttgaggatgtggacttccttagagagcn

SEQ ID NO: 30246 - DNA, 370 bp, Homo sapiens
ggcacgagcgagttacaacagaggagactccacatttgaaagcaagagctataaaatggcagatgaggccggaagtgaagccgatcatgaaggaacacatagcaccaagagaggccatgctaaatctcgccctgtcagaggtatccacacttctcctttggggaagccttccctgtccccctagactaagttaaatatttctgcacagtgttcccatggccccttgcatttccttcttaactctctggtacacgtcattgaaactacacttttttggtctgtttttgtgctaaactgtaagttccttgggggcagggcctttgtctgtctcatctctgtattgccaaatgcctaacagtacagagccatg

SEQ ID NO: 30247 - DNA, 369 bp, Homo sapiens
ggcacgaggattattaacatatgtttttggagggggattttgcgagttgcatttatatgtgggtatcctagatgtcctggggatacacaccaggtaaaagagaagaaagtaagatggtataccttctgcaactttgtcaattctttgtgcttttgctcagtgtaccagggagatggaaaaaattctaatcaaatgtctcataaaaacatttatatgcccataccagaaaatggcaatcaagcatgctagatttcactcctttttattcctcatgctatttattttccacatgtgatcttttccattactttgaagggtttgtctaaaaactaattatttccttcttggcactggggctgcaattcaggt

SEQ ID NO: 30248 - DNA, 369 bp, Homo sapiens
  misc_feature (1)...(369): n = A,T,C or G
ggcacgaggtagcgggcacctgtggtcccagctactcgggaggctgaggcaggagaatcacttgaacctgggaggtggaggttgcaaagccgagattgtgccactgcactctagcctgggcgacagagttagattccatctcaaaaataaaaaataaaaaataaaaaagaatgtacataattctatctattattggatagtattggtgcttcatgattttattttagttattattagctggtttaagttctccaaagataaatttgccctcatttttcttagactttataaaaaatgaattaagtaaaaccataagcctctgttttgcctttgatctttctgggttttgcacctgttttcatttgagan

SEQ ID NO: 30249 - DNA, 366 bp, Homo sapiens
  misc_feature (1)...(366): n = A,T,C or G
ggcacgagcggcacgagaaaggaagaaagaatttcggaaccctagcatctacgagaagctgatccagttctgtgccattgacgagcttggcaccaactacccaaaggatatgtttgatccccatggctggtctgaggactcctactatgaggcattagccaaggcccagaaaattgagatggacaaattggaaaaggccaaaaaggagcgaacaaaaattgagtttgtgacgggcaccaaaaaaggcaccacgaccaacgccacgtccaccaccactaccactgccagcacagctgttgcagatgctcagaagagaaagagcaagtgggattcggctatcccagtgacaacgatagcccagcccan

SEQ ID NO: 30250 - DNA, 365 bp, Homo sapiens
ggcacgagagtgaacaaagcacctaagatgcgccgccggacctacagagctcatggtcggattaacccatacatgagctctccctgccacattgagatgatccttacggaaaaggaacagattgttcctaaaccagaagaggaggttgcccagaagaaaaaggtaaataagtagttgctcggttttgtttgtgatagtagaaagatttgtggttgctgtgatgactatcttaggacacctttggaataactatgaaagaaaactattctgagcaacccttttcacctgtcttattttggcttttgtaagtttgtttcttgactaataataaatgggaagttttctgtaatcccagcactttggga

SEQ ID NO: 30251 - DNA, 368 bp, Homo sapiens
ggcacgagaatatctatcagggtaagttaatatgagtatttgaaaggttcactgttaaatttatattatcacatattaaatgaaagaactgttaactgtgtactgaattcaaaagttaatatagcttctctcttttttaagaaatgggacacaatattaaaaaattaaagagttttcaaatatttatacttaaatttatatctaaggaattatatatagaatgcatacctttcaagtagatactattgttgctgttaagattattgtcaacaaaatttaaatacacagactattaaataaagaaattaaaacaacaaaaaataacctctcggccaggtgtcctggttaacctgtaatcccagcacttt

SEQ ID NO: 30252 - DNA, 368 bp, Homo sapiens
ggcacgaggaggttatcaataagctcctagtccagacgccatgggtcatttcacagaggaggacaaggctactatcacaagcctgtggggcaaggggaatgtggaagatgctggaggagaaaccctgggaaggctcctggttgtctacccatggacccagaggttctttgacagctttggcaacctgtcctctgcctctgccatcatgggcaaccccaaagtcaaggcacatggcaagaaggtgctgacttccttgggagatgccataaagcacctggatgatctcaagggcacctttgcccagctgagtgaactgcactgtgacaagctgcatgtggatcctgagaacttcaagctcctgggaaatg

SEQ ID NO: 30253 - DNA, 378 bp, Homo sapiens
ggcacgaggaaattgccagaagacatccttacttttatgccccggaactccttttctttgctaaaagggataaagctgcttttacagaatgttgccaagctgctgataaagctgcctgcctgttgccaaagctcgatgaacttcgggatgaagggaaggcttcttctgccaaacagagactcaagtgtgccagtctccaaaaatttggagaaagagctttcaaagcatgggcagtagctcgcctgagccagagatttcccaaagctgagtttgcagaagtttccaagttagtgacagatcttaccaaagtccacacggaatgctgccatggagatctgcttgaatgtgctgatgacagggcggaccttgccaagtata

SEQ ID NO: 30254 - DNA, 371 bp, Homo sapiens
  misc_feature (1)...(371): n = A,T,C or G
ggcacgagagttttttctggtttaaaaaccaaattgtaaatggagtgtgtacttgtagagagtgacaaggtattgtttccctatgtgctgtttgagcagtattttaaccaacttgtattacagatgttacagttccatgttaggaagtcagaaaagacttgtgtttgtctttgttctgctgatgtggagtcatgttttgtggggtcttccatggcacatttacctgttgctccgtccagatgttgagggccagtctaggctgacacatcctacccgaggacaagcctgttctccatttcttcactctcccctccccatatagcaactctcccaggtttagattaccgttttcgacgacagattaaccaaan

SEQ ID NO: 30255 - DNA, 368 bp, Homo sapiens
ggcacgagacggcagctctgtgcagtaggtactattaatattatcacacccactttaaaatggaagaaaccaaggcaggaagtggtggggtcaggagctgaaccctgtaggtctgcctccgggcctgtggtttattgtttcttgcaaatagcgaacagataacaagacaatcccaggccacggtgaatgtcatgcagacccaggctgggcgccatcactgcctgcactggtcactcccctgctgggcctccctgtcctctctgactaaaggctcggtggtccctccttcctcatgggggctgcgggtgagctgagctgagctgagctgagctgtgggcagcccaacacgtgcaggagccggaagatgc

SEQ ID NO: 30256 - DNA, 368 bp, Homo sapiens
ggcacgagcgcagcgtggggcaacggccagtgcctggtgtggggcgacccaagccccagcctaggacacatggttccaggtgccgggccctataccaatacgtgggccaagatgtggacaaactgagcttcaacgtgaacgaggtcattgagatcctcatggaagatccctcgggctggtggaagggccgtcttcacgggcaagagggccttttcccaggaaactacgtggagaagatatgagctgggccctgggatactgccttctctttcgcccgcctatttgcctgccggcctgggggggagccaggccctgccaatgagagcctcgtttacctgggctgcaatagcctaaaagtccaggccttt

SEQ ID NO: 30257 - DNA, 364 bp, Homo sapiens
ggcacgaggcatttagagttacatacagacatatggtggaaaggggtcttgagttgatttggggcaaaaggcaaccgtccccatgcactaaagatgaatcatgcctacctccctttgtcatgggaagtggcggccactgccacatctgctatgaggctcttcgccatcgttggctgctggaaatttggatacaggtaaatggtatataaggcttctttttgcttgtgcaccagaagtctttgtcccagcctccagatcagcagtcagtactcccctctcccaacctgtaggaagtacttgtgaaaagttatctatccctggtctgagtgggaggttcttaacctcattgatgttttagtgtgac

SEQ ID NO: 30258 - DNA, 366 bp, Homo sapiens
  misc_feature (1)...(366): n = A,T,C or G
ggcacgagcgagttacaacagaggagactccacatttgaaagcaagagctataaaatggcagatgaggccggaagtgaagccgatcatgaaggaacacatagcaccaagagaggccatgctaaatctcgccctgtcagaggtatccacacttctcctttggggaagccttccctgtccccctagactaagttaaatatttctgcacagtgttcccatggccccttgcatttccttcttaactctctggtacacgtcattgaaactacacttttttggtctgtttttgtgctagactgtaagttccttgggggcagggcctttggctgtctcatctctggattcccaaatgcctaacagtacagagn

SEQ ID NO: 30259 - DNA, 369 bp, Homo sapiens
ggcacgaggttgatgcctaagaagaaccggattgccatttatgaactcctttttaaggagggagtcatggtggccaagaaggatgtccacatgcctaagcacccggagctggcagacaagaatgtgcccaaccttcatgtcatgaaggccatgcagtctctcaagtcccgaggctacgtgaaggaacagtttgcctggagacatttctactggtaccttaccaatgagggtatccagtatctccgcgattaccttcatctgcccccggagattgtgcctgccaccctacgccgtagccgtccagagactggcaggcctcggcctaaaggtctggagggtgagcgacctgcgagactcacaagaggggaa

SEQ ID NO: 30260 - DNA, 365 bp, Homo sapiens
ggcacgagaatttagaagaatacttgaagctagaaggggaagttggttaaaaatcacatcaaaaagctactaaaaggactggtgtaatttaaaaaaaactaaggcacaaggcttttggaagagttagaataatttggaaggccttaaatatagtaccttagtttgaaaaatgtgaaggactttcgtaacggaagtaattcaagatcaagagtaattaccaacttaatgtttttgcattggactttgagttaagattattttttaaatcctgaggactagcattaattgacagctgacccaagtgctacacagaagtggattcagtgaatctaggaagacagcagcacactggattccaggaacct

SEQ ID NO: 30261 - DNA, 378 bp, Homo sapiens
ggcacgagagggtgaacagcggaagtgacactgtccttcactggacttcttccagtgcccaagttttcaaatagccaattcatcctcaaaacagttgtgtgaagtaagttttaacattcctattctataggtacaaggaaacttgaggactggaggggtaataagttttgcaagtgttaggtaaagccccagtctcaaagagtgcaaagccagtgccctcatccttggcaactagggcgccccttctgagcaggccatgctgtctctgctgctgtcgctgctgctataccagccagccaagcccaactcttcacttcctgaggaggcagctccagggttaatatgccaaggccagtaaccatctttgtcttgcaaatg

SEQ ID NO: 30262 - DNA, 368 bp, Homo sapiens
ggcacgagggaaggtgtagctctgttctcttcggaagacctcgttttctaaaggctggactaaatggctgcagaactccctttggcaaaaggcatgcgctcactgcttgcttgtcagaaacactgaagccatttgccccagtgtggtcaagcagccatgctttctgggcattttcgtcctcccataatttcatatttccgtacccctgaggaaacaaaaaggaaatgaggagagaaagttactgttaagggtgggtaacattttttttgttttgttttgttttgggttttttttttttgaaacaaaatctggctttgtcccccaggctggagggcaggggcccaatctcggttaatagcaagctccgc

SEQ ID NO: 30263 - DNA, 370 bp, Homo sapiens
ggcacgaggggagatgaaaaattaggcattctaactgggtaaccaggagccgacaacaactcctgacgcaatggttcagccttttactaccatcccatttccaccacctccgcagaatggaattcccacagagtatggggtgccacacactcaagactatgccggccagaccggtgagcataacctgacactctacggaagtacgcaagcccacggggagcagagcagcaactcacccagcacacaaaatggatctcttacgacagaaggtggagcacagacagacggccagcagtcacagacacaaagtagtgaaaattcagagagtaaatctaccccgaaacggctgcatgtctctaatattcctttt

SEQ ID NO: 30264 - DNA, 368 bp, Homo sapiens
ggcacgaggaactaaatgttttgggaacacacaaaatcgaagatggtacgttagcctctaagactaaaggaacatttgcacaccgtgacttcagtgcagaatatgaagaagatggcaaatatgaaggacttcaggaatgggaaggaaaagcgcacctcaatatcaaaagcccagcgttcaccgatctccatctgcgctaccagaaagacaagaaaggcattttcacctcagcagcctccccagccgtaggcaccgtgggcatggatatggatgaagatgacgacttttctaaatggaacttctactacagccctcagtcctctccagataaaaaactcaccatattcaaaactgagttgagggtccgg

SEQ ID NO: 30265 - DNA, 366 bp, Homo sapiens
  misc_feature (1)...(366): n = A,T,C or G
ggcacgagggatgaagatgcagcccctggatggtcccagactctcaggacatgcccagctcaggggcttcgagccacaggcctggcctcatatggcatgagggggatctggcataggagccagactgctcttagccccctggctttgtgccaggcctggaggagggcagtcccccatggggtgccgagccaacgcctcaggaatcaggaggccagcctggtaccaaaaggagtacccagggcctggtacccaggcccactccagaatggcctctggactcaccttgagaagggggagctgctgggcctaaagcccactcctgggggtctcctgctgcttaggtccttttgggacccccacccatcn

SEQ ID NO: 30266 - DNA, 363 bp, Homo sapiens
ggcacgagggaaggtgtagctctgttctcttcggaagacctcgttttctaaaggctggactaaatggctgcagaactccctttggcaaaaggcatgcgctcactgcttgcttgtcagaaacactgaagccatttgccccagtgtggtcaagcagccatgctttctgggcattttcgtcctcccataatttcatatttccgtacccctgaggaaacaaaaaggaaatgaggagagaaagttactggtaagggtggctaacattttttttggtttgctttgctttggttttttttttttagaaacaaagtttggttctttcccccaggctgaagtgcaggggcgcaatttcggtttataacaagc

SEQ ID NO: 30267 - DNA, 373 bp, Homo sapiens
ggcacgagcggaagaggctttgggaatatttcatagggaagggacaacatggaagaaacagcgatttaaattgtattgaacagggcatataaaatgcattctgtaccctgatctggcatatagcttcaaaactgcagtggctagagtccatctcttacttagctaccttaactgtccacccttactacctgtgggatcgttgcctggtttgacttctctgagtcctggagcaaagccagttactaaaactaaaactccattctagtcttgggaagaaaagtttctactcagaactggggaaggagtgtaacttatgacttggacctgtagggtgactctgtcccctcaggaccccgacatgcatttactcttc

SEQ ID NO: 30268 - DNA, 372 bp, Homo sapiens
ggcacgagtgcacacagtgccttggggagtagattttgccctaatagcgatgaagaattttatcagtcagtggagttcctttttcagatcagggatgggaaagagccaaactgggtacctcccacgtgtgccccgtgaacagccctttgcagctgggctgtggggcttggctgctgccctgtcccatctggcagttaacgccttctccctgctctgccccccactccccaaaaccagttgcagcctcaacccacatggggatgtagaaagccgtaaagtccacgctactgttgaaaatgtttacatctccgctctcaacctgccttgggttcgtgttaaatggtgttaaattctgcaaatggaggggaaaaa

SEQ ID NO: 30269 - DNA, 369 bp, Homo sapiens
ggcacgagattatctattgatccttcctcggcggacatctgggtaggctgccatcctaatggccagaaactcttcgtgtatgacccgaacaatcctccctcgtcagaggttctccgcatccagaacattctatctgagaagcctacagtgactaccgtttatgccaacaatgggtctgctctccaaagaagatccgtaccctcactgtatgacgggaatctgctcataggcactttataccacagagccttgtattgtgaactctaaaatgcacttttggcatgaaagtgcgataacttaacaattaaatctctatgaatcgctaattctgagggaacttaaccagccacattgaccccgaaatgtatg

SEQ ID NO: 30270 - DNA, 373 bp, Homo sapiens
ggcacgagggttttgccatgttggccaggctgggctcgaactcctggcctcaagcaatcccccacctccgcctcctgagtaactgggattacaggtgcgagccaccgcatccagcctgccaaattttctaaagtaggtttgccagtttatactcctgccagctgtatataagaattctctttgtgccatattcctgataacacttgatttgaatcaaccttcttgttttttgccattgtagaaggaggaaaatggtatctgctacaggccttaatttacatttcattaatgtctgagggtggacatattcttatgtatgtgttcattgtttggcatcacttgtgagaatagataatacaggtattactccatt

SEQ ID NO: 30271 - DNA, 357 bp, Homo sapiens
  misc_feature (1)...(357): n = A,T,C or G
ggcacgagggcataacacaattaaggtgttcccaaaactggaaatccaaagcatccgagtgatgctctgaatcatgcgccgtgtggaaggaatgtgctggcaggcgcaaatcgccggctgagtgttccactgaaattaaactcaagtgctgacttctcgttttttacctccccaccccttccctcaaggttggtctccgccagctggacatgtccttgctctgccaactgtacagcctctacgagtcgattcaggagtacaagggggcatgccaggcagcctccagcccagactgcacttacgctctggagaacggcttcttcgatgaagaggaggaatatttccaggagcagaacn

SEQ ID NO: 30272 - DNA, 357 bp, Homo sapiens
  misc_feature (1)...(357): n = A,T,C or G
ggcacgaggtctctgtccacttggatatacaggcttaaagtgtgaaacagacatcgatgagtgcagcccactgccttgcctcaacaatggagtttgtaaagacctagttggggaattcatttgtgagtgcccatcaggttacacaggtcagcggtgtgaagaaaatataaatgagtgtagctccagtccttgtttaaataaaggaatctgtgttgatggtgtggctggctatcgttgcacatgtgtgaaaggatttgtaggtaagatgtttccagtcttcctatgttgtcttaaaatcttgtgaaccaccacaaattagtacatttcttaacatatatattaatgtgaatttttggn

SEQ ID NO: 30273 - DNA, 361 bp, Homo sapiens
  misc_feature (1)...(361): n = A,T,C or G
ggcacgagggactggaggtgaggcggtggggcttangatgcgcaggagcccaacggtggtccgcagtcgggagagcagtgcggggctgcttcctccccacttggtcaataagtcgcccacgtgtccggcctcggtggctcctgccagccgggtgagctctgcagccgctctctgtagagcctaaaaccgtgaaaaggccgggccagcgccaagctgggcgtctttactgtaacacacccgagcacagcccagctcgcctgcccgccaccgccattcagccccagggagccccacacactcctggagcttcagctgccccctctctagtgtttacttgagatccagcttagtcctagaaaaa

SEQ ID NO: 30274 - DNA, 371 bp, Homo sapiens
ggcacgagcactgacctgggacagtgaatcgacaatgccgtcttctgtctcgtggggcatcctcctgctggcaggcctgtgctgcctggtccctgtctccctggctgaggatccccagggagatgctgcccagaagacagatacatcccaccatgatcaggatcacccaaccttcaacaagatcacccccaacctggctgagttcgccttcagcctataccgccagctggcacaccagtccaacagcaccaatatcttcttctccccagagagcatcgctacagcctttgcaatgctctccctggggaccaaggctgacactcacgatgaaatcctggagggcctgaatttcaacctcacggagattccgg

SEQ ID NO: 30275 - DNA, 369 bp, Homo sapiens
ggcacgaggcgacacaaatcgaggtgagggaagagagaggaaaatcccctgaatccctgcaggattaatttattcaaaaaggaaataaaaaatactcaatatgcaaaagtcttgtgaagaaaatgagggaaaaccacagaacatgccaaaggccgaggaagatcgccctttggaggatgtaccacaggaggcagaaggaaatcctcaaccttccgaagaaggcgtaagccaggaagcagaaggaaaccccagaggagggccgaatcagcctggccagggatttaaagaggacacacccgttaggcatttggaccctgaagaaatgataagaggagtagatgagcttgaaaggcttatggaagagataaa

SEQ ID NO: 30276 - DNA, 363 bp, Homo sapiens
ggcacgagctcgtgccgacagaatgtcttgctatcagcgacactcacagaaggtgtaacgcggctagctgatatcagtttgcatgatccagtcagtatttctgtcctggacaagagccatgaccagttgaacccaaaggacaaagcggtccaggaggtctgtcctccaccagctggcgacaagctggacagctttgcaataccagagagtctcaagcagcatgtgactgtggttcccagcaaactgaggcttgtctgcctagcggccttcatccttcagaaatgcaagtttgaggaagaccagaagatggttgtctttttctcaagttgcgagctggtggagttccactacagcctcttcctt

SEQ ID NO: 30277 - DNA, 362 bp, Homo sapiens
ggcacgagcggcacgaggctggccaagcatctaaaaatataatccagccaccctcctgtgttttgcattattataatgttccattgtgtgtcacagaagagaccttcacaaagttgtgtaatgaccatgaagttcttacattcatcaaatataaagtgtttgatgcaaaacgtaagtgaacagtccctcttttaaagctttctggttaagttggtgataagcaagtaataataactgagtttgtgtttttttgttttagcttcagccaaaacactttctgggctattagaatgggagtgcaaaactgatgcagtagaagcccttacggcactgaatcactatcagataagagtgccgagtag

SEQ ID NO: 30278 - DNA, 369 bp, Homo sapiens
ggcacgagggcagaggagttcgaagatgctcctgatgtggagccgctggagcctacacttagcaacatcatcgagcagcgcagcctgaagtggatcttcgtcgggggcaagggtggtgtgggcaagaccacctgcagctgcagcctggcagtccagctctccaaggggcgtgagagtgttctgatcatctccagacccagcacacaacatctcagatgcttttgaccagaagttctcaaaggtgcctaccaaggtcaaaggctatgacaacctctttgctatggagattgaccccagcctgggcgtggcggagctgcctgacgagttcttcgaggaggacaacatgctgagcatgggcaagaagatgaa

SEQ ID NO: 30279 - DNA, 368 bp, Homo sapiens
ggcacgaggactcccccagcagggagggaggagaccagttccaatctcccagggaaggagcacccgggaaggccaccaagctcgccaacggatgccactattgggcaggatgtgaagaagatccaggagctcctgcaggagcagtggaactgcctggagcatgggtacccggagctggccttcgccatcaagcaagcagcctccaagctcatcagcattcagagccagctgctgagctgccttaacctgctgctgtcggcctaatcgggccaagctcacccacccaaggaggcgccggcctgcttcttctccccgccagtggagatctgcccatcgaccacccttaaatccataatgaactagagagg

SEQ ID NO: 30280 - DNA, 367 bp, Homo sapiens
ggcacgagacaaagcagccactgccctgccctcatagagcttatagcctaacacaaagcaacagcaaacattaggcatttgttcataaaacctttcccacaaagacttacaggcaggaaaattaggtattaatcaaatcacagaacctcccaaatgctaagcgaggattttaccctttgagcatatcccattaaaagcctcagttttctcatctgtgaaaggggacgggacctgccttttcaggtgaaacctaacgagataatgtgtatgcagctcttatcacagggccccccacataattggagcgtaaggttccagctgaggtgagagaaatacagaaaccccaatctaaatctatctctgaaac

SEQ ID NO: 30281 - DNA, 362 bp, Homo sapiens
  misc_feature (1)...(362): n = A,T,C or G
ggcacgaggagactgcatatggccggcgtgggggcgggtgcctgtaatcccaactacttgggaggctgaggcaagaaaatcccttgaacccgggaggcacaagttgcagtgaaccaagatcatgccattgcactccagcctgggtgacagaccgtgactccatttcaaaatacaaacaaactgaatatttgtaagatattctaacagttataattctcaatcttatcacaaagcttttccctaacacatgaacccaaattttatctcaagctcaacaaataaaatccacttggcatggctgatcacgctggtcatccctacacttatggaagccaaggcatggggattgattgagcccccgn

SEQ ID NO: 30282 - DNA, 375 bp, Homo sapiens
ggcacgaggccttatatgcatctgcctttggacagaagctccagtgtgaaataacttttttcttggtgggtaagtaatacatgttcacaggggtctttctatttaagaaaggaaaagaaaaggctgctcaaagaaaaaagcgaaaagcccctgtgtcattgctctgagttacccctggttaacacgttaccagggaggcgtttgctttgaaataaaggactcatgcgcgcttgctgagcacttgctggtcatgttttaagcacggtgcatcattttccttaagaccacataaccctggtctggggcacttgccccgtggtgcaaaggggaaggcgagccttgcagatcacgtgacttttgcagatgaggtgacct

SEQ ID NO: 30283 - DNA, 366 bp, Homo sapiens
ggcacgagccatcatgactaccatgatattctccatgatcaccaccaccaaaaccaccatccttacagtcacagccagcgctactctcgggaggagctgaaagatgccggcgtcgccactttggcctggatggtgataatgggggatggcctgcacaatttcagcgatggcctaacaattggcgctgcttttactgaaggcttatcaagggggttaagtacttctgttgctgtggtctgacatgagtggcctcatgaattaggtgactttgctggtctactaaaggctggcatgaccgttaagcacgctgccctttataatgcattgtcagccatgctggcgtatcttggaatggcaacaggaatt

SEQ ID NO: 30284 - DNA, 364 bp, Homo sapiens
ggcacgagcggcacgagggagtattatgattagcctgaatacagacccatggattgccctggggatcctcacaggcctctaaggtttgaatattggccctcacagagtcacaatggcacatgctgatgaatatgttggaacagtatccagaggatctcctaacttggccccacccacctcagctcctgctggtacggatattattacagtctcgactacctcgtctatccagtccctggcttatacttaaggcaacactagctgcttaacaaataaaccccagattttcggtagcttcacacaattaaaatttctcattaatattacaatccattgtgggtattcctatttggtacacaaattt

SEQ ID NO: 30285 - DNA, 366 bp, Homo sapiens
ggcacgaggtggctgagtttagaattgaaacttctttgggtccagtggtgctcacaaggctcaaatgtagtatgtcttttgtaagtgaaagtgaagttcaactgatttgtaagttttaaaaccttggtgtttactttttaaaattttgagggataccgtgtatgtatcaaacaagtttgtagtctttctataacatgaaattatgattattccgccagattttgaagtaactcgaattaatattttgtacttgatgttatattagttttctttaccttcaagcttttacaaattatgtttaggatgttacggtaatatttatgttgttagatttgacttaataacttaatatattatctacattga

SEQ ID NO: 30286 - DNA, 367 bp, Homo sapiens
ggcacgagaaatgaaaatgtatgacaacgtatctggttcaagcaaggctatgaggaaacagacattctaatacattgctggtgggaatgcaaactgatacaacctttctgaggagcagtttggcaacatttaacaaaactattggtgcctcgacctgttcacctaacacttcaaggaaacctgccttaaaagatagacttctaggcctgtaatcctagcgcttcggggggccgaggcgggtggatcacctgagatcaggagttcgagaccagcctcggcaacatggtgaaagcctgtctctactaaaaatacagaaatcagctgggcgcagtgatgcatggccgtaatccaaactacttgggaggct

SEQ ID NO: 30287 - DNA, 368 bp, Homo sapiens
ggcacgaggtaacttcacgggccctgggagtctatgtgctttttccctgtctcagacaggatgtcatatttgttgcagacgcagcaaatgcaatattgatgtcacttgaagacaagtctctgaatgttcgagccaaagcagcctggtccctgggcaacctgacagacactctgattgtcaacatggaaacaccagacccaagtttccaggaagagttctctggtctcctgctcttgaaaatgttacgatcagctatagaagcatccaaggataaagacaaggtaaaaagcaatgcagtccgggcccttggaaatttgcttcattttctgcaaccctctcatatagaataacccacatttgcagaaatg

SEQ ID NO: 30288 - DNA, 368 bp, Homo sapiens
  misc_feature (1)...(368): n = A,T,C or G
ggcacgagcggcacgagtcctaatgctgctgcattttttatcacctatgaatatgtgaaggggtttttgcatgctgattcatcttcatatttgacacctatgaaacatatgttggctgcctctgctggagaagtggttgcctgcctgattcgagttccatctgaagtggttaagcagagggcacaggtatctgcttctacaagaacatttcagattttctctaacatcttatatgaagagggtatccaagggttgtatcgaggctataaaagcacagttttaagagagattcctttttctttggtccagnttcccttatgggagtccttanaagccctctggtcctggaggcaggatcatgtggtgga

SEQ ID NO: 30289 - DNA, 365 bp, Homo sapiens
ggcacgagcagatttctagttgaccacttaacatttgtaactgatgatgtgctgacctttttttttttttgggccaacctaaaaaaagggccctaattttttgggggaaagggggtttattttttttgaaaaggaaccaagggggggggaaccacccataatggggcctttttttaaagggctggggttttttttaaaaaaaccaaaaaaagggggaaaaaaaaaactttgacccggggtttaccaaaagcccagggggcaaaccaaaaatttcccagggaaagggttccaaaagacccctcgggttttcccgggggggaaaaaggagggcacccttttttaggggttaaccacaggtggggacg

SEQ ID NO: 30290 - DNA, 367 bp, Homo sapiens
ggcacgagtttttagctagagtttttcctcgcttttaatgacctcagccccgcctgcagtggctagaagccagcaggtgcccatgtgctactgacaagtgcctcagcttccccccggcccgggtcaagccgtgggagccgctattatctgcgttctctgccaaagactcgtgggggccatcacacctgccctgtgcagcggagccggaccaggctcttgtgtcctcactcaggtttgcttcccctgtgcccactgctgtatgatctgggggccaccaccctgtgccggtggcctctgggctgcctcccgtggtgtgagggcggggctggagctcatggcactttctgcttgctcccacccctggcag

SEQ ID NO: 30291 - DNA, 368 bp, Homo sapiens
  misc_feature (1)...(368): n = A,T,C or G
ggcacgaggagtgacggtgccaccgcggcgcgtgagtttcgccctgtcttgtattaagtctgctcttccaggttcctggcgcttctgtacctgggacttgggatccccacaaacctggaaattctcagccgtcttccttcactcagagcaaattgagacgaccccgtgagaggccgtggagaggagtctgcaatgccgagtggaggaaggaggaaccggagtgtgagcagtagctgggtgggcagcatggctgggatcaccaccatcgaggcagtgaagcgcaagatccaggttctgcagcaccaggcagatgatgcagaggagtgagctgagcacctccagtgagaagctgagggaaaaaggtgggn

SEQ ID NO: 30292 - DNA, 364 bp, Homo sapiens
ggcacgagaaaatctatcacggtaagttaatatgagtatttgaaagtttcactgttaaatttatattatcacatattaaatgaaagaactgttaactgtgtactgaattcaaaagttaatatagcttctctcttttttaagaaatgggacacaatattaaaaaattaaagagttttcaaatatttatacttaaatttatatctaaggaattatatatagaatgcctacctttcaagtagatactattgttgctgttaagattattgtcaacaaaatttaaatacacagactattaaataaagaaattaaaacaacaaaaaataacctctcggccaggtgtcctggttaacctgtaatcccagca

SEQ ID NO: 30293 - DNA, 371 bp, Homo sapiens
ggcacgagaattacatcaatattatatttttattccctctaaattcaaggatacctacctggtttatattctaaatgaattggctggaaactcctttatgatattctgcagcacctgtaataatacccagagaacagctttgctactgcgaaatcttggcttcactgccatccccctccatggacaaatgagtcagagtaagcgcctaggatcccttaataagtttaaggccaaggcccgttccattcttctagcaactgacgttgccagccgaggtttggacatacctcatgtagatgtggttgtcaactttgacattcctacccattccaaggattacatccatcgagtaggtcgaacagctagagctg

SEQ ID NO: 30294 - DNA, 369 bp, Homo sapiens
ggcacgagggttttgccatgttggccaggctgggctcgaactcctggcctcaagcaatcccccacctccgcctcctgagtaactgggattacaggtgcgagccaccgcatccagcctgccaaattttctaaagtaggtttgccagtttatactcctgccagctgtatataagaattctctttgtgccatattcctgataacacttgatttgaatcagccttcttgttttttgccattgtagaaggggtaaaatggtatctgctagaggccttaatttacatttcattaatgtctgagggtggacatattcttatgtatgtgttcattgtttggcatcacttgcgagaatagataatacaggtattactc

SEQ ID NO: 30295 - DNA, 364 bp, Homo sapiens
ggcacgaggaggttatcaataagctcctagtccagacgccatgggtcatttcacagaggaggacaaggctactatcacaagcctgtggggcaaggtgaatgtggaagatgctggaggagaaaccctgggaaggctcctggttgtctacccatggacccagaggttctttgacagctttggcaacctgtcctctgcctctgccatcatgggcaaccccaaagtcaaggcacatggcaagaaggtgctgacttccttgggagatgccataaagcacctggatgatctcaagggcacctttgcccagctgagtgaactgcactgtgacaagctgcatgtggatcctgagaacttcaagctcctgggg

SEQ ID NO: 30296 - DNA, 367 bp, Homo sapiens
ggcacgaggctgtctataaggttttggagtgtggatgctggtccaagaaagaagatgtgccctggcctgctggaaagattgtgaattctagagatagagccgttagcatccatctcctccctgtaactcttaggaaatgcatcaaggaccattatagaaaggatcccctgacctaaggatgaaatcgacctagggttaatcatgacagctgcatcagttgtattggatgcaagtcaactctggaggtgagtgcccgcaagcagttcccctgctttgaaagaagatggtcagcccgctgcctccccagcggccacagctcctttgagtgtggggggtcacagccaggatgtattcctgacaataagga

SEQ ID NO: 30297 - DNA, 368 bp, Homo sapiens
  misc_feature (1)...(368): n = A,T,C or G
ggcacgagagaatattttgatccaagtatagttggctggacagtgaaatattatgaacttgaagaaaagatagtcagtctgatcaagaacctgttagttgctcttaaggacttccattctgaatatattggcagtgcctctaactttacttcccaactctcaagtcaagttgagcaatttctgcacagaaatattcaggaatatcttagcatccttaccgatccagatggaaaagggaaagagaagattgcagagctttctgccactgctcaggaaataattaaaagccaggccattgcgacgaagaaaataatttctgattaccaccagcagtttagatataaactgcaagatttttcagaccaacn

SEQ ID NO: 30298 - DNA, 368 bp, Homo sapiens
ggcacgagcaccaagttcctggaaaatgaagacagaaggtctgccagcttacatttacccaaactgtccattactggaacctatgatctgaagagcgtcctgggtcaactgggcatcactaaggtcttcagcaatggggctgacctctccggggtcacagaggaggcacccctgaagctctccaaggccgtgcataaggctgtgctgaccatcgacgagaaagggactgaagctgctggggccatgtttttagaggccatacccatgtctatcccccccgaggtcaagttcaacaaaccctttgtcttcttaatgattgaacaaaataccaagtctcccctcttcatgggaaaagtggcgaatcccac

SEQ ID NO: 30299 - DNA, 363 bp, Homo sapiens
ggcacgagatgagagttcaccagattttggaaatattttctattctgtaacctaccttttcatttacataacagtgataaaagctttaagtttgatcacatccaattaatcacattttttaatagttatgcttttatttgtttttcagacagggtcttactctgtcacccaggctggggtgcagtggcacaatcatggctcactgcagtctctgcctcccgggctcaagtgatcctcccacctcagcctctcaagtagctgggactacaggcatgtgccaccacacctgatttctatattttttgtagagactaggtttcaccgtgttgtccaggcttgtcttgacctcctgagctcgagcag

SEQ ID NO: 30300 - DNA, 364 bp, Homo sapiens
ggcacgagctcatgatacttgaccaaaattaaagtgaaattcctgccgggcacagtggctcatgcctgcaatcccacctcggcctcccaaagtgctgggattacaggtgtgaatcaccgtgcgtggctgccttaaatttttaataatcattgtgcaaattatttagcactccaggggtttgattttttctcctctgctgggtaggaataacaataatactgttattcaccatggtggtgtgggaagtttcaaagagcacatgtctataaagtgcttaatgcaaggcttggcatgcagttaacacaaaataaatgcgagctgctgtcattaacaatactgactacacggcactgtgatgcttatg

SEQ ID NO: 30301 - DNA, 366 bp, Homo sapiens
ggcacgagaatggatcatccctgtaatgccagcactttgggaggccaaggtgggcaaatcaccagcctggccaccatggggaaaccccatttttactaaaaatacaaaaaaaattagcccggggtggtggcacatatgtgcaattccagctactcgggagggtgaggtgggatcacttgaatcccggaggcggaggttgcagagaaccaagatcccaccattgcactcccagtttgggtggaagagtaacacaccgcctcaaaaaataaaaataaagattggggctatgaagagaggctcacccctctccctggaagaattggtctgataatggcaaattaacctggactttgacataaataatag

SEQ ID NO: 30302 - DNA, 366 bp, Homo sapiens
ggcacgagcgagagagcacactttccattagagcctggtaatacccatatcacctctgctctgaggctgggcctgcagctgtgtagtctttggaagaggtagcccctgaacgcagagcctaagagaagcaagtcggccctgacgccaggccccagtgggcgcctcacactcagaacctcataccccagagcaaaccgatggtcagggagagggctagagctcacacccagctcggaatagatcttccctgatgacatttcatgccctctaaggcagtttttaaatgaaggtacacacatccaggggtgttcacaggctttcacagcaagggtacctatttcatggcaaaataggcagttttaaaag

SEQ ID NO: 30303 - DNA, 369 bp, Homo sapiens
ggcacgagggacatttggtgccatcttcagaagatccaggagtcctgggaatcgtgtatgactcagttgctttccctgagcaggacgggagcccccctggcctcagagtgactgtgatgctgggaggttcctggttacagacactggaggctagtggctgtgtcttatctcaggagctgtttcaacagcgggcccaggaagcagctgctacacaattaggactgaaggagatgccgagccactgcttggtccatctacacaagaactgcattccccagtatacactaggtcactggcaaaaactagagtcagctaggcaattcctgactgctcacaggttgcccctgactctggctggagcctcctatg

SEQ ID NO: 30304 - DNA, 368 bp, Homo sapiens
  misc_feature (1)...(368): n = A,T,C or G
ggcacgagtatacccatatgattgaatgcagtagccactgcctgcacgtggctagctagcacttgaagtgtgacaatttgggattgaaagatgctggaaatgtgaaatacacaccaagttccaaagatttcatatattgattacatgttgaaataacagtgttttcgttatattgagttaaaatattaaaatattgtaagatttgatatcacttgtttctttttactttctaacgtggctactgggaaatttaagattccatatgtggctgctgttacgtttttttgtggtcagtgcgactgtagagaactaactccattaggctttcaagcatataattagaagcagggtgaggaaaactgggattn

SEQ ID NO: 30305 - DNA, 371 bp, Homo sapiens
ggcacgagctaaattttgaaaagaagtcaggtctctttgtactcctgggaagacaggaaaaaaaaaaaaaaggggggtcccctcctattaattaaaaagggggggcattcccaataaaaacccctttaaaacttgccggggtgaccctacattccaaaggaaaaagcaaagggcaaaaaatacccagggcatttttgaaaaaaaacaacagggcaaacaggacttgcctacctgttttaaaacttgcttaaaaaagggcgtatgggcacccggcccaagggaacaaattaaaagagcccaaaaccagggccctttcttttatggaacctgggggggggggcacccatgataaactcttgaccaggaaaggg

SEQ ID NO: 30306 - DNA, 368 bp, Homo sapiens
ggcacgagaactggtttgaaagaagctgggcagtgcatcaatccctatattacagttagtgtaaaggatctgaatggcatagacttaactcctgtgcaagatactcctgtggcttcaagaaaagaagatacatatgttcattttaatggggacattgagctccagaagcatgttgaaaaattaaccaaaggtgcagctatcttttttgaattcaaacactacaagcctaaaaaaaggtttaccagcaccaagtgttttgctttcatggagatggatgaaattaaacttgggccaattgtaatagaactatacaagaaacccactgactttaaaagaaagcaattgctattattgaccaagaaaccact

SEQ ID NO: 30307 - DNA, 368 bp, Homo sapiens
  misc_feature (1)...(368): n = A,T,C or G
ggcacgagctggaatattctgtccctctcagggctgcatttgatatgcactttaaatgtattttgcctataatttaaaagataggatggggctgggcactgtggctcacacctgtaatcccaacactttgggtggccacagaaggcagatcgcttgaggtcaggagtacgaaaacaacctggccaagatggtgaaatcccatctccaataaaaatacaaaaattagtcaagtatggtggcaggcacttgtaatcacagctacttgggaggctgtggcacaagaatcgcttgaacccgggaggaggaggtttcatagagccgagattgcgccactgccctgcagcctgggtaacaaaggaagactctgn

SEQ ID NO: 30308 - DNA, 368 bp, Homo sapiens
ggcacgagctgtcaaccccacacgcctttggcacaatgaagtgggtaacctttatttcccttctttttctctttaactcggcttattccaggggcgtgtttcgtcgagatgcacacaacagtgaggttgctcatcggtttaaagatttgggagaagaaaatttcaaagccttggtgttgattgcctttgctcagtatcttcagcagggcccatttgaagatcatgtaaaactagtgaatgaagtacctgaatttgcaaaaacatgtagttgctgatgagtcagctgaaaattgagacaaatcacttcataccctttttggagacaaattatgcacagttgccactcttcgtgaaacctatggtgaaat

SEQ ID NO: 30309 - DNA, 368 bp, Homo sapiens
ggcacgagcgcaggggcaagagagtagagagggacgccttaaagagcagagccacagcctccaatgcagagaaagtgccaggcatcaaccccagtttcgtgttcctgcagctctaccattcccccttctttggcgacgagtcaaacaagccaatcctgctgcccaatgagtcacagtcctttgagcggtcggtgcagctcctcgaccagatcccatcatacgacacccacaagatcgccgtcctgtatgttggagaaggccagagcaacagcgagctcgccatcctgtccaatgagcatggctcctacaggtacacggagttcctgacgggcctgggccggctcatcgagctgaaggactgccagccg

SEQ ID NO: 30310 - DNA, 365 bp, Homo sapiens
ggcacgagccatgggtcaactccaactcttgtagagggctcaagaaacctaggaaaagtgggcagcaaatgttgtaaacatcctgaaacaaaaagaatgccctgtgcaaaagactatctatccgtggtcctgaaccagttatgtgtgttgcatgagaaaacgccagtaagtgacagagtcaccaaatgctgcacagaatccttggtgaacaggcgaccatgcttttcagctctggaagtcgatgaaacatacgttcccaaagagtttaatgctgaaacattcaccttccatgcagatatatgcacactttctgagaaggagagacaaatcaagaaacaaactgcacttgttgagcttgtgaaaca

SEQ ID NO: 30311 - DNA, 366 bp, Homo sapiens
ggcacgagttatttttccctttacactgtccaattgagcttcttacttttttttcatgtatttacaaactctagttaggatcctgattacagcatagttccttgataatattaagatatgtaagggatcttcattgttggcctcaggctatctttgctatgacttgcatttgtccaacgtcaaaacataggaaacaggtaataaagcttttggtggtatccagccactgtaatgaagacaggaatgtgatttgagctgggaggaataaatttccatcttacttcacttttatattcctttttattatcaggcagcattacccaaagccatgggttttgttttcagaaaagtagaacttagaattat

SEQ ID NO: 30312 - DNA, 367 bp, Homo sapiens
  misc_feature (1)...(367): n = A,T,C or G
agcacgaggccatggagaatgatgtggataaacgcacatctgaaaactatacaaaatttggctacatttgtggagctcctgggacttcaccattttatggattcctttaaggatgtcgggagctttgatgaactcccaccaacctcacataaaaatgtcactgtgactgagacaaaattcaacaacattcttgttcgggtatatgtgccaaagagaaagtctgaagcactaaaaagggggttgttttacatccatggtggaggctggtgcgcgggaagagctgctctaagagggtatgacttgctgccaagatggacagcacacagacttgatgctgtcgtcgtatcaaccaactacagattatcan

SEQ ID NO: 30313 - DNA, 362 bp, Homo sapiens
ggcacgaggaatattccaaacatttcatcctttcttaataatgaacagtctttatagatgtgaattattatactttacatactaagcatagttaagcttactaagtttattaagtttagtaatagtgactactctcttcagcatttattctggtataccttaaatggttattgagctcttactctgctatatgcttagtccagggctttgcattcattatttacttttatcctagctttctgttgaagatccctataagctaaaaaacttcctcaaggacatagggctagtaaatgacagagctggtattggaacccatgtctgtttgatgccaaatcccactcttaaacactgtacattac

SEQ ID NO: 30314 - DNA, 363 bp, Homo sapiens
ggcacgaggatctttttaatgtctggcatagcagaagacagctggattttcacatctgcttcacatattccaccagccctcatagctgtgatggcgttacaggtcctgtagcaaaatacgcaagaggtttttcccttggtctttctccacttctgtcccctaataactttgctccagccccttaacagaatttgtcttttgttccaccctacttctcttgatctagccagatacaacaaacattatatatatcagccgctgttaaaacaggaagagtcagtcttttttttgggacaggggctcctctgtcacccaggctggagtgtgatggcactatcatggcttactgcagccctgacctcc

SEQ ID NO: 30315 - DNA, 369 bp, Homo sapiens
ggcacgaggttaaattagtgaatgaagtaactgaatttgcaaaaacatgtgttgctgatgagtcagctgaaaattgagacaaatcacttcataccctttttggagacaaattatgcacagttgcaactcttcgagaaacctatggtgaaaaggctgactgctgtgcaaaacaagaacctgagagaaatgaatgctttttgcatcacaaagatgacaacccaaacctcccccgattggtgagaccagaggttgatgtgatgtgcactgcttttcatgacaatgaagagacatttttgaaaaaatacttatatgaaattgccagaagacatccttacttttatgccccggaactccttttctttgctaaag

SEQ ID NO: 30316 - DNA, 364 bp, Homo sapiens
  misc_feature (1)...(364): n = A,T,C or G
ggcacgagatgcttacttcagagaataaagtcattgaaccccaatacttcggcttggcatacttattcagaaaagtaatagaggagcagttggaaccagcagttgaaaagataagcatcatggcggagagattggccaatcagtttgcaatttataaacctgtcactgattttttccttcaacttgtggatgcaggcaaggtggatgatgccagagctctcctacagagatgtggtgcaattgctgaacaaaccccgattttgttgttgttcctccttaggaattctaggaaacaaggaaaggcatcaactgtgaaatctgtgttagaattgattcctgaattaaatgaaaaggaagaagcatn

SEQ ID NO: 30317 - DNA, 364 bp, Homo sapiens
ggcacgagtgttttgtaggccgggcgcagtggctcacgcctggaatcccagcctcctgagtggctggaattacaggtgcaagccaccacacctgtttccagatttttctcaatcatacacatgcttcttaacttgcaatgaagaataagttcttattctgataaacccatcgtaagttgaaaatatcctaagttgaaaatttattaatacatgtaatttactgaacatcatagcttaacctaccgtgccttaaatttatttgctcagaacacttacattaggctacagtcaggcaaatcatctaacaccgagcctattttatactaaagtgttgaatagctcatgtgatctgttgaatactgta

SEQ ID NO: 30318 - DNA, 368 bp, Homo sapiens
ggcacgagcggcactaggggcagaaggctatttcagaaagtggaaggaatccaatggaaacttgagcctgcctgtcgacgtgaccttggcagtgtttgctgtgggggcccaaagcacagaaggctgggattttctttatagtaaatatcagttttctttgtccagtactgagaaaagccaaattgaatttgccctctgcagaacccaaaataaggaaaagcttcaatggctactagatgaaagctttatgggagataaaataaaaactcaggagtttccacaaattcttacactcattggcaggaacccagtaggatacccactggcctggcaatttctgaggaaaaactggaacaaacttgtacaaa

SEQ ID NO: 30319 - DNA, 376 bp, Homo sapiens
ggcacgaggccttatatgaatctgcctttggacagaagctccagggggaaaaaacttttttcttggtgggtgagtaatacatgttcacaagggtctttctatttaagaaaggaaaagaaaaggctgctcttagaaaaaagcgaaaagcccctgtgtcattggtctgagttacccctggttaacacgttaccagggaggcgtttgctttgaaatagaggactcatgcgcgcttgctgagcacttgctggtcatgttttaagcacggtgcactattttacttaagaccacataaccctgctctggggcacttgccccgtggtgctaaggggaaggcgagccttgcagatcacgtgacttttgcagatgaggtgacctg

SEQ ID NO: 30320 - DNA, 372 bp, Homo sapiens
ggcacgaggaaggttttaaataaagatggcaaagcacactttcttcagctgagaaaagattttgatcagaaaagggcaacgattcagtttcaccaacctcagagatttaaggatgagctttggaggatccaggagaagctggaatgttactttggctccttggttggctcgaatgagtacataactcccgcaggatctcagggcctgccgccccattatgatgatgtcgaggttttcatcctgccgctggagggagagaaacactggcgcctctaccaccccactgtgtccctggctcgagagtacagcgtggaggccgaggaaaggatcggcaggccggcgcatgagtttatgctgaagccgggcgatttg

SEQ ID NO: 30321 - DNA, 465 bp, Homo sapiens
  misc_feature (1)...(465): n = A,T,C or G
ggggnctnacctgacctagagcntatgccagggcttcccggactgcggaaggatggagctggccgccggaagcttctcggaggagcagttctgggaggcctgcgccgagctccagcagcccgctctggccggggccgactggcagctcctagtggagacctcgggcatcagcatctaccggctgctggacaagaagactggactttatgagtataaagtctttggtgttctggaggactgctcaccaactctactggcagacatctatatggactcagattacagaaaacaatgggaccagtatgttaaagaactctatgaacaagaatgcaacggagagactgtggtctactgggaagtgaagtacccttttcccatgtccaacagagactatgtctaccttcggcagcggcgagacctggacatggaagggaggaagatccatgtgatcctggcccggagcac

SEQ ID NO: 30322 - DNA, 470 bp, Homo sapiens
  misc_feature (1)...(470): n = A,T,C or G
aggggntnnnaactgactgcattcctaggccanngcgtggaattccttcaaacacagggccgcagcgctctgagaggtggaactgagcgccccgacccgctaactgccaggctgggccctccaggcggggaggggcacaggctggtgtccttattcccgtttcggtgtctaacgttaggtgttcagtgacggatccctatgtcctttgcccggccatggtgaccgatggcctgtgtgtcatctctagtgtccagtggcgggagaccagttcctggtgcctgcccatgaggcccgcggaacccagagtgaagaccagcgcccagcaggcgcagcttcggagtcggagctccaggaggaaggacccaagctgggggaggagcggcccaagccgcatgccggggcgctagaggagagaggccccaggcccgtggtctccattgtgaggccccgtcatggtccaaagagaaagn

SEQ ID NO: 30323 - DNA, 550 bp, Homo sapiens
  misc_feature (1)...(550): n = A,T,C or G
agatntcnaagagncncnnnnnnnnatttgacnatcgatccnctgctcagagtggngcaattcgccttgtccggtaccctgtcaggggtggagggcttcaccagccaggaggaccaggagatgctgagccgcatcgagaagcagctcaagcgccgctttgccattggctcccaggtgtctgagcacagcatcatcaaggacttcaccaagcaggtgagcctgccttggagtgggggtgtgagccggcacggggtgcaggtcttctgctggttcccacccactcagcactggcatcttactcagcagacaggccctgaacgggggtaggatggacaactgtccctttctcagaccttttctagccatcattccttccctagggacatcttcatcaggagcagggatgggggtattttttctgtcccacgaaggggaggggagagcagaggtggttggattctggtgaaaccccatacaagttccccgcagcccttcccgtctgtgcctttccccgttggcgggcgtttcatggagtgggaaggggcagagn

SEQ ID NO: 30324 - DNA, 509 bp, Homo sapiens
  misc_feature (1)...(509): n = A,T,C or G
aggcccccccnnccatagatnatcgaccagcatgaggaattcggcgggagaaggcggccggagagaaggtgtattggacctgccgggaccaggcccgcatgggctgccgcagccgcgccatcacccagggccggcgggtcatggtcatgcgcaggcactgccacccaccggacctgggcggcctggaggccctgcggcagcgggagcacttccccaacctggcgcagtgggacagcccagatcctctccggcccctggagttcctgaggacttccctggggggcaggttcctggtgcacgagtccttcctctacaggaaggagaaggcggctggggagaaggtgtactggatgtgccgggaccaggctcggctgggctgccgcagccgcgccataacccaaggccaccgcatcatggtcatgcgcagccactgccatcagcctgacctggcagggctggaggccttgaggcaacgggagcggctccccaccacggcccagcaggaggat

SEQ ID NO: 30325 - DNA, 457 bp, Homo sapiens
  misc_feature (1)...(457): n = A,T,C or G
nactgagntcccgctaacctacggaagngcggnggaattcgcaacatcaagttcagcagcctgtccaccttcatcgcccacaagaagtattactgctcctcgcacgccgccgagcacgtgaagtgagcgcccacactacagccgcagacgctttgcacgccccgctgcgatgcggggagggggccgcccccaggccgcacggactgccgctcctgggaatcccgccacgcacaggcctcggcggagggggccgcagggggcagcgcccgcctggacccttggcacttaataaagaagttcagtttgatgagaaaaaaaaaaaaaaaaaaaaaaaaatcggcccgccagaaattaaagggcccggtaaaccccgtgaaagacccttaatggtcctttttattgcccacccatctggggttggcccctcccccgggccttcttggccctgggagggggc

SEQ ID NO: 30326 - DNA, 489 bp, Homo sapiens
  misc_feature (1)...(489): n = A,T,C or G
gggaccnnagggggggnnttcgannccctatcgtagaccctagtccgtgtggtggaattcgtcaccgcttctttggacccaatgctgaaataagccagccccctgccctgagccagctggtgaacctgtaccttgggaggtcacactttctctggaaagagcccgccaccatgagctggctggaggagaacgtccacgaggttctgcaagcagtggacgccggggacccagccgtggaagcctgtgagaaccggcggaaggtgctctaccagcgtgcacccaggaatatccaccgccatgtgatcctctctgagatcaaggaagccgtcgctgccctgcccccggacgtgaccacgcagtctgtgatggggtttgatcctctgcctccttcggacacaatctactcctacgtcaggccagagaggctaagtcctatcagccatggaaacaccattgctctcttcttccggtcactgttgccaaactatn

SEQ ID NO: 30327 - DNA, 510 bp, Homo sapiens
  misc_feature (1)...(510): n = A,T,C or G
gagccgccccnnnnatagaaaatcgatcaccatgcgcaanncacaggtgcctgtcctgctgtctctgctgctgctactgggtcctgctgtcccccaagagaaccaagatggtcgttactctctgacctatatctacactgggctgtccaagcatgttgaagacgtccccgcgtttcaggcccttggctcactcaatgacctccagttctttagatacaacagtaaagacaggaagtctcagcccatgggactctggagacaggtggaaggaatggaggattggaagcaggacagccaacttcagaaggccagggaggacatctttatggagaccctgaaagacatcggggagtattacaacgacagtaacgggtctcacgtattgcagggaaggtttggttgtgagatcgagaataacagaagcagcggagcattctggaaatattactatgatggaaaggactacattgaattcaacaaagaaatcccagcctgggtccccttcgaccc

SEQ ID NO: 30328 - DNA, 514 bp, Homo sapiens
  misc_feature (1)...(514): n = A,T,C or G
aagggccccnnnntttgaaaatcgatccactgtcccgagnggngcaattccttggagccattcctgcccctttcaagaggagttaatgcccagctctgtttagagaaaattgggggagatgattgctcatgtgggtgataagaatcacctcccgtgcaggggtctgcatagaacactccataggcaaacctgggtgtccaaggcacgtggcattttgcaaactctgggtgcagctccgagctgtcctgcaggtcccagaccaggtgagaactccctgagttcctgctgcctgggtcgggggtgaggcataggtcttgggggttcaacctggaattctgaatgtcattcattgcattggagaggaaggagagtaggcaaagccaagaccctggaactggacaaactcgtgtggtttaaagtcactgtgagagctggagttgagtctgcctacggnggaggactgcggcacctacctcgcanggctgttgtgaggagcaatgtaaccgtgattttg

SEQ ID NO: 30329 - DNA, 488 bp, Homo sapiens
  misc_feature (1)...(488): n = A,T,C or G
gcgcggnnnnnaactgaacctagcagcactcggcaaggnccaattncttatagaagggtctaaatgaagtcatttttagagtatttgtttttggttacacaggtgcttccgcccatgtggcctcggagtgggaccctgcgggtcatcaatctgtacattgcctgagagcagccgtgtatgctctggaagggaacaagaccaggtacctgtcgggggatgcggccgtggtaccaggcatggctgcgcaggtcctcgctgctcaagagcagctcctcctccagctacttcttcagtttctcgggggtcctgtccatgatgtgcctctccttggagaactgcaacacagagtcaaccatgagctcaccctgcccaggccacaccaagccatgccagctggaggtgaccgcctgcttcactaatccaaccagttatgctacagcctgcattcagggagatgtggccacaggactcagttctgaccaaggagg

SEQ ID NO: 30330 - DNA, 487 bp, Homo sapiens
  misc_feature (1)...(487): n = A,T,C or G
agcggtgnnnnnccatcgactcgcatcacagtcgggcaattccgcggnggcacctgacaaaactgctgacgacaccgtatgagcggcaggagggctggcagctggcagcctcccggttccagggaacactatacctgagtgaagtggagacaccgaacgctcgggcccagaggcttgctcggccaccgctcctccgggagcttatgtacatgggatacaaatttgagcagtacatgtgtgcaggtgagttgcccctgcttcatagcccccttccccttcccagaggttgagagccccccacgcctgctgctgcttctctccttgtgcagacaaacctggaagctccccagacccctctggggaggttaacaccaacgtggccttctgctctgtgctacgcagccgcctgggaagccaccctctgctcttctcaggggagggagactgcacaagacccccagccccatccacacagnccccgacctgg

SEQ ID NO: 30331 - DNA, 486 bp, Homo sapiens
  misc_feature (1)...(486): n = A,T,C or G
agcggttnntnaaaaggtacngctacgcaagtgggcaattcgccactgtccagggccatgcagtggtcaggacagacctgagtgtggcgccccccgccccaccctccactcccttccttgtgttctccttgggagcagaagacaagctgttgggacctgacgcttttatttattctccaaattaagtgggaattagatcctctggggaaccctggagcttggtgagagtgacgctgccatggggttgggtccctgaggccttcctcggagcattgggtgccaggggctgcccagggcttctgagtgggcccacctgggtggganggctgccaccgcggcctgatcatgccctctgtgcccacacaggtctctgagcggnccctgatgttcctgttggacactcctggcgtgctggctcctcggattgaaagtgtggagacaggcctgaagctggncctgttggaacggtgctgaaccacctggtcn

SEQ ID NO: 30332 - DNA, 502 bp, Homo sapiens
  misc_feature (1)...(502): n = A,T,C or G
acgaggggnggggnnnnaatcgaaattcgatcagcatggcgngnggnggaattcgacagctcctcggcagggtaggcctgatgacagccctgtccctccctgcctctgccttgcccaaggccacggagggcgtctgcagagaggcctgccttccggattccaggcgggcatgccctgcaaaccccgcctgggcctcccttggtctgcccagccctcggttagccctgcctgaatcagtacatacttgaacgagtccccagtctgcgggaggcagtggtggggccatggacccatgcggggggttccagggtcacacgccacataacagacaaaaatacacacacgtgtgtttttctttgcaatacttgaaatattgccactgtgcttggacttagaagaagaaaatccccgtgacttcttcctcatcaccttgatggctttattctcaccttgtggggcatgtttgtatttattgcttcatggccgactggaatcctgagtc

SEQ ID NO: 30333 - DNA, 480 bp, Homo sapiens
  misc_feature (1)...(480): n = A,T,C or G
gtcagccggggnnnccctgagaatacgacatggcaanccaagcgcacccccaggagatttagctggagaggttttgctttgcagaggagcagcacagtatgggacacttggcttttcctccccggctgttcaggaagccaacagaggtgccctgtgttctagcataaagagagggtgaggtaggggttgaaagtgtcttctagaaaggcttatctctagaccaagcttcccagccagtgtgccagcagatcttgagaccctcagcactcaagcaagagcctgtggctgctttgagactggtcacaaaaaacaggctcaagctatccttccacctcaacctcccgagtagctgggtagctgggactacgtgtgcaagccaccacatctggctgtgttgttgttgtaaagacagagtttcgtcctgttgcccaggctggtcacgaattcctgagctcaagtgatccacctgccttggcctcc

SEQ ID NO: 30334 - DNA, 456 bp, Homo sapiens
  misc_feature (1)...(456): n = A,T,C or G
gacagcgtttaacaaagcttagagaaacctccaggagactgctatcatggcagagaagcccaagctccactacttcaatgcacggggcagaatggagtccacccggtggctcctggctgcagctggagtagagtttgaagagaaatttataaaatctgcagaagatttggacaagttaagaaatgatggatatttgatgttccagcaagtgccaatggttgagattgatgggatgaagctggtgcagaccagagccattctcaactacattgccagcaaatacaacctctatgggaaagacataaaggagagagccctgattgatatgtatatagaaggtatagcagatttgggtgaaatgatcctccttctgcccgtatgtccacctgaggaaaaagatgccaagcttgccttgatcaaagagaaaataananatcgctacttccctgcctttga

SEQ ID NO: 30335 - DNA, 492 bp, Homo sapiens
  misc_feature (1)...(492): n = A,T,C or G
aganttcaanagggagannnntttcgaaaccctatcgtagaccctantccatgtggtggaattcgggtgagccataggtggggtgcttttactcattggacatatgtgtgtaagtccaccatcacaaagacaatcctagtgaggccggggccaacataggccagtcacccctccttgtaaccttgatgacaatcccttgtacttaggtaggtcctttcttgctagactctttgcaaataaaaatgtataatgtgaggaaattgggtgccagtgccacctgggcctgtgggttgtcttgcctgggaggaggaagcaaactaactgaaggaaatggtcctttttccagcccgtgacctcacagccccaaccagaaggtgccaatgaagcagtccccacccccgtggtggacccagatgcacctccgtcccctccacttggcgcacctggactccctccagctggctcacccccagactcccatgtgttactggn

SEQ ID NO: 30336 - DNA, 471 bp, Homo sapiens
  misc_feature (1)...(471): n = A,T,C or G
nttttgagacccctannaactgatgtcactatcaggggggcggaattcgcaggagaattgcttgagcacaggaggtcaaggctgcagtgagctgtgatcacaccactgcgctccagccttggtgacagagcaagaccctgggtcaaaaacaacaaaacacgagaaagcacacaaggcagctcttggaagtagatgcctcacactgacgggccacagctgggcagagggtcccagagaaggagcgtctgtctcatgggctcagcactttctgcagctgccctaagacctcatggtcttcgggttctttataggaaagacgcctcttttcagcatctggtcccagagaagtgtcccctcagtccctgggaagtgtccctgggcagtgggcgggccgttagcctgaagctgcctccgggggccctccaggggatgactgtctctagaactgtggtcctggttcctagagtggcg

SEQ ID NO: 30337 - DNA, 490 bp, Homo sapiens
  misc_feature (1)...(490): n = A,T,C or G
acgccccccctcagtnacttagtatgacganccgnannnncgncgaanaananngccagggtcgcagacgtgtgtgagtccatgaaggagcatcttttggttcttgttgagagggccaagtacatcccaggtttctgcgagctccccctggacgaccagggggccctggtcacagcccatgctggcgagcacctgctgctcggagccaccaagagatccatggtgttcaaggacgtgctgctcctaggcaatgactacattgtcccttcgcactgcccggagctggcggagatgagccgggtgtccatacgcatccttgacgagctggtgctgcccttccaggagctgcacatcgatgacaatgagtatgcctacctcaaagccatcatcttctttgacccagataaggaaactgaggcatgattaacttgctcaaggtcacacaaccggaaaatggcagagctcggatttgaactgcagaccacctgtc

SEQ ID NO: 30338 - DNA, 483 bp, Homo sapiens
  misc_feature (1)...(483): n = A,T,C or G
aattgaactcgtnagcctaggccangtggtggaattcgtctctcttaaaaataaaattagctggacatggtggcatgtacctgcagtaccagctacttgggaggtagaggtgggagaatcacttgagccgaggaggcacaggttgcaacgagctgagatcacaccactgcactgcagcctgggggacagagtgagaccctgtccctgccccaccaaaaaagagaaagaaaaaaaagtgatggggaaactagacatcattaagttaactttggtcctattttaccaatgaggaaactgaaatcagaagatttaagggccttcccacccaaggccactccgtgacttcctggacaagaggggaagcccagcccactccccaccctgactactgaggttctgtgcacacgtctctaccttcctgctcaagacactgggtctttccacagcctgaagatgaccatggacaagacgggtctcctgctg

SEQ ID NO: 30339 - DNA, 490 bp, Homo sapiens
  misc_feature (1)...(490): n = A,T,C or G
agagggnnnncncccaatgagaataatgcatggcgggaaccggggggctgggttaagctatggtggtcattgcagatagcaggccactcacggagccttcttctcccgccgctggcggcagcaggggccccctttgcgtctcacgcagtagaagacagcaacgacgaggagcaggaggcccacgctgacggccacggccatgacggccactccagcctgggaggtctgggggctcacggtgccgaagtggaagacatggcgcttgttcccgtgggggttggaggcttcacaggagatgccatcgcggctcagggcgctggtcactttcagggtcagagagctgctcacccaaccctgccgtccggggattggctctgcggggctgccccccaattggctccagctgagtttggggtctggatggccgcgggcagagcagatgagtgtgacttcgtctccttccctccagctgccatctgccttgggcttn

SEQ ID NO: 30340 - DNA, 493 bp, Homo sapiens
  misc_feature (1)...(493): n = A,T,C or G
aggggcccgcnccaattgaacatganagcatcgcagnggcnggaattanatacaaagcctctgagaccgttgggcaaagctgcttccctgttgctggagtatcctgttcctcctgtgcaaaagcatgggtcctaaaaaggtggggacgctgtggcgagaagccgggcttagctggaaggaatttctacctgaaggccaggacattggtgcattcgtcgctgaacagaaggtggagtataccctgggagaggagtcggaagcccctggccagagggcactcccctccgaggagctgaacaggcagctggagaagctgctgaaggagggcagcagtaaccagcgggtgttcgactggatagaggccaacctgagtgagcagcagatagtatccaacacgttagttcgagccctcatgacggctgtctgctattctgcaattatttttgagactcccctccgagtggacgttgcagtgctgaaagcgcgagcgaag

SEQ ID NO: 30341 - DNA, 464 bp, Homo sapiens
  misc_feature (1)...(464): n = A,T,C or G
nattgaganccnattgaagngcgctggaanncgctggcggttgctgtcagctgattcccggggttggtggcagcggcggtagcagcaatggactttctcctggggaacccgttcagctcttcagtgggacagcgcatcgagaaagccacagatggctccctgcagagcgaggactgggccctcaacatggagatctgcgacatcatcaacgagacggaggaaggtcccaaagatgccctccgagcagtaaagaagagaatcgtggggaataagaacttccacgaggtgatgctggctctcacagtcttagaaacctgtgtcaagaactgcgggcaccgcttccacgtgctggtggccagccaggacttcgtggagagtgtgctggtgaggaccatcctgcccaagaacaacccacccaccatcgtgcatgacaaagtgctcaacctcatccagtcctgggctgg

SEQ ID NO: 30342 - DNA, 448 bp, Homo sapiens
  misc_feature (1)...(448): n = A,T,C or G
aggggntnnnnnnnaatgaaaatcgtgtgcatggcgaggaacccccagcccccccagaccacagaaggggagaagagcccagagcccttggggcttccccatagccagagtgcccaggccctcacgcctcctccgatacccaatggctctgccccggaagggcctgcatccccaggctcccaatagctgcctggtgcggcagcggcggccaaatcttccgtcctcccgtggatctcccggggtgggggcagggcgggtcccacgatggcccccattgccctcatcaccctgacacccccacattctctcctctggacccccaggaggctggtgccagggagacaggcccaacccacccccatttgcactgagaagagaagttttggagcgttgcctcctataataaagatacagagagtcaaatagaaaaaaaaaaaaaaaaaaaaaa

SEQ ID NO: 30343 - DNA, 473 bp, Homo sapiens
  misc_feature (1)...(473): n = A,T,C or G
ncttgatagacgtcgctaggacangccgnggaanncgaaaaacctgaagagctactttcagccctcccctagctgtccccaagcctctcctgacatagagctgcctagcctaccactgatgagcgccctcatgaccccgaagactccagaagagaaggcagtggccaaagtggtgaaggggcaggccaagacttcagaagccaaagatgagaaggagttacggacctcattctggaagtctgtgctggcggggcccttgcgcacacccctctgtgggggccacagggagccatgtgtgatgcgtactgtgaagaagccaggacccaacttgggccgccgcttctacatgtgtgccaggccccggggtcctcccactgacccctcctcccggtgcaacttcttcctctggagcaggcccagctgaaccaatggaggcctggggacatttggcatggtcacccctgcacatgatc

SEQ ID NO: 30344 - DNA, 479 bp, Homo sapiens
  misc_feature (1)...(479): n = A,T,C or G
ccatgagaccttggccaggcgggattgataccttcgatcatncttgctgactgtgacctcaacaaggctgtgcagatggggatgagttctgttttcttcaacaaaggagagaattgcattgcagcaggccgactctttgtggaggactccattcatgatgagttcgtgcggagagtggtagaagaggtgcggaagatgaaggtgggcaacccgctggacagggacaccgaccacgggccgcagaatcaccatgcccaccttgtgaagctgatggagtactgccagcatggcgtgaaggaaggggccacactggtctgcggcgggaatcaggtccctcggccagggttcttctttgagccaactgttttcacagacgtggaagaccacatgttcatagccaaggaggagtccttcgggcctgtcatgatcatctctcggtttgctgatggggactaggatgccgtgctgtctcggccaat

SEQ ID NO: 30345 - DNA, 491 bp, Homo sapiens
  misc_feature (1)...(491): n = A,T,C or G
ccattgagantcatcgnannnncncactgattccatggaagngcgnggaatttcagcaacccctctccttgggtgcctctccctcataggcctgagttcctggcactgggtgttgagggccccattgtttccactcacccagctagcatttattgagcacctactgtgtgccacatgctgttctaagggatggatactcctgagatggatacaggagttgatgagagaaaggtccctgtcctcacggggcccatgttctgaaggtggcacccaagtcttgtacagtcctttcctgcaggagtcacgctgggcagaaagtggaaacctggccccaggggctaggcacaggcgtggtgccgtggcctattgaggagcacccatcctggtttggggcaggttctctgggcacctctgaccctcacctcccccaccccccggtctgtttgcaggaatgtggcctgctgcggaaggggacaatgctactggctgac

SEQ ID NO: 30346 - DNA, 498 bp, Homo sapiens
  misc_feature (1)...(498): n = A,T,C or G
atatatgatnaccatcgnannnnnccnactgattccctacgtaagngccgnggaantttgaaggaggaggtcccgaatagcggtcgccgaaatgttccggtgtggaggcctggcgtcgggtgctttgaagcagaagctggtgcccttggtgcggaccgtgtgcgtccgaagcccgaggcagaggaaccggctcccaggcaacttgttccagcgatggcatgttcctctagaactccagatgacaagacaaatggctagctctggtgcatcagggggcaaaatcgataattctgtgttagtccttattgtgggcttatcaacagtaggagctggtgcctatgcctacaagactatgaaagaggatgaaaaaagatacaatgaaagaatttcagggttagggctgacaccagaacagaaacagaaaaaggccgcgttatctgcttcagaaggagaggaagttcctcaagacaaggcgccaagtcatgttccttttctggt

SEQ ID NO: 30347 - DNA, 484 bp, Homo sapiens
  misc_feature (1)...(484): n = A,T,C or G
ggggcggnnnnnnnnnaatcgatagcctacgtagngcggggaattctggttctcagggatattggagctgcttccttcaggtaggcctaacccagtgaaactcaggacagctggtgcctctccctcctgctcctgtgaccaggccacattctctttactctctgaatacagttaactgtggtgtaagtgactgggttgcagagccctcagttcccagatatgcagtgggcggcattgctaagacatgccatgcagtgtcagctgatttgtcccttttccttgtgagatcagagaggcctctgctgtcttttcctccttccagagctagcgctgaacacagcccagtttgcaaagagtctagccatgcttgggagctctgaggacaacacggcattgtcacgggcactctcccagctggctgaggtggaagaaaaaattgagcagctccaccaggaacaggccaacaatgacttcttcctccttg

SEQ ID NO: 30348 - DNA, 501 bp, Homo sapiens
  misc_feature (1)...(501): n = A,T,C or G
aggagtcccnnnnnagccccccaatgatacccttcatagagngccgtaannccatgaacgctccatctctgctcagtgaggacctgggcagccacactttgaatcttggtcttcctttttatctaaaagggtgaagtagatccccagctttctcagttctcccaccaggtcctcattctggcacatctgcagaagaatgttacagcccctgacaaactctccattgaggccagattgtcatggagactgcgcagttgtaggatatgcaccaccgtgttgctgaagccgcattggggctgctccggcatcctcttgaggaagtccagcaccttgtccttcaccagcgcctctctgctgcccgagtctgtcgcacgtgctgcatgcccagcacagcagagccaccacttcgctgctcatccccacacatttgctggagcccacaatggcccaggccctcgagcattattttgaactgaaatacagtagacttgaaaatttcaa

SEQ ID NO: 30349 - DNA, 497 bp, Homo sapiens
  misc_feature (1)...(497): n = A,T,C or G
ggatgtccnnnnaggggcaatgaaacctccatgagaccctacgccangtcgnggaattcactgtctgttccccaggctcagtgatgctgttatcctggaggggcaagtgcttcttaatgaagtgtgggaggagggaacagtctcttacaggagaagcagggtaggcactgctgggacagacccctcctcattccatggaggcctcacatggggaacagaaggacggaggcctcacttggggagtaggagaatgtgacaaggccctctccggacccagcacctggccagaggctgtgagtgcctgtgcttggtgctgaggggactccagagggtccttggccactgcactctgggggagccgctccagggtcttttccctgatggtccatcccccgccgcgatgcaggtgaccagccaagataaggctccggctgtaatccgcaaggccatggacaaacacaacctggaggaggaggagccggaggactatgagctgc

SEQ ID NO: 30350 - DNA, 471 bp, Homo sapiens
  misc_feature (1)...(471): n = A,T,C or G
natcgatagcantcgctagngcggngcaattcctttaaaaaatgcattcctttactttttctttgttttcttttggtagaagctatgcttggtttgtccttaaggcaatataaagtagtgttgatggttctcaaagtgtggtctgcagacctctgaggatccctgagaccatttcaggggtctgcaaagtcaaaactgttttcataatcttattaagatattatggcatcttttttacagtgttaatgtttgcatttacgttgcagaagcagtggtgggcaaaactgatgacttggcattaaccacagcagacgtcaagctatactcatggttattttattctctgttgtcacacatactcagttaaaaaaacaacgacagttcacttaagaatgtctttggccgggcacggtggctcacgcctctaatcccancactttgggaggccgaggcgggcggatcatgaagtcn

SEQ ID NO: 30351 - DNA, 468 bp, Homo sapiens
  misc_feature (1)...(468): n = A,T,C or G
natcgactgcgtcgctagngcggngcaattcctcctgtgggatgatatcaacaacgtcggactcagaggccactacttttgctcagtgtatggggcacggctgatggtaccagctggccaggggctcatcgtggtcatctcctccccaggaagcctgcagtatatgttcaatgtcccctatggtgtgggcaaagctgcgtgtgacaagctggctgctgactgtgcccacgagctgcggcgccatggggtcagctgtgtgtctctgtggccggggattgtgcagacagaactgctgaaggagcatatggcaaaggaggaggtcctgcaggatcctgtgttgaagcagttcaaatcagccttctcatctgcggaaaccacagaattgagtggcaaatgtgtggtggctttggcaacagatcccaatatcctgagcctgagtggaaggtgctgccatcctgtgaccttgct

SEQ ID NO: 30352 - DNA, 472 bp, Homo sapiens
  misc_feature (1)...(472): n = A,T,C or G
nctcgatagacatacgctagngcggngcaattcaaggggaaaagagtcactggaaggaggggccagctctgtgtcacatccagcagagacaccaggtacagcagaaggaccttggacatgaccatgaggagggccttgttggccatgacctgggatggatgggggtgagagcctgggggaccacaccatgtccccagtacacgaaacagtgcctggtagacaggatggatttatggatggatggataggtaggtggatgaatggacagatgatagatggatgcaaagacagatgaatagatggacagatggatggacggacagacggaatgaatgatcagaaaaggcttcatgaacaaagtgagactgagctgcatctccatgggtagattgcagaggactctcctcttgagtcaggaatgatccaatgtcctggtccagggagcaagtcaacttggcttgactgcagacac

SEQ ID NO: 30353 - DNA, 497 bp, Homo sapiens
  misc_feature (1)...(497): n = A,T,C or G
gggagtnccnaggttgtcccccaactgagantccctaggtatcctggaannnncaccangggaaggaggctggggatccgcggcaggggcgggccagaggaggcgaccctttttacttcttcgcggtgaacgaggcgcagcccgttcgcttcagcagtttcctaaggaagtgcccgacagggtggcaccactacgaaggcacggccagctgctaccgggtctacctgagcggagagaactactgggatgccgcgcagacctgccagcgcctgaatggctctctcgccaccttctccactgaccaggagctgcgctttgtcctggcccaggaatgggaccagcccgagcggagctttggttggaaggaccagcgcaagttgtgggttggctatcagtatgttatcactggccggaaccgctccttggaaggtcgctgggaggaggcattcaaaagctcttcagaggtgttcctgcccccagaccccatctttgcctcg

SEQ ID NO: 30354 - DNA, 395 bp, Homo sapiens
  misc_feature (1)...(395): n = A,T,C or G
aggatgtccnaggtggcccccactgaaatttcagttggtaggcagnggcnggannnnnngnggggagacaggaagcacatttattgagagcacagnggggcgcttcttgcccgttgttttggaaccgcancacagaggcgctcacaacgagccctgtgaggtaggtgaaggaccccacttcccacatgcagacactgaaggctcaacagctcccctaggcctcagggctcctgcggggtgggcaggggtccagcccacgggtctgaccccaggtcagcggcgtccatcactcagagggcgggtctctactcaaggggaggccccgggtccacagccacggggacaccctgcacctattcccacgggacaggctggacccagagaccccggctcga

SEQ ID NO: 30355 - DNA, 473 bp, Homo sapiens
  misc_feature (1)...(473): n = A,T,C or G
ntttgatcaccattccttgatcgccctccgaannncggagaaaanatggggggacgtaggtggagaatggcacacgggtgcaggaggattcggnagctggtttcactctgggngactgngacgggatccatgccctggatctcaggggcccactcatggacgtgggggagacggccatggtcactgctgactccaagtactgctacggcccccaaggcaggagcccatacatccccccgcacgcggccctgtgcctggaggtgaccctgaagacggctgtggacgggcctgacctggagatgctcacggggcaggagcgcgtggccctggccaaccggaagcgggagtgcggcaacgcccactaccagcgggcggacttcgtcctggccgccaactcctacgacctcgccatcaaggctatcacctccagcgccaaagtggacatgacgttcgaggaggaggcacagctcctg

SEQ ID NO: 30356 - DNA, 469 bp, Homo sapiens
  misc_feature (1)...(469): n = A,T,C or G
nttgagaccatagctggaggccgtaagncccngcggaacccagacgtcctcgtgggttcaggaatcctcgtagcccactacctccagagcatcacgccttgcctggccctgggtggagagctggtctaccaccggcggcctggagaggagggcactgtcatgtctctagctgggaaatacacattgaacaactggttggcaacggtaacgttgggccaggcgggcatgcacgcaacatactaccacaaagccagtgaccagctgcaggtgggtgtggagtttgaggccagcacaaggatgcaggacaccagcgtctccttcgggtaccagctggacctgcccaaggccaacctcctcttcaaaggctctgtggatagcaactggatcgtgggtgccacgctggagaagaagctcccacccctgcccctgacactggcccttggggccttcctgaatcaccgcaagaacc

SEQ ID NO: 30357 - DNA, 469 bp, Homo sapiens
  misc_feature (1)...(469): n = A,T,C or G
actgagacctggcagtgganggcattacaacttcgtcacagaaaaggagtgtctgcagacctgccgaactgtgggtgagtgcgggtccccacccctgtgcgctctgcaccctcaagaccctgtccctccagtaaaccacctgcgaattgaaaaggtagctaacagagggcattccagtggtagaactccaggcggtttcctgaaatcttaggaattccacctttggatgtggaggacctcgggcaaatcattttcttcctgtgggccccagtttccccatctgtcaaagagggatgaggtgttctagatgagcagggccctctggctcagcagtctcatgtatgtctgatcagcagtcacaagggtttctcaagttccatgcctctctccactccacagcggcctgcaatctccccatagtccggggcccctgccgagccttcatccagctctgggcatttgatgctgg

SEQ ID NO: 30358 - DNA, 497 bp, Homo sapiens
  misc_feature (1)...(497): n = A,T,C or G
agggcccccagggccccactaaaacttacgattgaccatcagcacnagccgcggaannnctnagatcttggtttttttctcccgcattggtttcattttcattcctgctttttcttcttgacatatatatatatatatatatatatatagatatatgttaagacagtttgcagaactgccctgcccccacttttattaatttgaaaagcaaatctctctgaagtaaacagtatgcctgtgatcttttgcgcagtctgtatttctgcccacactccctatttgtgtccctgtaatgtctgggaggaggccagggtatataagccattgcaggggagagccacatatagaagagccattggaagcagctctggaggcacccctccccaggccctgcctgcgcctgtctcactgagaggacttctcctctctcagagccactcaccacagttgccagacgtgcagtgctttattttctgctggactggagcatttagctg

SEQ ID NO: 30359 - DNA, 352 bp, Homo sapiens
  misc_feature (1)...(352): n = A,T,C or G
acggcttgaccccactganaccactaggccagagtcgaggaattccgttcacctagatggccaggaagtgacttgtcggggagccttggcactccccagagcccagctggacctgcttggcctgggcctggtagagccaggcacccagtgtggacctagaatggtgtgccagagcaggcgctgcaggaagaatgccttccaggagcttcagcgctgcctgactgcctgccacagccacggggtttgcaatagcaaccataactgccactgtgctccaggctgggtgacagagcaagaccctgtctctaaaataaattttaaaaagacatattaaaaaaaaaaaaaaaaaaaa

SEQ ID NO: 30360 - DNA, 491 bp, Homo sapiens
  misc_feature (1)...(491): n = A,T,C or G
nacgggctcccaattgagatccttatgcagngngccggaattccttggctgcggagctcacactcatgaggagccggaagctcacaggtgcagtgcggtcttcagcgcgcttgaaagcacgaagttgttcggcagccaggttggcctctgcccaggaagttgctggttccacgtctgccaagacagcatgtctgacttcctcatcccacaaagccacagacaggcgaacgtccaagaagttcaaatgtgacaaaggacatcttgtgaagtcagaattacagaagcttgtccctaagaatgacagcgcttctttgccaaaagtgacacctgagaccccttgtgaaaatgagtttgctgaaggcagtgccttgcttccaggcagcgaggctggcgtttctgtgcagcagggggctgcaagtcttcctctcggtggctgcagagttgtgagtgactctcgcttagcaaagactagagatggcctgtccgtgcca

SEQ ID NO: 30361 - DNA, 352 bp, Homo sapiens
  misc_feature (1)...(352): n = A,T,C or G
aggcctcccactgagacctactgagnggcgggaattcctcccgcggagccctcctcggacctggcctccaagttgagggaggccgaggagacgcagagcacactgcaggccgagtgtgaccagtaccgcagcatcctggcggagacggagggcatgctcagagacctgcagaagagcgtggaggaggaggagcaggtgtggagggccaaggtgggcgccgcacaggaggagctccacaagtcccgggtcacagtgaagcatctcgaagagattgtagagaagctaaaaggagaacttgaaagttcggaccaggtgagggagcacacgtcgcatttggaggcagagctggaaa

SEQ ID NO: 30362 - DNA, 488 bp, Homo sapiens
cgcgctttcggggccctcgagaccactaggcagtgtggtggaattcgttctgaagtggataggaagggacaggcccactgcctcaggactccaccttggggcgttcgagccacctctgcattggagaacagtccttccatccctctgccagtgcttaggccacttccctaccaccagaccagctctgaggcctgaatgtcgtgcagatggcacttagcattccagagaatgcttgtgctggtgggagagccatgtagtcacatgggcgtcttcatcagggagcacgtgagctgggatgacacagcatggggagatgaggaggatgtatcttctgggtataaaccccttaaatgggggtcatcaccacccatgactgtcagcccggcgctgcagctgctcccaccacctccccaaacctggctgctatacccaggaagggtcctggcttcccttctctgtgcctggcctgctgtcttccctcttttcct

SEQ ID NO: 30363 - DNA, 460 bp, Homo sapiens
  misc_feature (1)...(460): n = A,T,C or G
natgggaccttttgaagncgctggaanncgagngnagtgaagtccgagagccctagctgccaacccatggtggatggtaacttctgtctcatcaagagtaaaacagtcctgcacacagcagggtgggtttgtgcctttggcccaacaggtacatagccccataatttctgaattattctatgcacttgtttccctcttcttttattttttatttgatatatgccgagctagaatcctgtcgggtagcttttgtatactaagaacattattattattattatttttgagacggagtctcactctgtcacccaggctggagtgcagtggtgccatctcagctcactgcaagctccgcctcccgggttcacgccattctcctgcctcagcctcccgagtagctgggactacaggtgcccaccaccacacccagctaatttctttttttgtatttttagtagag

SEQ ID NO: 30364 - DNA, 515 bp, Homo sapiens
  misc_feature (1)...(515): n = A,T,C or G
tgtgttgnnnnggggnnnnnnnnnaatcgatcacgtccgnggttggaatccctgaacggcgggcgatcagctatgatcgtactaccacagctgctgcacagactatgctgttgaatgcaagcgccatccgactgtcggggatccctccaccatgccttacgaggaggacgcgggctatcaccatggcgtgcataacaacaatgccactgtgcatgaacaggaggggggccgctccctgacctctgacctgcaggcccagtccaaagggaatcctgagcagacacctgttctgaaacctgaggaagaggcccctgcgcctgaggtgggcgcctctaagcctgaggggatagactcaaggcctgagacccttcatccagggagacctcagcccccagcagaggaggagctgtgcagtgggaagcccttcgacgccttcaccgacctcaagaacggttccctctttgccttccgagggcagtactgctatgaactggacgaaaaggcagtgaggcctg

SEQ ID NO: 30365 - DNA, 536 bp, Homo sapiens
  misc_feature (1)...(536): n = A,T,C or G
nggtgtagttnnnngggggnnnnngnnnnntttcgaccacccctncgngnatcgaagaaccatgtcagtgtggcggaattctcgggctgctgggtgttctggacgccgccccggatggtggtttcgatttatccgatgcccttcctgacaatgaaaacaagaaacccactgcaatccccaagaaacccagtgctggggatgactttgacttatgagatgctgttgttgatggagaaaatgacgacccacgaccaccgaacccacccaaaccgatgccaaatccaaaccccaaccaccctagttcctccggtagcttttcagatgctgaccttgcggatggcgtttcaggtggagaaggaaaaggaggcagtgatggtggaggcagccacaggaaagaaggggaagaggccgacgccccaggcgtgatccccgggattgtgggggctgtcgtggtcgccgtggctggagccatctctagcttcattgcttaccagaaaaagaagctatgcttcaaagaaaatgcagaacaaggggag

SEQ ID NO: 30366 - DNA, 462 bp, Homo sapiens
  misc_feature (1)...(462): n = A,T,C or G
ntcgagattcgtagtccatgtggnggaattccgcggcgtttgcagtttgccttccccccacccggggtttggctgtgcgtttgctttcatggcagctccaccagcccctgaggaagatgcctcttatggacaaggaaggggctggagggccccactcaggctctgcgctgagtctgttctcgcgtctctgtgggctctggcagatgtcaccgtctgtccacggtgattctcttcctcacttccctgtcacgctgtcccctccttgtgggtggaggctgactggatagcagactgtcaggtgtggaggctgggtggctgctggatgagtgggccgctcagccattccttccagtcctgcccagtgcctggggcttcatgtcgaagccaggaccacgcccgagtctagggtccatgggagagaaagctgagaggagctggtcctgtcctcccggcaggggtagn

SEQ ID NO: 30367 - DNA, 474 bp, Homo sapiens
  misc_feature (1)...(474): n = A,T,C or G
aggaggtnnnnnnncctgagaaactgagtatatncgaagaanccngcgactnatggntgctaatcttttcgccagatttcaaaaagcacataacgacatgttttactgctttttcaggtttgaattagtcattgtttggaggatacaaatagatgaagatgggaaggtttttccaaagctggatcttctcaccaaagtcccacagcgaggtagggccctgggtgtggctgctctaggtgacttctcaacatgcccagcaaagccgcctgcctgtttcctctgggtttcaaagggcaagaatcaaaaattggaaatctcattaatgtactttgtctatcaatttttaaatatttttatcaataatcactcaaaaagaacatgaaaagggattgctgccccaaggccctcccaggctgaatgcacagggaatatgcctccagccgtaggtgaggcctncactcactccgtctnctc

SEQ ID NO: 30368 - DNA, 478 bp, Homo sapiens
  misc_feature (1)...(478): n = A,T,C or G
nggagggccnnnnnccttgataaaatgataccctagcgaagngncgnggaantcgcagcttggaggaagagccactcatcctctccacagagtgtcctctggaaccggccacaaccctcagaggaccgcttgccttcccagcaggggctggcggaagccaggtcttccagctcctcttcctcaaaccattctgataactttttcaggatgggtagcagtcccctggaggtccccaaacccaggcttgcagccctgagtgatcgagagactcggctgcaggaggtgcgctcagccttcttggctgcgtacagcagcacagtggggcttcgggcagtagcccccagtccttccggtgccatcgggggcctgctggagcaatttgcccgtggtgttggactccggagcatcagcagcaatgccttgtgaagaagccagcccatgacattttcctgctcctctctcagctgagcccttagcn

SEQ ID NO: 30369 - DNA, 490 bp, Homo sapiens
  misc_feature (1)...(490): n = A,T,C or G
agcgcctccccctgatacctatatgnagngngcnggaattctctaaagtctgctgagcaggcagcagcctctgctctgtggctccattcaggctttttcatctacgaaggccctgaggttcccatcaacccccatttccctagggtcctggaggaaaaagctttttccaaaggggttgtctttgaaaaggaaagcaatcacttctcactttgcataattgcctgcagcaggaacatctcttcactgggctccacctgctcacccgcctgcagatctgggatccagcctgctctcaccgctgtagctgtggcggctggggctgcagcctgcagggagaagcaagaagcatcagttgacagaggctgccgacacgtgcctcttccctctcttctctgtcaccctcctctggcggtccttccaccttcctctgtcctccggatgtcctctttgcccgtcttctcccttggctgagcaaagccatcccctcaan

SEQ ID NO: 30370 - DNA, 510 bp, Homo sapiens
  misc_feature (1)...(510): n = A,T,C or G
gggagcaattgatcacactccgngnatcgaaacacattctcgagcaggcgaactacaccaccgacctgctcgggagagacctcagctactgtctctacggaatgtatgaccacagatacggtgacagtgagttcacagtgcagagcaccacaggccactgcgtccacatgaggggcctgccgtacaaagcgaccgagaacgacatttacaacttcttctctcctctcaaccctgtgagagtccatattgagattggcccagatggaagagtgacgggtgaatcagatgttgagcttgctactcatgaacaagctgtggcagctatgtccacagacagggccaatatgcatcacagatatatagaactcttcttgaattcaacaacaggggccagcaatggggcgtatagcacccacgtgatgcaaggcatgggggtgtctgctgcccatgccacttacagtggcctggatagccagtcaatgagtggctgttacggtgccggctacagtg

SEQ ID NO: 30371 - DNA, 474 bp, Homo sapiens
  misc_feature (1)...(474): n = A,T,C or G
aggacggggnnnnncctgagaaactaggatcntcgaagaancanncnggntngagcgaacaagagatgttcaagaacttttgacacaatataccaagtttgcacagatggtaaaaaagatgggaggtatcaaaggacttttcaaaggtggcgacatgtctaagaatgtgagccagtcacagatggcaaaattgaaccaacaaatggccaaaatgatggatcctagggttcttcatcacatgggtggtatggcaggacttcattcaatgatgaggcagtttcaacagggtgctgctggcaacatgaaagagtctccttctgtcacccatgctgaagtgcagtggcgtgatctcggttcactgcaacctccgcctcccgggtttgagcggttctcctgcctcagcctccctagtagctgggattacagtgcaaaaattggccgggcgtggtggtgcacaactgtgatcccagctan

SEQ ID NO: 30372 - DNA, 469 bp, Homo sapiens
  misc_feature (1)...(469): n = A,T,C or G
natcgagacctcgagcaccctaggccgtgtggcggaattacagccgggcggccgggcggggacgcgccccggactcttctcagttgagagtgcggttcctgggcaggtttccacaccagttcctttccgcgtccttcggccctggctctggctgcctggcggaggtggggtagcatttgtcatttgcacactgctggctttatctttggggctgcaccccgaggcaacaaatgcaggatgctctgtcacccacatgtccaccaccatctggtttgccttttggctactttgactttctccttaaatgcttcctgtgctgagcaaacattccacagccagcagagcaatggagagttcatggccactcttcccagtatcagcaagcaatttggggtgatcgtttggaagcctcagaggaaagatgtcatcaggcttcctgtggctttgtccttcagcagtggggctcggn

SEQ ID NO: 30373 - DNA, 486 bp, Homo sapiens
  misc_feature (1)...(486): n = A,T,C or G
aggcgnnnagccccccctgaaaccatttgatcccctcgaannccacnnnaccttaaatctttctaagcaagtgtgaataggatttttactccctttgtacagcattctgagaaacgcaaataaaagggcaacatgtttctgtttccctgtgtctggccttcgcttcctggaaggctgaggggagggggcaggggtgtgggcagcggctcccgctgaggtgctggtggggcatcactgcagctctgacggcggcaagaggggcgctgggactgctgggctttctgctggcttcagcaaggaaatcccccaaaggggctgtgagggaactggcggcggcagcggtagtcacagagcaaaattctctgtgcttttgcctggctgttctccgacaggtcttgcgccttggccccacaggctggggtgacctgtgccatggccaacgaggaggacactccagcgatggtttacacgtgcagccatgggtcc

SEQ ID NO: 30374 - DNA, 469 bp, Homo sapiens
  misc_feature (1)...(469): n = A,T,C or G
nttcgagacctcgagnancactaggcagagtggcggaatacaagactactgaagaactggtggctgtagcagtacagtcacgactcggcagacccaggcatcctcgtgctcctggcctgcggtaccatatccagcacctgcggccagatagccagttacccgctggccctggtccggacccgcatgcaggcacaaggtgaggcctgggcgggaggatggggcagggggagtctcatcgcttgggccccagcttctcccaagtagagccctgggctgggaccctcctggatttcgatgggcttctctgggcctccgtttccccatttgtgacattgaaatgggagtcctttactttcatggagctgaggattaactaagataacaggtgcagtgggtacaggaagagatcccttgcagacttagctgggatgtcgttgctggcaaatgtctagcatttccaggctggtaa

SEQ ID NO: 30375 - DNA, 473 bp, Homo sapiens
  misc_feature (1)...(473): n = A,T,C or G
natagaganccntagtccagagaggaggaattcaattccactcaagtgccctaattgcagaagtattactgaaattgctccaactggcattgaatctttacctgttaattttgcactaagggctattattgaaaagtaccagcaagaagaccatccagatattgtcacctgccctgaacattacaggcaaccattaaatgtttactgtctattagataaaaaattagtttgtggtcattgccttaccataggtcaacatcatggtcatcctatagatgaccttcaaagtgcctatttgaaagaaaaggacactcctcaaaaactgcttgaacagttgactgacacacactggacagatcttacccatcttattgaaaagctgaaagaacaaaaatctcattctgagaaaatgatccaaggcgataaggaagctgctctccagtattttaaggagcttaatgatacattaaaaa

SEQ ID NO: 30376 - DNA, 497 bp, Homo sapiens
  misc_feature (1)...(497): n = A,T,C or G
gcgggggnnnnnnnnnaatcgatatcgtatctgcgtgtgcnggaattccatggagctgttcgtgcagcggactgagttccacgccctgagggcaggctttgccctggatgatggcatagccaatcccactgatgccttcactgtcttttatagtgagcggagtccctggtgggtgcgggttaccagcactgggaggccaggccatgcctcacgcttcatggaggacacagcagcagagaagctgcacaaggttgtaaactccatcctggcattccgggagaaggaatggcagaggctgcagtcaaacccccacctgaaagaggggtccgtgacctccgtgaacctgactaagctagagggtggcgtggcctataacgtgatacctgccaccatgagcgccagctttgacttccgtgtggcaccggatgtggacttcaaggcttttgaggagcagctgcagagctggtgccaggcagctggcgagggggtcaccctat

SEQ ID NO: 30377 - DNA, 494 bp, Homo sapiens
  misc_feature (1)...(494): n = A,T,C or G
agacggnnaggcccacccaggacccatttagntgcctncngaangccncnaantnatncngacgatggccgtcaagaagatcgcgatcttcggcgccactgtccagaccgttctcaccaccctggcgcaggcggggcaagcagggtacgaagtgacagtgctggtgcgggactcctccaggctgccatcagaggggccccggccggcccacgtggtagtggtagatgttctgcaggcagccgatgtggacaagaccgtggctgggcaggacgctgtcatcgtgctgctgggcacccgcaatgacctcagtcccacgacagtgatgtccgagggcgcccggaacattgtggcagccatgaaggctcatggtgtggacaaggtcgtggcctgcacctcggctttcctgctctgggaccctaccaaggtgcccccactactgcaggctgtgactgatgaccacatccggatgcacatagtgctgcaggaatcatgcn

SEQ ID NO: 30378 - DNA, 482 bp, Homo sapiens
  misc_feature (1)...(482): n = A,T,C or G
tgaagatgccngnaattgannnccctaaggaaatgcatacgcagngngcnggaaaacgcgngcttggacacacagacacgcagacacagagacaccggggcccagggccctcctatggaccctgcccgctcccctcccattggccacggctgtccgcccacccccattctccaagcttcagccccctccttagttcggcatctgcacagcactgaagaacctgggaatcagaccctgagaccctgagcaatcccaggtccagcgccagccctatcatgaccaaggagtatcaagaccttcagcatctggacaatgaggagagtgaccaccatcagctcagaaaagggccacctcctccccagcccctcctgcagcgtctctgctccggacctcgcctcctcctgctctccctgggcctcagcctcctgctgcttgtggttgtctgtgtgatcggatcccaaaactcccagctgcaggaggag

SEQ ID NO: 30379 - DNA, 472 bp, Homo sapiens
  misc_feature (1)...(472): n = A,T,C or G
cggggtcccnaatcgaganccaatgaagtgcgtggaaancgccagcgggaagtcgaccgtgtgtgagaagatcatggagttgctgggacagaacgaggtggaacagcggcagcggaaggtggtcatcctgagccaggacaggttctacaaggtcctgacggcagagcagaaggccaaggccttgaaaggacagtacaattttgaccatccagatgcctttgataatgatttgatgcacaggactctgaagaacatcgtggagggcaaaacggtggaggtgccgacctatgattttgtgacacactcaaggttaccagagaccacggtggtctaccctgcggacgtggttctgtttgagggcatcttggtgttctacagccaggagatccgggacatgttccacctgcgcctcttcgtggacaccgactccgacgtcaggctgtatcgaagagttctccgggacgtgcgccga

SEQ ID NO: 30380 - DNA, 460 bp, Homo sapiens
  misc_feature (1)...(460): n = A,T,C or G
ntcgagaatcgtagaccctaggcagtgtggtggaattcgctccctggcccgaatcttcacttccattcaggaaaccggagatcccctgatggctgggacctttgtggtctcctctctctgcaacggcctcatcgccgcccagctgctcttctactggaatgcaaagcctccccacaagcagaaaaaggcgcagtagagccagctactggagtcattccgtttccactcattcacccaacctcagggttctccccatctgagccagcctgctggtgtgacttactcatcctccattcctctgcacttgcagactttctgagccagggttttcttttagtggaaacaaatggttgatggatccagatccttanaaaaggagaggatgggggtagagtctcccaagccaaaattttgacatttgagtgctttcgtaagccctgtacatgtactattaattcag

SEQ ID NO: 30381 - DNA, 471 bp, Homo sapiens
  misc_feature (1)...(471): n = A,T,C or G
natcggagaccctagtcatagaggtgcatttcttgtgaggggagacattactgctccgcgccaggaagcatgcctactgtgagtgcacgctttcagtgtctggcgtgacagattgtacaaagtgaacccagccacacagctaccgtccatatcacaccaccaccagcacccagatatctccctcgtgtcccccagtggctgcctagaccaggtggccctgccctgcctcctgtccccatgggcagatgttgcttatctctggcctctgcatgaaagaccaagcagagtgctatcttctggctgagacctccctgctgcctcatcaccgtggaaaggcacaggctggcttcttttccaggttatggactttcttactgtgtcactttgtggacttacgcacctgcagagtgcctggcatggtgagcatgagttggggcatggcgtgatctaagcagggtttggaaggttctt

SEQ ID NO: 30382 - DNA, 459 bp, Homo sapiens
  misc_feature (1)...(459): n = A,T,C or G
ntcgagaccagtaggccctgtggnggaattcgccacctagtttggcctctactacaacatctcgggcgctgggttcttcctgcaccacgtgggcttggagctgctagtgaaccacaaggcccttgaccctgcccgctggactatccagaaggtgttctatcaaggccgctactatgacagcctggcccagctggaggcccagtttgaggccggcctggtgaatgtggtgctgatcccagacaatggcacaggtgggtcctggtccctgaagtcccctgtgcccccgggtccagctccccctctgcagttccatccccaaggcccccgcttcagtgtccagggaagtcgagtggcctcctcactgtggactttctcctttggcctcggagcattcagtggcccaaggatctttgacgttcccttccaaggggagagggtggcctatgaagtcagtgtccc

SEQ ID NO: 30383 - DNA, 475 bp, Homo sapiens
  misc_feature (1)...(475): n = A,T,C or G
gtcgnnnagggccagctgaaagacctagngngccgcannncannnncttnntnngnggctcggacgggatgctctggtgcggcaagattcttaggccttgttccaggtgccacgtgcaaatacgctgggtcagtttctgggtggcaagaacttgaaactgcatttcttgagcataaagaacagtttcattattttattctcataaactgtggagctaatgtagacctattggatattcttcaacctgatgaagacactatattctttgtgtgtgacacccataggccagtcaatgtcgtcaatgtatacaacgatacccagatcaaattactcattaaacaagatgatgaccttgaagttcccgcctatgaagacatcttcagggatgaagaggaggatgaagagcattcaagaaatgacagtgatgggtcagagccttctgagaagcgcacaccgttagaagaggagatagtgg

SEQ ID NO: 30384 - DNA, 463 bp, Homo sapiens
  misc_feature (1)...(463): n = A,T,C or G
ggccnnnnnnnnnnttatacgagcatctcagcagcgtcgaggaaatggcggcgggggtcgcactctccttgaggcgccggttgccggccacaacccttggcggagcctgcctgcaggcctcccgaggagcccagacagctgcagccacagctccccgtatcaagaaatttgccatctatcgatgggacccagacaaggctggagacaaacctcatatgcagacttatgaagttgaccttaataaatgtggccccatggtattggatgctttaatcaagattaagaatgaagttgactctactttgaccttccgaagatcatgcagagaaggcatctgtggctcttgtgcaatgaacatcaatggaggcaacactctagcttgcacccgaaggattgacaccaacctcaataaggtctcaaaaatctaccctcttccacacatgtatgtgataaaggatcttgg

SEQ ID NO: 30385 - DNA, 224 bp, Homo sapiens
  misc_feature (1)...(224): n = A,T,C or G
aangnttagggcttagncaatagttttaactatgccatttgtttaaatgagtgcatttgcttcgagggtagtggcttactaaaagttaggaacagagacctagtggggtgtccaaggccgtgtcactttccccttcagcacaccccagcttttgacctcaaagcccatgagctgcgtggacagtgtggggtgccatgaggaggggcggtggctggtcctcaaga

SEQ ID NO: 30386 - DNA, 476 bp, Homo sapiens
  misc_feature (1)...(476): n = A,T,C or G
catcgaagaccctagncatagagggcatagccagngaggnggaattccacagatgccacatccccataatgcaaccagacccggtcctcccggatccaggggaagggtcggagctcagggggtgagcaagaaaagccacgtggaagaagtaagcggccagatggctcaaagacaaactctcccctgctcaggcttgcacccagacacgacaccatgcatctcctcggcccctggctcctgctcctgggtaaggactgtggcctgggctagtactggggttctgggatgtcagcgggcactggaggaggaggaaagacccaggcagagaggcgtcaacataaggtacggtgggggcagcggtgtgtatagataaatgtacatacaaatatatatgtttcccatatatacatacacttctctcattgcatcctgctgtctttgagtatctctagatttctcccactatcttgagagga

SEQ ID NO: 30387 - DNA, 480 bp, Homo sapiens
  misc_feature (1)...(480): n = A,T,C or G
attgaaaccttnnangngtttgagtacctagtccgtgtggtggaattcgttctctgtccctggttcaactgtgatttggctttcccgtgtctttcctggtgatgccttgtttggggttctgtgggtttgggtgggaagagggccatctgcctgaatgtaacctgctagctctccgaaggccctgcgggcctggcttgtgtgagcgtgtggacagtggtggccgcgctgtgcctgctcgtgttgcctacatgtccctggctgttgaggcgctgctttagcctgcacccctcccttgtctcatagatgctccttttgaccttttcaaataaatatggatggcgcancaaaaccaaacaaaaaaaaaaaaacaaaaaaaaaaggggcccccctttaattttaagggcccctttaaaccccgcgaaaacccccccccgggcccttttatgtgcccccatttttttgttgccccccccccccgcn

SEQ ID NO: 30388 - DNA, 456 bp, Homo sapiens
attgagaccctttgaggcggggaattcttcagctagattcacagcctccccatggcaaatggaggccttccagggtcctggacccacccccaagcttgggtaggagggatccccctcttaatctcacatttacttgtgtttgaacatctcagaaaaaaaaaaagatgcaaattccaatgtcagggtccccaaatcaagttttcctggagcatgtccacgcttgtcaccaccgtctgtggctgctttcaagcacgtcagggctgcgtgctcataacagagacggcacggcccccaagacctaaaataccaccagctggcccttgtcggaaagtcccctggctggccctagtccattgactctgggccgggctgccaggaccacagaagcctgcggcactcagggctcccagggctcccttctccaacagttgctgtgcctccgtttccccgaaatgc

SEQ ID NO: 30389 - DNA, 494 bp, Homo sapiens
  misc_feature (1)...(494): n = A,T,C or G
caatggaaaccttccgnannnncncnaactgatantcatcggtaagngccgcggaatttctgatggcaacgaggatctgcgggctgacgacttgcctgggccagccttcgagagctatgagtccatggagcttgcctgccccgctgagcgcagcggccacgtagccgtcagcgacgggcgccacatgttcgtctggggcggctacaagagtaatcaagtcagaggattatatgacttttatctgcctagagaagaactatggatctacaacatggagactggaagatggaaaaaaatcaacactgaaggtgatgttcctccttctatgtcaggaagctgtgctgtgtgtgtagacagggtgctgtacttgtttggaggacaccattcaagaggcaataccaataagttctacatgctggattcaaggtctacagacagagtgttacagtgggaaagaattgattgccaaggaattcctccatcatcaaaggaca

SEQ ID NO: 30390 - DNA, 460 bp, Homo sapiens
  misc_feature (1)...(460): n = A,T,C or G
gcgtgctnnncctgacatcggacatgtgacnggacttccgngcgccagcctcccatgaacactgtgtcccaaccccggtcctctcaggattcctgtgtggaaatgtcacttctgtctcagctctctagggtgcacctggtgtccagctctgccccctttctgcttaagcagctgctgggagaccctgagccaggccgccgaggttctgagctcgtaaggggtgcagcagtttcccgcacagcgtggggagcacatttgctcacgtctcccaggctggctgtacactctgaggccagccctgggctctgacactctcccgattccgctgggctttctaagccctcctctcctgtccactgctggcccatggcccaggcccagccttgaagctgtaaagacctctcaccccatccaaatgagactggtcagatatctcccgcatgtcagccgccactggatt

SEQ ID NO: 30391 - DNA, 461 bp, Homo sapiens
  misc_feature (1)...(461): n = A,T,C or G
nttcgagaccttgaggcacngtggnggaattcccttcctctgtacgcctccctgccctatgcacagcagctccgagtcttccaaggggccccaaagggctatcgcaaagtgatcatttcaaccaacatcgctgaaacctccataaccattacaggaataaaatatgtagttgacacgggcatggttaaagcaaagaagtataaccctgacagtggtcttgaggtgttagcagtgcagcgggtatcgaagacgcaggcttggcagcgcacagggagggctggcagagaggacagtggcatctgctaccggctctacacggaggacgagtttgagaagtttgataagatgaccgtgccagagatccagaggtgtaacctggccagtgtgatgcttcagcttctagcaatgaaagtcccaaatgtgctcacctttgacttcatgtcgaagccatctccagatcn

SEQ ID NO: 30392 - DNA, 465 bp, Homo sapiens
  misc_feature (1)...(465): n = A,T,C or G
aggctgnntnnaacggggacttaccccacgacangccgnggaantccggcacgtgcagtcagaacgtggcagccatccaggagcaggtgctgggcctgggtgccctgcgtaagctgctgcggctgctggaccgcgacgcctgcgacacggtgcgcgtcaaggccctcttcgccatctcctgtctggtccgagagcaggaggctgggctgctgcagttcctccgcctggacggcttctctgtgttgatgagggccatgcagcagcaggtgcagaagctcaaggtcaaatcagcattcctgctgcagaacctgctggtgggccaccctgaacacaaagggaccctgtgctccatggggatggtccagcagctggtggccctggtgcggacagagcacagccccttccacgagcacgtgcttggagccctgtgcagcctggtgacagactttccgcagggtgtgcgcg

SEQ ID NO: 30393 - DNA, 491 bp, Homo sapiens
  misc_feature (1)...(491): n = A,T,C or G
gaaactcgataancntannnnnnnnnnctcgagatccctagtcagtgtggtggaattcgggtgaagaggggagtccgggcttggacctggcgcctgcacgttgcaggaccgcccgccgtttctggccgaggagcaactcgagttcttagctttggaggagagaaacggtggggaatgggaaaggagctagaaaaaacgaggggcgcaagggggcggccagcgggtgagaagcctcgaggtgaggcggataggtgcgcccaagggctcccacagtttccgaagacccttatattgcattcgccagtggagaaaaatgaggccctccgcgaagcgtccctcgaggtcacccagtgacgtaatattggacgaggactagggcttctgatccccatcaccggccgaattaacctcttttcttctgtatgtccatagctgtttgttcccaccgagctgtgctttatgaagctggccagccgggccttctttatgtg

SEQ ID NO: 30394 - DNA, 477 bp, Homo sapiens
  misc_feature (1)...(477): n = A,T,C or G
ncttgagaccctagtccgtgtggttgtgtcccttgatctacgggctggagttccaggcacgtgccttaacacctcaaactgcagaaacagatgccattcggtttttggttgggacgcagtctcttaaatatgataatcagatccatatcatagattttgacgatgaaaacaacattataaataaaaatgtcctcctccatcaagcgggtgaaatctggcatattagcgctagccctgcagacagaggtgtgctgacgacctgctacaacagaacttcagacagcaaagtcctgacatgtgcagccgtgtggaggatgccgaaggaattggaatcaggcagccacgagtcccctgatgattcatacagcactgcacagaccctggagctgctctgtcaccttgacaacacagcccatggcaacatggcctgtgtcgtgtgggagccaatgtgagatgggaagaccatcatttccttgg

SEQ ID NO: 30395 - DNA, 466 bp, Homo sapiens
  misc_feature (1)...(466): n = A,T,C or G
nagcgtgntnnccacggatccgaccacatatngcgtggcattccagaagttccgctcactgttcttcggctccatcctggcccctgtacgctccccccagggccccagccctgtgctggcggaagacagtgagggtgaaggctgaaccaagaacctgaagcctgtacccagaggccttggactagacgaagccccagccagtggcagaactgggtctctcagccctggggatcagaaaggtgggcttgctggagctgagctgtttcactgcctctcgcaggccccagctggctgtcactgtaaagctgtcccacagcggtcgggcctgggccgttatctccccacaacccccagccaatcaggactttccagacttggccctgaactactgacgttcctacctcttatttctcattgagcctcaggctatactccagctggccaaggctggaaacctgtctccctc

SEQ ID NO: 30396 - DNA, 467 bp, Homo sapiens
  misc_feature (1)...(467): n = A,T,C or G
agggtgggtnnaactgacttcgcancnctcgccgnngcgtggaattcgtccagaatgagaagaaggaaagcggggccggttccttcaggacccgcctcatggggcaccgcggcggcttggggaccacttggagccccgtcctggggagaaaacagctcacgtctatggccctgactgcttaggcgggagctgcgtgcagctcagcttctccggggcatttttttctacacgctgggtgagctatgaacaggccaactgcaagggcgagcagtttgtgtttgagaagggcgagtacgcccactgggactggtggaccagcagccagaggacagactcagcagcctgaggcccatcaaagtggacagccaagagcacaagatcatcctctatgaaaaccccaacttcaccgggaagaagatggaaatcatagatgacgatgtacccagcttccacgcccatggctacca

SEQ ID NO: 30397 - DNA, 484 bp, Homo sapiens
  misc_feature (1)...(484): n = A,T,C or G
nttgattaccatgtnnagnggtttgagtccactatccgtgtggtggaattcactttttggaagggtcagcagcattctgaatccaaagatgtgcattatgctggctttctggtcatcatggggagcatcaatgacaaggttttctctagtgataaatacagattgattcctgacctaatcagatacgttgtataagtgtaggtacaaagtgaaatcacttcagcaaacacagaagatgatgatgacgacgatgatgaggatgatgatgatgaaaaagaaaacgcagaggatcggaaccccgggctctccaaggagagagtgagagcttcactgtctgacttgtcaagccttgatgatgtggaaggaatgagcgtgcgccagctgaaggaaattctggctcggaattttgtcaactattctggctgttgtgaaaaatgggaactggtagagaaagtaaaccggttatacaaagagaatgaagaan

SEQ ID NO: 30398 - DNA, 478 bp, Homo sapiens
tttgctgtccctagtcagtgtggtgaattccctacctcttcattggcactctcaactccttgctgaccaacatggccggtggggacatggcacgagtcagcacctacacaaatgcctttgccttcactcagttcggagtgctgtgtgccccctggaatggcctgctcatggaccggcttaaacagaagtaccagaaggaagcaagaaagacaggttcctccactttggcggtggccctctgctcgacggtgccttcgctggccctgacatccctgctgtgcctgggcttcgccctctgtgcctcagtccccatcctccctctccagtacctcaccttcatcctgcaagtgatcagccgctccttcctctatgggagcaacgcggccttcctcacccttgctttcccttcagagcactttggcaagctctttgggctggtgatggccttgtcggctgtggtgtctctgctccagttcct

SEQ ID NO: 30399 - DNA, 484 bp, Homo sapiens
  misc_feature (1)...(484): n = A,T,C or G
gggtcgataacctanncannnntttgtagaccactatccatgtggtggaattcctgacccactagtgaaatgttagggcattgctagattgtatcctgattatttaagggccgagagaaagagaaagctaacattaattgaatgcctattaatgtgccatcatatttggtacactattatctcttttttgctttcccagcaactcgggaagcttatattatctctgtttttccagcaagaaaagtacctctcaaagaaatttatagaaattgagaagttgatttttaaactctgaaaatgtaaacaatccaaaatagtcaaaccaatttttaaaaagaacaaagttgagattcttgtattagctgattttaaggcttgcagtanagctacaagacagtgtggtgttggagaagagctggacatataaatcagtagagtaggataaagtccagaaatagacccatacatacatggtcaattcgtt

SEQ ID NO: 30400 - DNA, 471 bp, Homo sapiens
  misc_feature (1)...(471): n = A,T,C or G
gcccaggcttaganncccttnnttagtagaccctagtccatgtggtggaattcatcacattgggcccacagggtgaggaccctgctgtgccaggcatcctgaggccccaactctgtctcccctactcccaggatcaacaccccccggaaagagggaggcttgggccccctgaacatccccctgcttgctgacgtgaccagacgcttgtctgaggattacggcgtgctgaaaacagatgagggcattgcctacaggtactgtgggaccctcagcccggctcagggagcgccctgccccccattcctgtgatgctgggaccactcctgtacaatgtcttctctgcccccagccctgtggctagcagcgggtggttggtagtcccttccttgtctctggcagtgggagctatcagctcctcactgggaaccctgatgtcttcaggggcctctttatcatcgatggcaagggtgg

SEQ ID NO: 30401 - DNA, 544 bp, Homo sapiens
  misc_feature (1)...(544): n = A,T,C or G
agtnnaagnggggnnnnnnncaattgactttcgtccgcgtggngcaattcgggagatggggcagggggctgcccagtgggtgggaagaaggtgagttggggtttcttcccaactgggagtgggctctgccgtgccctgagaagaagaagaggcgtagcaggtggccttggcttgtgacctctgaacaggtggtcccctggggtcagccagaacaggtggtcccctggggtcagccagggcactcagcctggcagcccattgtgagaaaaggttccttcagtttgctggccgtgcagggaccctgcctcactgatggaaattgaggggtgagtggcctgaggtcacagagggtcacagccccacagcctccctggggctgagaccccagaatgcctgagatggtggtgtccgcagccacaggcttggagctttcaaggaacctaatggacccctcggcctccatccctctgctggagtctcangcctggtgtgagcagtgctctgggactcagagggaccccgtcctcccagagccggtgggagt

SEQ ID NO: 30402 - DNA, 492 bp, Homo sapiens
  misc_feature (1)...(492): n = A,T,C or G
ggggtttanaggnnnnnnnnnnaaatcgaagaccctcatcgagngtgcgtgaanncctcacatcgggcgggaagtcgacaggccgggatccaaggtgaacaagaaggaggtggtgtaggctgtgaccattgtagagacaccacccatggtggttgtgggcattgtgggctacgtggaaacccctcgaggcctccggaccttcaagactgtctttgctgagcacatcagtgatgaatgcaagaggcgtttctataagaattggcataaatctaagaagaaggcctttaccaagtactgcaagaaatggcaggatgaggatggcaagaagcagctggagaaggacttcagcagcatgaagaagtactgccaagtcatccgtgtcattgcccacacccagatgcgcctgcttcctctgcgccagaagaaggcccacctgatggagatccaggtgaacggaggcactgtggccgagaagctggactgggcccgcgg

SEQ ID NO: 30403 - DNA, 512 bp, Homo sapiens
  misc_feature (1)...(512): n = A,T,C or G
agggttgatnnccnttnnnnnnnnaattgatccacctatccgagtggtgcaattcccagagcccatcttaatcccgagagtccggagggctgtgctaccccaagaagaggaaggatcagggggtgggcaactggtaactgaagtcaccaagaaagaagattcctgccagctgggctactcggccggtccctgcatgggaatgaccagcaggtatttctataatggtacatccatggcctgtgagactttccagtacggcggctgcatgggcaacggtaacaacttcgtcacagaaaaggagtgtctgcagacctgccgaactgtggcggcctgcaatctccccatagtccggggcccctgccgagccttcatccagctctgggcatttgatgctgtcaaggggaagtgcgccctcttcccctacgggggctgccagggcaacgggaacaagttctactcagagaaggagtgcagagagtactggggtgtccctggtgatggtgatgaggagn

SEQ ID NO: 30404 - DNA, 504 bp, Homo sapiens
  misc_feature (1)...(504): n = A,T,C or G
agctttgatcaccgtccagagnggngctagattgcccgtgagaagggacaagcccagcggatgccccctggggaatctccacatcatcagtgtattactagtaatgtcccgctggagaggccaccgctgtgcagtgtcatgttccagaaattactgatgaagcagcatgtgttggtggcatgtgcactggcctgccatgacagccctctgactggccccccagtgaagagtaaaggcctgcctgccgcaggcttcggaggcgtctgctgagtcctctcacccgcatgggtctggggaagtgatcacgctcagccgacggtctgaccacacttcatcctccccccggggccttctcatcttgggagatgactcctcttcagagcacctgctgcaggactggatcccacccccctgcaggtcctggggtctcagggccttggagcagcccatgctggaatcatgtttacctcctagtgcaaccgtcccctacccagggactgtcga

SEQ ID NO: 30405 - DNA, 500 bp, Homo sapiens
agtccgtcaccattcgagaggttcttgatcgactgtctggcatttcagagacagccatgatcttcgctggcgtggacgtcacgaaggagccgatctctgtcctccccaccgtgcattataacatgggcgggattcccaccaactacaaggggcaggtcctgaggcacgtgaatggccaggatcagattgtgcccggcctgtacgcctgtggggaggccgcctgtgcctcggtacatggtgccaaccgcctcggggcaaactcgctcttggacctggttgtctttggtcgggcatgtgccctgagcatcgaagagtcatgcaagcctggagataaagtccctccaattaaaccaaacgctggggaagaatctgtcatgaatcttgacaaattgagatttgctgatggaagcataagaacatcggaactgcgactcagcatgcataagtcaatgcaaaatcatgctgccgcgttccgtgtgggaagcgtgttgcatgaaggt

SEQ ID NO: 30406 - DNA, 498 bp, Homo sapiens
gcactgacaccactcgagagggcctgacaaacgcttcatctgaaacagggccatgatgattagctctctctttccttcctttggcttcattgctgtattccatgtgggtcttgatatcttgaaactggatgagatacccaaatagtcagtccctgaatataaatcatttccttgtacagaatcactgccaaactcagtatgggtaaaagatttttaacacccagctgcagcattcactctggttagaattggccatttaaatttatttcacatatgtaagtatcatatcctttataatgcattcttaattagggctcagttcttccagattgaattcctttaaaaaattccttatgtaatcttttaattctagttggaaaacatcacttgacagttgctgtatatacaggcatgcctcgttttattgtgcctggctttattgtactttgcagatactgtgtttttcacaaatggaaggtttgtggcaaccctgcgtta

SEQ ID NO: 30407 - DNA, 508 bp, Homo sapiens
  misc_feature (1)...(508): n = A,T,C or G
agatttgatnnccntccgngnnncatcgaacaccgtccgagtggtggaattcgcgcagcagcaggcatcgcgggaaggtgaagagcttccctaaggatgacccgtccaagccggtccacctcacagccttcctgggatacaaggctggcatgactcacatcgtgcgggaagtcgacaggccgggatccaaggtgaacaagaaggaggtggtggaggctgtgaccattgtagagacaccacccatggtggttgtgggcattgtgggctacgtggaaacccctcgaggcctccggaccttcaagactgtctttgctgagcacatcagtgatgaatgcaagaggcgtttctataagaattggcataaatctaagaagaaggcctttaccaagtactgcaagaaatggcaggatgaggatggcaagaagcagctggagaaggacttcagcagcatgaagaagtactgccaagtcatccgtgtcattgcccacacccagatgcgcctgctttc

SEQ ID NO: 30408 - DNA, 510 bp, Homo sapiens
  misc_feature (1)...(510): n = A,T,C or G
agggttgatncccctnnnnnnnnnccctcgatccacagtcgcgagtggngcaattcgaggcgactgaggccctggtcctaggggtggaaccatggaggaacaccctggtcacccactgggactgcgggtctgcggggcgccagagggagcacagcacatacctgcctcggagctgacccctggctccatgccccgtcctcagagcagctcctgcgccaatattaagtatgagacatttcaagctgcttgggtggttgttcattatacagagatagtgggaaaatattattgggaatgaactctctgattgtcttaaaatgttaccattgtgtagacacgtcaagtcctggatagggttcctcattttcacatttttagttctctggtgtttctcagcagggcccagctggcctttgggcagaaccctccttccttatatgggaatgtcccactcttgggcagctgccctggtgccgggccattacacaccagcagcacttccaggcattg

SEQ ID NO: 30409 - DNA, 469 bp, Homo sapiens
  misc_feature (1)...(469): n = A,T,C or G
tgggtgccagggtaggaaaactcgatagtcttgngaangncgnggaattcaaccgactcccccctcaccctgcccaccatggctccaaagaagcatttgtttagcactttctgtgtgcccctaggtactatatgcctggacggggtcagaaggaccctgacccaccttgaacttgttccacacaggatgccaggccaaggtggagcaagcggtggagacagagccggagcccgagctgcgccagcagaccgagtggcagagcggccagcgctgggaactggcactgggtcgcttttgggattacctgcgctgggtgcagacactgtctgagcaggtgcaggaggagctgctcagctcccaggtcacccaggaactgaggtgagtgtccccatcctggcccttgaccctcctggtgggcggctatacctccccaggtccaggtttcattctgcccctgtcgctaagtctt

SEQ ID NO: 30410 - DNA, 454 bp, Homo sapiens
tcccactccagaaagcatgtctggatctaagtaggaaataaaggcaccaggagttaccaagaactcctggagacccttggtgggcctgtagataggcagcctgaattggcaggtgtcaaaggccaagaaccactgctggggacctcttggcagctccactcctgacccaccaaacccactctgcttcccctgtacagacacaccccaaggaggccagcacggtgaggtactggttgatctgcagcatggcggcgtccagcagtgtgtggatgttacgcaggctctgcagccgggcctccaggtgctgccgctcatggccctccagagctcgtagctcctctggggtcagcccagcaaagcccgcagggggcacaggcattggggggaaggcaaagggtggaggcaggggcatacccatccagggaggagggaaggggaaaccaggggcagggcc

SEQ ID NO: 30411 - DNA, 498 bp, Homo sapiens
  misc_feature (1)...(498): n = A,T,C or G
gaatagatcacgtcagagggngtagatagacaatcgaactgcgatgatccagaaactgaggaagcagctctggtggctatagactacatcaatcaaaaccttccttggggatacaaacacaccttgaaccagattgatgaagtaaaggtgtggcctcagcagccctccggagagctgtttgagattgaaatagacaccctggaaaccacctgccatgtgctggaccccacccctgtggcaagatgcagcgtgaggcagctgaaggagcatgctgtcgaaggagactgtgatttccagctgttgaaactagatggcaagttttccgtggtatacgcaaaatgtgattccagtccagactcagccgaggacgtgcgcaaggtgtgccaagactgccccctgctggccccgctgaacgacaccagggtggtgcacgccgcgaaagctgccctggccgccttcaacgctcagaacaacggctccaattttcagctggaggaa

SEQ ID NO: 30412 - DNA, 469 bp, Homo sapiens
  misc_feature (1)...(469): n = A,T,C or G
cgcgccaggggaaggataccatcgaaantccctggaangncgnggaannccgaagaaaccccgagaatggaagaacccggagtcccagcgcggcttgtttttggccctttatccattcccaggccccgcccccgtccctgtggaagtggtccagaagttctgtcgcattgacaaatcccgaaagctaccacattctaaagccaaaactcgaagccgacttgaggtggctgaagctgaggaagaggaaacaagtatcaaagctgctcgttctgagctgctgcttgctgaagaacctgggtttctggaaggggaggatggggaagacacagcaaagatatgccacgctgacattgtggaggctgtggacattgcaagtgcagccaagcactttgacttgaatctgcggcagtttggaccctacagactaaactactctcgaactggaagacacctggcttttggagggcgc

SEQ ID NO: 30413 - DNA, 564 bp, Homo sapiens
  misc_feature (1)...(564): n = A,T,C or G
tgggggtncnnnccatttgacatcttcgtgaggggcanncnatggagcatcgtncgtgnngggcaactcgntngagagttcgctgaagcaggaggcgaagaacttgcaccagcgtctggaagggcagcgtccacagaacaagggcaagaaccgctacaagaacattctcccctttgaccacagccgagtgatcctgcagggacgggacagtaacatccccgggtccgactacatcaatgccaactacatcaagaaccagctgctaggccctgatgagaacgctaagacctacatcgccagccagggctgtctggaggccacggtcaatgacttctggcagatggcgtggcaggagaacagccgtgtcatcgtcatgaccacccgagaggtggagaaaggccggaacaaatgcgtcccatactggcccgaggtgggcatgcagcgtgcttatgggccctactctgcgaccaactgcggggagcatgacacaaccgaatacaaactccgtaccttacaggtctccccgcttgacaatggagacctgattctggagatcttgcattn

SEQ ID NO: 30414 - DNA, 554 bp, Homo sapiens
  misc_feature (1)...(554): n = A,T,C or G
aggcgggcnnnncccttggtaccacttcangaggggaattcgtttgatgggcatgccttctgagggctgcaaatgctcacactagtgagggtccctgctccagcaccgtggcctgagccaggtcctccccacaggccctgaatgaagccttgaagctcttcaagatgcactcccctcagacttctgccatgctcttcacggtggacaatgaggctggcaagatcacgtgcctgtgtcaagtcccccaggtcagcaccacctcgcaccagtgggaagtgttaggtcttaaggttgttggctgaggcctgtgtgtgtacagcctgcattcgaaacagcctttctgcccaccggttggttacctttgccagtaccccttacccaggccttcttattggtgaagacatctggntgatacctggctttgccactctgtcctgtcctggcagtggccatggccgccccctgtaccagcccgtaagtctgtctcggcctccagcagtatcacccanggcanggagtgggtgatggctcctccatcctttctttccntgcat

SEQ ID NO: 30415 - DNA, 565 bp, Homo sapiens
  misc_feature (1)...(565): n = A,T,C or G
ggctgccnnnnncacttggaccatccttcgngnggngacnnncaattgaccatcgttcatgtggtggaattcgtggtggtggnggaacagggggaacatcagactgccgaggtatgagtttgggttctcatcttcttcccaggaggcttttgaaaccccaggatgatgcctcctagaggccttgctgtcaaattcaataggcaataacatgaaggatttactcagccaggctcatgagaccagctctgaggaagctgtgcttttcttgtactgatcggtgatgtgcatcaccctaagggatagtaaacagatgaaacccagaaagtccagtcaaaagagcaccctctgggaatgaagatctagtgaagactggggagacagatgaggaaagagtcctgaacaggagccactcattccagctttgtctccatagcctgcccgcccacgatggatgaagtgcgtggaggagacaggcacgttcttcgagcccacgctggcggctntgtttgttcgtgaggccttttgcccgagcacccgaagtgctgtatgtgagagctcttcccag

SEQ ID NO: 30416 - DNA, 481 bp, Homo sapiens
  misc_feature (1)...(481): n = A,T,C or G
cgagccaggggtattgagaccatctgananntctgcngaanngncgnnggaantcgctcaccgtcaatatgttgacaacgttgcactcaggggggcggaaaacactcttacctcctatttttaaaaccaacgattcccagtgaagcacctgaggccaagcacgggagaggaatgaggggagcagctggacatgggcctcctgaggcctcggggctgtccttcattgcccacatggatagacggagctgtggtgcaaataacttttcccgcaacaggtgcaggactgccagggataggagtgcgggccgcgcacggtgccaggattccgccgtggggaagccgctcacattgcagttatcacagacttacgcacttgtttggacagttttttcagaggggatgggaaagggccttgttctatctgaatctgtgtatcatgaccatttctgacaggcagaatgaattgtctggcaaccctgcg

SEQ ID NO: 30417 - DNA, 414 bp, Homo sapiens
caagcactgcttcccaccgggtgatgagccatgcaggcctccaaactgcacgtcatgattcatccctaaagtgagtttggccttgagagtccccagggtcctcccccactgggcaggggtcctcaaagccaaagaagcctggtgacacaggcacccatgggaggtgggcccagaaaggggcttcccatagataggccctgtgagtagggagcttgtacactgggccatgggcagcgccagttcccttgagcagtaaaggcccttttccccctacggtgggacccaggagtctctctgacagcttttctgccaggcacagtggctcatgcctgtaatcccaacactctgggaggcctaggcgggaagatcacttgaggtcaggagttcaagaccagcctggccaacatggtgaaa

SEQ ID NO: 30418 - DNA, 538 bp, Homo sapiens
  misc_feature (1)...(538): n = A,T,C or G
cttggacaacttcaggggggaatccatcgacggtcactgcagcaatggcggctcctgtaccatgaacagcaaaatgatgcctgagtgccagtgcccaccccacatgacagggccccggtgtgaggagcacgtcttcagccagcagcagccaggacatatagcctccatcctaatccctctgctgttgctgctgctgctggttctggtggccggagtggtattctggtataagcggcgagtccaaggggctaagggcttccagcaccaacggatgaccaacggggccatgaacgtggagattggaaaccccacctacaagatgtacgaaggcggagagcctgatgatgtgggaggcctactggacgctgactttgccctggaccctgacaagcccaccaacttcaccaaccccgtgtatgccacactctacatggggggccatggcagtcgccactcccttgccagcacggacgagaagcgagaactcctggngccgngccctgaggacgagataggggaccccttggcatanggcccn

SEQ ID NO: 30419 - DNA, 451 bp, Homo sapiens
  misc_feature (1)...(451): n = A,T,C or G
nttgaatagcactagcccagngnggnggaattctggtggctcatgcctgtaattccagtactttgaggccgaggtgggaggaatgcttgagcccccagtctgggcaatatagtgagaccccatctctgcaaaaaaagaagttccagaggcccagacttgctactggtgcccagggggctgtggggcagcttgggcattgagccctcatgctgtgggatctgatgctgtctctaggtagatagtgttggaattgaattggaggacacccaactggtgtccgctgcagaactgattgcttgcctggtggtggggagaaatccttacatattttttggagtcacagaagtcttctgtgttgattgttgcagtgtgaaagcagaggaaaaacaatggtttgggttttttcaaaacaactttcatgacacatacgagaatgtaaattccagaaggg

SEQ ID NO: 30420 - DNA, 555 bp, Homo sapiens
  misc_feature (1)...(555): n = A,T,C or G
aggcggggnnnnnnnnncaattgacctccttcgngggngaatttttactntgctgggcctagaggagccgctgcccctggcggngatccgctctgccctgtttgagaaccgggccccaccaccccatcagtctacgcagtcccagcccctcgcctccggcagctttctgcaccagttggaccaggtcacgagtcaagtactggccggattgatggaagcgcagaagagcgctgtccccggggacttgctcacgcttcctggtaccacagagcacttgcggtttacccggcccttgaccatggcagaactgagtcgccttcgtcgccagtttatttcgtacactaaaatgcatcccaacaatgagaacttgccgcaactggccaacatgtttcttcagtatttgagccagagcctgcactgaccagaggaggtaggggggaagccatggcttctgatctccactccactttatttctctgggaaaaataggctgcaggtctccagagcatatcgatgcagtactgtacttagagctgtgtgactgattcactcana

SEQ ID NO: 30421 - DNA, 450 bp, Homo sapiens
  misc_feature (1)...(450): n = A,T,C or G
nttcgattgcactacgcagngnggnggaattcgctgacaagcttttaagaagataagactttttgggtagggttgccagatttagcaaataaaataaaaatacagcagacccagttaaatttggatggtagataaacaacgaaaattttttcatatatgtatgtcccatgcaatatttgggacataacgtatactaaagaaatgtttgttgtttattctgccatccaaatctaactaggtgtcctgtgttttatctggcaaccctacccattcctattccttgggcaacaggaatggccccctttaaaagcacctcttctgtcatttctcccatttttgtgcctatcctaaagcagtagagggagatctcaagggaaaagccctcccatagactgtcagttgcctatcaacttgagaaaaaaacaaggccctttcttggcttgcttattt

SEQ ID NO: 30422 - DNA, 559 bp, Homo sapiens
  misc_feature (1)...(559): n = A,T,C or G
ggcgatnnnnnnnnaaattgaactcctcggagggnacnnnnattgagcatcctccagngaggngcaattccctgaagcggcccttcctcagccgngagtcgctgagcggccaggccgtgcgccggcctttggtcgcctccgtgggcctcaatgtccctgcttctgtttgttattcccacacagacatcaaggtgcctgacttctctgaataccgccgccttgaagttttagatagtacgaagtcttcaagagaaagcagcgaggctaggaaaggtttctcctatttggtaactggagtaactactgtgggtgtcgcatatgctgccaagaatgccgtcacccagttcgtttccagcatgagtgcttctgctgatgtgttggccctggcgaaaatcgaaatcaagttatccgatattccagaaggcaagaacatggctttcaaatggagaggcaaacccctgtttgtgcgtcatagaacccagaaggaaattgagcaggaagctgcagttgaattatcacagttgagggacccacagcatgatctaaatcgagtaaagaa

SEQ ID NO: 30423 - DNA, 484 bp, Homo sapiens
gagcatgagatctttgaagtgcggtggaattccaggaggaagcacacaggccccacagagagtggttggcaagagtcactcggggattaggatgccggccaaatcgcggaatttgaggctggaatccaagctcaacaggaaagtagtgaaatacaaatggggaaaacagggctctggagcggggagggagctggtgccggcatttcccaccaacgccggtttaggaagacgggaccgatgccggccgccccctgctggaggggatgtggcatctcacgggctgccagggagcggggttggctactcctgcaaccagcgtgaagagggtctcaggggaggctgtggtgggatcccccacgtgcccttgttcctctcaccgttacctctggatgcctcggggcaaaggccttcttccacctatagacagagtctacgcaggggtcttggaacccgggcacaccagtccccagctaacgaaatcccc

SEQ ID NO: 30424 - DNA, 496 bp, Homo sapiens
  misc_feature (1)...(496): n = A,T,C or G
nttcggatcgctgtncagtgtggnggaattccgagaagccgcagtcccgtggggtctggagacgcagtttcctgttaatgacaataaatccctgctccccctgcctcagacatctacgcagcgaaatcgagcctggccttgagggtccacaccgcgagggaagatgcgtgcgcccattccagagcctaagcctggagacctgattgagatttttcgccctttctacagacactgggccatctatgttggcgatggatatgtggttcatctggcccctccaagtgaggtcgcaggagctggtgcagccagtgtcatgtccgccctgactgacaaggccatcgtgaagaaggaattgctgtatgatgtggccgggagtgacaagtaccaggtcaacaacaaacatgatgacaagtactcgccgctgccctgcagcaaaatcatccancgggcggaggagctggtggggcaggaggtgctctacaagctgaccagtgan

SEQ ID NO: 30425 - DNA, 480 bp, Homo sapiens
  misc_feature (1)...(480): n = A,T,C or G
gggaattgacaccctggnanntccgtgatcctcgcaagngcggnggaantcggagaccagtcgcgacgagttcatcttctactccaagagactgatgcggctgctcatcgagcacgcgctctccttcctgccctttcaggactgcgtcgtacagaccccgcaggggcaggactatgcggatcaccggtgtgtccattctgcgcgccggtgaaaccatggagcccgcgctgcgcgctgtgtgcaaagacgtgcgcatcggcaccatcctcatccagaccaaccagcttaccggggagcccgagctccactacctgaggctgcccaaggacatcagcgatgaccacgtgatcctcatggactgcaccgtgtccacgggcgcggcggccatgatggcagtgcgcgtgctcctggaccacgacgtgcctgaggacaagatctttttgctgtcgctgctcatggcagagatgggcgtgcactcag

SEQ ID NO: 30426 - DNA, 498 bp, Homo sapiens
  misc_feature (1)...(498): n = A,T,C or G
nttcgaatcagcantncgtngtggggaattccgtgaggcggctgcgcaccgcctgcgagagggccaagaggaccctgtcgtccagcacccaggccagcctggagatcgactccctgtttgagggcatcgacttctacacgtccatcaccagggcgaggttcgaggagctgtgctccgacctgttccgaagcaccctggagcccgtggagaaggctctgcgcgacgccaagctggacaaggcccagattcacgacctggtcctggtcgggggctccacccgcatccccaaggtgcagaagctgctgcaggacttcttcaacgggcgcgacctgaacaagagcatcaaccccgacgaggctgtggcctacggggcggcggtgcaggcggccatcctgatgggggacaagtccgagaacgtgcaggacctgctgctgctggacgtggctcccctgtcgctggggctggagacggccggaggcgtgatgactgccctgatca

SEQ ID NO: 30427 - DNA, 517 bp, Homo sapiens
  misc_feature (1)...(517): n = A,T,C or G
tgggcgtggggnaannaaannttcgactcgagctccatcccgagnggngcaattcagaaagtgctgtgtgctggctgtgccccacatactagtgagaggttgcgaaggtgctattctacgttagggaggaagtctcgggccatagccaccaggtgtgttctgcatgaggctggggccagcttctccaggctggtaggccatggccacccaggctgagagctgctgacagctcccggtgggccagcctcaggcatggtccttgcagcttcccttttgcctgcaggttttccagcttgcagctcatctggtgtattggggcaaggccatcatcatctacccgctgtgtgagaacaacgtctacatgctgtctcccaatgccagcgtatgtctgtactccccgctggccgagcagttctcccaccagatcccatctcatgacctgccgtccgttcttgccaagatctccttgccggtctccttgtcagaatttaagaatcccctggcccccgctgtgcag

SEQ ID NO: 30428 - DNA, 501 bp, Homo sapiens
  misc_feature (1)...(501): n = A,T,C or G
agttagtccnggnnnnnagnnaattgaaaccntngaannnattgagtacactaggccagngcggnggaattccactggatgtataacgcgacctcctaccaccacagctactaggacactggcctcctttgcatccatgccagcgccgacccaagacaggttcgagaaatggtagaaatcatcacaaaggagtttattttaatgggcggaaccgtggacacggtggagctggaacgagccaagacgcagctgacatcaatgctcatgatgaacctggaatccaggcctgtgatcttcgaggatgtggggaggcaggtgctggccactcgctccagaaagctgccgcacgagctgtgcacgctcatccgcaacgtgaagccggaagatgtgaagagagtcgcttctaagatgctccgagggaagccggcagtggccgccctgggtgacctgactgacctgcccacgtatgagcacatccagaccgccctgtcgagtaaggac

SEQ ID NO: 30429 - DNA, 500 bp, Homo sapiens
  misc_feature (1)...(500): n = A,T,C or G
aggtggcnanaanattgagatcgattccgtgtggcggaattcggaggaggaagaagaactggaagaggtggaagacctggagtttggcacagcaggaggggaggtagaataatgtgcacctccaccctcaaccctgcctccagctctgcctccccctgagtctcccccaaaggtgcagacagaacccgaacccgaacccgggctgcttttggaagtggaggagccacggacggaggaggagcgtggggctgacacagctcccaccctggcccctgaagcgctcccctcccagggagaggtggagagggaaggggaaagccctgcggcagggccccctccccaggagcttgttgaagaagagccctctgctcccccaaccctgttggaagaggagactgaggatgggagtgacaaggtgcagcccccaccagagacacctgcagaagaagagatggagacagagacagaggccgaagctctccaggaaaaggagcaggatg

SEQ ID NO: 30430 - DNA, 471 bp, Homo sapiens
  misc_feature (1)...(471): n = A,T,C or G
natcgaagcccctattgtagaccactaggccangncgtggaattcgaggcagcagagccgcttaaacccaggaggcagagactgcaatgagctgagatcgtgccattgcactccagcttgggcaacaagagtgaaacttcatctcaaaaaaacagaaacaaacaaaaaggcagctgggttgtcactgatgggcagcatttgagcctgccacactggcctggaagtttcccttccagtctggattttgtctgctccttccttccccctcaccccgttacctcttcacctcccatctcatttcactgtgtagctcagtctctcccacgcacataattggggacagtgggggctctcttaccagcctcctcagcaacgcacgtccatcaggcctggcctcagtggccagccacattgatgtcacactggaattgttaccccagacagggcgaagagataggctatctccccacc

SEQ ID NO: 30431 - DNA, 500 bp, Homo sapiens
  misc_feature (1)...(500): n = A,T,C or G
gggggangaaaaacttgaattcgagtgcatcatccgtgtggtggaattcaataaacgtatctatttcataagctcaatatcaggatcaaatggatattcaatgagataatcctcagaacctggcacatcatagaaattaacaagtattagttatcactatcattcccatcatcgttatgagttgaaatgtgtcccctttaaaatgtcttgcagtcctaacctccccactggtatctgtgaatatgaccttactggaaataggatctttgcagatgatcaagttaaaatagggtctttagtgtgggctctaatccagtgtgactgtatgtatataagaaggggaaatttggacacagcaacagacatgcatagggagagacaatgtgaaggcacaaggtagctaggagaaaggcatggaacagattccctcgcagccctttagaggtgccaacccttgccacaccttgatcttggacttctaggctccagaactatgagaa

SEQ ID NO: 30432 - DNA, 505 bp, Homo sapiens
  misc_feature (1)...(505): n = A,T,C or G
atgcggatannnnnnnacctcgagactcgtattcncgtgtggnggaattcgatggaatgtccatacccttcaccctcatccaagagcagtgtgggctgggatagggaggggacatgggtcataggctcttctaggtagagccagggccccggcgttgtgctttcccacccttctagagtttctggagtccctggagccggacctgcccgccctgagagccatggggctccacctgtgggctgcaggcccaggaacccaccctgctggaattagcgatttgctggctgaagtgtccgctgaagtggatgggccagtgccaggatacctctcttccccccagagcataacagacacgtgcctgtacatcttcacctctggcaccacgggcctccccaaggctgctcggatcagtcatctgaagatcctgcaatgccagggcttctatcagctgtgtggtgtccaccangaagatgtgatctacctcgccctccactcttacacatgt

SEQ ID NO: 30433 - DNA, 411 bp, Homo sapiens
gttttttacaaagattttttgcagtcgagtccatatgtccacccattgatttttaaagcttttgtgatattttagcattttgaaagactttcacagtgagagtagaaggtagatttggaatcatgcattttagcaagtggacttgttgaaacaggaagcaagagccttcagtgtagcccattcttgatccagagctgttgcctgtgacagcggtttctctggatgtcaaaggcagctgcctggtgcccagcttgcttctcgactggtggcccctatgggtgggtgtgcgatggaaatgtgttcctgccggagtctgaggcaccagggtgtgctcaaaggctggccctggtggtggactggcacctgtgcagagtgccgtgtgcttgtggtgcgccatctgaagcaagagtc

SEQ ID NO: 30434 - DNA, 447 bp, Homo sapiens
  misc_feature (1)...(447): n = A,T,C or G
ntcgagattcctagtccagtgggtggaattccatcggcatcaccttctaaacaagtggctgacaaagagcttccatttccccctcttcatgacgatgctgcacctggccgtgatcttcctcttctccgccctgtccagggcgctggttcagtgctccagccacagggcccgtgtggtgctgagctgggccgactacctcagaagagtggctcccacagctctggcgacggcgcttgacgtgggcttgtccaactggagcttcctgtatgtcaccgtctcgctgtacacaatgaccaaatcctcagctgtcctcttcatcttgatcttctctctgatcttcaagctggaggagctgcgcgcggcactggtcctggtggtcctcctcatcgccggnggtctcttcatgttcacctacaagtccacacagttcaacgtggagggcttcgc

SEQ ID NO: 30435 - DNA, 488 bp, Homo sapiens
  misc_feature (1)...(488): n = A,T,C or G
ggcnngnnnnnnnnacctgagttgcctancaagtgncgnggaanncggngccatcaactctccacagctgctcatgctctctggcatcgggaatgctgatgacctcaagaaactgggcatccctgtggtgtgccacctacctggggttggccagaacctgcaagaccacctggagatctacattcagcaggcatgcacccgccctatcaccctccattcagcacagaagcccctgcggaaggtctgcattggtctggagtggctctggaaattcacaggggagggagccactgcccatctggaaacaggtgggttcatccgcagccagcctggggtcccccacccggacatccagttccatttcctgccatcccaagtgattgaccacgggcgggtccccacccagcaggaggcttaccaggtacatgtggggcccatgccgngcacgagtgtgggctggctcanactgagaagtgccatccccaaga

SEQ ID NO: 30436 - DNA, 478 bp, Homo sapiens
  misc_feature (1)...(478): n = A,T,C or G
ggctgagaccctacgcanggccgctgagagcgatgcagatgtcatggggggacctgagcctcacaactcggaggaagccacagacagtgaaaaggagatcaaccggctctccatcctgcccttcccccccagtgccggctccatcctccgccggcagcgtgaggaagaccccgcaccccctaagagatccttcagcagcatgtcagacatcacagggagtgtgacacttaagccctggtcccctggcctctcttcgtcctcatcctctgacagcgtgtggcctttgggaaagccggaaggcctcctggctcggggctgtggcctggacttcctcaacaggtctctggctattcgggtgtctggccggagccccccagggggcccagagccgcaggacaagggaccagatggactgtcgttttatggggacagatggtctggggctgtggtgcgcagggtgctgtctgggcctgggtcn

SEQ ID NO: 30437 - DNA, 487 bp, Homo sapiens
  misc_feature (1)...(487): n = A,T,C or G
gatcgaagccctcgnnannnncnactgagaacactagtcagngtcgnggaattcgaagcctgttacctccagaagcttctgagaagaatgatgtgaaaagacagggagtgggttctaggcaaagaaaacataatgaccattcagaggaatcagtagcacagctcacagataaagtattttattactatctgaagttttcttttgttttcatgcaggacattttaaaaacgtatatggcagcagaaacctgtttctcaatagaaaaaatacattcagaggcatttctgggatagtctatctgtgttagtatttggtgctatctatgtccagccaagttatctaccctcaaattctgactaatcatgtttgtgctttgggtatttaaaattacatacatatatattctttttgccaaaaacaaaagtcttgcttcttgtcaaatgattgctaaagtagatcttacattttttgttattatgtatggatn

SEQ ID NO: 30438 - DNA, 445 bp, Homo sapiens
  misc_feature (1)...(445): n = A,T,C or G
gggaaccaggcttgtggtcctcctgtgtctgggttccagcacagccagtttcaacgacctcttcctgaccttgtatgactgggtttgggggctatcattgtagtgagtggcggccctgggactgatagcaaggacagtggtgagctcagttcactcccactgggcccaacaacactggacacccggccactgcagtcttctgccctgctggacagcagcagcagcagcagcagcagcagcagcagcagcagcaacagtaacagcagcagttcggccggacccaacccttctacctcctttgagcccatcaaggcagaccccacaggtgttttggaactccccaaagagctgtcagaaatctttgatcccacacgaggtaggctgctgcattcctccctgaggctaggggtaagggacacagctcattgngtcctatggctgtttn

SEQ ID NO: 30439 - DNA, 489 bp, Homo sapiens
  misc_feature (1)...(489): n = A,T,C or G
agcngnnnnnnnnaaattgagatgcatatcaattgngcgggaantcgctgtctggagaagtggctttcctcatctaacaccagctactgcgagctgtgccacacttagtttgcagtggagaaacggcctcgacccctcacagagtggctgaaggacccggggccgcggacggagaagcggacactgtgctgcgacatggtgtgtttcctgttcatcacaccgctggccgccatctcaggctggttgtgcctgcgcggggcccaggaccacctccggctccacagccagctggaggccgtgggtctcattgccctcaccatcgccctcttcaccatctatgtcctctggacgctggtctccttccgctaccactgccagctgtactccgagtggagaaagaccaaccagaaagttcgcctgaagatccgggaggcggacagccccgagggcccccagcattctccactggcagctggactcctgaagaag

SEQ ID NO: 30440 - DNA, 471 bp, Homo sapiens
  misc_feature (1)...(471): n = A,T,C or G
aggnagggccnnnnnttctgaaatcttggtatcctacggaagngcggnggaantccgaggctcagcacgcagggggtgtcataaccgaagaggacttcagcaattacagcgcccttgtggagaagcctgtgtgtggcgtgtacagaggccacctggttcttagtcccccacctccgcacacgggccctgccctcatcagtgctctcaacatcctggagggcttcaatctcaccagcctggtatcccgagaacaggctcttcactgggtggcagagaccctgaagattgcattagccctggccagcagactgggagatcccgtctatgattctaccatcactgagagcatggatgacatgctcagcaaggtggaggccgcctacctccggggccatatcaatgactcccaggcagcccctgccccactcctgcctgtctatgaactagacggagctcccacggctgcccagg

SEQ ID NO: 30441 - DNA, 473 bp, Homo sapiens
  misc_feature (1)...(473): n = A,T,C or G
ttttgatagcgtacgctagngcgnggcattccttgcgtccccgcgtgtgtgcgcctaatctcaggtggtccacccgagaccccttgagcaccaaccctagtcccccgcgcggccccttattcgctccgacaagatgaaagaaacaatcatgaaccaggaaaaactcgccaaactgcaggcacaagtgcgcattggtgggaaaggaactgctcgcagaaagaagaaggtggttcatagaacagccacagcagatgacaaaaaacttcagttctccttaaagaagttaggggtaaacaatatctctggtattgaagaggtgaatatgtttacaaaccaaggaacagtgatccactttaacaaccctaaagttcaggcatctctggcagcgaacactttcaccattacaggccatgctgagacgaagcagctgacagaaatgctacccagcatcttaaaccagcttggtgcggatg

SEQ ID NO: 30442 - DNA, 415 bp, Homo sapiens
cccggatcagcggccgctcttttttttctcggggatcgcttttaaacacaactctagcttaatcccatttatcagtaaactcgattttaaggtggccccattccggggggtttctgttgccctttttatacacctccctttgaaatttcaaatgctggggcaggatttcacaaaaaggaaaataagttcggagcacattttccggtcatcaaaacttgaaccaaagcacagcaacagtatgtttccatgaataatgagacaccattgtcttcctctgctggcaagcttatgttctggtattaccctccaaattcaaggtctcagcagtgcatacctaacagtttctgagagcaagtttgaaatgttacatttgaaagagctcaacaaaagattatctgattcagttggctgcagt

SEQ ID NO: 30443 - DNA, 458 bp, Homo sapiens
  misc_feature (1)...(458): n = A,T,C or G
attgaaacctcgagaccctaggcagngnggnggaattcgcttttccagggtcatgccttggcatttgctcactgtacctgataaggaatgtggccttgtagcaaaatttgacttgaattttgacagtctcaattatgaaactctcagcccctggagacaagactatttgtatcaccagtgagagttactagtcattttatatccattaactcacaagggatgtacagtgtattttatagataaaattgaagctcaaaagagtgcagtaacttggccaggtctacatatttaggtaaatggtagcaccaggattcgggcctgctgttttctgattccaaggctagcattccattctgcctctgcattttgtgtaccactggggcaccaactgatgccttctggagtgtttgatatcctgggggccatgtgtctgattttcccaaatgaagaaagaaagg

SEQ ID NO: 30444 - DNA, 451 bp, Homo sapiens
  misc_feature (1)...(451): n = A,T,C or G
actcgagattgagagcactagcccagngnggnggaagtccagcatcggtgaggttggtctctcaagaacccaaagctctggtcagtgaatggaaggagcctcaggccaagaacatcagtgtggcctcctgcaataacagccaggtggtggtggctgtaggcagggccctctactatctgcagatccatcctcaggagctccggcagatcagccacacagagatggaacatgaagtggcttgcttggacatcaccccattaggagacagcaatggactgtcccctctttgtgccattggcctctggacggacatctcggctcgtatcttgaagttgccctcttttgaactactgcacaaggagatgctgggtggagagatcattcctcgctccatcctgatgaccacctttgagagtagccattacctcctttgtgccttgngagatggagc

SEQ ID NO: 30445 - DNA, 458 bp, Homo sapiens
  misc_feature (1)...(458): n = A,T,C or G
natcgagaccagtagcccctnggnggaattcccgcccgagtgggaaccgcgctggaggaaggcgctgcgcggcaaggagaacaaggggtctgtggaaatcatgagaaaggacttgaatgacgcccgggacctgcatggccaggcagagtcagcagctgcagtgtggaagggacacgtgatggaccgtaggaagaaggcactgaccgactacaagaagctgcgggccttctttgtggaggaggaggagcatttcctgcaggaggctgagaaggaggaggggctccctgaggacgagctggctgaccccactgagcggttcaggtcactgctgcaggcggtctcggagctggagaagaagcatcgcaacctgggcctcagcatgctgctgcagtgatggcgccaacccgtggcagtcccagagctggaggcaggaggatggatcctcatctccatgggaa

SEQ ID NO: 30446 - DNA, 535 bp, Homo sapiens
  misc_feature (1)...(535): n = A,T,C or G
atttgatagcantncnnnnnacattgagcatcgtccgngnggngcaattccacggcagcccccgggaggaagcgtccctgctgagtcactccccaggtacctccaatcagagccagccctgttctccaaagccaatccgcctggttcaggacctcccagaggagctggtgcatgcaggctgggagaagtgctggagccggagggagaatcgtccctactacttcaaccgattcaccaaccagtccctgtgggagatgcccgtgctggggcagcacgatgtgatttcggaccctttggggctgaatgcgaccccactgccccaagactcaagcttggtggaaactcccccggctgagaacaagcccagaaagcggcagctctcggaagagcagccaagcggcaatggtgtgaagaagcccaagattgaaatcccagtgacacccacaggccagtcggtgcccagctcccccagtatcccaggaaccccaacgctgaagatgtgggtacgtcccctgaagaataacagcaggcagct

SEQ ID NO: 30447 - DNA, 503 bp, Homo sapiens
  misc_feature (1)...(503): n = A,T,C or G
aggctccccnagcggcccccaaatgagngctncctagntagctaacgcaagngcgcnggaantcgctcaaggaggcttaatccagaggccctgacatggaccgcccccagccatggaaaatcaaacttcatcctaaagtgtgcagcccacgccctgcgcctttacaagctacgccgcctgccatggggggcactctctccaggggctgtggaagacttgcacgctgcccacatccagatttctgcaaagacgagatgggagcacagcaccccagccacatacacgaggaagaagatgcggtcagcagtctcaggccagcttctctgtgacccctttactcctctggagggctctgtggggagagatacagggaaaggagctgttcttcaaggtcccctcaacatgagcggaagagcgaaccccaggggtcatcagcctgtatcgcttcctttcttagattctcagctgatgaaaatttgggtctggcccatttcaggccatcn

SEQ ID NO: 30448 - DNA, 492 bp, Homo sapiens
  misc_feature (1)...(492): n = A,T,C or G
aggcgcgnaggncccccctaataccnattgaggatcgtcgaaannnccgnccctccacccctgcggctaccagcactccctctaagcaggccctccagttcttctgctacatctgcaaggccagctgctccagccagcaggagttccaggaccacatgtcggagcctcagcaccagcagcggctaggggagatccagcacatgagccaagcctgcctcctgtccctgctgcccgtgccccgggacgtcctggagacagaggatgaggagcctccaccaaggcgctggtgcaacacctgccagctctactacatgggggacctgatccaacaccgcaggacacaggaccacaaggtaggagggcctgcacgctgcagaggcacccgcactgccgtctgcaagtggagtccagacaacacagagccccagttggaaagtaaacgttcctctttgcccctgcacacccataacccacaatgcagtttctggaggg

SEQ ID NO: 30449 - DNA, 460 bp, Homo sapiens
  misc_feature (1)...(460): n = A,T,C or G
ntttgagacctctagcacctgtggnggaattcggagaggagggccaagccctgaggcgagcccaccagcgcaatgtcaagcacatgcgccagctactcatggacaggggccttcctgtcatcccctgccccagccacatcatccccatccgggtgagagccccaccatgcccattgccctctccacctatttattctgggagcctcacgctcccaacaaacctacatctgttgctgtcttcaattatttgctttcctgctaaccattccctttattgccagctttgtttccctttttgaaaaattatcagccattctggattaaccagtcttttccttgcatcagccattacctcatgcttattagattatcctaaccctaacaatagcgagtgctcacagcctataattcagagtttttcaaactggatcaagacaattaatgggtcacaaaatcagct

SEQ ID NO: 30450 - DNA, 530 bp, Homo sapiens
  misc_feature (1)...(530): n = A,T,C or G
agctttcnctcgtnngnnnnnnnagggggnnnnnnaattgannnccntatcgaaccactatccgtgtggtggaattccccgctgaatggtctgcactttgcctgtgctccttcttaaggtgtggtgcctgaacaaaacacccaccactcttgacatgcccagagcaggcatcacccagtacacatggctccgtccagatgaaaaccttcccaggagtggctggataaggcccccaaccccaacacttgacaacctgctgtgcttactggctccccatggccctccgatttcagatttctcagatttctggctttgccagaagactctggcatccctggggcaggtgccttgctcacatctgggaccctgcctcctgggctgtgatcaccagtgctcagctctgccaggccaggtacagcacatagtgctcccagggtggcctgacccgggcagagtggagaagggctcttgcctcccctatcctagnttctttcctgtccagcctaggctcacatagcttcttttggctg

SEQ ID NO: 30451 - DNA, 463 bp, Homo sapiens
  misc_feature (1)...(463): n = A,T,C or G
natcgaganccntttgnagngcgctggaattcgaccaggaccctggaggccactacacactgcaggaggtggaggagggcctggcccagcacaagccagtgctgctgttcttaacccacggggagtcgtccaccggcgtgctgcagccccttgatggcttcggggaactctgccacaggtacaagtgcctgctcctggtggattcggtggcatccctgggcgggacccccctttacatggaccggcaaggcatcgacatcctgtactcgggctcccagaaggccctgaacgcccctccagggacctcgctcatctccttcagtgacaaggccaaaaagaagatgtactcccgcaagacgaagcccttctccttctacctggacatcaagtggctggccaacttctggggctgtgacgaccagcccaggatgtaccatcacacaatccccgtcatcagcctgtn

SEQ ID NO: 30452 - DNA, 463 bp, Homo sapiens
  misc_feature (1)...(463): n = A,T,C or G
aatgagcccaattgagacccctcgcagngngcnggaattcgtggggaggggatcagcctcccacctgggtgaagctgggagagggccagactggtccatggccccagcttggatctttgcacacaatttctcccctgagcctcaggctcctttttgtaaattgggtgtagtgtgtcccccttggagagttgccctgagggccgagggacgaggtcagagtggagtgggtggtaacatgagcagcaggggtcacaggagtgggggcggaggccacagccaatgtctcctgagtgcttgggcaggcactgttgaagcctcatgatttatgtccattcttcctccacacggtgtccacacacccatttcaccatgaggaagcaggcacagatgccccccgcctgagctcacacagccagggggaggagggctgggttccaaaacaagtctagatgggctctggggt

SEQ ID NO: 30453 - DNA, 491 bp, Homo sapiens
  misc_feature (1)...(491): n = A,T,C or G
atttgattganncccctnnnnnnnattgagaccactagtcagngtggnggaattcggcgccctgaggggaagagcggcccggcccgagccatgacggacgggatcctagggaaggcagccacaatggagatccctatccacgggaacggcgaagccaggcagcttcctgaagatgatgggctggagcaggacctccagcaggtgatggtgtcaggacccaacctcaatgaaaccagcattgtgtctggtggctatgggggctctggtgatggactcatccccacagggtctggccgccatccatctcacagcaccactccttctggccctggagatgaggtggctcggggcattgctggagaaaagtttgacatcgtcaagaaatggggcatcaacacctataagtgcacaaagcaactgttatcagaacgatttggtcgaggctcacggactgtggacctggagctagagctgcagattgagttgctgcg

SEQ ID NO: 30454 - DNA, 524 bp, Homo sapiens
  misc_feature (1)...(524): n = A,T,C or G
ggttatnnnnaaggagnnnnnnnaggggnnnnnnnaatcgaaccatgttcgaagggcgaattcagtttcagtgttaaacactcttgcacgtgtgacatcattgagtcctaaagaccactctgctcagtgcatgccattgtttccttcagttacagaggagggaaccagagcccagaacatttagcctttgcctaaagtcactgggccaggaagtggtagaggtggggttcagcaggatttgcctgggaaccccaatattgaccacagtgccatgctgccctgcacggctccctggctgtgagttgtcctggcctctggcaccaccggtctgtctgggttcctatgtccctatgtcccacctgcagaatgtgacatgcagctctttgggccctggggtgaaatcgtgagcccctcgctgagtccagccacgagtaatgcagggggctgccggctcttcattaatgtggctccgcacgcacggattgccatccatgccctggccaccaacatgggcgctgggaccg

SEQ ID NO: 30455 - DNA, 533 bp, Homo sapiens
  misc_feature (1)...(533): n = A,T,C or G
cgtatacatcataggtgtnnnnnnnagggggnnnnnnnaattganncccctatcgaaccactatccangnggnggaattcgggcggaggaggaggtggggaagctgccctgctgcggactgcacatctgtggcgacagggagctcagtgggcagcacagctcacgtctgagcgcacgtgcacgtgtctcgctttaggctcctagtgggtgcgcccactgccaactggctcgccaacgcttcagtgatcaatcccggggcgatttacagatgcaggatcggaaagaatcccggccagacgtgcgaacagctccagctgggtagccctaatggagaaccttgtggaaagacttgtttggaagagagagacaatcagtggttgggggtcacactttccagacagccaggagaaaatggatccatcgtggtaggtattggaactggtccacagatccatcgtgaaatcagctatcctgggtgcagctttcacatcatttggtctacttttattttattcagacttgtgggcatagat

SEQ ID NO: 30456 - DNA, 462 bp, Homo sapiens
  misc_feature (1)...(462): n = A,T,C or G
natgaganccnattgaagngcgtggaattcggaacgtctgaggttatcaataagctcctagtccagacgccatgggtcatttcacagaggaggacaaggctactatcacaagcctgtggggcaaggtgaatgtggaatatgctggaggagaaaccctgggaaggctcctggttgtctacccatggacccagaggttctttgacagctttggcaacctgtcctctgcctctgccatcatgggcaaccccaaagtcaaggcacatggcaagaaggtgctgacttccttgggagatgccataaagcacctggatgatctcaagggcacctttgcccagctgagtgaactgcactgtgacaagctgcatgtggatcctgagaacttcaagctcctgggaaatgtgctggtgaccgttttggcaatccatttcggcaaagaattcacccctgaggtgcatgcttacn

SEQ ID NO: 30457 - DNA, 463 bp, Homo sapiens
  misc_feature (1)...(463): n = A,T,C or G
natcgaganccnattgaagccgctggaanncgcgntttcagtgcccacatgttgccaaaccgcgctccagaaagctgcccagtttctgtccctgccgaacgcaggagaatgcagggaaggatgttgtactttttctccagagctgcttcccttgaggggggcccctgcctacaggtcagaaggaagctgaggttccaagtcaccccccaggcgggcctggcctgtgtaacacgcaggcgtgcaaggcagaggagatactgatgcccagggcacagtgccgtgccctggaagaccactccgtgcctcggactctgcagcagcttctgatgccgcggaggtggctgttctgttgcagacgggaaactgaggcttagcggcttgccccaggccaccgagcagctggttggcagagcaggcacacgccaggagagctgcctccctgagcctcatttccccctgtgcg

SEQ ID NO: 30458 - DNA, 452 bp, Homo sapiens
  misc_feature (1)...(452): n = A,T,C or G
tgcnnntnnnnnnnnccaggctgcacgcactcgacgngacnggaatcttacgaggagttgtttctggagcttgatggtcgaggccatctcctgggccgcctggcggccatcgtggctaaacaggtactgctgggccggaaggtggtggtcgtacgctgtgaaggcatcaacatttctggcaatttctacagaaacaagttgaagtacctggctttcctccgcaagcggatgaacaccaacccttcccgaggcccctaccacttccgggcccccagccgcatcttctggcggaccgtgcgaggtatgctgccccacaaaaccaagcgaggccaggccgctctggaccgtctcaaggtgtttgacggcatcccaccgccctacgacaagaaaaagcggatggtggttcctgctgccctcaaggtcgtgcgtctgaagcctacaagaaagtttgc

SEQ ID NO: 30459 - DNA, 422 bp, Homo sapiens
ctaacatgtcatttgaggagctgttggaattgcagagccaagtggggactaagacgtacaaacaattggtagctggaaatagtcctaagaaacaagcttctagaccacctatccaaaatgcatgtgttgcagataagcacaggcctctggaaatgtcagccaagatccgagtaccatttttacgtcaggttgttcccattagtaaaaaggtagcccgggaccctcgctttgatgatctgtcaggggaatataatcctgaggtgtttgacaaaacataccaattcttgaatgacatccgagcgaaagagaaagagcttgtgaaaaaacagttgaagaagcacctttcaggagaggagcatgagaaactgcagcaactgcttcagcgaatggagcagcaagaaatggcacagcaggaacgaaag

SEQ ID NO: 30460 - DNA, 532 bp, Homo sapiens
  misc_feature (1)...(532): n = A,T,C or G
aggcantntaatagggagnnnnnnnnggggnnnnnnnnnaatcgaaccaccgtctcgagtggccgaattccacgaactgaagcactgaggcccggctgcagacctctcccgagaggggaataatccgtgccggccggttccgccatggagccaggtgcaggtcacctcgacggtcaccgcgcggggagcccaagccttcgtcaggctctgtgcgacggaagcgcagtgatgttttccagtaaagaacgcggacgttgcaccgtgatcaattttgtccctttggaggcgccgttacggtccacgccccgctcgcgtcaagtgactgaggcctgtggtggagaaggacgtgccgtgccgctgggttctgagccggagtggtcggtgggtgggatggaggcgaccttggagcagcacttggaagacacaatgaagaatccctccattgttggagtcctgtgcacagattcacaaggacttaatctgggttgccgcgggaccctgtcagatgagcatgctggagtgatatctgttc

SEQ ID NO: 30461 - DNA, 451 bp, Homo sapiens
  misc_feature (1)...(451): n = A,T,C or G
agcggnntnnnnnnncccaggttcanagcataagacgngacangcaatctntacgaccacttctttgtagaattgccaactgctcactggtcaagcccagcattccagcagctctcaggagtaacacagacctgcaccaccaagtccctggcaatggacaaggtggctcacttctcctacccattcacgtttgaagccttcttcctccatgaggatgaatcttctgatgcactcccggagtggcctgtgctctactgtgaggtcctctcgctggacttctggcagaggtaccgtgtggaaggctatggggctgtggtgctgcctgccactccaggctcacacaccctgacagtctgcacgtggagacctgtggagcttggcacggtggctgagctgaggagggttttcattggccgttctctcgaactgggagacctctcctatgtacgga

SEQ ID NO: 30462 - DNA, 451 bp, Homo sapiens
  misc_feature (1)...(451): n = A,T,C or G
gccggctnnnnnnncccagttcagnacaattgccnggcanggagaacaaaggcgagaccccccaccaggttgggcaaacccagggtcccatatccggagacaccttcaaattggccatgtccacagaccccagccaagcccaggtgccagtagggctggaccagtctgaaggggcctcccttcctgctgctgccagccctgaaaggccccccatctgcagccatggcatggaccccaacccactgggctgccccgattgtgcctgcaagacccagggccccagcacggggctggactgaccacagcaggggacctgagccgtcttccccagactccatatgcagctctctcttataccctcgggttcctcccaggagctctggaggtacaggatttccacaggcctctttcctaaatggaaggaattggaactgaaagggaaaggatatgg

SEQ ID NO: 30463 - DNA, 532 bp, Homo sapiens
  misc_feature (1)...(532): n = A,T,C or G
cggaacaccaatcgcacgnannnnnaggggngnnnnngaattganncccctatcgaaccactatccatgtggcggaattcctgatgaggggggcactaatgtctgctgttttgctatttgtttccccatgtcttatgtcttcattactgacttttttattaaacaactattttcttgggtaccattttaagtccctctcccactcattttttaatgtttttttgtgtttacttttgtttttattgtttgccctgatattaaaattaacattttaccttgaaatagttggcttcagattaatatcaacttagtttcaatagcataggaaatttgcttcactatatttccattttctccccgtcctttgtgctattattactataccaattagatctctacacaatataggcatatcaacacattttgtaattatttccttatccagttgtcttttaatatagatctgtgaagaaaagtattacacanatagatctattctggtttttataattatttaattaccttttgtggg

SEQ ID NO: 30464 - DNA, 532 bp, Homo sapiens
  misc_feature (1)...(532): n = A,T,C or G
aggcttatactanagggagannnnnnnggnnnnnnnnnggaatcgaaccacatttcgagtggccgaattcacaagaggtcccatgtggccccagtgagaggcagtggaaaaaccgtgaaggggttcttgggaaagcagggagctttggtggggacccagttctatcagcaaaccttttgagcacctgctgctccatgtactcttgggaaagcaacgattaataagacccagtcctgccctcgaggagccagctcatggtttggtgaggaagcccaggcacacggctaaccctggagtaagccagcctgttatgtgatacagggagggcagagtgctgaaggccgggaaaggaagagcaggagctgggccttgagcagactgtttggtgtggccgatggcccaagagccaaccagaggttctgttgagattttcaacccaggaggtgggcagaggggtggcactgtgggcagaaatggagtcactgtaagggaggagtgggctttanggaagagatggcagggcaggtgggaa

SEQ ID NO: 30465 - DNA, 466 bp, Homo sapiens
  misc_feature (1)...(466): n = A,T,C or G
natggacncccatcgaganccataggccgngngcnggaattccgctattgctacttctctgctcccccacagttcctctggacttctctggaccacagtcctctgccagacccctgccagaccccagtccaccatgatccatctgggtcacatcctcttcctgcttttgctcccagtggctgcagctcagacgactccaggagagagatcatcactccctgccttttaccctggcacttcaggtatcacttccaccccagaagcttggccagaggctcccagaacaccccagtggttctccaggtcaccatcccacctcccgtccccaaatcagaggatccgtgtccttctccgagtcccagaatcagcgacccccagcctgtgttcaggagcaccccgtgtgcccgccgcacagccccgagggtcctgggacaccccagcctctctgcatctgtctcccgtttca

SEQ ID NO: 30466 - DNA, 492 bp, Homo sapiens
  misc_feature (1)...(492): n = A,T,C or G
tgggccaggggnggggnnnnanccttgatttcctatcccagtggngcaattccattaacgacagcctggaccaggcctacgcagagctgaaggaggcgctctctgaggtgggcccatccttgtgcctacctgggcaaggcccaaggggaggcctgggggccaggcctttgttgtccatgaggccactgaggttagatgggacagtcctacccaagcactggcatgagacaccgaggtccacggtggagggagagcaggaagcccagcccttcctggataccagccctcccaactccctttcttcctcactggcaggaaatcaagaaagctcaaaggaccggcgcctgaggcttgctgtctgttctcggcaccccgggcccatacaggaccagggcagcagcattgagccacccccttggcaggcgatacggcagctctgtgcccttggccagcatgtggagtggaggagatgctgcccctgtggttggaacc

SEQ ID NO: 30467 - DNA, 476 bp, Homo sapiens
ggcccggcatcgagatccctagtcatagaggagcaattcgctggctcggctaatgaaactcccgaaataccggacaacgtgggagattggcttcggggcgtctaccgctttgccactgataggaatgacttccggaggtaaccgagcccgaggaacttggtccttttctggcccttaaatccgtatttcccctttcttgcgaggctggcgcctcagggttttttgtttttgttttttaacattaccagcattgaggcgtcttcgtagctctggctgtgcctcactgagatccctggccaggagagttcccgtgtggcaaaagcgatctttctgtcatgtggctgtatctgtaatgtcaccctgatcaagggaagaagtgctagcacgtaaacaggctttttcggccctggactagtgctttagctgggctttgcgctcgatcttacatttcttttatctaggtttttctttttgag

SEQ ID NO: 30468 - DNA, 459 bp, Homo sapiens
  misc_feature (1)...(459): n = A,T,C or G
agcgcctnnnnnnnaacggactgcnancntangacgngncgnggaattccccctccccgccagggaggtttcatgagctcatgtctatgcagcacataagggttcttcagtgaaaagcaggagaagagcccactgcaaggatagctcattaggcacatgaccgatgcagggaaggccatgccggggaagctcttcctgcaggtattttccatctgctgtgccaaggctgagcggcagaaacttgtctcataaattggcactgatggagcatcagctgtggcccacagagagccttgctgagaagggggcaggtaaagcagagattttagcattgccttggcataacaagggcccatcgattccctactaatgagaggcagggagagcatgggcaatggagacccaccaatgatccccaaccccggtgggtactggctgcctgccctgggccaaggaatg

SEQ ID NO: 30469 - DNA, 459 bp, Homo sapiens
  misc_feature (1)...(459): n = A,T,C or G
agccgctttntnnnnccagcttgacanacnagtgacgnggcannttccctncccgccagggaggtttcatgagctcatgtctatgcagcacataagggttcttttgtgaaaagcaggagaagagcccactgcaaggatagctcattaggcacatgaccgatgcagggaaggccatgccggggaagctcttcctgcaggtattttccatctgctgtgccaaggctgagcggcagaaacttgtctcataaattggcactgatggagcatcagctgtggcccacagagagccttgctgagaagggggcaggtaaagcagagattttagcattgccttggcataacaagggcccatcgattccctactaatgagaggcagggagagcatgggcaatggagacccaccaatgatccccaaccccggtgggtactggctgcctgccctgggccagggaatggctc

SEQ ID NO: 30470 - DNA, 456 bp, Homo sapiens
  misc_feature (1)...(456): n = A,T,C or G
agccggcttttnnnnacaacgatcgaccancntcngacanggacttggggacagaagggacggggggcagacaggagcccaggaacttccacacagacagaccggacagcaggaggacctgggggagggaggcggacacatgtgccccacatccagaagcacatccagcccttactgtggtggcaggagggccggggaccaaaggacagtgggagaccccaataccaacccctttgcacctctcccctttcctctgcaggtcccagagcccctgggtgaagacaagaagaaggggaagccagagaaattgaaacggtgcattcgcacagcggcagggagcagctgggaggaccccagcctgctggagtgggatgcagatgacttccggatcttctgtggggatctgggcaatgaggtgaacgatgacatcttggcacgcgccttcangccgcttcc

SEQ ID NO: 30471 - DNA, 468 bp, Homo sapiens
  misc_feature (1)...(468): n = A,T,C or G
cgccctattggccctcgaaattcgaacgattcgaaancnnnaaaacacctgccctctggcctcaccagctgaggacaggtgtgtgctttttgtgtttctggacttttatggacatcgagctgggctgcagatgttgctgttttttaattgaaactttattgcccgctggacatggtggctcatgccccctaatccccacctaaccctaatcctaatcacagcactttgggaggctgtggtgggaggatcacttaagcctatgaggttaagactggagtgctgtacaatcgcaccactgcattccacagcctgggcaacagagggggaccctgtctcaaaaaaaaaagaaactgctgttgccataatagttgtaagaaataatacagagcgatcccttgttccctctgcccaactatttctaacagtgagtctttgcagaacaccacagtcttacacaaggacatggat

SEQ ID NO: 30472 - DNA, 535 bp, Homo sapiens
  misc_feature (1)...(535): n = A,T,C or G
cggnntnnnnnnnaggaggnnnnnnnnggggnnnnnnnnngaattgaaccacagtatcgagtggccgaattcacacctggcatgaagcacgagaacctgctacagttcattgctgccgagaagcgaggctccaacctcgaagtagagctgtggctcatcacggccttccatgacaagggctccctcacggattacctcaaggggaacatcatcacatggaacgaactgtgtcatgtagcaaagacgatgtcacgaggcctctcatacctgcatgaggatgtgccctggtgccgtggcgagggccacaagccgtctattgcccacagggactttaaaagtaagaatgtattgctgaagagcgacctcacagccgtgctggctgactttggcttggctgttcgatttgagccagggaaacctccaggggacacccacggacaggtaggcacgagacggtacatggctcctgaggtgctcgagggagccatcaacttccagagagatgccttcctgcgcattgacatgtatgccatgg

SEQ ID NO: 30473 - DNA, 486 bp, Homo sapiens
  misc_feature (1)...(486): n = A,T,C or G
ttgggagggagggtggggnnnaattgaactcatcgacgtgggcaattccaggcaccaagaaagacctggatgacatcagcaccaaaacaggcatcaccctcaagagctgccggagacagtttgacaactttaaacgggtcttcaaggtggtagaggaaatgcggggctccctggtggacaatattcagcaacacttcctcctctctgaccggttggccagggactatgcagccatcgtcttctttgctaacaaccgctttgagacagggaagaaaaaactgcagtatctgagcttcggtgactttgccttctgcgctgagctcatgatccaaaactggacccttggagccgtcgactcacagatggatgacatggacatggacttagacaaggaatttctccacgacttgaaggagctcaaggtgctagtggctgacaaggaccttctggacctgcacaagagcctggtgtgcactgctctccagg

SEQ ID NO: 30474 - DNA, 486 bp, Homo sapiens
  misc_feature (1)...(486): n = A,T,C or G
tgggaggggggtggggnnnaatcgactctatccacgtggtgcaattctggcgtcctgggaattaccaaggtgggcagccggcgcgtggtgcagtatggtgcggctatcatgctggtcctgggcaccatcggcaagttcacggccctcttcgcctcgctccctgaccccatcctggggggcatgttctgcactctctttggcatgattacagctgtggggctgtccaacctgcaatttgtggacatgaactcctctcgcaacctcttcgtgctgggattttccatgttcttcgggctcacgctgcccaattacctggagtccaaccctggcgccatcaatacaggcattcttgaagtggatcagattctgattgtgctgctgaccacggagatgtttgtgggcgggtgccttgctttcatacttgacaacacagtgccagggagcccagaggagcgtggtctgatacagtggaaagctggggctcat

SEQ ID NO: 30475 - DNA, 488 bp, Homo sapiens
  misc_feature (1)...(488): n = A,T,C or G
aggggggcncaggggnnnattgaaattgatccactatccgcgtggtggaattcctggagaggccgaggctctaggccgcgaggggcgggtgcaatggcggaggaacaggtgaaccgcagcgccggcctggcccccgactgtgaggcctcggcgactgcagaaactacggtttcctcagtggggacctgtgaagccgctgccaagtcaccagagcccaaggactacgacagcacctgcgtgttctgccggatcgcggggcggcaggacccgggcaccgaactcctgcactgcgagaatgaggacctaatttgcttcaaagatatcaaaccagcagcaactcatcattatcttgtggtgccaaagaagcatattggaaactgcagaactctaaggaaagatcaagtagaactggttgagaacatggtaactgttggaaaaaccattcttgaaagaaataatttcactgacttcacgaatgtgaggatggg

SEQ ID NO: 30476 - DNA, 472 bp, Homo sapiens
  misc_feature (1)...(472): n = A,T,C or G
naatgaaagccctngaantangganacgctacgaagagnccnggaannntgcagctcctgaattgtgcttcacattgctggctcttctccttgtggtctcagcttagatttcatttccaaagaaagacttttctgaccaccctatctcatgtggcccccctctacctctatttacagcaccctacttctcactatttatcacaattactttaaaaattacgtgtctatttatttacctgtttattacctatctcctaacaccagaatggaagttcctagttctagcacagcatctagcacagaatgctgtaagtattttaaaaaatattttctagctgaatcaatgaatttaagggaaggaaaggacaggagtaataaaagaagctaattaacaagccaaaaggttgaggtggattgtggtcatgcagtcatttgtaaacttgttaagagtacagcctaacttgtttatttg

SEQ ID NO: 30477 - DNA, 446 bp, Homo sapiens
  misc_feature (1)...(446): n = A,T,C or G
ggggccnnnnnnatttggaatttagcatcgccggcccggaatccatttcgcctttaaagaaaatatatccagaagcagccgctgcctcggagccctggcccgtgggtccccctctcgcctggctggttcggtctaacgccccggagagtcagagctcccaggaccctggggaggaggcggattccgggcctggctgggcttcctcttcccacctgaggactgggtgcacagttgtctttgaggggggacgcttaaggtgctttggggttctcaggccaggatacatgctggcgctgaagtgcaggcagccttgaggtcacctgggatctcggggtagccaggctgctccaagacagtggatatcgaggcagtcgtgaggcccctactccacctgggagcaggggaaggacgtggttgcctggcctgggctgcgcccagcagcttcn

SEQ ID NO: 30478 - DNA, 457 bp, Homo sapiens
  misc_feature (1)...(457): n = A,T,C or G
agcggntnnnnnnaaccgactgcgcgcatgtgacnggacntcgtgcctacccaagtgcctaaggctggtggaaaggcggtcttgatcctcgaacgccatgccctgctgctatgcaagcagactgtgccccaccggccaggcgatcatgactgtgtacagcggacatcccaccttccttccctagaagacacacggactcaccggcaatggctgcaaaagcagctgactgatcatctgcgccaaagctggggcctgcttggggcccccatacaagcccgggacctgggagaactgctgcaggcctggggtgctggggccaagactggtgctcctaagggctcccgcttcacgcactcagagaagttcaccttccatctggagccccaggcccaggccactcaggtgtcagatgtgccagccacctcccggcggcctgaacaggtcacgtgggcagctn

SEQ ID NO: 30479 - DNA, 494 bp, Homo sapiens
  misc_feature (1)...(494): n = A,T,C or G
atttgcctcgcgcaccatccgngnggnggaattccggngaggtggtgaccctccgcgtccttgagagttctctcaactgcagtgcgggggacatgttgctgctttggggccggctcacctggaggaagatgtgcaggaagctgttggacatgactttcagctccaagaccaacacgctggtggtgaggcagcgctgcgggcggccaggaggtggggtgctgctgcggtatgggagccagcttgctcctgaaaccttctacagagaatgtgacatgcagctctttgggccctggggtgaaatcgtgagcccctcgctgagtccagccacgagtaatgcagggggctgccggctcttcattaatgtggctccgcacgcacggattgccatccatgccctggccaccaacatgggcgctgggaccgagggagccaatgccagctacatcttgatccgggacacccacagcttgaggaccacagcgttccatgggcag

SEQ ID NO: 30480 - DNA, 467 bp, Homo sapiens
  misc_feature (1)...(467): n = A,T,C or G
aggacgggggnnnnnttaccagacatcgtnacggccgnannnncncngnnnagnannttnttnttcgctccctagcttagaagagtatgagcccagaggacctggtcggcccttgtaccaaagaagaatctcatctagctcaggtcaaccttgttctgaagaagtaagcactcctcaagacagtctggctcagtgtaaagagcttcaggaccacagtaaccaatcttctttcaacttttcatccccggagtcctgggtaaacaccacctcatctactccttatcagaacattccgtgcaatggatccagcaggacagctcagcccagagagttgatagcgccacccaagactgtcaaaccccctgaggatcaactgaagtcggagaacctcgaggtgtccagttccttcaactacagtgtgctgcagcatcttggccagtttccaccccttatgcctaacaagcaga

SEQ ID NO: 30481 - DNA, 484 bp, Homo sapiens
  misc_feature (1)...(484): n = A,T,C or G
gaaaattgattccatanccagggttgagaacctatccaggggggaataccgctcgggacggttcgagatactttccgtgggtctctttgtcctctttgctgagtgggatcactgtcgatgttaaaaatctgccagccggtcagctttgtccccttgtcctagtcagtgtcctcttggttccctgcggcctctggaggcccctcctgacattcagcagagccagacgcccagcctggggtccccaccctggcccttgcctacctcccaaggcccagcttactggctggaataaccgtgtccctctgtggttcctctgtgcaccccacgtgtgcaccccagcctgtgggcccagctcagttccacacagaccagtgattccacggatgccgccgctgccaaaacccagttcctccagaacatgcagacagcttcaggcgggccccagcccaggctcattgctgtggaggtggaggcggaggcggcn

SEQ ID NO: 30482 - DNA, 548 bp, Homo sapiens
  misc_feature (1)...(548): n = A,T,C or G
gtggggggnnnncccttggacccacttcatngggggaattcgatagaccaccccagcctggtgcaggagctgaaagcagtgctgaggaccccaccaggtgccctggtgctggcagttgggggtgggggtctcctggccggggtggtggctggcctgctggaggtgggctggcagcatgtacccatcattgccatggagacccatggggcacactgcttcaatgcggccatcacagccggcaagctggtcacacttccagacatcaccagtgtggccaagagcctgggtgccaagacggtggccgctcgggccctggagtgcatgcaggtgtgcaagattcactctgaagtggtggaggacaccgaggctgtgagcgctgtgcagcagctcctggatgatgagcgtatgctggtggagcctgcctgtggngcagccttagcagccatctactcaggcctcctgcggaggctccaggccgagggctgcctgccccttccttgacttcagtgtgggatcgngtgtgagggcacacatcacagccgagagct

SEQ ID NO: 30483 - DNA, 500 bp, Homo sapiens
  misc_feature (1)...(500): n = A,T,C or G
aggccttccncncaaggaaatcgatagcatagccangngcnggaattcgggcagggtcgatgaatggggcttggatgaagggctggggccccaggtgggaactacatggccaggctcattctgcttccagtgagaacaaaggtggcggagggagccgtggactggtgccaaatgagcagcccaagcaggacactggggccccctgtgagtggccagcagcccccacctccctccctgcctcttgcctctcgtgtgtggctctgccacctgcacaccgtcacctcagtctggtcgggagtggaatggacaccgtcacctcagtctggtcgggagtggaatggacaccatcacctcagtctggtcgggagtggaatgggacacgggttgtaggaacttgctgggcttcacaggggccactgtgtggccctttggggaccagatgcccagagccagtctaaatgaataaacatgctaaaacgcttccccaccaaaaaaaaaan

SEQ ID NO: 30484 - DNA, 501 bp, Homo sapiens
  misc_feature (1)...(501): n = A,T,C or G
nccagagcggcncncnaatgaaatgatgtgcgtgtgcaggaatccaactggtacttttatttccgtaacatggatggggtttgaattgtgactgttccttccaactgtgtagcattaagctacttaactcttgatcttctttttgctgatataggacatgtacatataatacctcatgggttgttaataagggttaatgaaatgtgggtaaaattctgggcatatagtaggtactcaactctatacaggtcagtttcttttagggatctagtagttaagagtcagggcccaggttatttaaccttagaagttgtatcacaatatgaatcaaaaattggcctcccaagactttttttttaaattaaaaaaaaggaaatcatgttttgtgaaaattataggcttttttgacttgtataatttaaaaatactgcattttggcacaacctttgcagcttttgctgctagtttgtaattccctacaggtgaattgaaaacattagt

SEQ ID NO: 30485 - DNA, 461 bp, Homo sapiens
  misc_feature (1)...(461): n = A,T,C or G
ncttgaaaccttggagatcctcggccgngcggnggaattcctcgggaggctgaggcaggagaatggtgtgaacccgggaagcagagcttgcagtgagccgagattgcaccactgcactccagcctgggcgacagagcgagactccgtctcaaaaaaaaaaaaaaaaaaaaagggggctaggtcctgggactgggaaatcgatttctttattggatttacgggtggggaaaagctttaaagcttatacaacttggcaaaggagggtcacacagttaaaattggtagagcccaggcctaactccaaagttctgggctagttaccttacaaactttgtctttaatcttccccaatcccaaaaggggttttattacattttgcanttgaaaaggttgaggctgggggtgttaaataaaacacacagggttacacagttatgaagtatccaagccaagatgtgttg

SEQ ID NO: 30486 - DNA, 221 bp, Homo sapiens
  misc_feature (1)...(221): n = A,T,C or G
ctggcgcctccctggacaagttcctggcttctgtgagcaccgtgctgacctccaaataccgttaagctggagcctcggtggccatgcttcttgccccttgggcctccccccagcccctcctccccttcctgcacccgtacccccgtggtctttgaataaagtctgagtgggcggcgnnnnanncannnncnnnnnnnctnaacaaanaaaaaaaacaaatc

SEQ ID NO: 30487 - DNA, 486 bp, Homo sapiens
  misc_feature (1)...(486): n = A,T,C or G
agcgcggnnnnnntttgaacctagctacgtccgcgagggcaattccgcgggctgacgcgccactatgtagcgggtttcgggcgggccacgcgtgcgggacaggaacccaaccccagccgaccttgagctccaggagttcgtctcttacgtctgcggaagtgcagctgcctcagtttcttagcgcaggttgacaactacaggcacaagccattgaagctggaatgtcctgttgctggtatttcaattgacttaagccaactatcccttcagttacaataggaaagtgcctctaataaggccaaatatgcgtactaacttgtagcaaccacgtgtccgtgcagtgccacaggagctagagcagtgacaatgctggtggcaacagggcagtgtagcacgtgcttcatgttcaccttttcaaccttttcatttaattgtcacaactcggaggtggattctgttagggacaggctgccccaggaccactcn

SEQ ID NO: 30488 - DNA, 504 bp, Homo sapiens
  misc_feature (1)...(504): n = A,T,C or G
gagcggccnncnnncaatagaaactganatgcgtgtgcgaggaaccctgtgttggagctctgcttgttccctgatgtgtctcgagcccattggtagggtcatacaaagcccacggttacaagcagtggtaggattgcagccgtgggcctgctggacacacacatacaccaaagatgtatttggatctgggcaccccctcccaggatccctgtactcacgtgccagtctcctgactagagcactttactctgtttcctcagccctgcagcccctgggagcacacactgggtgcagccctgggccaggcacgggaggccctgccctgtgctgcccaggggctgtgtgcaccacatgagcacatttccctctggcctggcggcctccaggctggctgtggaaacagttcctgaggaaattagagattctatgaattgtaggagtattaaagaccaggctgttggcaccagaacttaaagcgatgactggatgtctctgtactgtatg

SEQ ID NO: 30489 - DNA, 499 bp, Homo sapiens
  misc_feature (1)...(499): n = A,T,C or G
ttggagcnagggaaggggnnnccttgaaactcgatccacagtggngcaattcccagccgcagttctgggggcccgcccagatcaaggctgtgctgggagctgtgccccgtggccgcctcctggttctggacctgtttgctgagagccagcctgtgtatacccgcactgcctccttccagggccagcccttcatctggtgcatgctgcacaactttgggggaaaccatggtctttttggagccctagaggctgtgaacggaggcccagaagctgcccgcctcttccccaactccaccatggtaggcacgggcatggcccccgagggcatcagccagaacgaagtggtctattccctcatggctgagctgggctggcgaaaggacccagtgccagatttggcagcctgggtgaccagctttgccgcccggcggtatggggtctcccacccggacgcaggggcagcgtggaggctactgctccggagtgtgtacaactgctc

SEQ ID NO: 30490 - DNA, 504 bp, Homo sapiens
  misc_feature (1)...(504): n = A,T,C or G
ttggagggaggccaaggggnnnnccttgaaatcgatccactatcgcagagaggncgaattccctgagggcgcggcggctcacgcacaggacgtcatctcggacctgctgtgcaaccgcatcgatatctcccagctggtcatcaccaaggagctgacccgcgcggcctccgactatgccggcaagcaggcccacgtggagctggccgagaggatgaggaagcgggaccccgggagtgcgcccagcctgggcgaccgcgtcccctacgtgatcatcagtgccgccaagggtgtggccgcctacatgaagtcggaggacccgctgttcgtgctggagcacagcctgcccattgacacgcagtactacctggagcagcagctggccaagcccctcctgcgcatcttcgagcccatcctgggcgagggccgtgccgaggctgtgctactgcggggggaccacacgcgctgcaagacggtgctcacgggcaaggtgggcggcctcctggc

SEQ ID NO: 30491 - DNA, 506 bp, Homo sapiens
  misc_feature (1)...(506): n = A,T,C or G
agaggctcncnnnnccattgaaattcatgtgcagtgtgcaggaattcggcctcctgctgctcggggaaagtcgccacactgccccctgcaggagcccactgtgatgcttgtggtgggatgagatcagcgtgggtggaacaaggccctggaaggacccatgccatcatcatcgacagcaaagctactctgcaaacagacagatgcttccgcgaattggtagaaaattctgcagccggaatgctctaggatcctgaggccctaagcccggcccggggctcccgaggccctaagcccggcccgggactctggaagctgctctggcttattgggaatggaagttggcaggactcctcttcctgggaagaagcagagggtggggatgagaagacaggccaggagcccacccagacccacaggaggaaactaggggagttatgcagagtcctggtggagcgccagcttcccttcctgccaatgggaaatgcaggcgcccacctcgcggaccc

SEQ ID NO: 30492 - DNA, 473 bp, Homo sapiens
  misc_feature (1)...(473): n = A,T,C or G
nttcgagatccctagtcatcgagatccatagtcagcgtggtggaattcacgatggtgtccccgcgggatcaaacttcagcgtcacagctgaggactggcttcgaggtccctgatgggagagcatgaacaggtggtatgtgaagcccttggagaccagctcttccaaagtcaaagccaagaccattgtgatgattcccgactcccagaagctcctgcgatgtgaacttgagtcactcaagagccagttacaggcccagaccaaggctttcgagttcctgaaccactcagtgaccatgttggagaaggagagctgcttgcagcaaatcaagattcagcagcttgaagaggtgctgagccccacaggccgccagggagagaaggaggagcacaagtggggcatggagcatggccggcaggagctgtatgggccctgacccaaggccttcaggggctggagaagaccctgcgtgaca

SEQ ID NO: 30493 - DNA, 492 bp, Homo sapiens
  misc_feature (1)...(492): n = A,T,C or G
gagcgcctgnnnnnnnacttgaaacctagcagctatcgagcgaggnccaattnccacctgacccagaccgcagagccaggccaggaggaagaggaggaagaataaaaaagccaaccacatcgggactcaaaggaagcccaggatcctcgccggcctccaccgcatgctgccctgaccctgccccacttcctaactttgctggcctcagtttccgtcaaaggaggcagccacttcctgcccacatggtctgtccagtgaggagatcggcggctgtctcgggacctctaggtttccctttagcaatgatgttctatttacatgacctcagcaggcagctagatgtgtcccactagagaggacctgaggatctggggcctgatgggctccagggtacccgctgcccagtgcttggtgtgctccttgagaagtgggcaccagcccctgtcggttacatgacaccaaggcctgacttgacctcgacagatttacctn

SEQ ID NO: 30494 - DNA, 499 bp, Homo sapiens
  misc_feature (1)...(499): n = A,T,C or G
ntggtgcaggggaggggnnncatcgaactcgatccagcgtggtgcaattcgtggagaccaaagggtcagcaggaaaaaggaacggccgagtgtccatcagggacagtcctgcaaacctcagcttcacagtgaccctggagaatctcacagaggaggatgcaggcacctactggtgtggggtggatacaccgtggctccaagactttcatgatcccgttgtcgaggttgaggtgtccgtgttcccggcatcaacgtcaatgacacctgcaagtatcactgcggccaagacctcaacaatcacaactgcatttccacctgtatcatccactaccctgtttgcagtgggtgccacccacagtgccagcatccaggaggaaactgaggaggtggtgaactcacagctcccgctgctcctctccctgctggcattgttgctgcttctgttggtgggggcctccctgctagcctggaggatgtttcagaaatggatcacaggcct

SEQ ID NO: 30495 - DNA, 488 bp, Homo sapiens
  misc_feature (1)...(488): n = A,T,C or G
ggggtctaaggggnnnnnttcgagacccatattgagtgccgtggaattccccggtagaacagccgaacgaactgacaggagcggggtaaactcactggtcagacgcctgagggacttctaggaaccagccagcacggggtggctcctctgccctgactaacatgaccctcgcaggcgacagtcccaccggcccttgctaataaaataaggagacaggcatcctccggcgaacgaggtgagaatgtaattcggatgatttgactgcaagcaacagaaaaatcaaacaaaaatggcctaagccaagaagagaaatgattatttcacattccaagaagtttgggagtcgagtggttaaacggctaattaatctagagctcaacagtatcacccaggacccattttcactatggtggctaaagctctngcaccctcangcttgcaccatggcagcagcagtgacagtaaagacacccttacaccacaatgcg

SEQ ID NO: 30496 - DNA, 479 bp, Homo sapiens
  misc_feature (1)...(479): n = A,T,C or G
ggagtggcnnnnnnacctgagatcatatgcatgngcgggaacnctaatttattttccttcttgactggtagtctgcccccacctccattgtcctcaccggaaaggtcttgtctctcttttgccctcctctgtccccaaaactgggctgggtttatggtgggcgctccacaaacatctttgtgcgaagggacttcttttatccctcgtctttgtctctccctgtgttggagcctgcgtgtgtgcacgatgctcacatgtgcatctgtgtctggcatctcttgccaggtccttgtgtttctgtgtgtcttggtctctgtatgtgcctgtccctttctcacttgctgtctttcctcatagtccctgcctgcccacactgtctgggcctttgcccttctgctctggccccaccctaccttagcatctccaccctgcaccctgtggccccagataaggggctgcccaggccctcttctggagga

SEQ ID NO: 30497 - DNA, 236 bp, Homo sapiens
attggaaaagggaaaaaaaaccaaaattttaaggggaaacgttggctgctttggcctaaattaaaaaaccacagccggtttgttatttttttttggaaaaaaaaaaggaaaaagtttttttcattctttcaaaaggaaggggtccccctttataaaaacaaatgggcgggaccaacctaggaagagaagccaaaattaaggggcaaaggggaaaaatatttttcaaaaataaaatg

SEQ ID NO: 30498 - DNA, 495 bp, Homo sapiens
  misc_feature (1)...(495): n = A,T,C or G
agcagcncggggnnnnaatcgaactcgatcacagtggngcaantcgtcctgggtgacaaagtcgcaaggttgtgtctcttacctgcccacaggtgcacgtcgtcagccccaccgcctcactgcagcccccaaggttaccgccagccgccgaggggtgggaacggcagggtgatgatatcaacagccaagaaccccctgggcttgtccactgctcaggccgtcccagcccccggggaagcaggtccaccactaggcccattcgacagatagcagcacaatcaccgtcaccacgactggagaatgacatgtcccagcacctagtgccaggccctcttccaagggcttgcatttgcttatccatttaacccccagcagccccctgaagggggtactgttatgatctcctcagtttccaaagaggaaactgaggcccagaagccttgcccaaggcccacagctgggaagtggcagaattgaggtttgagccccagcctc

SEQ ID NO: 30499 - DNA, 463 bp, Homo sapiens
  misc_feature (1)...(463): n = A,T,C or G
tgggtgtggcnngnnnannttttgatcgccaccatccgngnggnggaattccttaggcaaccccctgaggaggacttaaggtggctcccagaggaagatttcaggcggccacctgaggaggactggagacggcccccagaggaggactttaggcggcctcttcagggagaatggaggcgaccacccgaggatgacttcaggcggcccccagaggaggatttcaggcattcccctgaggaggaanttaggcagtcaccccaggagcatttccggaggccacctcaggagcatttccgtcggccacccccagagcatttccggagaccacctccagagcattttaggcggcctcccccagagcacttccggcggccacccccagagcacttcaggcggccacccccagagcatttcaggcgcccgcccccggagcacttccggagaccgccccaggagcatttca

SEQ ID NO: 30500 - DNA, 486 bp, Homo sapiens
  misc_feature (1)...(486): n = A,T,C or G
aggggcnagggnnnncctgagaccatattgagtgccgtggaattcccacccaggcgcatggctccatgaagcaagaggaggaggcagagcgcgagagatcccgtccgccccagccgcgtctgggccaggagaaaagcaaaaccatattcctgctgctgtcagttttgatgcactgagaaaacttcagagacctaagctttttccagagaagagaagctttactggtgttccagccctaaggctcatataacattaacagacaagacacttttcagaaagacaggcaacgtgttggaccttccggagcttctcagaagacagagggttttcttttgagttgttgagacagagacttgctctgttacccaggctggagtacagtggtgcaatcatggctcactgcagcctccacctcctgggctcaaacagtcctcccacttcagcctcctgagtagctgggaccacagtcatgcaccaccacacatg

SEQ ID NO: 30501 - DNA, 230 bp, Homo sapiens
  misc_feature (1)...(230): n = A,T,C or G
atgtgtgngctcatctgcttcgacattagccgaccagaaacactggacagtgttctcaagaagtggcaaggagagactcacgagctctgccccaatgccaaggttgtgctggttggctgtaaactggacatgcggactgacctggccacactgagggagctgtccaagcagaggcttatccctgttacacatgagcagggcactgtgctggtcaagcacgtggtggctgn

SEQ ID NO: 30502 - DNA, 495 bp, Homo sapiens
  misc_feature (1)...(495): n = A,T,C or G
agggccggccnnttttgaatcggtgagctagcgcagngngcnggaanncggagagtcgcttgaaaccagaaagtggaggttgcagtgagccaagattgtgcctttgcatccagcctgggagcgaaactccgtctcagaaaatgtaaaagaacggaggccggggagagaaatgaaggacctcccagctctaggtctgtcagagagagaaggggtacctgcttgtcctccacaaagaagagcatcactataactatactctgacccctcctaaccccggttgccctggcacactcggagacctgggaagtcacaagtgggccgtggaaggctcatcatatgcctctccttgtaagcaggcagccctgaagcatcttgctacgaacaaggtccccaacatggcggtgatgatcaagtccctgactcggagcacaatggacgccagcgtggctttcaaggaccccacggacaggaaaactgaggcagcgagcaccccac

SEQ ID NO: 30503 - DNA, 490 bp, Homo sapiens
  misc_feature (1)...(490): n = A,T,C or G
tggtacnnaggggnnnnncctggaaaccctatcgagaccctaggcagngncgggaattccgggctgtctccctccaaaaggactcaccagcgctctaagtcagatgccactgccagcataagtctcagcagcaacctgaaacgaacagccagcaaccctaaagtggagaatgaggatgaggagctctcctccagcaccgagagtattgataattcattcagttcccctgttcgactggctcctgagagagaattcatcaagtccctgatggcgatcggcaagcggctggccacgctccccaccaaagagcagaaaacacagaggctgatctcagagctctccctgctcaaccataagctccctgcccgagtctggctgcccactgctggctttgaccaccacgtggtccgtgtaccccacacacaggctgttgtcctcaactccaaggacaaggctccctacctgatttatgtggaagtccttgaatgtg

SEQ ID NO: 30504 - DNA, 489 bp, Homo sapiens
  misc_feature (1)...(489): n = A,T,C or G
cggtgcnnagnngnnnnaattgagaccatattgagtgccgtggaattcgctcgagccgggcacagactcagagagaacccaccatggtgctgtctcctgccgacaagaccaacgtcaaggccgcctggggtaaggtcggcgcgcacgctggcgagtatggtgcggaggccctggagaggatgttcctgcccttccccaccaccaagacctacttcccgcacttcgacctgagccacggctctgcccaggttaagggccacggcaagaaggtggccgacgcgctgaccaacgccgtggcgcacgtggacgacatgcccaacgcgctgtccgccctgagcgacctgcacgcgcacaagcttcgggtggacccggtcaacttcaagctcctaagccactgcctgctggtgaccctggccgcccacctccccgccgagttcacccctgcggtgcacgcctccctggacaagttcctggcttctgtgagcaccg

SEQ ID NO: 30505 - DNA, 485 bp, Homo sapiens
  misc_feature (1)...(485): n = A,T,C or G
aggggcnnggggnnnnnaactggaccatatcgagtgtcgtggaattccacagactcagagagaacccaccatggtgctgtctcctgccgacaagaccaacgtcaaggccgcctggggtaaggtcggcgcgcacgctggcgagtatggtgcggaggccctggagaggatgttcctgtccttccccaccaccaagacctacttcccgcacttcgacctgagccacggctctgcccaggttaagggccacggcaagaaggtggccgacgcgctgaccaacgccgtggcgcacgtggacgacatgcccaacgcgctgtccgccctgagcgacctgcacgcgcacaagcttcgggtggacccggtcaacttcaagctcctaagccactgcctgctggtgaccctggccgcccacctccccgccgagttcacccctgcggtgcacgcctccctggacaagttcctggcttctgtgagcaccgtgctgaccc

SEQ ID NO: 30506 - DNA, 488 bp, Homo sapiens
  misc_feature (1)...(488): n = A,T,C or G
tgggctnnaggggggcngatcgannncctatcgtagaccctagtccatgtggtggaattcgaggacatggggacacagagggacgggtgagactgggtgaggtgccagaatccaaccctcccaggacagtcaccagaaaggagacagtctcttagggcagagatgtgtctgtccctggagccccgtcacctctggggcccagtgtctctctgttcacggatcggcctcctgccttcctcaaagggcatgttagactcaggaaatgaccagaggggagtgaatgaggggtgcagagaactccatggctaccaggtgaagtttggggtcatcacaggctgctggggtgggcctgggggctgctgagtctcatagtctgtgggagcagccccaggaacagctgaggtgaagggttctgtggtcgggcttgtggagacaggaaacatctcacagccttagaggagccctgaggcttgtctaggtggagccca

SEQ ID NO: 30507 - DNA, 499 bp, Homo sapiens
  misc_feature (1)...(499): n = A,T,C or G
ggagtgccnnnnaagcggcccctgaaacccttaatgagaccctcgcagagtcgggaattccgcaccagctccaagggctccgaccaggccatcatcacgctccgcgtgcgcagccacctggccgccctctggcccttcctgggcatcgtggctgaggtgctggtgctggtcaccatcatcttcatctacgagaagcgccggaagcccgaggacgtcctggatgatgacgacgccggctctgcacccctgaagagcagcgggcagcaccagaatgacaaaggcaagaacgtccgccagaggaactcttcctgaggcaggtggcccgaggacgctccctgctccgcgtctgcgccgccgccggagtccactcccagtgcttgcaagattccaagttctcacctcttaaagaaaacccaccccgtagattcccatcatacacttccttcttttttaaaaaagttgggttttctccattcaggattctgttccttaagattnt

SEQ ID NO: 30508 - DNA, 489 bp, Homo sapiens
  misc_feature (1)...(489): n = A,T,C or G
agccgccccatagaataccntggctagatagccgtcagaaccnngcagagcgcgagctcaatcaggccggccaggagaccctcgtgacgggctggggctaccacagcagccgatagaaggaggccaagagaaaccgcaccttcgtcctcaacttcatcaagattcccgtggtcccgcacaatgagtgcagcgaggtcatgagcaacatggtgtctgagaacatgctgtgtgcgggcatcctcggggaccggcaggatgcctgcgagggcgacagtggggggcccatggtcgcctccttccacggcacctggttcctggtgggcctggtgagctggggtgagggctgtgggctccttcacaactacggcgtttacaccaaagtcagccgctacctcgactggatccatgggcacatcagagacaaggaagccccccagaagagctgggcaccttagcgaccctccctgcagggctgggcttttgcatgga

SEQ ID NO: 30509 - DNA, 495 bp, Homo sapiens
  misc_feature (1)...(495): n = A,T,C or G
tggtccnnaggggnnnnnaattgannnccntatcgtagtncctagtcagtgtggtggaattctatggaccatcatttccggaagccagcaaatgatataacgtctcagctggagatcaattttggagaccttggccgcccaggacgtggcggcaggggaggacgaggtggacgtgggcgtggtgggcgcccaaaccgtggcagcaggaccgacaagtcaagtgcttctgctcctgatgtggatgacccagaggcattcccagctctggcttaactggatgccataagacaaccctggttcctttgtgaacccttctgttcaaagcttttgcatgcttaaggattccaaacgactaagaaattaaaaaaaaaaagactgtcattcataccattcacacctaaagactgaattttatctgttttaaaaatgaacttctcccgctacacagaagtaacaaatatggtagtcagttttgtatttagaaatgtattggtg

SEQ ID NO: 30510 - DNA, 490 bp, Homo sapiens
  misc_feature (1)...(490): n = A,T,C or G
agccgcccatagaaacccttaactgataccctacgcagagncgnggaattcgctgcttggccttcccagcatgaagggagaggacatggggcttctcttcctctgctctgagtgggaaaggagctctgagggctggccccgcacagaggagggggcaatggagactcattaactcactgctgtacctcctgcaggtcactcgccgctcactggcttttttttctctttctcgcaggtgtctcctgcacctgcgctggttcctgcaagtgcaaagagtgcaaatgcacctcctgcaagaagagtgagtgtgaggccatctccatggtctggggctgtggctaaagttgggatggaacccaaggctggccctgagtgcatgcttctggggaactggccttcctttgtccccgtaggttgtcactgcctttctagtcttctgccctgtgcagggcgcctgggcagctttctcataggaagacccaccccagaa

SEQ ID NO: 30511 - DNA, 477 bp, Homo sapiens
  misc_feature (1)...(477): n = A,T,C or G
taggatatcctcgcangctntgagatcctacgcacngccanngananaannctaaggtgtctgagagcaggtacagaatacgaacttcagacgctacggttatttgcaaagctttgtaaaagccacaaggcctgagctgaacccctcctttttgaacttactgtgacaagcacaggaacggtcagaaactgggctcatcacaccaaggcaaagcaacgggcgagtcttcctccttgtcctagttactgcctatggaggcagtgtttagatcaagaaggcctctcttgctcccaagggccctcaccagaggccagggctgccagtcactggtctggggggtggaggcctgagctgagggcagggtgcctgacctgtgtgccggctgctcactgctgtgaccagcagccgagcccttgggcctagcccttgctgcgcagaacagcttgctggcagctggcatcgggtcgctttatctgg

SEQ ID NO: 30512 - DNA, 494 bp, Homo sapiens
  misc_feature (1)...(494): n = A,T,C or G
ccattgatagccnctcgaannnncncnnactgatgaccctaggacangccgnggaattcgctgggaggagtgggaaggattcggaaaagggcctgggtaccggctccactggtggctcagcgctggggtgctgagacatcagagccaacactcatcccttctctggggcaggagatccagtgaacctgctccggtgccaggaaggtgaggcagcccttgcaggagccaggaacttgggatcacatggtgttgggtgttggcagacccccaagtgtggccaagatcctccccacagcctcctcagaacccttcttcagggacctgaaggagccaagagggtccctagggtcccacacttgttccagtgcctgggggtgggggtcagggaataacctgggcaccaccccagtccatctcccctttcccaggccccagaaactgccgggagctgttgagccagggcgccaccttgagcggctggtaccatctgtgcn

SEQ ID NO: 30513 - DNA, 491 bp, Homo sapiens
  misc_feature (1)...(491): n = A,T,C or G
agaccgccattagaaaaccnnaaatgagatcctacgcagagncgnggaattcctgtcgcccaaggctggagtgcagaggtgtgatctcggcttgctgcaacctcacctctatggttcaagcgattctcctgcctcagcctcccgagtagctgggattacaggcatccaccaccaagcgagccatgtcctccaaccgatgagcaattggttgcagggttttcagatgttattctggcaacaattttggcaaccaagtctgaaatgtgtggccaaaaatttgaactgaagattgataatgtgcgatttgttgggcacccaacactgctacagcatgctctggggcagatctccaaaacagatccttccccgaagagggaagcacctactatgattctttttaatgtggtgtttgcactgagggccaacgcagacccgtcagtgataaactgtctgcataacctgtcccgtcgtatcgccaccgtgctgcagca

SEQ ID NO: 30514 - DNA, 494 bp, Homo sapiens
  misc_feature (1)...(494): n = A,T,C or G
tggggaggggggcncaggggnnnaattgaaatagattcactatccgcgnggncgaattccggaagagaaaggtgaaagtagctgggggcttaggctacacctggagcccagaagtaagggggagtaggctctagggggaggagcgttggccttggggttaaacgaactggatgatggccgccagctactaacagacctcaacttgcttacccctggaatgtggtgatggatggttccttgcagggcatttagggtggaaggcagtgatgtggatgtacctcgcagagcggatgttccactgtgtagcctggcttctaccctctacaagcttaagagggaaaacttagggaactatgacctaagcagtcaagcaagaaaccacacatatgcacatacccagaatcgaacaccactagaactacccaaaaactgagatggttgggggaggtatcatttattcatattactttctcccatgtactttttgaaagaca

SEQ ID NO: 30515 - DNA, 492 bp, Homo sapiens
  misc_feature (1)...(492): n = A,T,C or G
agccggccaatagaaaccnttaatgagancctaggcagngncgnggaattcgttcaagaccagcctggccaacagcaaaatgatgctctaaccaaaaattagctgggcatggtggcatgcacctgtagtcccagctactcgggaggctgaggcaggagaatcacgtgaacccaggaggcggaggttgcagtgagccgagattgcaccactgaactccagcctgggcgacagagtgagactccgtctcaaaaaaaaaaaaaacccaaaaaaaagggggcgggacgggggggtccacccttttaaccccaccttttgggggggccagggcggggggttctttgggggccgggagttcaaacccacccggcccaacataggaaacccttgtttttacaaaaaatacaaattttaggccgggcgggggggctcacccttatatccccacccttttgggaggttgaggggggggaatcacgaggccaggaaatcaaa

SEQ ID NO: 30516 - DNA, 488 bp, Homo sapiens
  misc_feature (1)...(488): n = A,T,C or G
agccccgccctgatanccntanttagagaggcgtaattcagccacactcagagaaggcagggcagggaggctgacggaactgctcagggagacccagcgagaggctcatagatccaggaggaaaataaatatgtgacagtaaatctacggaacctgtgtgccaccttgactacttatgctgtggctgatgtcactttgtgatcaccatggtctttcccactgatcccccgatgccaccctagaattctcaacacagcactccatagtggattagagctcagattctgaagtcagctaaaacagggtttaaattttggctccaccacttactctgtgacctgagtcacatttcttagcttctctgagcctccatttcagcatctgtaaaatgttactacctactttataggttttctgatgaggcttaagtgtggttgtgcatgtgaccatcttagcatagtgtgtggcaatggtaagcactcagtgct

SEQ ID NO: 30517 - DNA, 490 bp, Homo sapiens
  misc_feature (1)...(490): n = A,T,C or G
aatagaccccctcnggannnataccgagnaaccctcggaagngccgnggaantcgcctatacacacacacacacgcacacgctgtcctgtacctccctacacacacacacatgctgtccttacactggcttcctgtccttctcaccccttttcaggaacctccgcaggctggacatctcggacctccctgccgtgtccaaccctggcctcactcagatattgggggaggagatgctgcccaattgcgaggttgtgggagtcgactgggctgagggcctgaagtcagggccggaggagcagcctcgggacacagccagccctgtccctgcctagcctttagccctgtccccactcacgtggcttctcagcgggctgcatggaatgtctggtagctcaccacacttctggcttccatttgtcttcactcaacgtcagggtgggggagtggtgctggccaatcacaggagagagcgtgagttcccagtattta

SEQ ID NO: 30518 - DNA, 475 bp, Homo sapiens
  misc_feature (1)...(475): n = A,T,C or G
nttcgagnctcgatagccatcgnggaggaactcctgccgggtgtcaacaagccccagccggcccgaagcacagcagaaggcaaaggtgtctgcatctaggacctgcaggctactcagctcctcactgtcactgacatctggaagaccgacagcaaaggagacaagcggctggaggcagatgggtctggcaatttggcagggctggctggtcacaggtcccttcccaccagtcccaggcagaataaatcacatctcccttcccactcatctcaccattgtctgctcagctggttgggtgctggtccctgggactgcctaatcctgccccagcataggagcccttagaggccagggcttacctcttattcactgtgtatccccaacacctggcacagagagttgaactcagtttttatagtggctgagttgggctggggggtgatgccggctggagcagcaagcaagggacaaagtn

SEQ ID NO: 30519 - DNA, 479 bp, Homo sapiens
  misc_feature (1)...(479): n = A,T,C or G
ttttgataaccctcngaangcttagagnacctacgacgaccacagagacgctcaggctgggttctcaggatgaccgagtgggagttttagcaccagcggtggtttagaccccagacatcaagctctttgggaagtggagcaccgatgatgtgcagatcaatgacatttccctgcaggattacattgcagtgaaggagaagtatgccaagtacctgcctcacagtgcaggacggtatgccgccaaacgcttccgcaaagctcagtgtcccattgtggagcgcctcactaactccatgatgatgcacggccgcaacaacggcaagaagctcatgactgtgcgcatcgtcaagcatgccttcgagatcatacacctgctcacaggcgagaaccctctgcaggtcctggtgaacgccatcatcaacagtggtccccgggaggactccacacgcattgggcgcgccgggactgtgagaagacgg

SEQ ID NO: 30520 - DNA, 493 bp, Homo sapiens
  misc_feature (1)...(493): n = A,T,C or G
ttttgatgcccttccggaannnctnttgagnatcctagcgaagngccgcggaannctcccgaacaattcatggtataaacacaaatggtatattttcaacatactgaatgtgtttttaacctacttgacagggttggtgaaaatagggccaggatttcacacccgtgaatgctttttactgaaaagtattttgtgtttttctcccagttacagaatgtctgaaggggacagtgtgggagaatccgtccatgggaaaccttcggtggtgtacagatttttcacaagacttggacaggttggtgggttttttagtagatgagtataaatatttgaaaaagaaacgggactcccagcattttcgggaaggatctgtttgctggtgttcctgatggagaagttacttcgccttaggctcaaacttcctgaagacagcgttctcttcactgtgaagggcccagctgtggagagattgggctctgtggccacacgtggg

SEQ ID NO: 30521 - DNA, 485 bp, Homo sapiens
  misc_feature (1)...(485): n = A,T,C or G
cgccgcattgagnccctngnnnattgagnacactagtccangcggtggaattccagagagaacccaccatggtgctgtctcctgccgacaagaccaacgtcaaggccgcctggggtaaggtcggcgcgcacgctggcgagtatggtgcggaggccctggagaggatgttcctgtccttccccaccaccaagacctacttcccgcacttcgacctgagccacggctctgcccaggttaagggccacggcaagaaggtggccgacgcgctgaccaacgccgtggcgcacgtggacgacatgcccaacgcgctgtccgccctgagcgacctgcacgcgcacaagcttcgggtggacccggtcaacttcaagctcctaagccactgcctgctggtgaccctggccgcccacctccccgccgagttcacccctgcggtgcacgcctccctggacaagttcctggcttctgtgagcaccgtgctgacctcc

SEQ ID NO: 30522 - DNA, 476 bp, Homo sapiens
  misc_feature (1)...(476): n = A,T,C or G
tttgaaaccctggaagngctttgaacctttcgacgngcaagcaaggtcggaaagctcgcgccaaggccaagacccgctcttcttgggctgggcttcagttttccgtgggccgagtgcaccgcctgctccgcaagggtaattatgccgagcgggttggagccggcgcgccagtgtacctggctgcggtgctggagtacctgaccgctgagatcctggagctggctggcaatgcggcccgcgacaacaagaagacccgtatcatcccgcgtcacctccaactggccatccgcaacgacgaggagctcaacaagctgctgggcaaagtcaccatcgcgcagggtggtgtcttgcccaatatccaggccgtgctgctgcctaagaagactgagagccaccataaggccaaataaggagcgaggttgtgaaaactggaaaacacaggctctttttagagccattaaaaaaaaaaaaaaaag

SEQ ID NO: 30523 - DNA, 477 bp, Homo sapiens
  misc_feature (1)...(477): n = A,T,C or G
naagataacctggaagngctntganaccttacgaccancgnccggncccaggtagccctgctgggcctgagtctgctgctcatgctcctactgtatgtggggctgccaggcccccctgagcagacttcctgcctctggggagaccccaatgtcacagtcctggctggtctcacccctggcaactcgcccatcttttaccgcgaggtgctcccactcaaccaggcacacagggtggaggtggtgctgcttcatggaaaggcctttaactctcacacgtgggagcagctgggcacactgcagctactgtcacagaggggctaccgggccgtggcccttgaccttccaggttttgggaactcggcaccttcaaaggaggcaagcccagaggcagggcgggcagcgctgctggaagcggcgctgcgggacctggaaggacagaatggccggttggtgagcccctcgcttagtggcactatg

SEQ ID NO: 30524 - DNA, 451 bp, Homo sapiens
  misc_feature (1)...(451): n = A,T,C or G
ncctaagacatcgtccgagcggncgaattncgngtatttaatgaaactcccatcaaccctcggaaatgtgcccacatcctcaccaagattctttatctcataaaccagggggagcacctggggaccacggaagcgaccgaggccttctttgccatgaccaagctctttcagtccaatgatcccacactccgtcggatgtgctacttgaccatcaaggagatgtcttgcattgcagaggatgtcatcattgtcaccagcagcctaacaaaagacatgactgggaaagaagacaactaccggggcccggccgtgcgagccctctgccagatcactgatagcaccatgctgcaggctattgagcgctacatgaaacaagccattgtggacaaggtgcccagtgtctccagctctgccctcgtgtcttccttgcacctgctgaagtgcagctttg

SEQ ID NO: 30525 - DNA, 452 bp, Homo sapiens
  misc_feature (1)...(452): n = A,T,C or G
ncctcagacgtcgtaggaccngcggtggaattccttgagtccggctttgctggcccagcaagcctgataagcatgaagctcttatctttggtggctgtggtcgggtgtttgctggtgcccccggctgaagccaacaagagttctgaagatatccggagcaaatgcatctgtccaccttatagaaacatgagggggcacatttacgaccagaatgtatcccagaaggactgcaactgcctgcacgtgggggagcccatgccagtgcctggccatgacgtggaggcctactgcctgctgtgcgagtgcaggtacgaggagcgcagcaccaccaccatcaagggcatcattgtcatctacctgtccgtggtgggtgccctgttgctctacatggccttcctgatgctggcggaccctctgattcgaaagccggatgcatatactgagcaactgcn

SEQ ID NO: 30526 - DNA, 491 bp, Homo sapiens
  misc_feature (1)...(491): n = A,T,C or G
ttttgatagacgttcganaannnctntgatgaccttacggaagngccgcggaantctgaatgccacccctgtctctaccaaacaaagccagctcatcctcccaggcccagcatttaggccacctcttcccctcagccctcctgctctcttcctctgctgaactccagatttctctgggcttctcatttggcatgtcttagcctgcattgtctcatgacttttccttcctttactaattcggtcattcattcattcattcattcattcaacaaactgtgccaagcaccagagcaatgctgggcagcagagctataggaagaggtggtgagagtctgctgtggaggtcacaggtgatgagtgggagtcacagaacacggactctgatattagacagcctgaagtccaagtcctggctccactgcttaccagctgtgctaccttgggcaaggtacttaacctctctgagcctgggactttacaggctcggagtg

SEQ ID NO: 30527 - DNA, 482 bp, Homo sapiens
  misc_feature (1)...(482): n = A,T,C or G
ttttgaaaacgttcgccanngctttgagaccactcggancgcncgagcctggaagatcgaggttgcagtgaaccatgattgcaccactgcactccagcctggacattagagcaagaccctggcttaaaaaaagaagaaagaaatgtggagggtttcttactcgtcagctgtagcctttgctgataagatgcccttgtgtctctgcagtgtgtgatccagtctcgggtgacaagtgggacggcgaaggctcgatgtacgtcccggaggacctccttcccgtctacaaagaaaaagtggtgccgcttgcagacattatcacgcccaaccagtttgaggccgagttacttgagtggccggaagatccacagccaggaggaagccttgcgggtgatggacatgctgcactctatgggccccgacaccgtggtcatcaccagctccgacctgccctccccgaagggcagcaactacctgatgggttg

SEQ ID NO: 30528 - DNA, 485 bp, Homo sapiens
  misc_feature (1)...(485): n = A,T,C or G
gaattgacaccctggaanncctttgataccntcggaagngcggggaanncggagccccctccttcccctcgccacctactgaacccttctccgaggtgcccgagcagtcgtctgcccagttactccctgggagtccccccagaagagcctattacatctactccgggggcgagaagatccccctggtgttgagccggcccctctcctccaacgtggccactcttcagcatctctgtcggaagaccgtcaacggccacctggactcctatgagaaagtcacccagctgccggggcccattcgggagttcctggaccagtacgatgccccgctttaaggggtaaagggcgcaaagggcatgggtcgggagaggggacgcaggcccctctcctccgtggcacatggcacaagcacaagaagccaaccaggagagagtcctgtagctctggggggaaagagggcggacaggcccctccctctgccctct

SEQ ID NO: 30529 - DNA, 454 bp, Homo sapiens
  misc_feature (1)...(454): n = A,T,C or G
nccctagngacctcgtcagngcggcggaattccccggctcgagcggtttggtcgttcgttgggcggtgctggtttttcgctcgtcgactgcggctcttcctcgggcagcggaagcggcgcggcggtcggagaagtggcctaaaacttcggcgttgggtgaaagaaaatggcccgaaccaagcagactgctcgtaagtccaccggtgggaaagccccccgcaaacagctggccacgaaagccgccaggaaaagcgctccctctaccggcggggtgaagaagcctcatcgctacaggcccgggaccgtggcgcttcgagagattcgtcgttatcagaagtcgaccgagctgctcatccggaagctgcccttccaaaggttggtgagggagatcgcgcaggatttcaaaaccgacctgaggtttcagagcgcagccatcggtgcgctgcaggaggct

SEQ ID NO: 30530 - DNA, 516 bp, Homo sapiens
  misc_feature (1)...(516): n = A,T,C or G
aggctctatcccccgggggggnnaggggnaattgagnngcgtcggnnnnnnatttgagaccactaggccagngcggnggaattcggaggacggcgcggaggagctggaggatctggtgcacttctccgtgtctgagttgcctagtcgcggctacggcgtcatggaggagatccggcggcagggcaagctgtgcgacgtgaccctcaagagctttgctgttccttgatcatcagtccgaaaggcggtatcacacagactctgcagccacactgcctacgtttgagttctgggtctgccacttgttagctgtgaaaatgagcagcttccttaaacactggtgattctctgtctcgtctgtaaaatgcacatcaccacctacttgagtgttgaggattcaattagttaatgtacttcaaataatcatgtagtaaatgctcagtagtgtgaaaaanaanaaaaaaaaaaaaaaaaaaaaaaaaaaaaaaaaaaaanaanaaaaaatatttgtgcctcccg

SEQ ID NO: 30531 - DNA, 499 bp, Homo sapiens
  misc_feature (1)...(499): n = A,T,C or G
tggaggggnggggnnntttatgaaactgatcaccgtggcgcgaggcggctgaagaacgccttcagcctggccgaggagtactgccccggcatctcagacaagctgatggtgcacctggtggagcgagtgcagaggttttcacacaacagaaaccacctgacatccacccgctgaagcgcactgctgttcagataggggacggaaggtcgtttgtttttgttctgagctccataagaactgtgctgacttggaaggtgccctgtgctatgtcgtgcctgcagggacacgtcggatcccgtgggcctcacatgccaggtcaccaggtcaccgtctccttccacccctgcagtgtgctgttgtgcacgtcagggacgctgttctctatgcccactggcctcctacctctcctggcccagcagtattgctcacggaggctacagccgccggcgtggccctcatgagctacgcctgggtcttctgcagactcatgcagccctat

SEQ ID NO: 30532 - DNA, 618 bp, Homo sapiens
  misc_feature (1)...(618): n = A,T,C or G
cacgccgcagccgtagacgatcactgtttcggttagcactcgtagactagatctttctcctcatttctctaccaggccancagacagccccnnnnaattgacnatcgagcgatgtccgaanggncgaannccgnngctnccgaatcattcaccggaggcggccacgaacgctgccccttaacagggaatcccccgcattcaccctgtcctgcggccatcaccatcttccccgcgggccagccttggtcatgcatagcagcacctctcgcagtctcttcccgccctagaagaggcaacatccttccctcctactccgtggtcacgtcttgctgccctcccctgccgtgttctcacgcactcgctctgtccctccagaaccacaatattccacccctgggcccgccaggattataaccgtctttcgaaaagagagatggaagggcaaggaggatgtcaatcgggcttttagcgtttatccgttgcggggcttttgctggagttaaaaaaagaaatactgctcacgcccaaccgcctcatgtgttaagcccttgctgtggttacagagaaggacctaacgctgaaagcctgcanngcattataataacaaaacaaaacaag

SEQ ID NO: 30533 - DNA, 476 bp, Homo sapiens
  misc_feature (1)...(476): n = A,T,C or G
ggaggntccggggntgnnnnnnaatcgagtacccnattgcagngcggtggaattcgacccctgcccaccccgcaggaaccctgaggcctaggggacaggctggacccagagactctggacccggggcctccccttgagtagagacccgccctctgactgatggacgccgctgacctggggtcagacccgtgggctggacccctgcccaccccgcaggaaccctgaggcctaggggagctgttgagccttcagtgtctgcatgtgggaagtgggctccttcacctacctcacagggctgttgtgaggggcgctgtgatgcggttccaaagcacagggcttggcgcaccccactgtgctctcaataaatgtgtttcctgtcttancnnannaaaaaaaaaaaaaaaaaaaaaaaaaaaaaaaaaaaggggcccctttaatttaaaggggccctttaaaccccggttaaacccttttgc

SEQ ID NO: 30534 - DNA, 545 bp, Homo sapiens
  misc_feature (1)...(545): n = A,T,C or G
aagcnnccaagggagcgcnnnnncttttgacatcgatccatgtccgagtggtgcaattccgttgctcccgaatcattcaccggaggcggccacgaacgctgccccttaacagggaatcccccgcattcaccctgtcctgcggccatcaccatcttccccgcgtgccagccttggtcatgcatagcagcacctctcgcagtctcttcccgccctagaagaggcaacatccttccctcctactccgtggtcacgtcttgctgccctcccctgccgtgttctcacgcactcgctctgtccctccagaaccacaatattccacccctggtcccgccaggattataaccgtcttcgtaaaggagagatggaagggcaaggaggatgtcaatcgggcttttagcgtttatcgtttgcggggcttttgctggagttaaaaaaagaaatactgctcacgcgcaaccgcctcatgttctaggccctgctgtgggttacagagagggacctaacgctgaaagcctgcaggcattagtaataacaaaacaaaacaa

SEQ ID NO: 30535 - DNA, 473 bp, Homo sapiens
  misc_feature (1)...(473): n = A,T,C or G
tggggccccnnnnncnnnnnccctgaagtacntcgtccgtgcggtggaattcgtcgctgaaggcagtggccatgctggccgtggaaatgggaggcggttgcagggggtctatggggcccggtcctggatactcggcaggaagccgtgtctgcagaggctcctccctgcctcaggtggccccgttcaaccccagccgtgcccatctcctgccaccgcctgtcggtgggggtttaaattcggtgtggctttctggggtgcagctcagcacccccccttatgcagactgggagggggtcgggcagtcccctcagccacgaggaccctggatgggttctagttcacttgggaccgtggggcctggctgcgtactgagtgggtgccccacagtcaaggccaacgggggctccccctgctctgagatgttgggagaaaggcggcttctggaaccttccgtgggacccgtaagtggctgt

SEQ ID NO: 30536 - DNA, 487 bp, Homo sapiens
  misc_feature (1)...(487): n = A,T,C or G
agagctttgggccatcgagaccactagtgcagtgtggaggaattctctggctgccacttggttatgttgtgtgtgtgcgtgagtggtgtgcaagcgcggttccttacgccccatgtgtgctgtgtgtgtccaggcacggttccttacgccccatgtgtgctgtgtgtgtcctgcctgtatatgtggcttcctctgatgctgacaaggtggggaacaatccttgccagagtgggctgggaccagactttgttctcttcctcacctgaaattatgcttcctaaaatctcaagccaaactcaaagaatggggtggtggggggcaccctgtgaggtggcccctgagaggtgggggcctctccagggcacatctggagttcttctccagcttaccctaaggtgaccaagtagggcctgtcacaccagggtggcgcagctttctgtgtgatgcagatgtgtcctggtttcggcagcgtagccagctgctgctn

SEQ ID NO: 30537 - DNA, 490 bp, Homo sapiens
  misc_feature (1)...(490): n = A,T,C or G
agcgcctccccctgagatccatctgcagngngcnggaattccagaagatgggcagtcggcatcaaggcaccctgagcccgtgcccgaagagggctcggaggatgagctaccccctcaggtgcacaaggtaagggccccggggcctaggaaaaactgccagaaatagtaacttccagggtgaggtaacagcttttcaggggaaggaagatatgccccacccccacacagagatactgtaccctcccttccaaaacacactaccccttcttttctcaactgctctgcagggcttggtttttccttaccttacctccccaggaatcaacctttcctgtccctttacctctaggtttctatggggctagcaggtatcaaccagaagctgaagactatctccattaccaaccctttctccccacaggtatagacaaggctgagcagggttcctgtggcccaggatggaggccaccgctgccctgccatcccgtct

SEQ ID NO: 30538 - DNA, 490 bp, Homo sapiens
  misc_feature (1)...(490): n = A,T,C or G
ccgcgcatcgancccataggagaccactagtccagagaggaggaattcggccaaagtgagagtccagcggtcttccagcgcttgggccacggcggcggccctgggagcagaggtggagcgaccccattacgctaaagatgaaaggctggggttggctggccctgcttctgggggccctgctgggaaccgcctgggctcggaggagccaggatctccactgtggagcatgcagggctctggtggatgaactagaatgggaaattgcccaggtggaccccaagaagaccattcagatgggatctttccggatcaatccagatggcagccagtcagtggtggaggtgccttatgcccgctcagaggcccacctcacagagctgctggaggagatatgtgaccggatgaaggagtatggggaacagattgatccttccacccatcgcaagaactacgtacgtgtagtgggccggaatggagaatccagtgaact

SEQ ID NO: 30539 - DNA, 458 bp, Homo sapiens
  misc_feature (1)...(458): n = A,T,C or G
naccgaggtacccgcnatcctcggaagngcggnggaattcctcgcctccatcacctccaccgtagttgagccagcgatagtactgagagtatggaaagagcctccggtaataaagtttaagcagctcgggcagctcggtggggtcaaacgtctccattgagcgcggaactcgccacgtaacagatctgattctgcagctgatcaaggatgacactggtgagaaccctatgagggagtgaagcagcctggactcttaccacaagagggaggtgttataagagcaatgcagaggttggagtgggcagcagttggggcaggaggaagccgactgctgcctggtctgcaaagaagtcctttcaagtctctaggactggactcttcctaagcaagtccggtatgtagagaaggaagcaccctcactatgtggctctacctggcggccttcgtgggcctgtact

SEQ ID NO: 30540 - DNA, 492 bp, Homo sapiens
  misc_feature (1)...(492): n = A,T,C or G
agcgggctcccaactgatatcctcacgcagagnccnggaattctaggcattcagagagtggaaggggcctctgggacacagtattaggaaagtattaggaaagaagcatttctcaccctcttctctgcccctccccagagctgctgcccaaagggagcaaggaggaacagcgggattacgtcttctacctggccgtggggaactaccggctcaaggtgaggaggggaccccgttcccttcaccctcctctggggctgcaggaccttcttactgtgtcctccagggtggagccctggacagcgggaaggctgaaggggtgcacaggtgcacagcggtgtcagatgaggactccgagggaagatcacagtggcgagggggtggggaggaagtgactttnanagactgtacgcaggccctaggcttgcgctggtatctcccgcagagccgcaggagtgggaagagcttactctctgtggatggggatatagggag

SEQ ID NO: 30541 - DNA, 521 bp, Homo sapiens
  misc_feature (1)...(521): n = A,T,C or G
nattgaacatcgancagcggtnggaannctcgacgggcaagccctgctgctgctcaaggaggaccacctgatgagcgccatgaacatcaagctggggcccgccctgaagatctacgcccgcatcagcatgctcaaggactcctagggctggtggcagccaggattctggcccagggcgcctcctcccgactgagcagagccagacagacattcctgaggggcccacaaatggggccggttggagggcaggggctctccctaggggcatagctggtgaggaggtctgggcacctcctccatggctctcaggggcctttcatttctgtgggaggggcagagaggtaggtggcacaaaagatggggctctatgcttgtaaatattgatagcactggcttcctccaaagacccaatactctagccccgctctcttcccctctttgtgtcccccattttccagggggtatatggtcagggctccccaacctgagttgggttacttcaagggcagccagcatgcctg

SEQ ID NO: 30542 - DNA, 488 bp, Homo sapiens
ccgcgctagaaaccttcgtagtccctagtccatgtggtggaattaaaggaaccaccactcagagaatcatggagccagtggagttagaagtggaagggacagaacaagacaatgctaaaacctgtggttcactaggaagggggaatgaaaacaccatgctccgaggtggattcagcatgaacacaactgtggggcaaggaatttccaagcaaacacaccacactagtaccacttcttcctaaacagaaaagggaaagagcatccttcgacttccccctccctccatcagcaccaactaaaactgtgggtttcaaaaacactgacaggaaaagggatggacatgattcccagaatccttcaggctagctcctccgcgcatccacgttcaaccgaggctggtgatgttggagcggccaccagggggcgccacgatgcggtggccggtgcgcctgggattgttgtcatctatctgggcacctgaaagagag

SEQ ID NO: 30543 - DNA, 489 bp, Homo sapiens
  misc_feature (1)...(489): n = A,T,C or G
agcgcctcccaatgagacctctcgcagngngcnggaattcggcctccggtgtggctgtctctgatggtgtcatcaaggtgttcaacgacatgaaggtgcgtaagtcttcaacgccagaggaggtgaagaagcgcaagaaggcggtgctcttctgcctgagtgaggacaagaagaacatcatcctggaggagggcaaggagatcctggtgggcgatgtgggccagactgtcgacgacccctacgccacctttgtcaagatgctgccagataaggactgccgctatgccctccatgatgcaacctatgagaccaaagagagcaagaaggaggatctggtgtttatcttctgggcccccgagtctgcgccccttaagagcaaaatgatttatgccagctccaaggacgccatcaagaagaagctgacagggatcaagcatgaattgcaagcaaactgctacgaggaggtcaaggaccgctgcaccctggcag

SEQ ID NO: 30544 - DNA, 521 bp, Homo sapiens
  misc_feature (1)...(521): n = A,T,C or G
nattgatcttcgatcgcggtggcaanncgcagaagnnggcctangtaactcatcttttaatatgaacatcagaggtgacattggacacaaggcctatgagtatcaggaatatggaccgaagccatgactcacactggagagaaaccctatgagtgtaagcaatgtggaaaagccttcagatctacctcacacctttgaaaacatggtaggactcacactggagagaaaccctatgaatgtaagcaatgtgggaaagccttcagatctgtcaaaaattgttgaattcatgaaaggacacacactggagagaaaccctgtgaatgtaagaaatgtgggaaagcgttccataatttctcttctttgcaaatacatgaaaggatgcacagaggagagaagctctgtgaatgtaagcattgtgggaaagcattcatacctgccaagatcctttgaatacatgcaagaacacacaatggagagaaaccctatgaatgtaaagaatgcagaaaagcattcagcttgcn

SEQ ID NO: 30545 - DNA, 456 bp, Homo sapiens
  misc_feature (1)...(456): n = A,T,C or G
nctggaaaactgagagcactcggaagngcggnggaattccgctgaggcgccaggagagcgctgaggcgccaggagagcgctgaggcgccaggagagcgctgaggcgccaggagagcgctgaggcgccaggagagcgctgaggcgccaggagagcgctgaggcgccaggagagcgctgaggcgccaggagagcgctgaggcgccaggagagcgctgaggcgccaggagagcgctgaggcgccaggagagcgctgaggcgccaagcgctgaggcgtggagactcgaggtggcggccgagagtaggaagcaaaacaacgggacgggactgactcggggcaacaacgactacccattgtggggaaagaatgaagattcattactattatgagttgaattatctccctcgtaaaaagataaggtgaaatcctaaccctgggaacctcagactgtcactttg

SEQ ID NO: 30546 - DNA, 479 bp, Homo sapiens
  misc_feature (1)...(479): n = A,T,C or G
aggaggtccnnnnnaactgagnncctgcgantctgngaagnngcgnggaannngcaaaaaggaaaagccctgaagaagaaagccggcctccacctgacctggcccgacatgatgtcatcaaggggctcctggctaccagcctgctgcctcggctgcgctacgtgctggaggtgacatacccaggacctgcggtggtccttgacatcctggctgtgctcatccgcctggcccggcattccctggaatcagccacaagggtcctggagtgccctcggctgatagagactatagttcgagagttcttgcccaccagttggtctcctgtgggggcagggcctacccctagtctatacaaagtaccctgtgctactgccatgaaactacttcgtgtcctggcctcagctgggaggaatattgctgcccggctgttgagcagctttgatctccggagccgcctgtgccgcatcatagctgaggcg

SEQ ID NO: 30547 - DNA, 475 bp, Homo sapiens
  misc_feature (1)...(475): n = A,T,C or G
gagggcnnnnnnaactgagnccaagcnatgctggaagaanncnnagananggaccagttcactgcctcaatctcagagacccctgtggacgtccgggtgagctctgatgagagtgaggagatcccaccgttccaccccttccaccccttcccagccctacctgagaacgaaggatctggagtgggagagcaggatgggggactgatcggtgccgaagagaaagtgattaacagtaagaataaagtggatgaaaacatggtcattgacgagactctggatgttaaggaaatgattttcaatgccgagagagttggaggcctcgaggaagagcgggaatccgtgggcccactgcgggaggacttcagtctgagtagcagtgctctcattggcctgctggtcatcgcagtggccattgccacggtcatcgtcatcagcctggtgatgctgaggaagaggcagtatggcaccatcagcg

SEQ ID NO: 30548 - DNA, 475 bp, Homo sapiens
  misc_feature (1)...(475): n = A,T,C or G
agagggtcnnnnnnaaatgatnnnctaaccctagtcgaangncgnggaannangaaangaacttctttctgcttttgcttatttggaaatatcttagtttcaccttatttttggagggatgttttgctgcgtatagaattcttggctgacagatttttttcccccctctttctgttagcactttaaatatgtcatcccactgacttctggcttctatagtttctgatgaaaaaatgctgataatgataatctaaataatctaatgaggattccttgaaccagatgagtctcttcttttttgctgctttcaaaatttctgctctctttgaggtccacaatgtgtcttgacatggatatctttgagtttatcctgcttttggagtttgttgagcttcttggatatgtatatttatcatcatcatattagggcagttttcagccattgtttcttcaaatgttttgttaactttggaaa

SEQ ID NO: 30549 - DNA, 472 bp, Homo sapiens
  misc_feature (1)...(472): n = A,T,C or G
natcgagaccantantcagagcgccggaattcaaacgctccacagactgtggctgtgagtggggacagctcctcgggacaagggggctgtgtgtggccttgaggttggtgtgcacaggcactggctgctgtgagtgggggggcatggggcagtttcctttggtggaccccaggacttcggcccactccggggcctcccctccctgctaggaggcaactcgtcacacccaagctgctggcctccagtcccatctcccccaacacatgtgcccccaaaaagtgagccaggcacctctgtttcctgctgtttattgacagccgacggcagcgccttgcccagacctcccctgcccacctgctggagcccagcctgtgccgccctctgaggagaggcctggggggacagctgggcacgtccactcgcagggaaacacgggaaacgtcaaagttgtgcccaacactgtggatcagca

SEQ ID NO: 30550 - DNA, 490 bp, Homo sapiens
  misc_feature (1)...(490): n = A,T,C or G
agaccgccccttattgaagaccctctatttgagatcctcaggaagngccgnggaanncgaacgaggactcggaccaggaccgagaggagcggaagctgctgctggaccctatcatcccccctaccaaagctctcaatggagccgagcccaactaccacagcctgccttccgctcgcactgatgagcaggccctgctctcttccatccttgccaagacagccagcaacatcattgatgtgtctgctgcagactcacagggcatggagcagcatgagtacatggaccgtgccaggcagtacagcacccgcttggctgtgctgagcagcagcctgacccattggaagaagctgccaccgctgccgtctcttaccagccagccccaccaagtgctggccagtgagcccatcccgttctctgatttgcagcaggtctccaggatagctgcttatgcctacagtgcactttctcagatccgtgtggacgcaaaaga

SEQ ID NO: 30551 - DNA, 484 bp, Homo sapiens
  misc_feature (1)...(484): n = A,T,C or G
gcgggttncaactgacctgaatgcctgtgcanggcnggaancaagggccttgctgggggcaaacaaggtggaacataacacgtctgccaaagtgaaggaggactccccagtcccatcacccagagccctgctggtggggtcaaatcatcggcgcctgcctcacgggctggactggtgccatgccagctgggatgcccagtttgggagaagcctgaccagggcctctgtttggcaaggcttccctggcagccctgggtacctgcctgtgtacccccgttctcagggtctccccaccttctgtgctgtgggtccccatgctaaacagcactagataccgataaccttcttgactatactgaagccaccttcctgctgcccaccagcctcagtgacagcaacagacccctctgcccaggccggcctcacacggggctaaagacacccacggctcctgccagcagggtccacacaggccacctcgctg

SEQ ID NO: 30552 - DNA, 479 bp, Homo sapiens
  misc_feature (1)...(479): n = A,T,C or G
nggggcgtccnngnnnaactgagnncctggtaagcgagcacaanncnnggagacagnggcagagggaagtgtttgcttttaaatacactcagcaggttcagacaggagaggatccgaggggaaatgtttagagccctcaggaggaggaagagaccgagttttaggaaaaacatcaaagctggataggttgggcagaagagctggggatagcatttagagaggctgagagtcctgggttctgggttatcaaggtgagagaaaccagaggttgccagttgtaggtgggcgtcaggactagagtgatgcttccagaagtttctgcaagtgggccgagtctaaggtagggcagggtacgccagaagttgaggggcactaggtagacaggccgagctggtggctgggtgctcccctcaccctccatgctgctaggagcccgtgagcagggacttgctctcctctccctccctcctggggcctgc

SEQ ID NO: 30553 - DNA, 472 bp, Homo sapiens
  misc_feature (1)...(472): n = A,T,C or G
aatcgagaccactattcggagngccggaattcgngacattgagggagcagacaatgagggctccaagcagatgcagcacatccgcatgtcccttcgcgggaaggctgtggtgctgatgggcaagaacaccatgatgcgcaaggccatccgagggcacctggaaaacaacccagctctggagaaactgctgcctcatatccgggggaatgtgggctttgtgttcaccaaggaggaccttactgagatcagggacatgttgctggccaataaggtgccatctgctgcccgtgctggagccattgccccatgtgaaggcactgtgccagcccacaacactggtctcgggcccgagaagacctcctttttccaggctttaggtatcaccactaaaatctccaggggcaccattgaaatcctgagtgatgtgcagctgatcaagactggagacaaagtgggagccagcgaagccacc

SEQ ID NO: 30554 - DNA, 485 bp, Homo sapiens
  misc_feature (1)...(485): n = A,T,C or G
ggccgaccaattgaaacccctnattgagatcactaggcagngcggnggaattcagcacactgcaggaggcgttcggaggaggagttccgccccaccctctacagccttcctcaggcccctgtctctggtccccagcctcagtgcctcttggcccagggccaggcagtcgtggttgcagaaggagcaattaggctgcctgcctgtgggctgggagacagggacaatggggaaaagttaaggagcaaaatgggggttggaagcaaaaaatagggccccacctatttaggacgagattgaagactgacccttgaggcacacttgcactggagatgggtttatttcacgctctgtgcttgtgtgctagcggagggagagctcagggtggcttaatccagaggccctgtcatggcccgcccccagccatgggaaagcaaacttcatcctaaggtgtgcagcccaggccctgcccctttacagtctaggcg

SEQ ID NO: 30555 - DNA, 555 bp, Homo sapiens
  misc_feature (1)...(555): n = A,T,C or G
aggcgcccnnnncattttggccctccttcgnngggggaatcgctcgaacggcctcgggcccgaggtgtccgcgaaggtggcgcagccatggcggcaggggagagcatggctcatcggacggtctgggtggacctggagatgacaggattggacattgagaaggaccagattattgagatggcctgtctgataactgactctgatctcaacattttggctgaaggtcctaacctgattataaaacaaccagatgagttgctggacagcatgtcagattggtgtaaggagcatcacgggaagtctggccttaccaaggcagtgaaggagagtacaattacattgcagcaggcagagtatgaatttctgtcctttgtacgacagcagactcctccagggctctgtccacttgcaggaaattcagttcatgaagataagaagtttcttgacaaatacatgccccagttcatgaaacatcttcattatagaataattgatgtgagcactgggtaagaactgtgcagacgcttgtatccagaagaatatgaaattgcacaa

SEQ ID NO: 30556 - DNA, 481 bp, Homo sapiens
  misc_feature (1)...(481): n = A,T,C or G
taagaacgcatctaaaccgtacgnannnncnncnnnnnnnnngcgctgggggcctactttttcctcttcctacgccggtttctctgttgactgcatacccagggctcggccctcctcggactcctgctgagtccctatgacgggcgcacgtgggcaggggctggaggtggtgcgctcagcgtcgccgccgctgccgctgagctgcagcaattccaccagggcgctgttggctccccttggccaccagagcttccagtttgacgaggacgacggtgacggggaggatgaggaagacgtggatgatgaggaagacgtggatgaagatgcccatgattcagaggccaaagtggcgagcctgagaggaatggagttacaggggtgcgccagcactcaggttgaatcagaaaataaccaagaagaacagaaacaggtgcgcttaccagaaagccgcctgacaccatgggaggtgtggtttattggg

SEQ ID NO: 30557 - DNA, 478 bp, Homo sapiens
  misc_feature (1)...(478): n = A,T,C or G
ggcccgcnattgagaccactagtcatagatgggcatttccagtctttcatttttgaaccctcggtgtacacagaggcgggtctataacaggcaatcaacaaacgtttcttgagctagaccaaggtcagatttgaaaagaacagaaggactgaagaccagctgtgtttcttaactaaatttgtctttcaagtgaaaccagcttccttcatctctaaggctaaggatagggaaagggtggatgctctcaggctgagggaggcagaaagggaaagtattagcatgagctttccagttagggctgttgatttatgctttaacttcagagtgagtgtaggggtggtgatgctaccattactgtgaggacctaccagtgtggctggagcagggactctctcccaggccttttactcctcagcacctccctgcatactgattggtggttttagtttctgtgaaattatattcatgaaatgaaaan

SEQ ID NO: 30558 - DNA, 474 bp, Homo sapiens
  misc_feature (1)...(474): n = A,T,C or G
aatcgagcccantgttttgatgaccngtaaaacggacagccagacagactttgaggattcttcagttcagcatgtcaaagggccatattttgaggtattgatttctgagccccaacagcacccaagcattgtgtgaggctgtgggagctgtagtctactcccctgacttacagcagcacctcattcaagggtagatctttcagcatccagaatggcccccttctggaagcttcctaatgggcatctctaagagaacaggaagagcataaaaactcaatgggaacactgggtggtctggggtgggctgaggcgatgcataggccagcctcaactgctggtgtgcactctaaaagccgatgtctatggactggggttgagaaaagttgggaagcttcagactgaggggagaaaaaagaaagagcccagagaaacgtgaggaggagcttgaatttctagcaagtcagtgaaaaaagg

SEQ ID NO: 30559 - DNA, 571 bp, Homo sapiens
  misc_feature (1)...(571): n = A,T,C or G
tgtgcgtcncnnnnnaattggatcatccctcgngaggngccannnaatcgatgcntcagtccgtngtggggaattcttcgctcttcttgccttggtgcccagtctggagtgcaatggcgtgatctcggctcaccgcaacctctgcctcctgggttcaagctattcttctgcctcagcctcccaaagcactgacacggctcccgggacctcggcaggatggaagagaagctgaagaaaaccaagatcatctttgtggtgggtgggcctggctcagggaagggcacccagtgtgagaagatcgtgcagaagtatggctacacccacctctccaccggggacctcctgcggtccgaggtcagctcaggctcggccaggggcaagaagctgtcggaaatcatggagaaggggcagctggttccactggagacagtgttggacatgctccgggatgccatggtggccaaagtcaatacttccaaaggcttcctgattgatggctacccgcgggaggtgcagcagggagaagagttngagcgacggattggacagcccacactgctgctgtatgtgg

SEQ ID NO: 30560 - DNA, 562 bp, Homo sapiens
  misc_feature (1)...(562): n = A,T,C or G
tggcggccnnnnnnncatgggatcatccttcgngaggnggaattcgttcgagcagcctcaccttccaagagctacagcgtgtgctccataagctgaccactttgcatgtctatgaagaagaccctcgggaagcagtcagactgcactcacctcagacacactggaaaacagtaagagaggagagaaagaagcctactgaggaagaaataagaaagatctgcagggatgaaaaggaagcgctggggcagaatgaggaatctcccaaacagggttcagggtcggagggagaagatggctttcaggtagagttggagctagtggagttgactgtggggactctggatctttgtgagtctgaagtattgcccaagcggaggaggagaaaaaggaataagaaggagaaaagccgagaccaggaggctggggcacatcggactcttctccagcaaactcaagaagaggagccttccacacagtcatcccaggcagntgctgcccccttgggccctttgctggatgaggccanagccccttgtcagccagagctctggaatgcactgcn

SEQ ID NO: 30561 - DNA, 567 bp, Homo sapiens
  misc_feature (1)...(567): n = A,T,C or G
agtgggcccnnnnccaattggaccatccttcgnngggggacnnncctagagcntcatccagcgnggngcaattcctccatatgcctggtccgacccccagcggcactaacgtgggatcctcagggcgctctcccagcaaagcagtggccgcccgggcggcgggatccactgtccggcagaggtaaggaaccctgcagttcgttcgcttccagactcggagataggacccagaacctcgctgattctggggtggagaccctagcatgtgaagattgacaaaggcaaaatgagcttctagtgacgtggccgtgggagtagttaacggccttttggcaggaaggcgacattttttttctcgttgctcaggttagggcactactcttaaaaaaggaaagttaacaaactggaatagagtcagagataactttgagaaaaccgatgtcattaaactggtgtctctggacctgaggtttgcactcacatttccatctggcggccccataagcaatctgtcctacagataactcgtcctacacaaaacttagtctcttttcagctcagctctct

SEQ ID NO: 30562 - DNA, 487 bp, Homo sapiens
  misc_feature (1)...(487): n = A,T,C or G
cgggatgtccaattgaaacccctnnatgagnacactaggccanngcgnggaattcgaccgttcctctcccctgtacatagncccgagccagtcctgagtgggtgactcctgagtgggtgacgcgcagacgggatttctcaggtcatttgtatggtcgacatgatggctgctgctttggctgccaccacccccgggcccagcctgtctgaaagttcagggtttaggccgaaaaacccggtggggaggggtggggagccggagctctgtggcggggctggagggctggggtgcactttagtttggggcgggacgggagccgccgttgtgactggcgtggtctggctgctgctcccgaacggaggggtcggggttggcttgctgggccctcagagcccagtgggtggctctgactcggctccctactccctgcacccagctgggcgcagccttggggcctgcggnctgaatgtatccctcccctcagttn

SEQ ID NO: 30563 - DNA, 472 bp, Homo sapiens
aatcgagaccactgttggaggcggtaattctgaaggcaaggggaaaggccagatgaagacctacctgtacccaaagtgcacggatcacagggtcatcccacagcaccagctgtccatctccccagacatccgcgtccaggtggatggcagcatcggacggtctcccacagacgagattgccaacctggtgccttctgtccagtatgtggacaagacatctctgggttctgacagcagcacgcaggccaaggatgcccacctgtcccccaagagaccgtggaaggagcccgtcaaagccgaagaaaggggtcgatttggcaaagccatagagaaagacgactgtgacgaaacaggaatagaagaagccaacgaactcaccaagctcaacgtttcaaagagtgtgtgaggcggcgcccacccgctgcccgaggtgctctgtttgtcgaaacacaataatatttgtatttggctg

SEQ ID NO: 30564 - DNA, 464 bp, Homo sapiens
  misc_feature (1)...(464): n = A,T,C or G
natcgagatccctattgcagtgcggtggaattccagggacagaaggcccctagtcccatgtgacctccagtaaagttttggcaccaaacctgtgttgtgtgttggcggttttgggggcagggctgagagctgagctgcgggtcttggggcaggagcaggacatatggtcagtggcccatgggagccagggttggagggaatggggttgcagcgtgaggagacagacctcagcgccagggtccccagacacccagtgcagcccacagtgggcagggtcacaggtattcagaggacctggggttcagtgcaggtccctgggctgtgaggccccttgtctgagggaaaggggccctggttctgtgcatgggacagaaaccccagggacagcaggaccttcgacgctggaaggatagcctcgcttcccaggtgcagctcccggcaggtctggacagttccacagagca

SEQ ID NO: 30565 - DNA, 553 bp, Homo sapiens
  misc_feature (1)...(553): n = A,T,C or G
accatacaccacatccattgttaaacactaaaatagcacaacatactagctatgatgcatcaaatcacacnacaaggagcagacccannaatgagaccaattganagcactagccaagagcnggaanncccgnggacgagggcaccatgaaggcagaggagctgcctgccctgaccgacaactacatgtacctggtcattgatgatgagaccaaggaggctgccattgaggatccggtgcagccccagaaggtagtggacgcggcgagaaagcacggggtgaaactgaccacagtgctcaccacccaccaccactgggaccatgctggcgggaatgagaaactggtcaagctggagtcgggactgaaggtgtacgggggtgacgaccgtatcggggccctgactcacaagatcactcacctgtccacactgcaggtggggtctctgaacgtcaagtgcctggcgaccccgtgccacacttcaggacacatttgttacttcgtgagcaagcccggaggctcggagccccctgccgtgctcacaggtgacaactn

SEQ ID NO: 30566 - DNA, 479 bp, Homo sapiens
  misc_feature (1)...(479): n = A,T,C or G
atccgagaccctttggcangncgnggaatccctcggagtgtgagtggcctggggagggggccgtggcactgaggccgaaagtgcctgccagacggcacggtctgggtgcgggtgttccctgtgagcccgagtccgcttcaggaggggagcctgcaggtgccggctggtgaggggatgacgcactgtgggtgggaggaggcagcgcccatctcagcagcaccaggactgcctgggactccctggcaacccagcaccggggaagccgtcagctgctgtgacaataaaacctgccccgtgctggagcgcnnnanaaaaaaaaaaaaaaaaaaaaaaaaaaaaaaaaaaaaaaaaaaaaaaaaaaaaaaaaannnnnanaaannnanaaaaaaaaaannnnnnaaaaaaancccccccctattaataaaggaggnnataaaaccccctttaccccccctctggtgtttttttttgacacactn

SEQ ID NO: 30567 - DNA, 459 bp, Homo sapiens
  misc_feature (1)...(459): n = A,T,C or G
atgagaccttttgaagngcctggaaancgcaatcctcttgcctcagcctctcaaattattctgactccactgaagtcaaatttgaagagcttaaaaatgtcaaactagaagaggaggatgaggaggaagaacaagaagcagctgccttggatctttctgtgaatcctgcgtctgtagggggacgccttgtcttctcaggctccaaaaagaaatcatcttctagcctgggctctggctcttcacgggattctatctcttctgattcagaaactagtgagcctctctcctgccgagcccaagggcaaacgggagttctcactgtgcacagttatgccaaaggggatggcagggtcactgtgggagagccatgcacgaggaagaaaggaagcgccgctagaagtttcagtgagcgggagctggcagaggttgcagatgaatacatgttttccctagaagaga

SEQ ID NO: 30568 - DNA, 252 bp, Homo sapiens
ctataggctgatgcagcgtaattctatgttccttcgcgggaaggctgtggtgctgatgggcaagaacaccatgatgcgcaaggccatccgagggcacctggaaaacaacccagctctggagaaactgctgcctcatatccgggggaatgtgggctttgtgttcaccaaggaggacctcactgagatcagggacatgttgctggacaattaggagccagctgctgcccgtgctggtgccattgccccatgtgg

SEQ ID NO: 30569 - DNA, 498 bp, Homo sapiens
  misc_feature (1)...(498): n = A,T,C or G
ngagggccccgagtgccccgaatgagaccncctaaggagtcgtggaaanccacctccgncccatcatctcgctggttaaacgtggaaaaacggggtcttgagctctccacggtctcccctctggttgggccggaacaaagatttataaaagcagtgttgaaaaatctttctgcaattggattgagaaaagacagagtaagatgaaaatgcaggcttgtctcccgctgaaaagggaaaggtgcaatttgtctgcagcggtcctcaccccctgtgttctgtcagctggggtggtgaagccgtgagtccctggcagcgtggtgcatcacagggctgctaagtgggcatgggctgacatctccccatccccagggatgaccacatcggtgcgctgctggctgtgcgtggggacgccagccgtgacatgaagcagaccatcatggagaccctggagcagggcccagcacaggccagccccagctacgtgcccctcttcaaggg

SEQ ID NO: 30570 - DNA, 498 bp, Homo sapiens
  misc_feature (1)...(498): n = A,T,C or G
agaggggcccccgggtgcccccgcctgatacccnccatgggttcntcggacagngcggnggaanncgcagcttccgagtcaaggagaacttcgacaaggctcgcttctctgggacctggtacgccatggccaagaaggaccccgagggcctctttctgcaggacaacatcgtcgcggagttctccgtggacgagaccggccagatgagcgccacagccaagggccgagtccgtcttttgaataactgggacgtgtgcgcagacatggtgggcaccttcacagacaccgaggaccctgccaagttcaagatgaagtactggggcgtagcctcctttctccagaaaggaaatgatgaccactggatcgtcgacacagactacgacacgtatgccgtgcagtactcctgccgcctgctgaacctcgatgggacctgtgctgacagctactccttcgtgttgtccgggaccacacggtctgccccagatcgcagaagataga

SEQ ID NO: 30571 - DNA, 474 bp, Homo sapiens
ggattattcctatccagggcgttgattacactctttgattaattatatgcattgcacatgtctggtacattgtggcttgcctctcttccctgcctttatgagtgttttgctggacccaagtaatttttaaatgttaatgttattaaatctatcagttttttgcttgtatggcttatgccattgaatcttgttttaagagatccttccctaccctcaaggttttctaaatttttattttcataataagatttttagttcatctgaaatgtatttttatgattgtatttagtagggacctaattttgtttttctttgtaaccaggtgtcccagcactgtttactgaacagtctctcctttctcgctggtctgtagaactctcctgacatataccaagtttccataagtgggtggatgggttcctgagctctctactgttaatagaacttgctctctcgcaggccaatgcctcaccg

SEQ ID NO: 30572 - DNA, 474 bp, Homo sapiens
  misc_feature (1)...(474): n = A,T,C or G
cgccctttgagaccccttgcaatgatgacctcccacangcaccacgncagngggtatcacagcgtttaaggctttttcatcatgagctgattttgtttttaatgatggattagtactagaaccttctatcctgcttgtctgatgattccacagaacactgaatcccatatcaggcttttgagattggcatactcaaataagttgtgatgacctcagaaggtttatttgaccagatttgactggttcaactcatattaagtcagttttggctcctatgtcttaatgtttgtgaaaaaagtctggaggtggttccaggcttattccaaaatggaaaaaaaatgtcaatgtatagagggctggtaaggaagagattatggacagcatcactggctccggggctgtgaaggtcacagggttcagtttgggccaacaccctcattgcacagatggggaaaccacggccaggaggcactg

SEQ ID NO: 30573 - DNA, 509 bp, Homo sapiens
  misc_feature (1)...(509): n = A,T,C or G
agcggcnccccnncttagacttctgtcagcgtggaggaattcctttncatgtactttagagaggaaatcttacccaagccagaaagtctcagtctaggcattttttttattgtgcaagcatataaaattctagtaattctggggctaatcctgtgatagggagaattcaaggaaaggtggtggtgacccagtgctgccgttttctccttaggtgacgcatccaaagaagacattgacactgctatgaaattaggagccggttaccccatgggcccatttgagcttctagattatgtcggactggatactacgaagttcatcgtggatggtaggaattggaattttttgttgtctttaattgaggtagtttttctgaactgtaaattataatgcctttttaaaaaaagttagcaggggtcttaataaagaccttccaaaatcctgcctcaccaggttgagaattcatgaacagatgtcaggagaaggaagaatgtgactgtctagtgtct

SEQ ID NO: 30574 - DNA, 492 bp, Homo sapiens
  misc_feature (1)...(492): n = A,T,C or G
ngggctcgagatccctagtcagggtggctggatatccctagtgagagtgatggaattcttatgtctgagggtgcagggctgagtgaggaatgtgctctctcctgctactttgccaggagccattcattgacaggccctcccagcacagaaactatagtgatgcgttggttgccatggtttccgaggatgctctgcagctaatctgagtgccccccagagctgctgctctcccctccctgggctactgggatggggtgtgctgcgaccccaggagggtgcatttcgtgctgacctccagcggggcgcgcttctctcactgtctctcactgatgcttgggcctggccacagtagagtcaccttcaatacttgggtgggggaagaggggaggggcttctttctctggaaccacaaagtggctctgagttggaacaccccactggctccagagaatgaagttcctttaagtgaaatactcccaggttcataataan

SEQ ID NO: 30575 - DNA, 463 bp, Homo sapiens
  misc_feature (1)...(463): n = A,T,C or G
ggcagcccttaagagaccattantgaggccgtcgaacaacccanggnnctgcctggcactgcgcgctgaagaaatacccccggatcattatcattcccctcacatggctcgctgcaagaactaccatcaaagggagtggggagagaggaatcgattccagctttctctgtgggggaggggacagctctcgccccaggcttctgagggcttcaccagggggcactgccagcttccagaacacacccttatcctcccagggattggatctgcctgccgaatgggggccaggcataagtgcggtgcagagatgccaaggcagcctacgagagtcctgaaggcctccgatacctgatcctgcaggctggcagacgggcgggtgacacccacagactcttttgttatggctcctaaaacagggaaggcaagagggatctacggtgaggagaaaggccagggaggcacg

SEQ ID NO: 30576 - DNA, 543 bp, Homo sapiens
  misc_feature (1)...(543): n = A,T,C or G
agtcnatagnaggccnnnnnnnnattgaaatcgatcacgtcagagngggcaattcggaggtggatcacctgaggtcaggagttcgagaacagcctgactaacatggtgaaaccccatctctactaaaaatacaaaaattagctcggcgtggtggtgggcgcctgtaatcccagctactcggggccaaggcagcagaatcacttgaacccgggaagcggaggttgcagtgagccgatatcgcgccgttgcacttccagcctgggcgacagagcaagactccctctcaaaaccaaacaaacaaaaaaacctcaagtgcctgcaaggccaagcagatactgtagatgtgtaaagggtagcatagattggcagggttgggagttgggggcaggctgggcaaactggagtgagcaaggcctacttatattttaatactttaaagttatttttattaaactgtctgctgtccaaacataatacatgttgtaggccaaaatggccatgaagctaccagtttgcaaaccctgaactgtgaaatcttttacc

SEQ ID NO: 30577 - DNA, 471 bp, Homo sapiens
  misc_feature (1)...(471): n = A,T,C or G
ccccccccccgcccccaatgagaccctgatcgtaggcgtaagnacgcgcgnccacgcgtgtgatcgtccgtgcgtctagcctttgcccacgcagctttcagtcatggcctccggtaacgcgcgcatcggaaagccagcccctgacttcaaggccacagcggtggttgatggcgccttcaaagaggtgaagctgtcggactacaaagggaagtacgtggtcctctttttctaccctctggacttcacttttgtgtgccccaccgagatcatcgcgttcagcaaccgtgcagaggacttccgcaagctgggctgtgaagtgctgggcgtctcggtggactctcagttcacccacctggcttggatcaacaccccccggaaagagggaggcttgggccccctgaacatccccctgcttgctgacgtgaccagacgcttgtctgaggattacggcgtgctgaaaacagatgaggg

SEQ ID NO: 30578 - DNA, 262 bp, Homo sapiens
  misc_feature (1)...(262): n = A,T,C or G
ggacaccnctttttatnccccttgatagctctcgcannggcnggaanncgacataccttttcttggctggactaccctccccacacctctttagtatctcaacctcttttccacctttaagaacctgccttctctgaatcttgctggcaatctgaagtgttccttctccatccttccattgtactttgcacttatatctgtaactgctctttaccgtattaaattataatagttttattttccatccctctcccaaaatgag

SEQ ID NO: 30579 - DNA, 252 bp, Homo sapiens
  misc_feature (1)...(252): n = A,T,C or G
ngggatcgagtacatagtccaggtggtggtaccgatgtctggtacgcagtcgacaatctcttcgccatcgagttgcaaaacgatacggaaagccccgtgcgccgacgggtggttcggaccgaggttgaggaacatgaagtcctcgttttcggtgccgcgcttcatcccccactcttccggtttgaaggtcagggcttccatctccagatcctgtttggctttggtcagctcaaacggcgagaattcgatatc

SEQ ID NO: 30580 - DNA, 497 bp, Homo sapiens
agggaccaaaaaaaatcgaacttgagtgcactcgccggaaacctgaggatgagtgctttgggttcttgacctcagctcttcccaaggtcttcttagagaagggtctaaatgaagtcatttttagagtatttgtttttgggtacacaggtgcttccgcccatgtggcctcggagtgggaccctgcgggtcatcaatctgtacattgcctgagagcagccgtgtatgctctggaagggacaagaccaggtacctgtcgggggatgcggccgtggtaccaggcatggctgcgcaggtcctcgctgctcaggagcagctcctcctccagctccttcttcagtttctcgggggtcctgtccatgatgtgcctctccttggagaactgcaacacagagtcaaccatgagctcaccctgcccaggccacaccaggccatgccagctggaggtgaccgcctgcttcactaatccaaccagttatgctacagcctgcattcaggga

SEQ ID NO: 30581 - DNA, 483 bp, Homo sapiens
  misc_feature (1)...(483): n = A,T,C or G
gcccccccccccccccccttactgagaccntcantgagagcataggccangngcnggaattcgaggcgagaacgacccccggaccgaccaaagcccgcgcgccgctgcatcccgcgtccagtacctacgtcccgctgccgtcgccgccgccaccatgcccaagagaaaggctgaaggggatgctaacggagataaagcaaaggtgaaggacgaaccacagagaagatccgcgaggttgtctgctaaacctgctcctccaaagccagagcccaagcctaaaaaggcccctgcacagaagggagagaaggtacccaaagggaaaaagggaaaagctgatgctggcaaggaggggaataaccctgcagaaaatggagatgccaaaacagaccaggcacagaaagctgaaggtgctggagatgccaagcgaagtgcgtgcatttttgataactgtgtacttctggagactgtacagtttgaaatact

SEQ ID NO: 30582 - DNA, 475 bp, Homo sapiens
  misc_feature (1)...(475): n = A,T,C or G
gaatgatccgggnnngnnccnaactgagnccncatagatgaccataggacangcggnggaattcgaaggcgctcaataaatgctcactagtgaatcagtaaaataaatcggcagcaaagagagacgagacgcatgctgatcttcaggtgttggggacatcagggacgcgaacatttattgagctcttattgtataccgcgtcggccagcatttgtgtccatttcacacatgaggaataagaggcccagagaggtgaagtgacttccttaaggccacacagatagtaagtggccgagacgaatttgaaaccaggggtgtcctgtttgaacttggtgccaaatagagtaactcggactccagttggaggggttcgggagaaccatagaagaggaagggccgtgtcttccgtggacaggccaccggagccgccagctgtttggaactgagctactgcagaaagggaagtggagagtan

SEQ ID NO: 30583 - DNA, 266 bp, Homo sapiens
  misc_feature (1)...(266): n = A,T,C or G
tggttnccngttttgaaaacccttagatacccctcgcagngngccggaattcattgaaccatcaaaatatattcactttaccatctgggacattttaatcttacctctcatttgttcaatcacatctttcacttcagaaagaactttcacttctgccttgtttttcagaactatctatagccaccacttttcacattaagatgatccttctcaagccatcagagaactaagtgacatctgcaatgaaatggcttcaccacttctgt

SEQ ID NO: 30584 - DNA, 501 bp, Homo sapiens
  misc_feature (1)...(501): n = A,T,C or G
ctgggccannnnaacctcgaaactgagtggcntacgcagngngcnggaattccagcagatctaacattgggagtagggacttgaagtttctcagtcttgtcacttactagatctacgctagtttctagttcttggctcctgtagcctggaccaggtctggttgggttgagcaaaagaatgaaattaggcgtttagaaactagaccaggagctgaagacaggaagcagtcaaaaactctccatgagtgaagaggtagcacttttttgatccaggcatgaaaggagtattaataggaatggggaagttggaacgtgtttccctccatattcctcacgtctattttagcttttccttccatttgtttcttactctttttctttctaacattctctgctagtgtttgaagagcagttgtgagggaacttaaatgatattccccttttccttttccctaataaccttcctgccagattttcaagtaggcaatgataacagcaggtg

SEQ ID NO: 30585 - DNA, 258 bp, Homo sapiens
  misc_feature (1)...(258): n = A,T,C or G
agcaccgcttggaacccatagagaggcntgagaacncgcgctctcagatgcagacacggtgtccgacgagtattctgacgaggaggtggtggatttcatggatgttgccgcctactccatgtctactggggctgttgtgacggagagccagacgtacaaaaaccgagctggtttcttgggtaatgatgattatgctgtatatgtgagagagaatattcaggtgggaatgatggttagatgctgccgaacatacgaagg

SEQ ID NO: 30586 - DNA, 490 bp, Homo sapiens
  misc_feature (1)...(490): n = A,T,C or G
gtttctcccagggagnnnnnaatcgaaaccctatcgagatcactaggccangnggnggaattcccactgccatgacacctatggtcaagccctggccaacaccttgatggtcctgcagatgttagtgagtgtcgcggactcttctgtggcaggacttggaggctgtccctacgcacagggggcatcaggaaacttggccacagaagacctggtctacatgctacagggcttgggcattcacacgggtgtgaatctccagaagcttctggaagctggaaactttatctgtcaagccctgaacagaaaaactagctccaaagtggctcaggctacctgtaaactctgagccccttgcccacctgaagccctggggatgatgtggaaataggggcacacacagatgattcatggatggggacatggaaatgagaataggttaaatggtgcaggtacctcatagccagctctacacagaggtctctccttgcan

SEQ ID NO: 30587 - DNA, 470 bp, Homo sapiens
  misc_feature (1)...(470): n = A,T,C or G
ggaggnnccgggnngnnnnnaactgagaccacattgagngccgtggaanncgctgagtgttactacccagagaggaacgagtggcgaatgatcacagcaatgaacaccatccgaagcggggcaggcgtctgcgtcctgcacaactgtatctatgctgctgggggctatgatggtcaggaccatctgagcagcgtggagcgctatgatgtggaaacatagacgtggactttcgtagcccgcatgaagcaccggcgaaacgcccttgggatcactgtccaccaggggagaatctacgtccttggaggctatgatggtcacacgttcctggacagcgtggagtgttacgacccagatacagacacctggagcgaggtgacccgaatgacatcgggccggagtggggtgggcgtggctgtcaccatggagccctgccggaagcagattgaccagcagaactgtacctgttgagg

SEQ ID NO: 30588 - DNA, 263 bp, Homo sapiens
  misc_feature (1)...(263): n = A,T,C or G
ggaggtgccngnttgaaaccctcggataacntcgcagnggcnggaanncaggagttccagaccagcctgaccaacatggttaaaccatgtctttactaaaaatgcaattattggcacctgtaatcccagctactcgggaggctgaggcatagaattgcttggacctggcaggcagaggttgcagtgagttaagatcgtggcactgcactccagcctgggcgacagagcgagattctgtctcaaaaaacaaaaaagccacctcc

SEQ ID NO: 30589 - DNA, 467 bp, Homo sapiens
  misc_feature (1)...(467): n = A,T,C or G
ngtggtctaggatactgagactcatgacaggctgngaaannacannnaaagacccaggaaggtctctgggtgggataaagccaagatgaaactcccccttcttctggctcttctatttggggcagtttctgctcttcatctaagggctgagacttccacctttgagacccctttgggtgctaagacgctgcctgaggatgaggagacaccacagcaggagatggaggagaccccttgcagggagctggaggaagaggaggagtggggctctggaagtgaagatgcctccaagaaagatggggctgttgagtctatctcagtgccagatatggtggacaaaaaccttacgtgtcctgaggaagaggacacagtaaaagtggtgggcatccctgggtgccagacctgccgctacctcctggtgagaagtcttcagacgtttagtcaagcttggtttacttgccggaggg

SEQ ID NO: 30590 - DNA, 495 bp, Homo sapiens
  misc_feature (1)...(495): n = A,T,C or G
agganccnanaaaattggatcgaagcatatccangngcnggaattcgacgctcatggtgtctttctctaaggcagtttgactacaagcctgctgccctacccctcattctcactctcacgccaccagcactctcctcacagaccctgaagtaacagtgctggacactgactggtgcccagagagtgctggagtttccattctgtcacttctggatgtgtcagcatttcaaaatggtggcctgtcagttttggtcagagagcaaggctgaggtgaagctcttcttacagtggtccagcggggtccgcaggatctccacccagttgccagatgagaagctgttggtagtggtgaggaggaggatgcagaaccctcaaggcgcccagcctgcagggcaggaagcacagcaccagccagtggccgagtttgcacgggaacaggctttgtaggccctgggcattgctcactccagggcataagcagaacccggcctggca

SEQ ID NO: 30591 - DNA, 471 bp, Homo sapiens
  misc_feature (1)...(471): n = A,T,C or G
ggaaggagccgggnngnnnnnaactgaagacacattgacgagcgtggaanncccgactggccgcggtcgtccatcccatggtttgtgaccctcccagcaacgctgtgaggaaggtgctgcagctggttctcagcattggcaggagcatggcgactcaggcagtcagtgttgtgtttattgccggctttcctgagtacacgcagtcaatgatagaccacctggttaccatgaagatcagccactgggatggggtcatccgagagttggctgcgagggcgctgcacaacctggcccagcaggcacccgagttcagcgccacgcaagtcttcccgaggctgctgtccatgacactgagtccagatcttcacatgaggcatgggtcgattctcgcctgcgcagaagttgcttacgccttgtacaaacttgcagcccaagagaacaggcccgtcacggaccatctggacgagcagg

SEQ ID NO: 30592 - DNA, 514 bp, Homo sapiens
  misc_feature (1)...(514): n = A,T,C or G
agagcncccccnccatagaccactgtccatgtggtggaattccgaggacgtgcgcaaggtgtgccaagactgccccctgctggccccgctgaacgacaccagggtggtgcacgccgcgaaagctgccctggccgccttcaacgctcagaacaacggctccaattttcagctggaggaaatttcccgggctcagcttgtgcccctcccaccttctacctatgtggagtttacagtgtctggcactgactgtgttgctaaagaggccacagaggcagccaagtgtaacctgctggcagaaaagcaatatggcttttgtaaggcaacactcagtgagaagcttggtggggcagaggttgcagtgacctgcacggtgttccaaacacagcccgtgacctcacagccccaaccagaaggtgccaatgaagcagtccccacccccgtggtggacccagatgcacctccgtcccctccacttggcgcacctggactccctccagctggctcacccccagac

SEQ ID NO: 30593 - DNA, 460 bp, Homo sapiens
  misc_feature (1)...(460): n = A,T,C or G
agcgggccgnnnnnnnnaattgaacatagcacctaacgacanngccgnggaantccttaggtgggggagcttgtttgtgtccctgtgggtggacgtggttggagattggcaggatcctggtatccgctaacaggtcaaaatgcagatcttcgtgaaaacccttaccggcaagaccatcacccttgaggtggagcccagtgacaccatcgaaaatgtgaaggccaagatccaggataaggaaggcattccccccgaccagcagaggctcatctttgcaggcaagcagctggaagatggccgtactctttctgactacaacatccagaaggagtcgaccctgcacctggtcctgcgtctgagaggtggtatgcagatcttcgtgaagaccctgaccggcaagaccatcaccctggaagtggagcccagtgacaccatcgaaaatgtgaaggccaagatccag

SEQ ID NO: 30594 - DNA, 513 bp, Homo sapiens
  misc_feature (1)...(513): n = A,T,C or G
agaggggcccnnctttgacatcgatcaccntgcggcaagngcaanncggagcatgctgncgaaggagactgtgatttccagctgttgaaactagatggcaagttttccgtggtatacgcaaaatgtgattccagtccacactcagccgaggacgtgcgcaaggtgtgccaagactgccccctgctggccccgctgaacgacaccagggtggtgcacgccgcgaaagctgccctggccgccttcaacgctcagaacaacggctccaattttcagctggaggaaatttcccgggctcagcttgtgcccctcccaccttctacctatgtggagtttacagtgtctggcactgactgtgttgctaaagaggccacagaggcagccaagtgtaacctgctggcagaaaagcaatatggcttttgtaaggcaacactcagtgagaagcttggtggggcagaggttgcagtgacctgcacggtgttccaaacacagcccgtgacctcacagccccaacca

SEQ ID NO: 30595 - DNA, 469 bp, Homo sapiens
  misc_feature (1)...(469): n = A,T,C or G
gaggggcgggttttgataccatcgagaccntcggcagngncgnggaattccggggtctgggcgcggcgaggtctggtgtggcagatgtggatagctggtccctcctgtttgcctctgcgttatgtcgtttgggtgatgcatttggagagaatctgtgctctccacaactgcaggggcaacatgctttcctggcctcttcagatcagggtggctgttcttgggtgctgcaccaaaactccagcagtgggctttcttcaagtggccggctcacctcattcctgccaagacccaggtccgtgttctcacagtgctgccatctttcctccgtgtgagcgtgggctgtgcggagagtggacctcggtgtgtgcggggctgcgtgcactgccatcgctccctctacacgagccggcgtggacccagggctgagctgtgaccacgagggccatcccgacgagccgccatggaccca

SEQ ID NO: 30596 - DNA, 459 bp, Homo sapiens
  misc_feature (1)...(459): n = A,T,C or G
ggagcagggatgaacatgacagcntcnggaannactngngataacaaaaggaaatatctctgagatacattaagtaacttaaaaaaaaactttacacagtttgcctagtacattactatttggaatatatgtgtgcttatttgcatattcataacctccctactttattttcttttatttttaatcgatacataatcattatacatatttatgggttaaagcgtaatgttttaatatgtgtacacatattgaccaaatcaaggtaattttgcatttgtaattttaaaaaatgctttcttcttttaatatacttttttgtggatcttattcctaatactttccctaatctctttctttcagggcaataatgacacaatgtatcatgcctctttgcaccattctaaagaataacagtgataatttctgggttaacgcaatagcactatttctgcatataaa

SEQ ID NO: 30597 - DNA, 479 bp, Homo sapiens
  misc_feature (1)...(479): n = A,T,C or G
gggcccccnncttgacatcgacacgtgggagcccattcacgcatcaggagcgtgctaagcatgcacaactcaaagcccacttataccagcccatgtaggccgacacatcccctgcggatgaaaaagccttacaggaccaactggcgctggtctttgctaaacttgacaccagaatacaatttgatggcctgaatgggcggcatgctatgcaacttcttgggcttccgtatatatggcatgcacagtgagctatggggcgtggtccatggggccaccgtcctctccccaacggctgtctttggcaccctggcctctctctatctgggagccttggaccacacagctgacaggctacaggcaatcctgggtgttccttggaaggacaagaactgcacctcccggctggatgcgcacaaggtcctgtctgccctgcaggctgtacagggcctgctagtggcccagggcagggctgatagcca

SEQ ID NO: 30598 - DNA, 511 bp, Homo sapiens
  misc_feature (1)...(511): n = A,T,C or G
gagccnnnnnnnaatagaaatcgagcaccctccgagngggcaattccagagactggcctgagggagcaggtggtaaaacctctgccacagcagtccccataaggctgaagattcctggatcccctctgctcatactgggccagtttcctcgccacccgtcctgctgtactctggccaaactaaaaagacatctctatttaactttcctcggcatttcccatctctctggatggttccaggataactttcttttaatagttggacaactttgaccacatcatggggtgatgtaggttgtctacagggagtccctgtgcactcagccatctcagagcaacgtgctagctggtcaggttcccaccgcctgcatctgtgtgaatcggttatttgggtagaagtttgaaacctctcattttgaaactactgaaaatagtgtgtttatataagaatatgctcacgcaaattgcgtgtatttaatcctataatacatatcttaccaagggagatttgt

SEQ ID NO: 30599 - DNA, 511 bp, Homo sapiens
  misc_feature (1)...(511): n = A,T,C or G
aggccngnnnnaatagacatcgagcaccatgcggaattcgcgcttcaacgtggacaagaagtgccagtgtgacgagctctgctcttactaccagagctgctgcacagactatacggctgagtgcaagccccaagtgactcgcggggatgtgttcactatgccggaggatgagtacacggtctatgacgatggcgaggagaaaaacaatgccactgtccatgaacaggtggggggcccctccctgacctctgacctccaggcccagtccaaagggaatcctgagcagacacctgttctgaaacctgaggaagaggcccctgcgcctgaggtgggcgcctctaagcctgaggggatagactcaaggcctgagacccttcatccagggagacctcagcccccagcagaggaggagctgtgcagtgggaagcccttcgacgccttcaccgacctcaagaacggttccctctttgccttccgagggcagtactgctatgaactggacgaaaaggcn

SEQ ID NO: 30600 - DNA, 456 bp, Homo sapiens
  misc_feature (1)...(456): n = A,T,C or G
attgaccgcagtccctaggccagngnggtggaattctatatgacgaacagctcgcgctacagagaggcacagaacacctctgacgatctgaagctgaccatcattactgcacaaccgccgggccctacaccttgcaccgcgcatatgcgttgctattataacggcccggctctatgagttcctggacaaactggaaggggagcgcatcttattgcatgctcgggtgcggacagatactcttcggcatgacgcagacgggcaggccaccctgttgaacctcctgctgcggaattacctacactacagcttgtacgaccaggctgagaagctggtgtccaagtctgtgttcccagagcaggccaacaacaatgagtgggccaggtacctctactacacagggcgaatcaaagccatccagctggagtactcataggcccggagaacgatgaccaacgn

SEQ ID NO: 30601 - DNA, 516 bp, Homo sapiens
  misc_feature (1)...(516): n = A,T,C or G
aggcnccgcccccaattgacatagatccgctgtgcgcagagccccaagctgatggatatcagcgttaaactctgcgtggcaatccctgacgcaccgctcgtgatgcccatggaagacagggcgacctggaagtccaactacttccttaagatcatccaactattggatgattatccgaaatgtttcattgtgggagcagacaatgtgggctccaagcagatgcagcagatccgcatgtcccttcgcgggaaggctgtggtgctgatgggcaagaacaccatgatgcgcaaggccatccgagggcacctggaaaacaacccagctctggagaaactgctgcctcatatccgggggaatgtgggctttgtgttcaccaaggaggacctcactgagatcagggacatgttgctggccaataaggtgccagctgctgcccgtgctggtgccattgccccatgtgaagtcactgtgccagcccagaacactggtctcgggcccgagaagaccttctttttn

SEQ ID NO: 30602 - DNA, 486 bp, Homo sapiens
  misc_feature (1)...(486): n = A,T,C or G
cgccttctnnnccccaagtcgagctgctatggcaggaccnnatgaggttgcggctcttctccggtggctggaggaatctgtgcaactctctcgaagccatgttcacctaattgggtacagcctgggtgcacacgtgtcaggatttgccggcagttccatcggtggaacgcacaagattgggagaatcacagggctggatgccgcggggcctttgtttgagggaagtgcccccagcaatcgtctttctccagatgatgccagttttgtggatgccattcatacctttacccgggagcacatgggcctgagcgtgggcatcaaacagcccataggacactatgacttctatcccaacgggggctccttccagcctggctgccacttcctagagctctacagacatattgcccagcacggcttcaatgccatcacccagaccataaaatgctcccacgagcgatcggtgcaccttttcatcgactcctt

SEQ ID NO: 30603 - DNA, 490 bp, Homo sapiens
  misc_feature (1)...(490): n = A,T,C or G
agggttctnnnaactgagacctaactgcagtgtgcaggaactcggatacaaacacaccttgaaccagattgatgaagtaaaggtgtggcctcagcagccctccggagagctgtttgagattgaaatagacaccctggaaaccacctgccatgtgctggaccccacccctgtggcaagatgcagcgtgaggcagctgaaggagcatgctgtcgaaggagactgtgatttccagctgttgaaactagatggcaagttttccgtggtatacgcaaaatgtgattccagtccagactcagccgaggacgtgcgcaaggtgtgccaagactgccccctgctggccccgctgaacgacaccagggtggtgcacgccgcgaaagctgccctggccgccttcaacgctcagaacaacggctccaattttcagctggaggaaatttcccgggctcagcttgtgcccctcccaccttctacctatgtggagtttacagtg

SEQ ID NO: 30604 - DNA, 488 bp, Homo sapiens
  misc_feature (1)...(488): n = A,T,C or G
cgccttctnnaaactgagacctancgcattgngcaggaactngganaanaacaaagccactgtccatgaacaggtggggggcccctccctgacctctgacctccaggcccagtccaaagggaatcctgagcagacacctgttctgaaacctgaggaagaggcccctgcgcctgaggtgggcgcctctaagcctgaggggatagactcaaggcctgagacccttcatccagggagacctcagcccccagcagaggaggagctgtgcagtgggaagcccttcgacgccttcaccgacctcaagaacggttccctctttgccttccgagggcagtactgctatgaactggacgaaaaggcagtgaggcctgggtaccccaagctcatccgagatgtctggggcatcgagggccccatcgatgccgccttcacccgcatcaactgtcaggggaagacctacctcttcaagggtagtcagtactggcgctgtg

SEQ ID NO: 30605 - DNA, 478 bp, Homo sapiens
  misc_feature (1)...(478): n = A,T,C or G
attgaactcgaagcatatccangtgcnggaattcgttgtcgtggccggagcggcccgcgcctgggctgccggcacttcgcggcagtcagagcaccataacatggtgtgggaagtgaagacaaatcagatgcctaatgcagtacagaaactcctgttggtgatggacaagagagcctcaggaatgaatgactcattggagttgctgcagtgtaatgagaatttgccatcttcacctggatataactcctgtgatgaacacatggagcttgatgaccttcctgaacttcaggcagttcaaagtgatcctacccaatctggcatgtaccagctgagttcagatgtttcacatcaagaatacccaagatcatcttggaaccaaaatacctcagacataccagaaactacttaccgtgaaaatgaggtggactggctaacagaattggcaaatatcgcgaccagtccacaaagtccactgatg

SEQ ID NO: 30606 - DNA, 495 bp, Homo sapiens
  misc_feature (1)...(495): n = A,T,C or G
naatcgagaccctatnccaggnatcgagnacccctcaacagtgcggcgctcactctcaacagcacggatgccactagtgagcgggactttgtggccgagatcctgttctgggcttcgctgtgcatgacccatctcagcaggatggccgaggacctcatcctctactgcaccaaggaattcagcttcgtgcagctctcagatgcctacagcacgggaagcagcctgatgccccagaagaaaaaccccgacagtttggagctgatccggagcaaggctgggcgtgtgtttgggcggagtgccgggctcctgatgaccctcaagggacttcccagcacctacaacaaagacttacaggaggacaaggaagctgtgtttgaagtgtcagacactatgagtgccgcgctccaggtggccactggcgtcatctctacgctgcagattcaccaagagaacatgggacaggctctcagccccgacatgctggccactgacctt

SEQ ID NO: 30607 - DNA, 450 bp, Homo sapiens
  misc_feature (1)...(450): n = A,T,C or G
atttgatcgcgtccactagtccgngtggtggaattcccggcccatccaagcgggatcgcagacagatcttcctgccagagcccgagcagccctcgaggcttcaggatccagttctcgtaagctgcgactcggcgccctgtactgtggtgcagtgtgacctgcaggagatggcgcgcgggcagcgggccatggtcacggtgctggccttcctgtggctgcccagcctctaccagaggcctctggatcagtttgtgctgcagtcgcacgcatggttcaacgtgtcctccctcccctatgcggtgcccccgctcagcctgccccgaggggaagctcaggtgtggacacagctgctccgggccttggaggagagggccattccaatctggtgggtgctggtgggtgtgctgggtggcctgctgctgctcaccatcctggtcctggccatgtgga

SEQ ID NO: 30608 - DNA, 452 bp, Homo sapiens
  misc_feature (1)...(452): n = A,T,C or G
nttcgattgcactagcccgtgtggnggaattcgcaagtccccgagatggtaaccgctgtctccaatgtgccttcctagggcaatttttccaccccatcggttttgaagtgtctgacatccacccaggctccgaccccacaaagccagatgccacgatggtggtgaggaaccgccggctcacggtcaccaggggtttgcaaaaagactacagcaaggacccgtggcatggggccgaggtgtcctgctggttcattcacaacaatggggctggactcatcgatggtgcctacactgattatatcgtccccgacatcttctgagccctctggccagcacgcctgtcctcccccggggccaaggcagaggaggaggacgacatcctgacctgctgctgaggctgtacctccttgactaagctggttccttgtgtcaaagcacctcatgccttccan

SEQ ID NO: 30609 - DNA, 459 bp, Homo sapiens
  misc_feature (1)...(459): n = A,T,C or G
atgggcntnanccaggttcgagagcatgtgcgnggcancaaanangngaaagataaaatgttaaaattgataaagctgagtggtatcacagatgtttgttatttttttcatagatttctctatgttgctaagatgtgataatttaaaaatttcttagagagataagacttgtgccaagttgtttgcctttactcaaaacaacctttggctaatccgctattagaatgtattatttatcaatgttagccttcatttgctgctgccagtatgcctgccatagcaactcatgcctacaaatttgaatctgcttcttctgatctgttgattagagaaatcgattttgaagctcgtttagaagtatacataacttaagagttttggctgggcgcagtggctcatgcctgtaatcccagcactttgggaggctgacgtgggcagattgcctgaggtcaggagttc

SEQ ID NO: 30610 - DNA, 518 bp, Homo sapiens
  misc_feature (1)...(518): n = A,T,C or G
gagttaccnnnnnnagnnnaatcganacccttnncagngaatgagantcctactcagngtgcgggaattccggcttcctgcctcggaagcgcagcagcaggcatcgtgggatggtgaagagcttccctatggatgacccgtccaagccggtccacctcacagccttcctgggatacaaggctggcatgactcacatcgtgcgggaagtcgacaggccgggatccaaggtgaacaagaaggaggtggtgaaggctgtgaccattgtagagacaccacccatggtggttgtgggcattgtgggctacgtggaaacccctcgaggcctccggaccttcaagactgtctttgctgagcacatcagtgatgaatgcaagaggcgtttctataagaattggcataaatctaagaagaaggcctttaccaagtactgcaagaaatggcaggatgaggatggcaagaagcagctggagaaggacttcagcagcatgaagaagtactgccaagtcatccgtgtcatn

SEQ ID NO: 30611 - DNA, 450 bp, Homo sapiens
  misc_feature (1)...(450): n = A,T,C or G
attgctcgagtacctaggccgngnggtggaattccttggcttggctttgttctcatttcttcttttgacctcaaacaggccacggttcatgactctctcaggaagggattttatctccatcacttgcaacttcttggagctgaagtctgcacagcactgtggagattgtcagatctgcgtggacaagggagggcaggcctggtggtttggagaagtagggctatgccagagtgaggtggcacggggtgcaggcggcttctttgagggggacccggggaagcaggaacaggaaagccagctaaactgcaacctcagtccccgttgaagacagcagggcctgaggcagctgcacccagacgtctccggagttcgtgttggtccaaaggagggaggctgggtggagactcacctgctgcagtccccatgggctgagtgttgtggagctgtcgn

SEQ ID NO: 30612 - DNA, 450 bp, Homo sapiens
  misc_feature (1)...(450): n = A,T,C or G
nctcgatagcctaccccangnggnggaattcctatttccctcctgaggatggcttgacccgagtcggcttccgcacagtgttgctgagaatacgagaacagtgatcctgagcttcctgttctcctactggctcagccatcgactgactcaggatggctctcgggcccagcagatggccttgcataccctgaaaatgatggctaacgggggcatccgggaccatgtggggcaggtgacgggcactgggtgttccctggaggggcagcagggggctgtggggtggggcacaagctgggactggcctccagctttgtatccgcacagggctttcaccgctactccacagaccgccagtggcacgtccctcactttgagaagatgctctatgaccaggcacagctcgctgtggcctattcgcaagccttccagctctctggtgatgaattctac

SEQ ID NO: 30613 - DNA, 459 bp, Homo sapiens
  misc_feature (1)...(459): n = A,T,C or G
aggcccgcaatagaannccnnnnntttcgagatccatagtcagtgtggtggaattcgtgttccactgcctcttctcttctcgcttgggaactccagtctcacctcggcttgcaatggaccccaactgctcctgcgaggctggtggctcctgcgcctgcgccggctcctgcaagtgcaaaaagtgcaaatgcacctcctgcaagaagagctgctgctcctgttgccccctgggctgtgccaagtgtgcccagggctgcatctgcaaaggggcgtcagagaagtgcagctgctgtgcctgatgtcgggacagccctgctgtcagatgaaaacagaatgacacgtaaaatccaggattttttttttctacaactccgactcatttgctacattccttttttttctgtgaaatatgtgaataataattaaacacttagacttgataaaaaaaaaaaaaaaaaa

SEQ ID NO: 30614 - DNA, 483 bp, Homo sapiens
  misc_feature (1)...(483): n = A,T,C or G
nttttgaaagcccttcgaannatcagtagattcgtcggaagngccgcggaanncgcgtcatcacaatagtaaagtccaagacggatgcccgatcgtagggacgcgcgtctgcccaggcgggtctttgcggggccactaggcacatggcgaatttggctgccctgtccctctgtttccttctcttctctttcctccctctcttccccacccttctctcttccctgcaaagcacaacctgtaccccaggggcgccgggctgagcccctttgatctcgtcattgtcgtcgtgtgttttgtatgttgggattggtcagttcggcggtgacgtggggtcgccccaaccccttttgtaccagggccatgcaggcttggagtccagagttggtgctgtgggaacggactanagagagttgcgggagagagaaggagcaggcacgctgggcctcgcgtgtccccgagcagtgagggtcccagtgttccctg

SEQ ID NO: 30615 - DNA, 460 bp, Homo sapiens
  misc_feature (1)...(460): n = A,T,C or G
tgtngntnnnaatgaaactagagcatagtccgtgcggtggaattaaaataaatactggggcagcagacaggggccagcctgcctgtcctgaggcttgttttctctcgtgggcagcttccgggcatttgtggaggacagtgaggacgaggacggcgctggggagggcggctccagtttgctgcagaaacgtgccaaaaccaggcaggagaaggcccaggaggaggccgactacatcgagtggctgaagggacagaaagagattcggaacccagattccctgaaggaactgacgcatctcaaggaatactggaacgaccctgagttggatgaaggggagcggttcctgcgggattacatcctcaacaaacgctatgaggaggaggaagaggaggaggaagatgaagaggaaatggaggaagagaaagggtccacggtcccccagtccagctggctgtggaca

SEQ ID NO: 30616 - DNA, 462 bp, Homo sapiens
  misc_feature (1)...(462): n = A,T,C or G
cggggctnnnaactgaacttagnatcntctgncgnggcantcgnnggaaagagacaactttggggcgataggatagtaacaagatcgccagatccagggtgattttctcagcacacgtgcacaaaacccagtaacattttttgctttttgcagctcttctctctctaagaactcacagtccatatttctgtctcctgggcacggagattggaggtgggatagggaaggcggctagttattttcccccatgttctaacctaaatggagtaaaggaagtccagagaacatctgtggctctccagggtcactcagcacatggcgagggggcagccattagcttaatgagtggcaggcgggcttatgtctgggtcttgtatcttctagcaaatgcccagctcctacactaaacccctgacttgggaggccgtgtggagaagggaacagagctttccttggcagaga

SEQ ID NO: 30617 - DNA, 506 bp, Homo sapiens
  misc_feature (1)...(506): n = A,T,C or G
cgttaaannnnagnnnaatcggaccctttccanggtcgatattcctacaccacttctgacgctgtcatttccactgagaccgtcttcattgtggagatctccctgacatgcaagaacagggtccagaacatggctctctatgctgacgtcggtggaaaacaattccctgtcactcgaggccaggatgtggggcgttatcaggtgtcctggagcctggaccacaagagcgcccacgcaggcacctatgaggttagattcttcgacgaggagtcctacagcttcctcaggaaggctcagaggaataacgaggacatttccatcatcccgcctctgtttacagtcagcgtggaccatcggggcacttggaacgggccctgggtgtccactgaggtgctggctgcggcgatcggccttgtgatctactacttggccttcagtgcgaagagccacatccaggcctgagggcggcaccccagccctgcccttgcttccttcaataaacatca

SEQ ID NO: 30618 - DNA, 450 bp, Homo sapiens
  misc_feature (1)...(450): n = A,T,C or G
attgattcgcgtccactagtccangtggtggaattcccttgtctcaaataataataattctctctttctatacacgcatttagtgaaataactcccttttcacagctaatagcctgcatattttgatatgttgtattttaatttttattcagttttatgtattttaaaaatttcctttaggattttctcttagatcaatgtatttagaactgtttaattcccaagtggtggggagtggggaggctttatttttgtataataccgatttccactttggtttgactttgctcagaaaatacactgcgtattatttcagttcttttaaatttgttgatgtttgacttatgtcttaatgttgatgtttgagttacttactgcctgagctgcacactccacagggccactgggagctgaggacaagtgggggcgccgccctcccacttccaagtt

SEQ ID NO: 30619 - DNA, 525 bp, Homo sapiens
  misc_feature (1)...(525): n = A,T,C or G
agcgtttcnnaannnnnagnnnnnatttgannncccctnnnnnnnnactcgagantcctatgcagtgtgctggaattcagtcttcttacttggaactgaagggggcggcctatgacttgggcacccccagcctgggcctatggagagccctgggaccgctacaccactctggcagccacacttttcaggacacaggcctgtgtagctgtgacctgctgagctctgagaggccctggatcagcgtggccttgttctgtcaccaatgtacccaccgggccactccttcctgccccaactccttccagctagtgacccacatgccatttgtactgaccccatcacctactcacacaggcatttcctgggtggctactctgtgccagagcctggggctctaacgcctgagcccagggaggccgaagctaacagggaaggcaggcagggctctcctggcttcccatccccagcgattccctctcccaggccccatgacctccagctttcctgtatttgttcccaagagcn

SEQ ID NO: 30620 - DNA, 497 bp, Homo sapiens
  misc_feature (1)...(497): n = A,T,C or G
gggagctcagggnngtccnnnnaactgagnncctgagnacactctgcagngcggnggaattcacaccggacaccaggacccaagcccagcagacacaggatctgctaacgcagctggcagctgaggtggctatcgatgaaagctggaaaggaggaggcccagtgaccctccaggactatcgcctcccagacagtgatgacgacgaggatgaggagacagccatccaaagagtcctgcagcagctcactgaagaagctgccctggatgaggcaagtggctttaacatccctgcagagcaggcttctcgaccctggacgcaaccccgcggggcagagcctgaggcccaggatgtggaccccaggcctgaggctgaggaagaggagctcccctggtgctgcatctgcaatgaggatgccaccctacgctgcgctggctgcgatggggacctcttctgtgcccgctgcttccgagagggccatgatgcctttgagcttaan

SEQ ID NO: 30621 - DNA, 452 bp, Homo sapiens
  misc_feature (1)...(452): n = A,T,C or G
tctgagntaccgttactgcccggaanngccnnggaantcctttctttcttctttcttttcctttcttcctttctttctttctttccttctcttttctcttagctcccactagcctaagggctgtggaaaccagtaccttttgtctgcacccagccccctctcctccctttggtggcttcctgtgtgtccagggctagcgtcttctaggtgaatctaagatgtcagtaccttagccttcggctgcttgctcagagcctggtttgtgttctttccccagctctgccaggcccattcccagctgctgcagtacatggagcgatacgggtgagatgtgactctctgaggtagtgggacagtcccttggtggccccctgcatgggcctctgagaggcagcactttggttcccacctctggcccgggctgtggcggggtggagctgcatgccattcat

SEQ ID NO: 30622 - DNA, 468 bp, Homo sapiens
  misc_feature (1)...(468): n = A,T,C or G
ggaggannnnnnncctgagaaactgctantactggaagnngcgnggaanncgccaccccccatctcctccatctcctctatccttccatcccctccatcccttcgtccctccatcccctccgtccctccatccctccgtcctctccgtctccttcatcctctctgtccctccatccggtacagttccgtctgccagaggcagggcttgcttcatgccttctgtgctcctcctccacactcaacctccttttccccccaacaggccaccctgcagttctgtgtggtgaagccactcatggcggtcagcactgtggtcctccaggccttcggcaagtaccgggatggggactttgagtaagcagcgggtgctccccggggtgtgtgggaggagtgttggcgcaggctggtgccttggctcagggaagggggcagccagagtggccgcacagccatgaccttcctgggtgg

SEQ ID NO: 30623 - DNA, 472 bp, Homo sapiens
  misc_feature (1)...(472): n = A,T,C or G
aactcgataaccctggaagngcttgaaaccatgagaggagacngggaaggatccacggccgaacagcaggagatggcatttcgtaggtagtgggaagccttgggaattttttgagctgtaatgcagttgatctatcgctgttgaacctagagtctagtcagcttgtctgtctgcttgaacatttccagtgactgggagacattattcgttggacacttgtttgggtattttcccttgtattaaaagctagaaatctgtctgttaatttccattccttggtcttaggcagtggagtgctttgtcataatttccgaccaggtgtccttctgctctgccagaaatcacgcctctcgccatctgttctctgcttaatactcttcaacagtcccgtgtgaccacagagtccaggtctaagctcttttgcctccgtccctgtaggcgtccctcangatctgcacgccccgctttgagg

SEQ ID NO: 30624 - DNA, 479 bp, Homo sapiens
  misc_feature (1)...(479): n = A,T,C or G
attggatacattcgaanntctcttgaacctaggacangcggnggaantccccggcgctggagtccgactcgccgctgcccccggaggacctggacgcggttgtcccattcagtggagccgtcgccggtggcatgttggatcggatccttctggagtccgtgtgccagcaacagagctgggtccgggtgtacgatgtgaaaggaccacccacccaccgtctgtcttgtggtcagtcaccctacaccgagacaacaacgtgggagcggaagtattgcatcctcacagacagccagttggtattgctcaacaaggagaaggagatacctgtggaagggggacaggagcagcagacagattccaccaaagggcgatgcctgaggagaactgtcagtgtcccttccgagggtcagtttcccgagtacccaccagagggcgccactaaactggaggtaccagcagaaaggtcccctcgtagacgg

SEQ ID NO: 30625 - DNA, 471 bp, Homo sapiens
  misc_feature (1)...(471): n = A,T,C or G
tctgaaactctcgaagngcnggtatacctccgancgaccaanccgngaagaggccgncagggttgagcaggtagatggcaatgtattggtccacgatgtagtcctggtcctcatccttggggccggcattgtagtacacgcggtaactgtgactagcctgggcaacctgtttggtggagccggtcagacccaacagtcttgggtggaagtcctggacgtagcgggccatggcttcaacgtcgtcccgctcggggtccacagtgatgaagacaggctgcactggaggcaaaccaggctctgcttccagctgccgcaccacctgcaccagcttctccagctcgtctgggcagatgtcagggcagtgagtgaagccaaagtacatcagcacccactggccccggaagtcagccttgcagcgagcccggcctttgtgatccaacaagtggaagtcgccctggcccacagcttgct

SEQ ID NO: 30626 - DNA, 515 bp, Homo sapiens
  misc_feature (1)...(515): n = A,T,C or G
gtgcccgggggaanannnannacctcgaatcgcagtnccgtgtggngcaattccgtggcgctgccgctgcagctaccggccagccagggactgcgcctgcaggaacccctggtgccccacccctggctggcatggccattgtcaaggaggaggagacggaggctgccattggagcccctcctactgccactgagggccctgagaccaaacctgtgcttatggctcttgcggagggtcctggtgctgagggtccccgcctggcctcacctagtggcagcaccagctcagggctggaggtggtggctcctgagggtacctcagccccaggtggtggcccgggaaccctggatgacagtgccaccatttgccgtgtctgccagaagccaggcgatctggttatgtgcaaccagtgtgagttttgtttccacctggactgtcacctgccggccctgcaggatgtaccaggggaggagtggagctgctcactctgccatgtgctccctgacctgaaggan

SEQ ID NO: 30627 - DNA, 470 bp, Homo sapiens
  misc_feature (1)...(470): n = A,T,C or G
taagaaagcctggaaggcctgataacctccgaagcncnngcannnnagagctaccagtttcctagaacagcagaagtagcatgctcccctggcccaaccaacaggtgcggctatagtggcctatctgtactggggaggggacaccccaaatctgacattgacaggttcacccaacagcagggatgtcctgtgccatgtgtaataccccctcttctttcatagctccagaatgtccaatgactacatagcactgtgctgagtccttcacatacaccagcctgtctttgtgcttgtaacagtctataagggaagcattattactcccattctacaggtggggaaattaagactcagagagaaaaggtaatttgctcaaggccttgtagctagaaatttggaagagctaacacataccactcttggcatagcagtttagacatggacagctttaggatggtgagactgagaac

SEQ ID NO: 30628 - DNA, 471 bp, Homo sapiens
  misc_feature (1)...(471): n = A,T,C or G
tctgaaccctcgcagngctgatatcctcgcagnctccncagatgggatataggaagctcctgggcttagctgtgggaagccaagtaccctcaccggcatgggacatgaggggcagctagacttcacccccttcccgcagacctgcctccagagcaaggagaattctgccttaatctgttgggctccagtctccgggttgaattccagtgtatcccactgggagtgaatggatcatgaggtgggatggccccatctggatgttctgcagatccccacatgggaggagattcccaagtagaggcagccagaattctgactccctggcagcagcagggctttcaggcaccagtgtctgtgttgttagaactcaaaggaagaggcaggggcagcagccgacagggggcagcatgacccaagcaaggggcctgaggcctcagtgggggtagggcaaggaggtacctcacaggtggg

SEQ ID NO: 30629 - DNA, 489 bp, Homo sapiens
  misc_feature (1)...(489): n = A,T,C or G
caatagaagcccctggaannncncnactgagaccntaggaagnngcgnggaattcatccctctttggctgtcccatccaacaggtggcctgtggctgggattttacgattatgctcacagaaaatggtcaagttctatcatgtggatccaactcctttggccagttaggagttcctcatggacctcgaagatgtgtggttccccaggccattgagctccataaagagaaggttgtttgtattgctgctggactgaggcatgcagtagctgctacagcgagtggcatcgtgttccagtgggggactggtttggcatcatgtggacgacggttgtgccctgggcagactcttccattgtttttcacagcaaaggaaccaagcagagtgacaggtctagagaattctaaagcaatgtgtgttcttgctggctcagaccactcagcttcattaacagatgcaggagaggtgtatgtttggggaagcaacaagc

SEQ ID NO: 30630 - DNA, 484 bp, Homo sapiens
  misc_feature (1)...(484): n = A,T,C or G
agcggttttnnnatacgacngtaagcaattgtcgnggaattcgacagtcttactccgttgcccaggctggagtgtagtggcatgacctcggctcactgcatccttcgcctcccgggttcgggcaattctcctgcctcggcctcccgagtagctgggattgcagaggcctgccaccacacccgactaattttcgtatttttagtagagacggggtttctccatgttggccaggctgttcttgaactcctgacctcaagtgctccacctgcgttggcttcccaaagtgctgggatacaggagtgagccactgcgcctggctgatcccagcacttttcaaatgatgccgctcaaagccgtgacttggcctactttgaacagcaaacttgttgctgctgttgtcaacctgaaggcctctcaaatgccagcttcaagcagggtgtgaattggccagtgtcagatctcaggagtcctgtgttgagagtgt

SEQ ID NO: 30631 - DNA, 481 bp, Homo sapiens
  misc_feature (1)...(481): n = A,T,C or G
ccatgggaccttggcagnggcgggatgatgaccgtgagcgagttcgagaaaggtttaatccccaacaagagcagagctgaacaaatggccagtgttcaaaatgcccagagagacaacgctggggaccgggcagatttctggagaatgcgtggccagaggtctggggtgaagaagaacctgaggaaaagtcgggaagacctcacagctgttgtgtctgtcagcaccaagttcccagcttatgagagggttttgctgcgagaagctggtttcaagagacctgtggtcttattcggccccatagctgatatagcaatggaaaaattggctaatgagttacctgactggtttcaaactgctaaaacggaaccaaaagatgcaggatctgagaaatccactggagtggtccggttaaataccgtgaggcaaattattgaacaggataagcatgcactactggatgtgactccganagctgtggacn

SEQ ID NO: 30632 - DNA, 490 bp, Homo sapiens
  misc_feature (1)...(490): n = A,T,C or G
tgcgggctnnnnnnnaattgatactcatatctctaggccgngtggtggaattccaaagttgccaggacttcccagggaagctgcagcagctctcggtgccagctttctggcggaggctcctctcccagagacagtgcgtggctccggcctggcaggaatggcagtgacatgcgatccaaaggccttcctgtccatctgctatgtcaccttggtcttcctgcagctcccactggccagcatctgtcaaaactgagggacagactcctgtgcaagtcgagggaaagctgactttgatgtcactgggcctcatgcccctattctggctatggctgggggacacgtggagttacagtgccagctgttccccaatatcactgccgacgacatggagctgaggtggtacaggtgccagccctccctatctgtgcacatgcatgagagagggatggacatggatggagagcaaaagtggcagtacagaggaaggacc

SEQ ID NO: 30633 - DNA, 484 bp, Homo sapiens
  misc_feature (1)...(484): n = A,T,C or G
catggacgccttngnannncncnaaatagtccatggaagcgcgcggaattttagcaaaggaaggctccccatgccatggtgtttgttatgctgtgatataactagttgtttactcatctgtgagtcccctgagccagaagcttattcaggacaggacccatgtctgattcttctcggtgccctctacccaaagcccagcacagagtaggcctgtttgttgaatgaatgaatgaatgaatgaatgaagcaaatataaatagatgagagggtagagcacctggcctgtgagctgctttcctgcccacctgtttcctttctttcttagctgngggaatcactttaaccctgatggagcatctcatgggggcccccaggactctgaccggacagggccaagaggaccttgcctgcccagtccttggggagctcagatcctacgagactggtacccacaggaggaaatgggtactttagggaagcagga

SEQ ID NO: 30634 - DNA, 471 bp, Homo sapiens
  misc_feature (1)...(471): n = A,T,C or G
aggttgccnaatcagtagaccncatcgatagcgtgcaaanncacgcnncnccctgttgcgggcagggggcgcaggagtctggctggttgtcttctcctgtaggaggagcatggggtgggggctacagcgtgaaccctgccatgtgtccgccccaggaaccaacgtgcctgcaaccttcggccatctggcaggtggctaccacgcccagtactacgggtacctgtggagcgaggtgtattccatggacatgttccacacgcgcttcaagcaggagggtgtcctgaacagcaaggttggcatggattacagaagctgcatcctgagacccggcggttccgaggatgccagcgccatgctgaggcgcttcctgggccgtgaccccaagcaggacgccttcctcctgagcaaggggctgcaggtcgggggctgcgagcccgagccgcaggtctgctgaggcctggcactgcgact

SEQ ID NO: 30635 - DNA, 520 bp, Homo sapiens
  misc_feature (1)...(520): n = A,T,C or G
tgagaggggnnngnagttttgatcccgtccgngnattgattaccataagtaccacactcccaagattgcccttttgaatgtcgagctcgagttgaaagctgagaaagacaatgctgagataagagtccacacagttgaggattatcaggcaattgttgatgctgagtggaacattctctatgacaagttagagaagatccatcattctggagccaaagttgtcttgtccaaactccccattggggatgtggccacccagtactttgctgacagggacatgttctgtgctggccgagtacctgaggaggatctgaagaggacaatgatggcctgtggaggctcaatccagaccagtgtgaatgctctgtcagcagatgtgctgggtcgatgccaggtgtttgaagagacccagattggaggcgagaggtacaatttttttactggctgccccaaggccaagacatgcaccttcattctccgtggcggcgccgagcagtttatggaggagacagagcggccc

SEQ ID NO: 30636 - DNA, 483 bp, Homo sapiens
  misc_feature (1)...(483): n = A,T,C or G
tgtggctgnnnnnaactgaattagatctattgccnggacnncgagnggggaaagaacatcgactgcgtggggaggaactacgcggaccacgtcagggagatgcgcttcgcggtgttgagcgagcccgcgctgttcctgaagccgtccacggcctacgcgcccgagggctcgcccatcctcatgcccgcgtacactcgcaacctgcaccacgagctggagctgggcgtggtgatgggcaagcgctgccgcgcagtccccgaggctgcggccatggactacgtgggcggctatgccctgtgcctggatatgaccgcccgggacgtgcaggacgagtgcaagaagaaggggctgccctggactctggcgaagagcttcacggcgtcctgcccggtcagcgcgttcgtgcccaaggagaagatccctgaccctcacaagctgaagctctggctcatggtcaacggcgaactcagacaggagggtgag

SEQ ID NO: 30637 - DNA, 472 bp, Homo sapiens
  misc_feature (1)...(472): n = A,T,C or G
catcgacccatagccggcccgattgataagatagacacctaagnccgatgagttatanatcttncaagacatgcttttttttggtgtggagagncaggatttggcccttggattcttgggcggagtgctggttctttcatgtcctccccagcccatgaattgaaatagcagccacagagactcccagccttcctgtaatttgtgtctcctgcaggtggaggccgtcatggcagagctgagtctgagccatgtggcagaccgactgattggcaactacagcttggggggcatttccacgggtgagcggcgccgggtctccatcgcagcccagctgctccaggatcctacaatgtgctaaagggtgctatccaggaccgcgtaggtctcctttaccagtttgtgggcgccaccccgtacacaggcatgctgaacgctgtgaatctgtttcccgtgctgcgagctgtcagcgacc

SEQ ID NO: 30638 - DNA, 483 bp, Homo sapiens
  misc_feature (1)...(483): n = A,T,C or G
tggggctnnnnnnaactgtactcatatcaatngncgnggacnncgccaacagccaggccttacagtggggcaggcttagtgactgtgcctcagttatgctgtacctgtgagtgggcaggccctctcccatgtcaccatcaaaacccactgatgaaggctggtgggagtctgagggctgcacccgggtatggtgagttcccctcagggattgtgctgagcgccttggcctggcttcttggctccgcccacctgctctccctgccaccaagttgtcttccccgggtggcatgtgccacttggctgcctcgtgcctgggcacagtggtgcctattatgggccctccaggtggctctggtgctcagcctgctgtgagcaggaacagctgagtcccaggggttcttgcacacagcagggctcgggtttgaatccaggctctgctgcttggtcgctgcatgagcttctgctgtgctgacctctctgttt

SEQ ID NO: 30639 - DNA, 490 bp, Homo sapiens
  misc_feature (1)...(490): n = A,T,C or G
cttggagcccttttggaccncccccctcgttangatttaggaatcggcggaaaaattatgttatgccatcacccanagangagcagntattttttactcaactaggcataattttttgcaaatttttctctgngcattntcttattaggacatgagctgagccaatttttagccaccctttgcaaaagatgggttacagggtaactcaaccctggctgccatccttgggcactgtgtgtgtccagggcaccttggaggaccgtgcagcccccagaagcttccagctcccgcaccactcagtgaagcccagcctggcgcctgccctgcccccgtcacgggatgggcccccattggggttcaacattccatcgcagccaaaggcagtcggcacttgggacatctgcttccacggacaggtcacctccgctttgcacggaagaatctggatgcttacattaaactggtgttctgagagttcctacggacaggt

SEQ ID NO: 30640 - DNA, 489 bp, Homo sapiens
  misc_feature (1)...(489): n = A,T,C or G
tgcgggccnnnnnnnnttttgaccttgagnaccactaggccgngnggnggaattcgttggtggtggccttcgagggtagcttcctggtccgcttcatctcccgctatacccaggagatcttctccttcctcatttccctcatcttcatctatgagactttctccaagctgatcaagatcttccaggaccacccactacagaagacttataactacaacgtgttgatggtgcccaaacctcagggccccctgcccaacacagccctcctctcccttgtgctcatggccggtaccttcttctttgccatgatgctgcgcaagttcaagaacagctcctatttccctggcaagctgcgtcgggtcatcggggacttcggggtccccatctccatcctgatcatggtcctggtggatttcttcattcaggatacctacacccagaaactctcggtgcctgatggcttcaaggtgtccaactcctcagcccggg

SEQ ID NO: 30641 - DNA, 498 bp, Homo sapiens
  misc_feature (1)...(498): n = A,T,C or G
agcgggcccgcncccaatagaaacatagnagcnctcgcagngngcnggaattcgatctagtttctataaattaggcatgctttatacattatgtttgtgtagaaaatccctggtttaatatttttactttatgcctatctgattgttgaagtttttatgagactatattagtttttgggccaggtgcggtggctcatgcctgtaatcccagcactttgggaggccgaggtgggcggatcgctttaggttcggaattcaagtccagcctgaccaacatgatgaaaccctgtctctactaaaaatacaaaaatcagctggcgtggtggcgcgtgcctgcaatctcagctacttgagaggctgaggcaggagagtggcttgaaccgggaggcagaggctgctgtgagccattgcactccagcctgggcgacagagtgagacttcgtcttaaataataagatcccatggagttaaaatgaagtttgacatcatgaaaatgaa

SEQ ID NO: 30642 - DNA, 472 bp, Homo sapiens
  misc_feature (1)...(472): n = A,T,C or G
ntcgacacctgagaacctaggccagngcgnggaantccaggcctccagggccagggagggcactgctggagtgtgaccacctgaggagtggggtgccaggtggaaggagaagaaaggactggtcctgctcgctcctcgtggcctccctcgcgggcgccttcggctcctccttcctctacggctacaacctgtcggtggtgaatgcccccaccccgtacatcaaggccttttacaatgagtcatgggaaagaaggcatggacgtccaatagacccagacactctgactctgctctggtctgtgactgtgtccatattcgccatcggtggacttgtggggacattaattgtgaagatgattggaaaggttcttgggaggaagcacactttgctggccaataatgggtttgcaatttctgctgcattgctgatggcctgctcgctccaggcaggagcctttgaaatgctcatcgg

SEQ ID NO: 30643 - DNA, 467 bp, Homo sapiens
  misc_feature (1)...(467): n = A,T,C or G
aatcgagttcttgagaccctaggcagagncgnggaattcgcattgaggtggtctcagtccctccctcgggtctggagggcattgtgccaggggccactttcgggacagctggccttggcaccgtctcccaagaacccagttctgtgcataccgtggccccaccagaaacccaaggccacaccgcccaccagctgggtgtggtcaccattcatggagggccggctggggcctggctcaccacgcagagtttgccctccggtgcgatgatgcatgagacacagcctgcccccctgcctgtgtgtgcagggggtgtctgtgggggggccctgctggctggactttgggattctcctgagctccacttagcccccaagtcaggccacggaggcctgagtaggacccatgggctgtgtgtgtcaatggaggtggtgtgctcacaactgcactgctggtcgtcaggtggtcag

SEQ ID NO: 30644 - DNA, 488 bp, Homo sapiens
  misc_feature (1)...(488): n = A,T,C or G
agaggctnnnnnnaaatgaaactanggcgtgtcaattgcgcggtcctgggcttgaggtcgaggccatctcctgggccgcctggcggccatcgtggctaaacaggtactgctgggccggaaggtggtggtcgtacgctgtgaaggcatcaacatttctggcaatttctacagaaacaagttgaagtacctggctttcctccgcaagcggatgaacaccaacccttcccgaggcccctaccacttccgggcccccagccgcatcttctggcggaccgtgcgaggtatgctgccccacaaaaccaagcgaggccaggccgctctggaccgtctcaaggtgtttgacggcatcccaccgccctacgacaagaaaaagcggatggtggttcctgctgccctcaaggtcgtgcgtctgaagcctacaagaaagtttgcctatctggggcgcctggctcacgaggttggctggaagtaccaggcagtgacagccn

SEQ ID NO: 30645 - DNA, 494 bp, Homo sapiens
  misc_feature (1)...(494): n = A,T,C or G
gaggccnnnnnnaactgagacctagcgctctcgcagngggcaattcgaagaaggtgttggaaagcactatggtgtgtgtggacaacagtgagtatatgcggaatggagacttcttacccaccaggctgcaggcccagcaggatgctgtcaacatagtttgtcattcaaagacccgcagcaaccctgagaacaacgtgggccttatcacactggctaatgactgtgaagtgctgaccacactcaccccagacactggccgtatcctgtccaagctacatactgtccaacccaagggcaagatcaccttctgcacgggcatccgcgtggcccatctggctctgaagcaccgacaaggcaagaatcacaagatgcgcatcattgcctttgtgggaagcccagtggaggacaatgagaaggatctggtgaaactggctaaacgcctcaagaaggagaaagtaaatgttgacattatcaattttggggaagaggaggtg

SEQ ID NO: 30646 - DNA, 504 bp, Homo sapiens
  misc_feature (1)...(504): n = A,T,C or G
agggataggcaaaagccagggccangnnnnnnttcgtagactgagaaccatngcggaggacttcgaaaaagcatcaagtttctacttctggctggaaagcaaaaccaatctcagctgacaaggctgggcaaactaagttttcctgagcccattttcctttgagccctgacctagcctggccttacctcattaaggtttggctaaagcagtggaaaggaggaggaggcaggggtggatgggggtgtggggaggggatgaccactttgcatgcgaataagatgagcgtacgggcccagcttcttgggagtgcttattcaccccaagagtggaggctgtttacagcgaaccctggagatggcagcttgtctccagctggggagggggcaggcccctaaattgaagaccactttggtagcataactgtagggactgaggagtcaactcacagactgtgcatcagctgctccacccacaataaagcaaacgccgacaggctagaccccg

SEQ ID NO: 30647 - DNA, 451 bp, Homo sapiens
  misc_feature (1)...(451): n = A,T,C or G
aatgagacctgaggacagtgcgnnggaacccagaggaagctgaatgaagaggacgccgccagcgagtccagcagggagtccagcaacgaggacgagggcagcagctccgaggccgacgagatggccaaggcgctggaggcggagctcaacgacctcatgtgagcgcgggcagcgggcagggactgaagcctgaccgacctccagcagcactcggacgtccccggaccagccctcagtctcggtccacgctgctttcttcccaaaggacatgtatatttgcagagctccacatacagaaacacattattttgcagaaataggtgtttttaagaagttttactacaggaatgtctacttttgtaagtgacaggtgttaaaggcccaggtgtgctgtgccaaagagctcagcagaggctcacgtggcccaggctggtgcgcccgctgtctcggt

SEQ ID NO: 30648 - DNA, 249 bp, Homo sapiens
  misc_feature (1)...(249): n = A,T,C or G
cccgtgngctggaccccacccctgtggcaagatgcagcgtgaggcagctgaaggagcatgctgtcgaaggagactgtgatttccagctgttgaaactagatggcaagttttccgtggtatacgcaaaatgtgattccagtccagactcagccgaggacgtgcgcaaggtgtgccaagactggcccctgctggccccgctgaacgacaccagggtggtgcacgccgcgaaagctgccctggccgccttca

SEQ ID NO: 30649 - DNA, 464 bp, Homo sapiens
  misc_feature (1)...(464): n = A,T,C or G
natcgaganccntttgaagngcgctggaattcgaacaacggctccaattttcagctggaggaaatttcccgggctcagcttgtgcccctcccaccttctacctatgtggagtttacagtgtctggcactgactgtgttgctaaagaggccacagaggcagccaagtgtaacctgctggcagaaaagcaatatggcttttgtaaggcaacactcagtgagaagcttggtggggcagaggttgcagtgacctgcacggtgttccaaacacagcccgtgacctcacagccccaaccagaaggtgccaatgaagcagtccccacccccgtggtggacccagatgcacctccgtcccctccacttggcgcacctggactccctccagctggctcacccccagactcccatgtgttactggcagctcctccaggacaccagttgcaccgggcgcactacgacctgcgccn

SEQ ID NO: 30650 - DNA, 475 bp, Homo sapiens
  misc_feature (1)...(475): n = A,T,C or G
ntcgcagactgagaccactaggccagngcggtggaattctggggatggtgccgtcctgacctggcccaggtccagtctccgggctgggggctcacagggtgacggcatggtcccaggtcagactgtcctctctggagacaaggatgggctcgtggctgtgagccacccccgcacagggacaacattccgtgtgctgagtgaccaccagggcgccccaatctctaccatctgtgtcacgtgcaaagaggtaaagcagccccaagagctggggagagggggcctgggtgctggtgggggcaggcaccatcttggcagaaggcacctatcggccctcacccactccattcccagtgtgaagacttaggggtggagggcacagacctatggctggctgccagtggggaccagcgggtcagcgtctgggcctccgactggctgcggaaccactgtgagcttgtggactggttgagtttcn

SEQ ID NO: 30651 - DNA, 497 bp, Homo sapiens
  misc_feature (1)...(497): n = A,T,C or G
gatggccnnagggggnccnnaatcgagatcccnattgaagagtcggtggaaaccttcgcggaagctgggaccgccgttcagtcgccaatatgcagctctttgtccgcgcccaggagctacacaccttcgaggtgaccggccaggaaacggtcgcccagatcaaggctcatgtagcctcactggagggcattgccccggaagatcaagtcgtgctcctggcaggcgcgcccctggaggatgaggccactctgggccagtgcggggtggaggccctgactaccctggaagtagcaggccgcatgcttggaggtaaagtccatggttctctggcccgtgctggaaaagtgagaggtcagactcctaaggtggccaaacaggagaagaagaagaagaagacaggtcgggctaagcggcggatgcagtacaaccggcgctttgtcaacgttgtgcccacctttggcaagaagaagggccccaatgccaactcttaagtcttt

SEQ ID NO: 30652 - DNA, 220 bp, Homo sapiens
accctccaaggcctctgcccaccgggcacctgctggattctgtgggtctcgtgtgtggggctgtgtgcacccatccagcggcacctcacgcgcccgcctgcgtgtacccagccagcaccacggtgttcagttaagactctgtgtgccgagtgacgtggcaaacttcccacgtccctggtttgggtggacctgttggtgagtgtgttcagacgtgtgtctg

SEQ ID NO: 30653 - DNA, 484 bp, Homo sapiens
  misc_feature (1)...(484): n = A,T,C or G
atttgaacctcgatagacctaggccagngtgcnggaattcgcccaggaagaagagttggatgaccagaaaattcaggtgactcctccaggctttcagctggtctttttaccctttgctgatgataaaaggaagatgccctttactgaaaaaatcatggcaactccagagcaggtgggcaagatgaaggctatcgttgagaagcttcgcttcacatacagaagtgacagctttgagaaccccgtgctgcagcagcacttcaggaacctggaggccttggccttggatttgatggagccggaacaagcagtggacctgacattgcccaaggttgaagcaatgaataaaagactgggctccttggtggatgagtttaaggagcttgtttacccaccagattacaatcctgaagggaaagttaccaagagaaaacacgataatgaaggttctggaagcaaaaggcccaaggtggagtattcagaagag

SEQ ID NO: 30654 - DNA, 448 bp, Homo sapiens
  misc_feature (1)...(448): n = A,T,C or G
atcaggaacnatccgcagattgaggacatcggacggcgcgngagatgtgctggccggggagattcgggcctgattgtctgccctgtggttgctcaaaccacggactgtgcgatgatggcatcacgggctccgggcagtgcctctgtgaaacggggtggacaggcccctcgtgtgacactcaggcagttttgcctgcagtgtgtacgcctccttgttctgctcatgccacctgtaaggagaacaacacgtgtgagtgtaacctggattatgaaggtgacggaatcacatgcacagttgtggatttctgcaaacaggacaacgggggctgtgcaaaggtggccagatgctcccagaagggcacgaaggtctcctgcagctgccagaagggatacaaaggggacgggcacagctgcacagagatagacccctgtgcagacgggcttaccgg

SEQ ID NO: 30655 - DNA, 515 bp, Homo sapiens
  misc_feature (1)...(515): n = A,T,C or G
aggcgcngnnnnnncattgacaatcggaccactgntcagagtggtggaattccaagagggcgcgcgccagaagctgcacgagctgcaagagaagctgagcccactgggcgaggagatgcgcgaccgcgcgcgcgcccatgtggacgcgctgcgcacgcatctggccccctacagcgacgagctgcgccagcgcttggccgcgcgccttgaggctctcaaggagaacggcggcgccagactggccgagtaccacgccaaggccaccgagcatctgagcacgcttagcgagaaggccaagcccgcgctcgaggacctccgccaaggcctgctgcccgtgctggagagcttcaaggtcagcttcctgagcgctctcgaggagtacactaagaagctcaacacccagtgaggcgcccgccgccgcccccctttccggtgctcagaataaacgtttccaaagtggnnnannnnnnnnnnnnnnnnnnnnnnnnnnnnnnnnnnnntnnnntnaaaaaaaa

SEQ ID NO: 30656 - DNA, 475 bp, Homo sapiens
  misc_feature (1)...(475): n = A,T,C or G
nttgaaactcgagagcactaggccagngcggnggaattcccggtggcgactcatttctcgttttatttttcaacgatttggcggagaagctcctcttgtgaatggactttggatttcttggagctgcgctgcgggtcccacagtgtggctttcggcccgtgctgtgctggcgcctgcacttcctctggcggggcacggggtggcgctcccgggtaaagcagcggccagggggagccgtgagtgaggcgctgcctctcccgctgaagcgggttccaaggccaccgtgagggggaccatccatccaggagagtactgggcaggctgcaaatgtctgtgttaaaacagctctgctgggctaagacaggacagaagcagacagcaggtggatgagacacaatttcctatccagcagaacctgcagcaagctccacagcaccctccatgggctcagtcttgctcccaggaagatggttaa

SEQ ID NO: 30657 - DNA, 496 bp, Homo sapiens
  misc_feature (1)...(496): n = A,T,C or G
gcggatgnannnnnnnttcctgaacttgagtggcntcgcnggaanccgngagaagtccagggtccagggttcttgaaagggctgcacttggggaccccgtgatgtcctttacttgtctctgactgcccctgaggacacggngcaccccgggacctttgacatccggggttctgaggggccccactccgggaggtgatggtgggggtgtggctgtttcccccattcgtgccttttctgtgtccttcccctgacagcatccctccagacactctgctgtttcctgcctaggcgtggctgcagccatggctaggaaagcgctgccacccacccacctgggccagagctggttctgctcctgctgcagggacactgagctggctatctcggcgcttcgggcaagaactgcaacaggctctcctgggtcctgcaggtgtacagccgggcccctgccttgtgcctcagctctcgagagctgctgctgccgagtgacctgaan

SEQ ID NO: 30658 - DNA, 528 bp, Homo sapiens
  misc_feature (1)...(528): n = A,T,C or G
ggatattcnnnaggaggggcccnaggggnnnnnnaattgatncccatctcgagaggcgatttcgactcattggtgcccttgtttccccgaggcctcctgcagtgacgtgctgaggagaggagcccaggtctgcgggtgggggacccgtcctctgagaagcctgcagcttctcctccaggacccttccagcccacctggctggctgtggggataatgggcacttgggagcattggagggggaggaagcatagagaaagcagcaggagacgcacctggaagcccaggggagggaagtccacctccctgcaagtgtagggcagtgagaggagccctggcaccagcagagcaagaaagaaatgcatgcaccgttcagaataagctgtcaggtcgtctggctgtttaagatttatttattaatgtgtcaaatcaacagtgccttgacatctttccacactgctttggaacttgcagtagaccagagagaaattcaacatgtctgtctgtatgaaattggttggtgcagcatgn

SEQ ID NO: 30659 - DNA, 452 bp, Homo sapiens
  misc_feature (1)...(452): n = A,T,C or G
aatgagaactgaggacactgcgnggaactcgcggatctgcggtgatgagtgcctgttgtccaagttccagcagctccaggccccctaccaggaccagctaccggctcctgcagcgcgtctgctgcccctcggcctcctgaccctcctccaggccatcccgagggtcatcatggccattcgccagtgttttggggtttgaagttggaatcttcagctactgtcaagaacagccacaaaaatgtgtcacgatcaagatctttgagagtccaccaatcaggaggcgtctgtgacagtcgctgtcttctcagaacagaatccacacccaggattcaacccaaatgatttctcatcaggtgattcttggttgtagcaaagttcatgtgaatgtgggggggacttgtccccatgtccgtgtccctgggggagggcagctatttccgagtgtctcttca

SEQ ID NO: 30660 - DNA, 534 bp, Homo sapiens
  misc_feature (1)...(534): n = A,T,C or G
cggagatantnaaggagtannnnnagggggnnnnnngattgaaacccctatcgatccactatcgagagnggnggaattccttgaagctgcagcagaaatggagctatgaagacaaagatcaaaggcctctgaatggcttcaaggaccagctgtgctcactggtattcatggctctaacagaccccagcacccagcttcagcttgttggcatccgtacactgacagtcttgggtgcccagccagatctcctatcttatgaggacttggagctggcagtgggtcacctgtacagactgagcttcctgaaggaggattcccagagttgcagggtggcagcactggaagcatcaggaaccctggctgctctctaccctgtggccttcagcagccacctcgtacccaagctcgctgaggagctgcgtgtaggggagtcaaatttgactaacggagatgagcccacccaatgctcccggcatctgtgctgtctgcaagccttgtcagctgtatcaacacatcccagcatcgtcaaggaan

SEQ ID NO: 30661 - DNA, 530 bp, Homo sapiens
  misc_feature (1)...(530): n = A,T,C or G
ggctttttantaggaaggggnnngaggggnnnnnnnaattgagcaccgtctcgagaggccgaattccaaccccagagcaggagaccgtaattaaggcaggccaggccggtgcggtggctcacgcctgtaatcccagcactttgggaggcccaaatgggcagatcacttgaggtcaggagaccagcctggccaacatggcaaaaccccatctctactaaaaatacaaaaattagccgggcgtggtggctggtgcctgtaatcccagctatttgggaggctgaggcatgagaatcgcttgagctcaggaggcagaggttgcagtgagctgagatcgtgccactgcactctagcctgggagacagagcaagactccatctcaaaacaaacttaaaatagaataaaataaaataagaatccgcccccctccccgccccagttggtgtttcaaaccctgagacttggcctttgaattcatggngtgatgaggaccccacagccagaggtgccaggcgttccctgccccaacccca

SEQ ID NO: 30662 - DNA, 452 bp, Homo sapiens
  misc_feature (1)...(452): n = A,T,C or G
taatgagntccgtaggccntcgcgaggnaacccanagcctgatcagagttaagtgcgagtgggggagtcccctctccaacacccctcaaagtgcatcgggactggccccccaaagctgggcccataacacccttgataaatctacgggccgacaggcgggagggtggctgcccccagggcccttggggctaaggggacagcggtgtggtttggctttagtgcaaaaagctggtttctttagaggcactttgagtggtgggacccctccccgacctggcgggggggagggttcagggtcagccccgcccccccaccccaagtaaaagcagaccctgcagctggtgaaggccagcccctggggctgtcctcgggctgtttcagccccgggcctggagggggtggggagggagaaggtggtagcttatgttcttgaacgagccggacttagtcca

SEQ ID NO: 30663 - DNA, 484 bp, Homo sapiens
  misc_feature (1)...(484): n = A,T,C or G
agagtggtggcccnaancanttatggaaaacctccatagagngctgtaanaccnnccgcgcagaaacatgttctgcatgtccagctcaaccggcccaacaagaggaatgccatgaacaaggtcttctggagagagatggtagagtgcttcaacaagatttcgagagacgctgactgtcgggcggtggtgatctctggtgcaggaaaaatgttcactgcaggtattgacctgatggacatggcttcagacatcctgcagcccaaaggagatgatgtggcccggatcagctggtacctccgtgacatcatcactcgataccaggagaccttcaacgtcatcgagaggtgccccaagcccgtgattgctgccgtccatgggggctgcattggcggaggtgtggaccttgtcaccgcctgtgacatccggtactgtgcccaggatgctttcttccaggtgaaggaagtggacgtgggtttggctgccc

SEQ ID NO: 30664 - DNA, 452 bp, Homo sapiens
  misc_feature (1)...(452): n = A,T,C or G
tatgaagtaccgctatccctcgaagngcggnggaattcctccgaagcagcgtgggcagcccgctgcggatctgctgtcgggacctgcgagctgatgacctgcccatgcgcaacactgcggccgtgctgcagcttctggatgcaggctgcctgcgccgcgtggacctgcgcttcaacaatctgggcctgcgcggcctgtctgtgatcatcccacacgtggcccgcttccagcacctggccagcctgcggctccactatgtgcatggggattcaaggcatccctccgaggatggcgaggacaacttccgctacttccttgcccagatgggccgcttcacctgtctgcgtgagctcagcatgggctcctctctcctttcaaggaggctggaccagctgctcagcaccctgcagagccccctggagagcctggagttggccttctgtgctctgctg

SEQ ID NO: 30665 - DNA, 534 bp, Homo sapiens
  misc_feature (1)...(534): n = A,T,C or G
cgttactatnnagataganacncnagggggnnnnnnnaactgatgnccctatcngancactatccgngnggcggaattcccaaattccacaacctgaaggcagtcgtctgcaaggcctgcatgaaggagaacagacgcatcactggccgagcccactggggctcacaccacgcaggtgggaaagggccaggtgcctctagaagccccacaagcgtagaccctaactgcttcctgagttttgttgataaatgaattctaagaagaggctgatataattggatgaacagaatagaatttaaatgatagggccgggtgcggtggctcacgcctgtaatctcagcactttgggaggccgaggcaggcagatcacttgaggtcaggaattcaagaccagcctggcccacatggtgaagccccgtctctgctggggatacaaaaatgaaccgggcgtgttggcgggcgcctgtggtcccagctgcttgggaggctgaggaaggaggatcacttggacctgggaggtggaggttgcagtga

SEQ ID NO: 30666 - DNA, 531 bp, Homo sapiens
  misc_feature (1)...(531): n = A,T,C or G
gggttttnnnaagaaggggncnccaggggnnnnnnaaattgatncacagctcgagaggccgaatncggaggtgcaggtcctggtgcttgatggtcgaggacatctcctgggccgcctggcggccatcgtggctaaacaggtactgctgggccggaaggtggtggtcgtacgctgtgaaggcatcaacatttctggcaatttctacagaaacaagttgaagtacctggctttcctccgcaagcggatgaacaccaacccttcccgaggcccctaccacttccgggcccccagccgcatcttctggcggaccgtgcgaggtatgctgccccacaaaaccaagcgaggccaggccgctctggaccgtctcaaggtgtttgacggcatcccaccgccctacgacaagaaaaagcggatggtggttcctgctgccctcaaggtcgtgcgtctgaagcctacaagaaagtttgcctatctgtggcgcctggctcacgaggttggcttgaaataccangcagtgacagccacccttgg

SEQ ID NO: 30667 - DNA, 536 bp, Homo sapiens
  misc_feature (1)...(536): n = A,T,C or G
cgtanctantanagtntganaancaaggnngnnnnnggaattgaaaaccctatcgatccccctatccgagnggnggaattcctcaagggctctactttctgatgtggttccagagaaggaacggccgcttgtaatcggacacttcaacacagcctccggtgtgggcttcatcttgggccccgtggtcggtggctatctcactgaattagaggatgggttttatctcacagccttcatctgctttttggtcttcattctcaatgctggtctcgtttggttctttccatggagggaagcaaaaccgggcagtacagagaagggcctgccattgcgaaagacccatgtgctgttgggaaggagccatgacacagtgcaggaggcagccaccagccgcagagccagggccagcaagaagactgcccagccctgggtcgaagtagtgttggccttgcggaacatgaagaacctgctgttttccgaaatgtgggacatatttctggtgcgcttgctgatggccatggcagtcatgctgtact

SEQ ID NO: 30668 - DNA, 521 bp, Homo sapiens
  misc_feature (1)...(521): n = A,T,C or G
cgctctatantggaagtannncaggggnnnnnnnttttgatcacatctcgagggccgttncgggccagcaggagatggagtttgggtttataacccaaccctcgaacgaaccagcctgtgggggcctggagtggagctggttttggggagtcacaggtgcggggggttcatcatctcctttctccttctcctttcctgacccctccgacagcttccatgttggccatgggtcaggtgaatggatggagctccaagcggggctcagcccattgacccgagcgaggcgcacacacctgcagcgtggatcaagcgcactctctccagcatcgccctgaccattccatgtgctttgtcctagcatgttcattcttgactttctccacttcattgtattaaaaagttaaatgctttacgaatctgtggcgtgtggccactgacacgcccccacctcctgggcgatctacaagtttgagctgagatggttctgtgagtccttggcaggggtcaaagggcacatcttc

SEQ ID NO: 30669 - DNA, 494 bp, Homo sapiens
  misc_feature (1)...(494): n = A,T,C or G
tgggcccccncccatgaaacctaatgcgtggccggagaccgangacatcgntctaaaccctgcgtggcaatacctgacgcaccgccgtgatgcccattgaagacagggcgacctggaagtccaactacttgcttaagatcatccaactattggatgattatccgaaaagtttcattgtgggagcagacaatgtgggctccaagcagatgcagcagatccgcatgtcccttctcgggaaggctgtggtgctgatgggcaagaacaccatgatgcgcaaggccatccgagggcacctggaaaacaacccagctctggagaaactgctgcctcatatccgggggaatgtgggctttgtgttcaccaaggaggacctcactgagatcatggacatgttgctggccaataaggtgccagctgctgcccgtgctggtgccattgccccatgtgaagtcactgtgccagcccagaacactggtctcgggcccgagaagacc

SEQ ID NO: 30670 - DNA, 496 bp, Homo sapiens
  misc_feature (1)...(496): n = A,T,C or G
agcccccccccnnaattgagatcgttggccgtgtgcaggaattctgatctcactgcaacctccatctcctgtctcagcctcctagataactgggattacaggtgcccaccaccatgcccggctaatttttgtatttttggtagagacagagtttcaccaggttggtcaggctggtctcaaactcttgacttcaggtaatccacccaccttggcctcccaaagtgctgggattacaggcatgagccaccatcttcagccagatgatttttttattgagagagtgaaatgctattttgttccccaaatggcgctagtgaatcactaggagggtcccactgataggccatgtttagcactggttgccagggattctctttttgagagagggaaagcaaaatgaatggaagtacccagctggaggtttcagggcttctggaggatgctctcgcatagctcgaggtcctctgcccacctcttctctccaaggaaaatgagg

SEQ ID NO: 30671 - DNA, 472 bp, Homo sapiens
  misc_feature (1)...(472): n = A,T,C or G
nttgagcccttgagacactcggccaagnggaggaattctggcctacagcaggaagtgtggctgaacactgcagccccctacaaaagggcagaagtctgcttccggcctgggaaatgcaagagtcttggctggcaactgccttaggacccctgtaagagttggggtcttgcctgagttggtttgccttcctaatccgagctacaagcatgttgggccacacttgaacgctcagggcacaagctgatgaggaggatgcagaccttgctgccctcagaaatcttcacctgtgtgttggacagagccttgcagcgtgggtcccagaagtggccctggtgtcttataacactccctaggctaggacccgtctccacaagttgccagtgaattgagctgctttccaggacaggcaggattgggaacggnggacacaataagaccccagatagatctggaatttactgctccggcttca

SEQ ID NO: 30672 - DNA, 470 bp, Homo sapiens
  misc_feature (1)...(470): n = A,T,C or G
ntttgactgcagtcntaggacanngcgnggaattcatttggatgtgttttctagcacttacatgcagatagtgaagctcctgggactggatgtgccatctctgtgcttggcagaactggtgaagacctattgcagcagcttcaaactgttccaagcttcaccttctgtgccagccaaatacgtagaagacaaagagaagatgctgtctcgaacaatgcagttggtggagctggcaaatgagacgtggctggtgaccgggaggcatcccttgcccgtcatcactgctgcgactttcctggcttggcagtcgctgcagcctgcagatcggctttcatgttcccttgcccgattttgtaaattggcaaatgtggacctgccctacccggcgtcctcccgcctgcaggagctgctggctgtgctgctgcggatggctgagcagctggcctggttacgagttctgagacttgaca

SEQ ID NO: 30673 - DNA, 461 bp, Homo sapiens
  misc_feature (1)...(461): n = A,T,C or G
attggacctatggaagngcgctggaattcgactgctgccttggagatcttggaagccattatagccacgggttgttttgggattgacaaggaggagctgcgcagacggttctcggccttggagaaggcaggtggtgggcgcaccaggacattcgcagattgcatccaggccctcctggagcagcatcatgtgctggaggtcgggggcaacactgcgcgcctggtagccatgggctctgcctggccttggctcctgcactccgtgcggctgaaagacagagaagacgccgacatccagagagaagacccccaggccagacccctggaggggtcttccagtgaggacagcccccccgaggggcaggcacctccttctcacagcccccggggcaccaagaggcgcgccagctgggccagtgagaatggggagaccgactccgagggcacccagatgacccctgg

SEQ ID NO: 30674 - DNA, 488 bp, Homo sapiens
  misc_feature (1)...(488): n = A,T,C or G
gagtcccnnaggggnnnnaatcgagaccaccttcgagngccgtggaantccgctcgagccgggagtggtcacaactgagagagccaaacatttctacagcccccaggacattcctgtcaccctctacagcgacgcttatgaatgggagatgtggaagagccgctctgacccagttctgcacattgacctgcggaggtgggcagacctcctgctggtggctcctcttgatgccaacactctggggaaggtggccagtggcatctgtgacaacttgcttacctgcgtcatgcgggcctgggaccgcagcaagcccctgctcttctgcccggccatgaacaccgccatgtgggagcacccgatcacagcgcagcaggtagaccagctcaaggcctttggctatgtcgagatcccctgtgtggccaagaagctggtgtgcggagatgaaggtctcggggccatggctgaagtggggaccatcgtggacaaag

SEQ ID NO: 30675 - DNA, 470 bp, Homo sapiens
  misc_feature (1)...(470): n = A,T,C or G
ggagcggggnnnnncctgagaaactganagtctagngaagngncgnggaantcctatcacctatcttagaaatgacttgccatgttgaacttactttttgaaagagagagaaaacagaaagaaaacagaagttgtggtatgcagaataacacccctgcccccacccaaggatgtttacaggttaatattcaaaacctgtgagtattttaccctacatggcaaaacagtctttgcagatatgattgtgtgatttcaggagattatccgggaccatctgggtgagtccagtctaattacatggttttgaaggtggagaactttttccagctatggtcagaaagggatatgactgcagaaaaaggctcagagaaatctgtcattgttggatttgaagacagcggaaggggaccgtgagccaaagaatgtgagaaacctctggaaggtggagaagacccagtacagattctctn

SEQ ID NO: 30676 - DNA, 497 bp, Homo sapiens
  misc_feature (1)...(497): n = A,T,C or G
tggcgnagagggccacccaggtaccattcagntagctacagcaanngcggcggaantccatggatatcctggccaatacctacaagcagtggtctatggctcatcaaaggagcagcctggccactgcaagggagcattatatcttggccaagcacagagattccctgaagggtccgctcaagaagcaggaggtggattcagccccacagcttcccaaagtggacctactgacggtgcctgcagtcgacacgcagatggagacgcggcccatgaccctggaggagatggaggaagtgggcaagcggtaccgcgagcggcagcgacagcacaagctcacgatcccctccatccagtacacggagcaatgtcacctggtgcgctgtgggaatcggcactttgatgagcactgcctcccgtccaccatccacggngatatgagggagctcattgactcggcccgcaggcacaactttctgggtctacctgcatggctgaag

SEQ ID NO: 30677 - DNA, 469 bp, Homo sapiens
ggttggtccctatccaggggggtagttatcatccctctggacccagcagctaggagcttctggaacccacgaggacatctgccactggcatggtctactcactgatggggtcctcctgactccagggcagagacgtccgtgcgggaactgaccgaggcgtggccccaggccccggcatcctcccctcgctgcacgtggtcacttccgaagcagcgctccctgtggccgcagagacagagcccgcaccctggctgtctgtggtgcctgggccccagctcccgcccgccacccgccctgttgagtgcggcctccagactcgagtccagaatctgtttctgtcaagtcagtcgtccccagctgcacacggggactgctgagcgctgcgctctcacgggtctgttccggacagagggtggcaggggtgagccctgatcccttacaaaaaataccagcttcccagggagtaatg

SEQ ID NO: 30678 - DNA, 492 bp, Homo sapiens
  misc_feature (1)...(492): n = A,T,C or G
aggcgnagacgccacccagggggacctaggtgggccangcaangcgggnnaantagaagggatagtggccacactgcagctgaggccccaggtggcagccatggatcatgtagacttccagatggtctcccgaaccgcctggctgtgccggcgccctcctcacgtcaggagcaagcagccgtggacccctaagccgagctggtggaaggcccctccccgtcgccagccgggccctcatgctgaccttgcaaattcagccgctgctttgagcccaaaatgggaatattggttttgtgtccgaggcttgttccaagtttgtcaatgaggtttatggagcctccagaacagatgccatcttcctgaatgttgacatgccagtgggtgtgactccttcatttttccttctcccttccctttggacagngntacagngaacacttagcatcctgtttttggttgggagntaagcaaactgacattacgggaaagtgc

SEQ ID NO: 30679 - DNA, 492 bp, Homo sapiens
  misc_feature (1)...(492): n = A,T,C or G
ggcncggaggccggcnnnnnnnncccgtcagacgtcgtagaccngcgnggaattccttccccacatccgcgggaacgtgggcttcgtcttcaccaaggaggatctgactgaggtccgagacctgctgctggcaaacaaagtgcccgctgctgcccgtgctggtgccatcgccccctgtgaggtgaccgtgccggcccagaacaccgggctcggtcctgagaagacctctttcttccaggctttgggaatcaccaccaagatctccagaggaaccattgaaatcttgagtgacgttcagctgatcaaacctggagacaaggtgggcgccagcgaggccacgctgctgaacatgctgaacatctcgcccttctcctacgggttgatcatccagcaggtgtatgataacggcagtgtctacagccccgaggtgctggacatcactgaggatgccctgcacaagagattcctggagggtgtgaggaacatcgccag

SEQ ID NO: 30680 - DNA, 506 bp, Homo sapiens
  misc_feature (1)...(506): n = A,T,C or G
tgaatgtaagggaanaannnnnnntttcgagaccatagtccgtgtggtggaattccgtctccttcctggtttgggcggaagccatcacctggatgcctacgtgggaagggacctcgaatgtgggaccccagcccctctccagctcgaaatccctccacagccacggggacaccctgcacctattcccacgggacaggctggacccagagactctggacccggggcctccccttgagtagagacccgccctctgactgatggacgccgctgacctggggtcagacccgtgggctggacccctgcccaccccgcaggaaccctgaggcctaggggagctgttgagccttcagtgtctgcatgtgggaagtgggctccttcacctacctcacagggctgttgtgaggggcgctgtgatgcggttccaaagcacagggcttggcgcaccccactgtgctctcaataaatgtgtttcctgtcttatgaganaanngnngtgaaaaaaaaaa

SEQ ID NO: 30681 - DNA, 261 bp, Homo sapiens
  misc_feature (1)...(261): n = A,T,C or G
aatgttccggtttgtatcccttggttgcgctggcancnacncgngnacaggnnctgcttgctgctggggctgatccaaaccttggagatgattttttcagaggtttcaagactgccaaggaacagggaatccattctttggaagtcctgatcacccgagaggatgacttcaacaacaggctgaacaaccgcgccagtttcaagggctgcacggccttgcactatgctgttcttgctgatgactaccgcactgtcaaggagc

SEQ ID NO: 30682 - DNA, 265 bp, Homo sapiens
  misc_feature (1)...(265): n = A,T,C or G
gagtcccccttagaaaccntcggaaatacctcgcagagngcnggaanccagattcggcctccgaccttgaccttaaactgcagctgaccccaggggttcgccgctgttcctcccctccacaccaaggcctgagacagcaggagccctgcctggcccgaagccgtttccaccgcagcaggcagaggggctggacaggcactgtcagccaatgtggggggtcctgaagacacccccttggggcacccgagtgccccttctcagggct

SEQ ID NO: 30683 - DNA, 471 bp, Homo sapiens
  misc_feature (1)...(471): n = A,T,C or G
natcgagatccntagtccagngtggtggaattcggattgcctacaggggcctctttatcatcgatggcaagggtgtccttcgccagatcactgttaatgatttgcctgtgggacgctccgtggatgaggctctgcggctggtccaggccttccagtacacagacgagcatggggaagtttgtcccgctggctggaagcctggcagtgacacgattaagcccaacgtggatgacagcaaggaatatttctccaaacacaattaggctggctaacggatagtgagcttgtgcccctgcctaggtgcctgtgctgggtgtccacctgtgcccccacctgggtgccctatgctgacccaggaaaggccagacctgcccctccaaactccacagtatgggaccctggagggctaggccaaggccttctcatngcctcacctagaagctgaatagtgacgccctcccccaagcccan

SEQ ID NO: 30684 - DNA, 263 bp, Homo sapiens
  misc_feature (1)...(263): n = A,T,C or G
agagttnnnncttgtttcctatggtttccgttngaanccngccgcaanaaaaaagganaaagaaatagaattcatcagtgacatttgacagaatatattttaaaaatatttattatggatataaagagaccaaaaaagagagatctgtatgtccaacaggaaggcgtcattgaataatccatgcacatcagtaaatagaaaattgtgcagacactaaaaattgtgttttcaaggaataatgaatgatatgagaaaatgctatt

SEQ ID NO: 30685 - DNA, 268 bp, Homo sapiens
  misc_feature (1)...(268): n = A,T,C or G
aggcccccccttttaaaacctgggtaatgagctacgcaannncnggaannngnnagagcacatcagcctcatgaccttggacagtctacagaaaagcattttcagctttttttgtcattggcaggagaggcccagtgaatatattgccaccatcttggagctcagtgcccttgtagagaaaagaagccagcatatcctccagcacatggactttctgtattacctctcccatgacgggcggcgcttccacagggcctgccgcctggtg

SEQ ID NO: 30686 - DNA, 475 bp, Homo sapiens
  misc_feature (1)...(475): n = A,T,C or G
gggcccgcnatcgagatccctagtcatagaggagcaattccgtctttaaaccctgcgtggcaatccctgacgcaccgccgtgatgcccagggaagacagggcgacctggaagtccaactacttccttaagatcatccaactattggatgattatccgaaatgtttcattgtgggagcagacaatgtgggctccaagcagatgcagcagatccgcatgtcccttcgcgggaaggctgtggtgctgatgggcaagaacaccatgatgcgcaaggccatccgagggcacctggaaaacaacccagctctggagaaactgctgcctcatatccgggggaatgtgggctttgtgttcaccaaggaggacctcactgagatcagggacatgttgctggccaataaggtgccagctgctgcccgtgctggtgccattgccccatgtgaagtcactgtgccagcccagaacactggtctcggn

SEQ ID NO: 30687 - DNA, 517 bp, Homo sapiens
  misc_feature (1)...(517): n = A,T,C or G
gagaggccnnnnnnnnagnnctcgaccaccgtccgtgtngggttagaacaccttcctgatttgaaaggcattttctttttatagttaggtgtagagcttaagggttaatttattttcatgttatgccagtaatatagagttgtatgcctattgagtgattgtggcaagaaaagctacagcttctttgcgtttaactttttcaaaccacagaccagaactggttgcatgttactttaggagttgtgggttggtaagctcccaggtacttcccgaggctatggtgtgagagcccccgtcctgccctctggggctccacaggcccctggcaaggccgatggctcangatgatggggcacagcccgcctttgaacaatcatgcttcagaaatctgcctgaccctagctgctgctgctgctcactttattcttgtatggctttggnaggcatacttggagaacatataccacattacgaattgatttaagcctgagagtttgagggctttcatgctttaaan

SEQ ID NO: 30688 - DNA, 489 bp, Homo sapiens
  misc_feature (1)...(489): n = A,T,C or G
aggcgnagcgcccccccagggtgtcccagnnggtcccgaannncnnnaantnaaggatacttggagtcctttattgctgaatgtgatcggagaactgagctcgcctataagcggctggcagaaacacaggaggaaatcagggcggaagtttctgcaaaggcagaaaaagtacatgagttaaatgaagaaataggaaaactccttgctaaagccgaacagctaggggctgaaggtaatgtggatgaatcccataacattcttatggaagtggaaaaagttcgtgcgaagaaaaaagaagctgaggaagaatacagaaattccatgcctgcatccagttttcagcagcaaaagctgcgtgtctgcgaggtctgttcagactaccttggtctgcatgacaatgaccgtcgtctggcagaccacttctgtggcaagctacacttggggttcattcagatccgagagagacttgatcagttgaagaaaactgtt

SEQ ID NO: 30689 - DNA, 462 bp, Homo sapiens
  misc_feature (1)...(462): n = A,T,C or G
nttgagaccatagtcattgtgcgggaattctatgggaccaggcccagagtcctgacgggcaacccacgcttggacctgcaagagatcaacaactgggtgcaggcgcagatgaaagggaagctcgccaggtccacaaaggaaattcccgatgagatcagcattctccttctcggtgtggcgcacttcaaggggcagtgggtaacaaagtttgactccagaaagacttccctcgaggatttctacttggatgaagagaggaccgtgagggtccccatgatgtcggaccctaaggctgttttacgctatggcttggattcagatctcagctgcaagattgcccagctgcccttgaccggaagcatgagtatcatcttcttcctgcccctgaaagtgacccagaatttgaccttgatagaggagagcctcacctccgagttcattcatgacatagaccgagaactg

SEQ ID NO: 30690 - DNA, 490 bp, Homo sapiens
  misc_feature (1)...(490): n = A,T,C or G
agggttgccaggnngnnnnnnaatcgagnccctattgtagaccctaggccangncgnggaattcggattaataaagaatgtgtcataaatgtggaagaatcttcaaaagggatgaacagaaatgccttataggagtttgaaagaatgcgcaggggaaattataggtggctgtggttgtaattacaaagttctgtcacgtcttcattgttaggaggaaaagaattcaataatcctatcagttctgctgtaaaacaaatgagctatgaaattctggtgaacactgattttatgtctccattcttgaggacactgttagtttgttttcatctgtatgccttgattagagcaaataaccttaaatatccttaaggaaacttagatatacatcatttccagtttttatcaaatgtgaattttttttgtcatactgcccacctaacatgggatgttttctcagaatattgttcacttatgtgtttgagtttcttaa

SEQ ID NO: 30691 - DNA, 464 bp, Homo sapiens
  misc_feature (1)...(464): n = A,T,C or G
ttttgatgaccctagttgaagagcgtggaannccncngcaggcatcacagacctgaggcaggggcctccggagggcactggacagaaactttcatccaagtggctgagtggagggaccctgctcaagtgcagctgcagtggccggggtttccctcaggtagggatcggggcgccttgtcgccgccagccacgtgtggcgtccggtacagtcagcagagtgcagggtgcgggcaccaggaaagggggcgcaggggaactcccgcgggcctcgcgtttgcaaacttctcgcctgggcaggaggcggtcgtgggaaagaaggtggaagagcgagctttttggaactgtgcacgggacagattggacgcacacccctcgggaggcgcgaaggcatggaaaatttgaagcatattatcacccttggccaggtcatccacaaacggtgtgaagagatgaaatactgcaag

SEQ ID NO: 30692 - DNA, 465 bp, Homo sapiens
  misc_feature (1)...(465): n = A,T,C or G
tttgagagcccttgtgatgacactaggccagngcggnggaattcgggaagtggtacaacctggccatcggttccacctgcccctggctgttgaagatcatggacaggatgacagtgagcacgctggtgctgggagagggcgctacagaggcggagatcagcatgaccagcactcgttggcggaaaggtgtctgtgaggagacgtctggagcttatgagaaaacagatactgatgggaagtttctctatcacaaatccaaatggaacataaccatggagtcctatgtggtccacaccaactatgatgagtatgccattttcctgaccaagaaattcagccgccatcatggacccaccattactgccaagctctacgggcgggcgccgcagctgagggaaactctcctgcaggacttcagagtggttgcccagggtgtgggcatccctgaggactccatcttcacca

SEQ ID NO: 30693 - DNA, 473 bp, Homo sapiens
  misc_feature (1)...(473): n = A,T,C or G
ggccctggcaatgatgtccctagtcatagagctcgcctactagactgaggaaagtgcatcggatagcctgagaacgcgtcatgctattcggcgtctggcaggggtgttccgagagaggtagacctcccctccccaaactgccaccatcacttccaacgccctccacgcgctggagctctgcccgggtgtggaaacctcgtcttccaacacgtagctgcccttcagccacccgcccgcagcctgggagtgccctgagggtgggtcgggggagctgcgcagggacatctctacaccgttcccatccgggaacagggcaacatctacaagcccaacaacaaggccatggcagacgagctgagcgagaagcaagtgtacgacgcgcacaccaaggagatcgacctggtcaaccgcgaccctaaacacctcaacgatgacgtggtcaagggcaactcacaacatggcagctggtttcn

SEQ ID NO: 30694 - DNA, 487 bp, Homo sapiens
  misc_feature (1)...(487): n = A,T,C or G
gggcacnnagggggnnnatcgagnccctatcgtagtccctagtcagtgtggtggaattcccgtgttcaacacctactatgctgtagcagtcagcgtggtgacagccatctcagggtcatccttggctcacccccaagggaagatcagcaagacttatgtgcacagtgcggtgttggcaggaggcgtggctgtgggtacctcgtgtcacctgatcccttctccgtggcttgccatggtgctgggtcttgtggctgggctgatctccgtcgggggagccaagtacctgccggggtgttgtaaccgagtgctggggattccccacagctccatcatgggctacaacttcagcttgctgggtctgcttggagagatcatctacattgtgctgctggtgcttgataccgtcggagccggcaatggcatgtcactcggctggaacctggctgtaaaaatggctgaagcaggtgatgaggagctgatgcgtttg

SEQ ID NO: 30695 - DNA, 471 bp, Homo sapiens
  misc_feature (1)...(471): n = A,T,C or G
ggcccgcnttcgagatccctagtcatagaggtccaattcggcccttctgtagctagaccgagcctgtgggatataccaaggcagaggagcccatagccatgaggagcctcggggccctgctcttgctgctgagcgcctgcctggcggtgagcgctggccctgtgccaacgccgcccgacaacatccaagtgcaggaaaacttcaatatctctcggatctatgggaagtggtacaacctggccatcggttccacctgcccctggctgaagaagatcatggacaggatgacagtgagcacgctggtgctgggagagggcgctacagaggcggagatcagcatgaccagcactcgttggcggaaaggtgtctgtgaggagacgtctggagcttatgagaaaacagatactgatgggaagtttctctatcacaaatccaaatggaacataaccatggagtcctatgtggtccacn

SEQ ID NO: 30696 - DNA, 465 bp, Homo sapiens
  misc_feature (1)...(465): n = A,T,C or G
ctcgagaccattgnnatagagatccatagtcagtgtggtggaatacgacacctggtgtgctcctcaggggggaatgcggacatcgctgctgtctatgctgctaggaagctgggcattcctgccaccatcgtgctccccgagagcacctccctgcaggtggtgcacaggctgcagggggagggggccgaggttcagctgactggaaaggtctgggacgaggccaatctgagggcgcaagagttggccaagagggacggctgggagaatgtccccccgtttgaccaccccctaatatggaaaggccacgccagcctggtgcaggagctgaaagcagtgctgaggaccccaccaggtgccctggtgctggcagatgggggtggaggtctcctggccgcggtggcggctggcctgctggaggtgggctggcagcatgtacccatcattgtcatggagacccatggcgca

SEQ ID NO: 30697 - DNA, 464 bp, Homo sapiens
  misc_feature (1)...(464): n = A,T,C or G
ntttgagatccctagtcatagaggtgcaattcccacgctcgggtactgaggtcaccctggcagaggtgcccctgctggatgaggtggctccggagccactgctgccagcaggccaaggctgtgccacccttctcaactttgatgagctgcctgagccgccagccaccttctgtgacccagaggaagtggaaggggagcccctggctgccccccagaccccaactctgccctcagcccttgaggagctggagcaagagcaggagccggagccccacctgctaaccaatggcgagaccacccagaaggaggggacccaggccagtgaggggtacttcagtcaatcacaggaggaggagtttgcccaatcggaagagctctgtgccaaggctccgcctcctgtgttctacaacaagcctccagagatcgacatcacatgctgggatgcagacccagttccagaagag

SEQ ID NO: 30698 - DNA, 480 bp, Homo sapiens
  misc_feature (1)...(480): n = A,T,C or G
nggcccggcnttcgcagacccctgnntttcgagnagcactagtccacgtggaggaattcttccgaggcgttaccatcaagagtgtcattcttccacttcctcagaatgtgaaggattatttactcgatgatggaactctggtggtttcaggaagggatgatccaccaacacattctcagccagacagtgatgatgaagcagaagaaatacagtggtctgatgatgagaacacagccacgcttacggcaccagaatttcctgagtttgccactaaagtccaggaagctatcaattccctcgggggcagtgtctttcctaagcttaattggagtgccccaagggatgcgtattggatagcaatgaatagttctctgaaatgtaaaaccctcagcgacatctttctgcttttcaagagttccgatttcatcactcgtgacttcactcagccgtttattcattgtactgatgattctccagatn

SEQ ID NO: 30699 - DNA, 465 bp, Homo sapiens
  misc_feature (1)...(465): n = A,T,C or G
ntttgagaccactanccatagatgggcatttcgacctggccaacctcagtgcagccaaccatgatgctgccatctttccaggaggctttggagcggctaaaaacctgagcacgtttgccgtggacgggaaagattgcaaggtgaataaagaagtggagcgtgtcctgaaggagttccaccaggccgggaagcccatcggcttgtgctgcattgcacctgtcctcgcggccaaggtgctcataggcgtcgaggtgactgtgggccacgagcaggaggaaggtggcaagtggccttatgccgggaccgcagaggccatcaaggccctgggtgccaagcactgcgtgaaggaagtggtcgaagctcacgtggaccanaaaaacaaggtggtcacgaccccagccttcatgtgcgagacggcactccactacatccatgatgggatcggagccatggtgaggaaggtgn

SEQ ID NO: 30700 - DNA, 455 bp, Homo sapiens
  misc_feature (1)...(455): n = A,T,C or G
nctgaaaaactgcagacctacggaagngcggnggaattccgcgggtccacgcgtgtgatcgtccgtgcgtctagcctttgcccacgcagctttcagtcatggcctccggtaacgcgcgcatcggaaagccagcccctgacttcaaggccacagcggtggttgatggcgccttcaaagaggtgaagctgtcggactacaaagggaagtacgtggtcctctttttctaccctctggacttcacttttgtgtgccccaccgagatcatcgcgttcagcaaccgtgcagaggacttccgcaagctgggctgtgaagtgctgggcgtctcggtggactctcagttcacccacctggcttggatcaacaccccccggaaagagggaggcttgggccccctgaacatccccctgcttgctgacgtgaccagacgcttgtctgaggattacggcgtgctgaaa

SEQ ID NO: 30701 - DNA, 241 bp, Homo sapiens
  misc_feature (1)...(241): n = A,T,C or G
tggncncnnncgnanangaagcattcaagaacatcctcacagagatctaccgcatcgtgtcacagaaacagatcgcagaccgtgctgcccacgacgagtccccggggaacaacgtggtggacatcagcgtgccgcccaccacggacggacagaagcccaacaagctgcagtgctgcccaaaatgtgacccctgcgcctccacccagcgtgcgtgcacgtnctccgcccgtccccgccacgg

SEQ ID NO: 30702 - DNA, 493 bp, Homo sapiens
  misc_feature (1)...(493): n = A,T,C or G
ggcgtttccagcagcccccttctgatatccactgaggagcgtggaaancggcaagagaaacaatgctattaactggagtaggagcacacagagaacaagctatgttttatgatttctaatgaaatgtgcagatgagattgttgggtaagctgttaagaattggattttggctctccctctccctctccctcctctccctctccctctccctctacggcctctccctctctctcttcctactgtctctacggcttccctctcactctctttctatgcctttcttttcatgccaagccgaggctgccttgcgctgtcgttatctaggctcactgcaacgcccctgcctgactctcctgcctcagcctgcccagtgcctgctattgcctgcgtgcgccgccacacttgatgggttttcgtacttgtttggaggggacgggggtcccctcccaccgccgggctgttctacagcttctaaccgtgagagatccgccag

SEQ ID NO: 30703 - DNA, 488 bp, Homo sapiens
  misc_feature (1)...(488): n = A,T,C or G
gggtcctnnggggnnnnnnaatcgaganccatatcgagtgccgtggaattcgggctgatttatagacaaccgaactgcgatgatccagaaactgaggaagcagctctggtggctatagactacatcaatcaaaaccttccttggggatacaaacacaccttgaaccagattgatgaagtaaaggtgtggcctcagcagccctccggagagctgtgtgagattgaaatagacaccctggaaaccacctgccatgtgctggaccccacccctgtggcaagatgcagcgtgaggcagctgaaggagcatgctgtcgaaggagactgtgatttccagctgttgaaactagatggcaagttttccgtggtatacgcaaaatgtgattccagtccagactcagacgaggacgtgcgcaaggtgtgccaagactgccccctgctggccccgctgaacgacaccagggtggtgcacgccgcgaaagctgtcctcgc

SEQ ID NO: 30704 - DNA, 486 bp, Homo sapiens
  misc_feature (1)...(486): n = A,T,C or G
tggtccnnagannnnnnaatcgagaccatattgagngccgtggaattccagaaattgtttagctcacagtgagccctcagtaaatatttgttggatgaatgcatgagagagaaaggaatggacaaaataaataattaaacaggagagaataaaattaatcttaacagcagctcacattcatggaccatttgctatgcctgcattttacatgtatgatttcatcaaattctcatgactgccatgtggagtgggaacattattatctatatttcacagctggagaaactggctgaaaagttaaatgacctggcaaaggtaaaacaggtagcacatggcacatcaaaagcaatttaaaacatttttctattaaaataaacatagactatgcagtagaatacatttctaaaaaatgtataaaaagtcctcaaagaaaaccctaacacttttaagcagggttttggccatgcctcctacgacactagaagn

SEQ ID NO: 30705 - DNA, 485 bp, Homo sapiens
  misc_feature (1)...(485): n = A,T,C or G
agcggcctgggnnnnnnncctgagaccatattgagtgccgtggaattcctgaaaggagactagaagctttgaaattattgtttgggggttttataaaagcaactactgtcacctccatccagattcttttaaattattgatccatccatagtatatattgctactcattcaagaatcctcaataagtattgagtatttaccatatgttgggatactgtgggctctggagagaggagggggcaatagagctaggaattaagaatcagttgagtaaaatgtgtaatatttattccccattaataactgactaggaaggactaaaagccagaaaggggatgaaaaaaaaatccttaattcagggccgacattatctacttaaacaactttgagatatggtcttaattattttaaagcagaataatataattgaaagtttatagctaaaagagactatataggtcatttagtataattcttcattagtt

SEQ ID NO: 30706 - DNA, 469 bp, Homo sapiens
  misc_feature (1)...(469): n = A,T,C or G
natcgagaccgataccaatngnggnggaattcccctgcaccagctgggcatcgtcgtcggcatcctcatcgcccaggtgttcggcctggactccatcatgggcaacaaggacctgtggcccctgctgctgagcatcatcttcatcccggccctgctgcagtgcatcgtgctgcccttctgccccgagagtccccgcttcctgctcatcaaccgcaacgaggagaaccgggccaagagtgtgctaaagaagctgcgcgggacagctgacgtgacccatgacctgcaggagatgaaggaagagagtcggcagatgatgcgggagaagaaggtcaccatcctggagctgttccgctcccccgcctaccgccagcccatcctcatcgctgtggtgctgcagctgtcccagcagctgtctggcatcaacgctgtcttctattactccacgagcatcttcgagaaggcggnggtg

SEQ ID NO: 30707 - DNA, 483 bp, Homo sapiens
  misc_feature (1)...(483): n = A,T,C or G
agatgggcagggttgcctnnnnccctaggangccatgccnatcntncggnanaancncnagncngggcaacagagttcagtgttgcaatcacagctcattgcaatctccaactcttttctggttaacagagtaagatccatctctaaaagaaatttaaggccaggcgcagtggctcaagcctgtaatcccagcactttgggaggccgaggcgggtggatcatgaggtcaggagatcgagatcatcctggctaacacggtgaaaccccgtctctactaaaaatacaaaaaattagccgggcatggttgcaggtgcctgtagtcccagctactcgggaggctgaagcaggagaatggcctgaacccgggaggtggagctcgcagtgagtggagatggcgccgctgcactccagcctgggcaacagagcaagcctccatctcaaaaaanaaaaaaaaaaaaaaaannnggggggggccgtttgatn

SEQ ID NO: 30708 - DNA, 531 bp, Homo sapiens
  misc_feature (1)...(531): n = A,T,C or G
cgggtctntncagtagnnnnnnnagggggnnnnngattgannccctatcgaaccactattcagngnggnggaattcgaactcgaggaagctgcacccagaagaaaaacttgtgggatcctctctgcctgtcgccagctgtgcaaccttggaagagaacccaaaacctagaagagcgtgagagggaaaagaggaaggagattgactcccaggccggcaaagaagccttcctgcccgtgcaggcagccagagcgccagtgacaccttcgacctcgccctcggcccccagcacccaagccttgcctgtgccgtcctctccttggagactcagccctgttgaggaggggagtgagcaatagaggagggaaggaaaagaggagctgtgattagccctgttttataatgggctacatagccctgttttatatgggctttttaatggaagtatggggagcagggggcagagaacaagagacagtcacgcagcagaagggggggccagagtgcaccagcaattaattcagctctaggtc

SEQ ID NO: 30709 - DNA, 414 bp, Homo sapiens
cagcgcgatgtactctacatccatcctgctggcgggcctgctgagcgtgaccgtaaacaccttccctgtgctgtccctccgaggcatcttcccagccctttacgagctacttgccagggaggataaagcggaggatggccccaacgaggagaatttcaccatggagcccttgcctcatgtacaccggtagtctcgtgcccgccgttccagctatgctttctcccaccgtgagggatatgcaaacctcatcactcagggcacaattctgcggaggggaccaggggtcagcagtgacatagcatctgaatccctagacccatctgatgaagaggcagcttcgagcccaaaagagtcacagtgacacctcaggaagatgtccttcctggggaagaagaagcaccagccacaggggca

SEQ ID NO: 30710 - DNA, 419 bp, Homo sapiens
gtgggttaccacctggaatggttcatcaggggaaaggacccccagcccgtggaggaggaaaagagcatctcagagcgccgggaggatcgcaagctggatgagcttctaggcaaggaccacacgcaggtggtgagccttaaggacaagctagaatttgccccgaaagctgtgctgaacagaaaccgcccagagaagaattaatggaggacacagggccctatggtcctactgtgggtggtgacttgtcctgctaccatgttgacagagccccagaacccacatctaattggctttgttgcttattctggcccttcccacaccacacagccacacaaatactggctgctccttgatggccaggcagacccagcagcagccgaggggccagtgaagaggaaggccgcatctgttgtgtggtg

SEQ ID NO: 30711 - DNA, 412 bp, Homo sapiens
  misc_feature (1)...(412): n = A,T,C or G
ggctgtccgactcaacatatcctatcctcctcagaacttgaccatgactgtcttccaaggagatggcacagcatccacaaccttgaggaatggctcggccctttcagtcctggagggccagtccctgcaccttgtctgtgctgtcgacagcaatccccctgccaggctgagctggacctgggggagcctgaccctgagcccctcacagtcctcgaaccttggggtgctggagctgcctcgagtgcatgtgaaggatgaaggggaattcacctgccgagctcagaaccctctaggctcccagcacatttccctgagcctctccctgcaaaacgagtacacaggcaaaatgaggcctatatcangagtgatgctaggggcattcgggggagctggagccacagccctggtcttc

SEQ ID NO: 30712 - DNA, 489 bp, Homo sapiens
  misc_feature (1)...(489): n = A,T,C or G
agggccnaggggnnnnnnttcgaganccatatcgagtgccgtggaattcgcagcgtgaggcagctgaaggagcatgctgtcgaaggagactgtgatttccagctgttgaaactagatggcaagttttccgtggtatacgcaaaatgtgattccagtccagactcagccgaggacgtgcgcaaggtgtgccaagactgccccctgctggccccgctgaacgacaccagggtggtgcacgccgcgaaagctgccctggccgccttcaacgctcagaacaacggctccaattttcagctggaggaaatttcccgggctcagcttgtgcccctcccaccttctacctatgtggagtttacagtgtctggcactgactgtgttgctaaagaggccacagaggcagccaagtgtaacctgctggcagaaaagcaatatggcttttgtaaggcaacactcagtgagaagcttggtggggcagaggttgcagtgacn

SEQ ID NO: 30713 - DNA, 493 bp, Homo sapiens
  misc_feature (1)...(493): n = A,T,C or G
ggggcncnaggggnnnnnnnaatcgagnnccctatcgagatccctagtccgtgtggtggaattcagtgacactcagtgggtcttgagctttaaattccccctggtgtctcagagggccttgggtcctgtggcatggctcctggcagcctggctggtttaattttgttccggattctcctgcctctggggctagaattttcacttgatcagttgactaacaagtacccggccatgcaaagagaactgtgagatactggtctccaccctgagcttcatctcccacctgcaacgtggggctgttgaaacctacctgctcactttggaggcgtgtcagggggacaccagagggatgcgcttgggcagcctctctccttgaccatcctgtgccagccctggggtacaggtgagagtgcgagaccattggcccctacccacagggagttcccaggcctgtacgtgggatccagaggcagggatagggggataaagtctg

SEQ ID NO: 30714 - DNA, 490 bp, Homo sapiens
  misc_feature (1)...(490): n = A,T,C or G
cgcgtcccnnaggggnnnnnncctcgaagaccncttcgagagccgtggaanacgccatgaggcactgggagaagcacacctgtgtcaccttcctggagcgcactgacgaggacagctatattgtgttcacctatcgaccttgcgggtgctgctcctacgtgggtcgccgcggcgggggcccccaggccatctccatcggcaagaactgtgacaagttcggcattgtggtccacgagctgggccacgtcgtcggcttctggcacgaacacactcggccagaccgggaccgccacgtttccatcgttcgtgagaacatccagccagggcaggagtataacttcctgaagatggagcctcaggaggtggagtccctgggggagacctatgacttcgacagcatcatgcattacgctcggaacacattctccaggggcatcttcctggataccattgtccccaagtatgaggtgaacggggtgaaacctcccan

SEQ ID NO: 30715 - DNA, 487 bp, Homo sapiens
  misc_feature (1)...(487): n = A,T,C or G
atggggccnagggggggnnttttgaaaccctatcgagaccctagcagngcgnggaattcctgcaatcttgcagaagatggtgtgccacggggagcacacgtacctgtttgcccaggccatgatgtccgtgctggcccaggaggagcaggggggctccgctgtgcgcaggatcgcccaggaagtgcagcgctttgcccaggagaagtgagaggccctgtttctgctcagcccttccttcctagtgctccccacaaaacccttcccatggcccgtgttccacagccaaagctgctagctccttctgttcaacgtagaggtaaacttgcttttggctgggcgtggtggctcacgcctgtaatcccagcactttgggaggccgaggcggatggatcacctaaggtcaggagtttgagaccagcttgaccaacatggagaaaccccatctctggtaaacaaaaatacaaaattagccgggtgtggcggcaca

SEQ ID NO: 30716 - DNA, 491 bp, Homo sapiens
  misc_feature (1)...(491): n = A,T,C or G
nttcgaatcgcagtncgtgtggtggaattcgttcgctgtcctcaccggaggctgtgtagcatcttcctgaacttgagttattctgggaaacttgatggctgccacttgctgaagggtttgtgatgcttttcctctccacttacccgtggagcatagctgttctctgtcttgcgagacaaccgaacgcccgttaggcccaagttggccaccgctgactctgccggtctcatgtgtccttgtagacagagaggcagagcaggcgctgtggaaaaggaaattgcctctgatttagaaagtaggtttattggtctctagctaccccaggcggcttaattgacagtcacccttcaccccgctctccgtgagcctagttttctggtaaaaatcaggaagaagataattggatgccgtccagagctgtgtgtagttcactatcaccccatctaattctctttgcttttgcaagaaactcagagggagattcaggctcc

SEQ ID NO: 30717 - DNA, 490 bp, Homo sapiens
  misc_feature (1)...(490): n = A,T,C or G
attgattcgcacaccatccgngnggngcaattcggagatgtctgactgagggccatctgaggtcacggtgcatcctgaggacagagctgagattggatatcaacgatgtgggctcagcagccctggagtaggagctgggaaggtcagtgccttggtggcggcagggccagggcactgagagtattggcagggcacagcaggggaaagggaagagaagcagagcgtgggactgtccctctgtgctggaagagggctaacaccagccccgactctccgctctggctaggccgagggggccctctgtcctctgtgttgccctagggctcggtgacctctgtcatagcactgaccacatgctatcctgcctgtgccttcctctagctgtccccgccctactccggaccgccccaaagactccatgggatggacctgagtcagccgaatcctagccccttcccttgggcctgctgtggtgctcgacatcagtgac

SEQ ID NO: 30718 - DNA, 491 bp, Homo sapiens
  misc_feature (1)...(491): n = A,T,C or G
nttcgattagcgtccagtgtnggggaattcgtgagccttcctctccgtctccgtctctgtaacacgtgcatgtcaacatgagccctcagtcccttatctgaagtccccaggctggatgtggttttttgtttttgttgtgcgacggagtcttgctctgatgcccacgctggaatgcagtggcacggatctcagctcactgcaacctccgcctcctggattcaggtgattctgatgcttcagcctcctgagtagctggtacaggcatgtgccacgatgcccagctaatttttgtaattttagtagagacggggtttcaccacgttggccaggctggtctgaaactcctgacctcaagtgatccgcccgcctggtcctcccgaagtgctgggattacaggtgtaagccactgcgcgcagccatttgttttggaattcagaattttccagcctttagagacaaggcctatgctgtgtggtgtgtgatgcccacag

SEQ ID NO: 30719 - DNA, 500 bp, Homo sapiens
  misc_feature (1)...(500): n = A,T,C or G
tggcgnnnnagagccacgctaaagnngactagntanctaacggaanngcgcggaattccgagaagacagcagagctgctttctcggagaaccttaacctggaagccgtactccacacgggggtagtagcaggcaaacttcatcctgtagccgtactccacacgggggtagtagcaggcaaacttcatcctgtagccatcctcgtcctgcagaccccgctccagggcgcgacgctggcgagggcacttcccctcagcacactggcagacttcagcagaacacaaggtggccaagagtctgctcttacttggtgccccgtaaaacacagaacatctgcgctcggggttgtagtagtcgtacagggttgcgctggccggctgcaccagccccaccggcacttcctgcacagcctcaaagcccacgcactcccgggaggtggggaccgagtcaaaatacagcaggacgtggggcccctcggtctcaaagtgactcacgtaacgg

SEQ ID NO: 30720 - DNA, 491 bp, Homo sapiens
  misc_feature (1)...(491): n = A,T,C or G
tggcggnnnaggcccnccaaatngcaatgagagtctgcaaanacgngnaaannncggagagctttaagatttccggtgatggaatccgaaatggaatcgcaaagcgccagggcagaggagggctttacccaggtcacccgcaagggtggccgacgggcgaagaaacgaccggctgaacagctgtccgcatcatgagagggcggagatgcgtgccgcatggacacagaggaggccatgccggcgaagaggcccgtcttcccacccctctgtggggacgggctcctgagtgggaatgacgaaacgaggaaaattccagtcccagctaacacatacacaccattgaaagaaaactggatgaagatatttacttctattgtggaacatttgggacttcagatacgctttaacttgaaatcatggaatgtagaaatcaccgacttgaaagacaccaaggatgttagtgctctgacaaaagcagctgattttgtgaa

SEQ ID NO: 30721 - DNA, 502 bp, Homo sapiens
  misc_feature (1)...(502): n = A,T,C or G
agtgccgnnnagagccancctaaagngaccttagnnagnctncggaagngcggnggaattccagggcagacagaagacaacatgaacgtctaacctcatgcaccagtggacacgtgtgggacccaggccgcttcttcaggattcggccgtcaggaaaaggctccctaaacgctggtagaccacgtggctggggtggcatggatggggcttatggacctgggtctttcagaagtgacccatagctcactcctggaaggcgtgagtcaagcaggtggttctgcgcactaacgacgctcttccactgtttccctagggaagatccttgtccttcaaaaccttcctcatctgggttttaataagtatttaccaaggcggcatcctcatgtatggggccctggtgctcttcgagtctgagttcgtccacgtggtggccatctccttcaccgcactgatcctgaccgagctgctgatggtggcgctgaccgtccgcacgttgcactgg

SEQ ID NO: 30722 - DNA, 451 bp, Homo sapiens
  misc_feature (1)...(451): n = A,T,C or G
aatcgatttgatanccctaggccagngnggtggaattcacccaggcgtgtcagccctgctccagacaccttgggcatggaggagagtgtcgtacggccctcagtgtttgtggtggatggacagaccgacatcccattcacgaggctgggacgaagccaccggagacagtcgtgcagtgtggcccgggtgggtctgggtctcttgctgttgctgatgggggccgggctggccgcccaaggctggttcctcctgcagctgcactggcgtctatgagagatggtcacccgcctgcctgacggacctgcaggctcctgggagcagctgatacaagagcgaaggtctcacgaggtcaacccagcagcgcatctcacaggggccaactccagcttgaccggcagcggggggccgctgttatgggagactcagctgggcctggccttcctgaggggcn

SEQ ID NO: 30723 - DNA, 495 bp, Homo sapiens
  misc_feature (1)...(495): n = A,T,C or G
aggcggnnncggccccctgaangactttgaagngtnngcaangccgcgnaantnnntncttggctgactcaccgccctcgccgccgcaccatggacgccctcaggcaggtggtcaactttgggcctggtcccgccaagctgccgcactcagtgttgttagagatacaaaaggaattattagactacaaaggagttggcattattgttcttgaaatgagtcacaggtcatcagattttgccaagattattaacaatacagagaatcttgtgcgggaattgctagctgttccagacaactataaggggatttttctgcaaggaggtgggtgcggccagttcagtgctgtccccttaaacctcattggcttgaaagcaggaaggtgtgctgactatgtggtgacaggagcttggtcagctaaggccgcagaagaagccaagaaagttgggactataaatatcgttcaccctaaacttgggagttatacaaaaatttca

SEQ ID NO: 30724 - DNA, 482 bp, Homo sapiens
  misc_feature (1)...(482): n = A,T,C or G
ngacggcnnnaatcgagttcctagcccatgcggnggaattccaagatttcacacatgtgaccaggggccaccaaagtccctgtgacctttgtgactaggatcctaatttctctattttctcctgggtgcctgggtctgtgtcacctggggcagtgtggataatgtttagttctgtgacactgttttttgggggtggcacctggttctccgatgcctgggctggtgtcaggcccaggactgtagtgctgggagcagtaaagctcagctctgtgtaatgagtgatgctatggcttgctcgtgtcttatgatccaatccttttctacatcagcccttgttttgttttatggctagtcttatctggcctggttatttccttgcggcgaggagagggtttgctaatctgctcccagcccaacctattaccaccccacctcgctgggacctactgctcgggaggcagcagacagggagccaccagcag

SEQ ID NO: 30725 - DNA, 496 bp, Homo sapiens
  misc_feature (1)...(496): n = A,T,C or G
ttgcgnnnnnaggcccannttaaagnggcctagnntgnacangcannanccggcngggaggagggagncagcggctggatgcagggggcttccatccaaggtggtaactagagcgtccaagaccaaaggaggaacggggctaaaagccaggcgactgaaagtgatgtacaaacagggcggaattctgcaagtatcaagcaagtagcttaacactggtggctgaagggaaggacgcagctcttacaagtgtggagcatcttacagttaaagagaatgtgttagattcccatgacacccctgtgaggcaggtattactactgattcctggntttgttttttgtttttttttgagacagtctcgctctgttgcgcagactggagtgcagnggggtgatctctgctcactgcaacctcagcctgccctggttcaagcgattctcatgcctcaggctcccgagcagttgggattacaggtgcccaccaccacacccaacta

SEQ ID NO: 30726 - DNA, 475 bp, Homo sapiens
  misc_feature (1)...(475): n = A,T,C or G
cggcaagggcccggnnnttcggaaatacaagttgtgtcctgtaanngncggngnaanttcgncccgtcagcacccacctgctgctgtcctcagaaatggggtgcctgtctgggtgtgctggtccccaaaagatgtgtccacattctggagcctgagagacagagaggagaaggccgtgtggagatggaggcagaaattgaggaagcctggagcccccaggagctggaagaagcaggaaggatcccccctagagactcggccctgcgcacacctggatctcagacttctggcttccagagctgtgagggaagagattgctgctgtttgaagcctcagggtccatagtcatttcttatggcaaccatgggacactcatttggtgagaaaaagccccttgaaacacacaagtggtgggtgccgtggatcaagggccgccaaccacagtcaagccccagggccgctggctgggcagact

SEQ ID NO: 30727 - DNA, 224 bp, Homo sapiens
ctactaaggcgtcttcgaaacgtgaagccgaggagatgaagctggagccattacaagagcgtgagcccgcgccggaggataacttgacgtggagcagtagcggcggctacgagaagatgtttcttatcaacagtttatgacatcagggtttgaagacaagcaatcaacctgtgagacaaaggaacaggagccaaaattggtgaaacccaaaaaaaaaaaaaaag

SEQ ID NO: 30728 - DNA, 488 bp, Homo sapiens
  misc_feature (1)...(488): n = A,T,C or G
nttctgatcgcagtncatgtggggaattcggtttaaaaaatactgaaagccaaagggcgggaatctaggtgagccgtaagggataacttcccaaacagcactacagaactgactcaccagtggcagaactattaccacattcaggtaacgtgaggagttcagagccccctaccaaaatgggtggtttcgggaacttactcctttatctgtgatccaataattaagaagctgtcacttggggctctaagaatacatcactatagttacaattcagcaattaggaagctacagctgcatctgttccagagctacagtgcacctgctagatctgcactgaaaaaaactgattccctgttccttgcttatcagcacctctaaagatacttgatactgggatcttctttaccattgctgaaatatacagacatactagagctccagtgcctcaattgtgatgcaggcaccaccacacttncactttccaaacc

SEQ ID NO: 30729 - DNA, 492 bp, Homo sapiens
  misc_feature (1)...(492): n = A,T,C or G
aggccccnnaggccacccagganaactgagntgnctncggannancgagcnnggnctctccactatgctagctgggaagtggccgagatctgtaccctctgcaagagcaatggctggatcctgcccactgtgtaccagggcatgtacaacgccaccacccggcaggtggaaacggagctcttcccctgcctcaggcactttggactgaggttctatgcctacaaccctctggctgggggcctgctgactggcaagtacaagtatgaggacaaggacgggaaacagcctgtgggccgcttctttgggaatagctgggctgagacctacaggaatcgcttctggaaggagcaccacttcgaggccattgcgttggtggagaaggccctgcaggccgcatatggcgccagcgcccccagtgtgacctcggctgccctccggtggatgtaccaccactcacagctgcagggtgcccacggggacgcggtcatnctg

SEQ ID NO: 30730 - DNA, 505 bp, Homo sapiens
  misc_feature (1)...(505): n = A,T,C or G
tggcgnnnnnnagagcccancctaggtgngaccttagcnagctancgnaagngcggnggaattngnattatcttcccctccagttgtgaccaaaaaaagtctgcagatcttgtcaaatatccctggcagagagggggcaaaactacccccagttcgtatacatatattataaggcatttgctagaatttcagaattatcatttttcacaagatactttggccctagaaatgctgactcaaagccattattttgggccttctaccaatgacgtgtttgtttcccttgaaggcttgccagaatctttatgtaggtgactctagatcatggttatttattttcattttctcagatattaaagcatattttccttctgagttttgaatggtaagggtaaggctattcaccgcatactatcatccaaatagaagtggatgtgcaaccacagatatttcattgaaaaatctcagaaagagaacagcgtattaaacatcacagatacagatg

SEQ ID NO: 30731 - DNA, 492 bp, Homo sapiens
  misc_feature (1)...(492): n = A,T,C or G
nattgatagccatncgtgnggngcaattccacctcttcaaggacaaggtggtgctggacgtcggctcgggcaccggcatcctctgcatgtttgctgccaaggccggggcccgcaaggtcatcgggatcgagtgttccagtatctctgattatgcggtgaagatcgtcaaagccaacaagttagaccacgtggtgaccatcatcaaggggaaggtggaggaggtggagctcccagtggagaaggtggacatcatcatcagcgagtggatgggctactgcctcttctacgagtccatgctcaacaccgtgctctatgcccgggacaagtggctggcgcccgatggcctcatctttccagaccgggccacgctgtatgtgacggccatcgaggaccggcagtacaaagactacaagatccactggtgggagaacgtgtatggcttcgacatgtcttgcatcaaagatgtggccattaaggagcccctagtggatg

SEQ ID NO: 30732 - DNA, 499 bp, Homo sapiens
  misc_feature (1)...(499): n = A,T,C or G
agtgccccnnnagagccancctgcnangaactgngagtgtcgtcggaaacggcggaggctgtactgagggtcgcccggcggcagctgagccagcgcggcgggtctggagcccccatcctcctgcggcagatgttcgagcctgtgagctgcaccttcacgtacctgctgggtgacagagagtcccgggaggccgttctgatcgacccagtcctggaaacagcgcctcgggatgcccagctgatcaaggagctggggctgcggctgctctatgctgtgaatacccactgccacgcggaccacattacaggctcggggctgctccgttccctcctccctggctgccagtctgtcatctcccgccttagtggggcccaggctgacttacacattgaggatggagactccatccgcttcgggcgcttcgcgttggagaccanggccagccctggccacaccccaggctgtgtcaccttcgtcctgaatgaccacagcatggnct

SEQ ID NO: 30733 - DNA, 488 bp, Homo sapiens
  misc_feature (1)...(488): n = A,T,C or G
tgaggcccnagnnnnnnnnnnttcgatgaccatattgagtgccgtggaattcagtcttgacgtggcgggttgctttccaaaatggcgcgggtgctgaaggctgcagccgcgaatgccgtaggtgaataccgggcaccggcgaccttcgccatgggacagggagcgtgggaacggcggtcgggggcggaggaggcctcggcgtggccaaagcaccttgatctaatgtcctcccccgggggcgcgttccacagcagctgctgtcacttatgcagagggtgccttccagaagcgccaccgcttagtagcggggattgccttgtgcatgagtcccatttccatccgagagctgtgcgccttgggctctgcaccttccagtatgtgggcgggagagtcgagggaacttgcccggcaggtcaggcagggcagggacagaagtaaatagaagcggatcggtaagttattttaccgcgcaccaataaagagactgg

SEQ ID NO: 30734 - DNA, 497 bp, Homo sapiens
  misc_feature (1)...(497): n = A,T,C or G
cgccccccccccggagngcnnaattgaaaccctaatcgatgaccactaggacagngcggnggaattccactggccttcctctcggagggacaaggaagcgtggcctccctttcactcaccttacttttccttctggtccagggccagctcttccgaggctccagcctgcttttccgccgggtgtcatcaggatcatgctttgccctggagtaacctgaatcatctaaaaaacacggtctcaacctggccaccgtgggtgaggcctgaccaccttgggacacctgcaagacgactccaacccaacaacaaccagatgtgctccagcccagccgggcttcagttccatatttgccatgtgtctgtccagatgtggggttgagcgggggtggggctgcacccagtggattgggtcacccggcagacctagggaaggtgaggcgaggtggggagttggcagaatccccatacctcgcagatttgctgagtctgtcttgtgc

SEQ ID NO: 30735 - DNA, 488 bp, Homo sapiens
  misc_feature (1)...(488): n = A,T,C or G
gtgcaccaaggggnnnnnaattgagnccctatcgagancactaggcagngcggnggaattcctctctgttgtcacagctgtgcagtggccttccactggacccctgctatgggctggcagtgtttcccacgtgcctgtcacatgccgcgcagttccatggtgcatgttgtccatctttctgggccccagggagtggccgtgagggcagggcccaggcacctgtgctggaagggctgagttgctgcccttgcggcccttcctgtgctctcagcagcactggatgtcatcaagcgtttgaatttctgcctttctgatagttggaaaatgcgttgttttgtttaactttgcattttctggatgacttacgggggtcagtgtcttcatatgtttgtcagacattccttttgctccgtgactgacttgttcatgtgttttgcccattttgaggaggttgtcgggacatttcactctccagtaaatgtggccct

SEQ ID NO: 30736 - DNA, 486 bp, Homo sapiens
  misc_feature (1)...(486): n = A,T,C or G
cgtggccnagnnnnnnnnaattgagaccctattgagtgccgtggaattcctcctcacacactagacaggaaaccaacgcagcttgaagccagtgacaagaaaaatcaagctggaaatatgcctcggggatcagtcaagagatttggagaggtggaaagaagctgtctgcctactgcctgttttgaaattagatttatttctgattaaggacaattctttcagcaaatatgtattacaagccttccttggacaagaaccagagatattaggttgaaccatataaaactgccatttttctatatcaaaagcaaccaaatattggccgttttaatggttcaacctaatacagtggtgaaaaaggcataatatgtgcccacaagagcttacaatctaggttggaaaataaggtcaacaacaggaagcctggaccgactgacgactgccatccgtctcacaaagagacaaaatatttgaaatcaggattgc

SEQ ID NO: 30737 - DNA, 506 bp, Homo sapiens
  misc_feature (1)...(506): n = A,T,C or G
aggcccncnnnnaatagacatcgatcagcgtttggaattcgcacatgggccccagagcagtccatcttcaaggtccggataacatgagcaatgagccttctcacattgttgttggggataagggactgtagctgctgggttagctgaatttcaaactgatcacctggggacgagagcaatgggtaattgaagcttttgggctcgggggacaggtcagtgcccacgttgttgtattcccattttgtctcagtttgtttaacagttggccctaagttgaatgcagtcccagcggaatctgcctcatgaggatgattgtagtttgtgttttcagagatggttccttctggcatgttagtgttttccataaaatcattttcttcaaaggcatttcttgcagntgcgggttttgaattattcttttctataaaatggtctgaaggagcagatacttccacaaaaggggtttctttagaggactcaggtctcctaaggatgaaaaagcccct

SEQ ID NO: 30738 - DNA, 498 bp, Homo sapiens
  misc_feature (1)...(498): n = A,T,C or G
tgagtccccnnagggggnnnnnnaattgganncccctcctcgtagaccactaggccgngnggtggaattccgccaatctaggagacaaagcctgagccgctgcggtgagccaacccaaacccatccgcgggtcttctttccagagacattttcggagccgagggcgcctctgcgagagcgctgcgaacaggttccgacgcgccggagatcgcgcgacgaatctgcgcctcgaaccctcgctttccagcagtcgccggattgctgctccacagggagccaacgcgcttgaggaccagcccagccggggctctctggatcagtaggctgtgcaggctgcgagctcgttgacgcatctcagcccactcccttgtcctcccgcctggcgaagatgtccgccaagcctgaagtcagcttagtgcgcgaggcttctcggcagatcgtggccggtggttctgcaggtcttgtagaaatttgcctgatgcaccccctagatgtggt

SEQ ID NO: 30739 - DNA, 455 bp, Homo sapiens
  misc_feature (1)...(455): n = A,T,C or G
nactgaagacatcgtcagngcggcggaattcgaaagagatgaatgagaagtgggaagcccgctgggagcggctccgcatgttgctggaggtgtgccagttctcgagggatgcctctgtggctgaggcgtggctgattgcccaggagccctacctggccagcggggactttggacacacagtggacagtgtggagaagctcatcaagaggcatgaggcttttgagaagtccacggccagctgggcagagcgctttgctgccctggagaagcccaccacgcttgagctgaaagaacgccagattgcagagagacccgcagaggagactgggcctcaagaggaggaaggcgagacagcaggggaggctccagtttcccaccatgcggccaccgagagaacgtccccggtcagtctctggtctcgtttgtctagttcctgggagtcactgcagccagag

SEQ ID NO: 30740 - DNA, 465 bp, Homo sapiens
  misc_feature (1)...(465): n = A,T,C or G
atttgagacccttcagtagaccatcccacagngcggnggaannctgtagagagaactgggtgattaaaggcttctcgtcccgattttgtgatagccaagtgcttggcctggtcgacggtctttggtcctttacagataaagtgttcggtttcagtgggtcccaagttttccatgaagggcagtggttccctgacctcccaggtgcctgggcttccccaggttcctgatctggggcttggggccctgtgtttggggatcgtggcactgtgtgcaccagcctggaagcactgggccagtcttggccaagctttccatcagggatgatttgatcttggtgctacaggtctgtggtacgaccattgttccacaccacatgtcattaataatgcttcccatgcttctgcttgcaaatgaccagccttccaaacagccagagctgtttcgaggtgtttctgcaggcaggtg

SEQ ID NO: 30741 - DNA, 477 bp, Homo sapiens
  misc_feature (1)...(477): n = A,T,C or G
agggattccnnntttttgatgaccacattgagagccgtggaannccgccgctgccttctgtgtcacctgcactgtcaccagtccggagccccacaccgccagctgcggggtttcagccgctgctcaatggaagcttggttcccgtgccgcccactactcctgcgccgggagtgcagctggacgtggaggctctcatccccacgcacgatgagcagggccggcccatccccgagtggaagcgccaggtgatggtgcgcaagatgcagctgaagatgcaggaggaggaggagcagaggcggaaggaggaggaggaggaggcccggctggccagcatgcccgcctggaggcgggacctcctgcggaagaagctggaagaagagagggagcagaagcggtgagtgcagggctggccccaacctgccacccttatccccacccaagtcgcagagggtcgtcccttcatccaggccaatttgn

SEQ ID NO: 30742 - DNA, 464 bp, Homo sapiens
  misc_feature (1)...(464): n = A,T,C or G
gggcaggaactgatactatgagancntcngaagngncgnggaattctttttaatgatgtggtcttgtatctttgtcattattatatttgcttgactttcagatattggatatgcaatattgtagcaataagtcgaggctctgggtaacaataacttcccccagagaggatgttctaggcaatcccaggtcactgcagtccctttggaaattgagagaatgcaaaactgggctggttttccgtaaaggctggtctacttctaactcacctgtatttctggtgtgtggccctttgaggttccagctcacagcatggggtctgccaggcctctttctcctgtgtgagggccctgggagtctctcacaagctccgttttgcttctcagtctcatccctgcttgcttaagatctctgggcctctttcttcctctcgtgggtctcagactttatgaagacctcactatcn

SEQ ID NO: 30743 - DNA, 225 bp, Homo sapiens
  misc_feature (1)...(225): n = A,T,C or G
cancgccagttngccaagtgaatgccgaggtcacactctacctaatattcctgtgagacaccctcagacctgggctgcttctggcactttcctctggcactattattatctttgaagctcttcaccaaataagtcacaagttcctgaaggcaaggatagccccttttatttttttttctggaggtctttacagacccagagccagagctgtcccctgaaaaggca

SEQ ID NO: 30744 - DNA, 481 bp, Homo sapiens
  misc_feature (1)...(481): n = A,T,C or G
tggnagtgnccaggggnnnnntttagagaccacatagagagcgctgaancaacccggctcgagcggagcatgctgtcgaaggagactgtgatttccagctgttgaaactagatggcatgttttccgtggtatacgcaaaatgtgattccagtccagactcagccgaggacgtgcgcaaggtgtgccaagactgccccctgctggccccgctgaacgacaccagggtggtgcacgccgcgaaagctgccctggccgccttcaacgctcagaacaacggctccaattttcagctggaggaaatttcccgggctcagcttgtgcccctcccaccttctacctatgtggagtttacagtgtctggcactgactgtgttgctaaagaggccacagaggcagccaagtgtaacctgctggcagaaaagcaatatggcttttgtaaggcaacactcagtgagaagcttggtggggcagaggttgcagt

SEQ ID NO: 30745 - DNA, 474 bp, Homo sapiens
  misc_feature (1)...(474): n = A,T,C or G
cggtcgtgcnttttgaaaccttcagtagacactaggacagngcggnggaanncatcagagggagctgagggaggcctgacctgaggccggcacccggagctggcgggagccagacccagaggacctccgccgcttcttgctgtcagcagcctgccggagcttcccacagtggctgcctggaggtggtggcggccaagtctccagctgctcagatactgatgtcccctacctgctgttggccgtcaagtcagaaccagggcgctttgcagaacgacaggccgtgagagagacgtggggcagtccagctccagggatccggctgctcttcctgctagggtctccggtaggtgaggcggggcctgacctatactcactagtggcatgggagagccgtcgctacagtgacctgctgctctgggacttcctcgacgtcccattcaaccagacgctcaaagacctgctgctgctggcctg

SEQ ID NO: 30746 - DNA, 490 bp, Homo sapiens
  misc_feature (1)...(490): n = A,T,C or G
agaggctnnnnnnaaatgatatcgatcgcgtgggcaattacaaaaggaagattagatatccttttatagtcatgcattgcttaacgatgggggatgtgttctgagaattgcatcactaggcgatttcatcattgtgtaaacaccatagagtgtacttacataaacctagattatatagcctaccgcacacctaggctttgtggtatggcgtgttgctcctaggctgcaaacctgtacaacatgttactgtattggatactgttggcaacaccatggtatttgtgtatctaaacatacctaaacatagaaaaggtacagtaaaaatacagtattataatcttatgggaccaccatcatatatgtggtcgtcattgactgagacatcattaatgtggtgcatgactactccaatcagtccaggaacaaattaaaaagataaggagaaaagtcagtgctttgaggctccacaacacctttggtgtgtccattt

SEQ ID NO: 30747 - DNA, 491 bp, Homo sapiens
  misc_feature (1)...(491): n = A,T,C or G
agagcgccnnnnnnaactgatnactagcgctatcccaggggcaattatggnggcggggcggtagccaggctgtggtggcgcgggatcttgggggcctcggcgctgaccatggggactgggcgaccctccgttctgttgctgccggcgaggcgggagagctccggggccgacacgcgccgtgaccactgtcagaccacggaatgatgtggcccacaagcatctctgagcttttggagagtatgtggctgaaatcttgcccaagtatgtccaacaagttcaagtgtcctgcttcaatgagttagaggtctgtatccatcctgatggcggcatcccagagctgacttttctcacggatcacaccaatgcacagatcaaatctctggttgacttgacagcagcggacgtcccaactcggcacagccggtttgagattggctacaacctggtgtctgtgcgcttcaactcacggatacgtgtgacgacctacacag

SEQ ID NO: 30748 - DNA, 494 bp, Homo sapiens
  misc_feature (1)...(494): n = A,T,C or G
agagggccnnnnnnncctgataactgacagcgtccgcaggngcaattcctgggccgagctcttcccttacgcaagtctcagccggtcgtcgcgacgttcgcccgctcgctctgaggctcctgaagccgaaaccagctagactttcctccttcccgcctgcctgtagcggcgttgttgccactccgccaccatgttcgaggcgcgcctggtccagggctccatcctcaagaaggtgttggaggcactcaaggacctcatcaacgaggcctgctgggatattagctccagcggtgtaaacctgcagagcatggactcgtcccacgtctctttggtgcagctcaccctgcggtctgagggcttcgacacctaccgctgcgaccgcaacctggccatgggcgtgaacctcaccagtatgtccaaaatactaaaatgcgccggcaatgaagatatcattacactaagggccgaagataacgcggataccttggcgctag

SEQ ID NO: 30749 - DNA, 474 bp, Homo sapiens
  misc_feature (1)...(474): n = A,T,C or G
aactgagacctttgagaacngtcgnggaattcgagaaggtcctggtgtctgtaagtgagcacacgtggacagaacagcccgaggctgagagctcccaggccgacagggaccggaggcagcaaggccaagaagagcaggtgcaggaggccaagaacaccttcacccaagtggtgcaggggaatgagtttcagaatattccaggggagcaggtgacagaggagcaattcacggatgagcagggcaacattgtcaccaagaagatcattcgcaaggtggttcgacagatagacttgtccagcgccgatgccgcccaggagcacgaggaggtggagctgagagggagtggcctacagccggacctgatagagggcaggaagggggcgcaaatagtgaagcgggccagcctgaaaagggggaaacagtgaccccgagccgctctccttggagtagcctctcgggaggatcacacctcgg

SEQ ID NO: 30750 - DNA, 453 bp, Homo sapiens
  misc_feature (1)...(453): n = A,T,C or G
nactgagacctgaggacgttgcgnggaattcctctttttatccaggcctgtggtggggatggagtcctgctctgttgcccaggctggagtgcaatggcacgatcttgactcactgcaacctccgcctcctggattcaagtgattttcctgcctcagcctcccaagtagctgggattacagagcagaaagaccatgggtttgaggtggcctccacttcccctgaagacgagtcccctggcagtaaccccgagccagatgccaccccgttccaggaaggtttgaggaccttcgaccagctggacgccatatctagtttgcccacacccagtgacatctttgtgtcctactctactttcccaggttttgtttcctggagggaccccaagagtggctcctggtacgttgagaccctggacgacatctttgagcagtgggctcactctgaagacctgn

SEQ ID NO: 30751 - DNA, 489 bp, Homo sapiens
  misc_feature (1)...(489): n = A,T,C or G
agacgctnnnnnnacctgagacctacggcatcgcaannncnnagnaaaagggtccattttcagctggaggaaatttcccgggctcagcttgtgcccctcccaccttctacctatgtggagtttacagtgtctggcactgactgtgttgctaaagaggccacagaggcagccaagtgtaacctgctggcagaaaagcaatatggcttttgtaaggcaacactcaatgagaagcttggtggggcagaggttgcagtgacctgcacggtgttccaaacacagcccgtgacctcacagccccaaccagaaggtgccaatgaagcagtccccacccccgtggtggacccagatgcacctccgtcccctccacttggcgcacctggactccctccagctggctcacccccagactcccatgtgttactggcagctcctccaggacaccagttgcaccgggcgcactacgacctgcgccacaccttcatgggtgtg

SEQ ID NO: 30752 - DNA, 473 bp, Homo sapiens
  misc_feature (1)...(473): n = A,T,C or G
nattgagacctttgagaaccgtcggggaanncgangcatggtgcatgactgtgctcacacacacacttggctgcctgggtccctctccccaaggccctgaggtgggcaggaggggctcagattcaccatggtgacactgccctcccacaggactatgagctctggaagtcctcggacaagatctgccgacagctcatctaccacctcacccctcactcgaagcagcagcaagggtccagcctgcgccagaggaagacccagagctgcctcaagagcagcctccagaagactctgctggcaggggagactgtggacctctcaggcatcccgctgtcgacacaggacgtgcaacacatcacacgctacctgagcagccatggtgctgtgctggcggtgctggacctgagcttcacggggctgagtgatgagctgctgcacctcctgctgcccagcctgtgggcgctgccccgcct

SEQ ID NO: 30753 - DNA, 472 bp, Homo sapiens
  misc_feature (1)...(472): n = A,T,C or G
natggagaccttgagaacagtcgnggaagncctgaccttggccgtgctcttcctgacggggagccaggctcggcatttctggcagcaagatgaacccccccagagcccctgggatcgagtgaaggacctggccactgtgtacgtggatgtgctcaaagacagcggcagagactatgtgtcccagtttgaaggctccgccttgggaaaacagctaaacctaaagctccttgacaactgggacagcgtgacctccaccttcagcaagctgcgcgaacagctcggccctgtgacccaggagttctgggataacctggaaaaggagacagagggcctgaggcaggagatgagcaaggatctggaggaggtgaaggccaaggtgcagccctacctggacgacttccagaagaagtggcaggaggagatggagctctaccgccagaaggtggagccgctgcgcgcagagctccaagag

SEQ ID NO: 30754 - DNA, 488 bp, Homo sapiens
  misc_feature (1)...(488): n = A,T,C or G
gaggccnnnnnnaactgaaactacggcctggcaannncgactggaggggagaggagcctcccaggtacccgcgggatgtccgagactacttcatgccctgccctggcagaggccatggacacaggaatgggactggccatgggaacagtacccaccatggccctgagtatatgcgctgtagcccacatctagtcttgtctgcactgacgtctgacaaccatggtgccacctatgccttcagtgggacccactactggcgtatggacaccagccgggatggctggcatagctggcccattgctcatcagtggccccagggtccttcagcagtggatgctgccttttcctgggaagaaaaactctatctggtccagggcacccaggtatatgtcttcctgacaaagggaggctataccctagtaagcggttatccgaagcggctggagaaggaagacgggacccctcatgggattatgctggactctgtg

SEQ ID NO: 30755 - DNA, 475 bp, Homo sapiens
  misc_feature (1)...(475): n = A,T,C or G
nactgagaccctcgagaacngtcgnggaantcgcggnggtgggagaggtatcggcaggggcagcgctgccgccggggcctggggctgacccgtctgacttcccgtccgtgccgagcccactcgagccgcagccatgtctggggacgagatgatttttgatcctactatgagcaagaagaaaaagaagaagaagaagccttttatgttagatgaggaaggggatacccaaacagaggaaacccagccttcagaaacaaaagaagtggagccagagccaactgaggacaaggatttggaagctgatgaagaggacactaggaaaaaagatgcttctgatgatctagatgacttgaacttctttaatcaaaagaaaaagaagaaaaaaactaaaaagatatttgatattgatgaagctgaagaaggtgtaaaggatcttaagattgaaagtgatgttcaagaaccaactgaaccagag

SEQ ID NO: 30756 - DNA, 474 bp, Homo sapiens
  misc_feature (1)...(474): n = A,T,C or G
nacggagaccttgagaatctcgggaagagcgcggagntccctcaggcgcccgcgcctggcctaccgcggcactcccggctgcacgctctgcttggcctcgccatgccggnggacctcagcaagtggtccgggcccttgagcctgcaagaagtggacgagcagccgcagcacccgctgcatgtcacctacgccggggcggcggtggacgagctgggcaaagtgctgacgcccacccaggttaagaatagacccaccagcatttcgtgggatggtcttgattcagggaagctctacaccttggtcctgacagacccggatgctcccagcaggaaggatcccaaatacagagaatggcatcatttcctggtggtcaacatgaagggcaatgacatcagcagtggcacagtcctctccgattatgtgggctcggggcctcccaagggcacaggcctccaccgctatgtctggctggag

SEQ ID NO: 30757 - DNA, 461 bp, Homo sapiens
  misc_feature (1)...(461): n = A,T,C or G
ntcgagaccatggaagngttgtagacattagagagtgcgagagaacccaccatggggctgtctcctgccgacgagaccaacgtcaaggccgcctggggtaaggtcggcgcgcacgctggcgagtatggtgcggaggccctggagaggatgttcctgtccttccccaccaccaagacctacttcccgcacttcgacctgagccacggctctgcccagggtaagggccacggcaagaaggtggccgacgcgctgaccaacgccgtggcgcacgtggacgacatgcccaacgcgctgtccgccctgagcgacctgcacgcgcacaagcttcgggtggacccggtcaacttcaagctcctaagccactgcctgctggtgaccctggccgcccacctccccgccgagttcacccctgcggtgcacgcctccctggacaagttcctggcttctgtgagcaccgtgct

SEQ ID NO: 30758 - DNA, 495 bp, Homo sapiens
  misc_feature (1)...(495): n = A,T,C or G
tgatggccnaggggncccnaatcgagaccacatcgatgacactagaaagncgcgnggaattcttttggaatgggggcaggggtgtttttcatgaccatttatttgagtggttttgattggttatgcatactctttaaatttgaatccaaattttttgcaaaattacttcccaatcagatcttgacccttagcctgggacaccacaaactgaggtgaattctctgctttgctcgtcacaaatgccaaactgactgccctttcacggtgtccatcttgctgtcttttgcttctgtttgatttggtctgcatatcttttaatgtgtctgtttttgttttgtttgttttatttttatttttcagttaacgcacgcacagacttacatgtcaagagtggactttagactttcatgtgttaagttgcttgagttacaccttgtgacccttctcccataacatggtgtgaggacggactgngagccggtacagactccagtg

SEQ ID NO: 30759 - DNA, 505 bp, Homo sapiens
  misc_feature (1)...(505): n = A,T,C or G
aagggcccccnnnatagacatcgaccacgtgcgaagtcccagactcagagagaacccaccatggtgctgtctcctgccgacaagaccaacgtcaaggccgcctggggtaaggtcggcgcgcacgctggcgagtatggtgcggaggccctggagaggatgttcctgtccttccccaccaccaagacctacttcccgcacttcgacctgagccacggctctgcccaggttaagggccacggcaagaaggtggccgacgcgctgaccaacgccgtggcgcacgtggacgacatgcccaacgcgctgtccgccctgagcgacctgcacgcgcacaagcttcgggtggacccggtcaacttcaagctcctaagccactgcctgctggtgaccctggccgcccacctccccgccgagttcacccctgcggagcacgcctccctggacaagttcctggcttctgtgagcaccgtgctgacctccaaatacccgttaagctggagcctcggtg

SEQ ID NO: 30760 - DNA, 471 bp, Homo sapiens
  misc_feature (1)...(471): n = A,T,C or G
cgccctcagagaccctggaagttgaagacatcagacgagccgggnagccaaatgccagatgctggtcacctgcttctttatcttgctgctgggcctctctgcggccaccatggtgactcttacctacttcggggcccactttgctgtcatccgccgagcgtccctggagaagaacccgtaccaggctgtgcaccaatgggccttctctgcggggttgagcctggtgggcctcctgactctgggagccgtgctgagcgctgcagccaccgtgagggaggcccagggcctcatggcagggggcttcctgtgcttctccctggcgttctgcgcacaggtgcaggtggtgttctggagactccacagccccacccaggtggaggacgccatgctggacacctacgacctggtatatgagcaggcgatgaaaggtacgtcccacgtccggcggcaggagctggcggccatccagga

SEQ ID NO: 30761 - DNA, 523 bp, Homo sapiens
  misc_feature (1)...(523): n = A,T,C or G
ggagagcnnncccnnccttcgatcccatccgtgtggtggaattcggatttatctacctttgttctttgttgttggtgaccttcggatggaatttttgcatggtcgtcatttttgttgatgttgatgctattgctttctgttagttgtctttctaacaagcccctcttctgcaggtctgctggagtttgctgggggtctactccagatcctgtttgcctgggtatcaccagcggaggctgcagaacagcaaagattgctgcctgctccttcctctggaagctttgtcccagaggggcacctgcaaagtgccagccagagctctcctgtatgagctgtctgtcaacccctgctgggaggtgtctgcctgtcaggaggcacggtggtcaaagaaccacttgaggaggcagtctgtctcttagcagagctagagcatggngctgggtgatccgctgctctcttcagagccggcaggcaggaacgtttatgtgtgtgcaagctgcgcccacagccacccctttcccca

SEQ ID NO: 30762 - DNA, 478 bp, Homo sapiens
  misc_feature (1)...(478): n = A,T,C or G
nggggaactggagaccctaggccaggactgaggaccatccgcagctgcctgggaaaagagaacacttttcatgccatgtgctgtgaccgagtcacgcattgaggacatacgacttgctgtttttagtcataccacaggcctcgcggacgaaggggcgcctgaagatgtgtagagggtgcacagggcctggcagggttctgtcctgccctgccacgacgctgctgaaccagctcaagaaaaccttccagcacagagtcagagggaagtacccaggacagctggaaatagcgtgccgcaggctcctggagcaggtggtcagctgtggtgggctgctccccggagctgggctcccataagaacagatcattacctggttccagtttcacagctacctgcagaggcagagcgtctctgacctggagaagcacttcacccagctcaccaaggaagtgacactcatcgaggagcttcactgtgc

SEQ ID NO: 30763 - DNA, 471 bp, Homo sapiens
  misc_feature (1)...(471): n = A,T,C or G
atttgagaccctagtaagagngcnggaattcctggcgcttagaatccagcacgggttccacggaaacgtggcatcatccataggctctctggagaggccgcccggccaggccctccagccccctgtgactccccacacggcccttcggagacagaagtatgccggttcagggtgtgtgggttgaccacagagtggggcaccgtgtgcctgccaggcccacgtgctctggagactgctgtccacacgcgtgtcgtcaaacgctgtccaggccttgggcccagaacagagcctgggggagccgtcgcagtgccccactcctggtggaacggagcctgggggagccgtcgcagggccccactcctggtggaacggagcctgggggagccgtcgcagggccccattcctggtggaacagagcctgggggagccgtcgctgggccctgctcctggtggaacagagcctgggggagc

SEQ ID NO: 30764 - DNA, 481 bp, Homo sapiens
  misc_feature (1)...(481): n = A,T,C or G
ccccccttgagcccctngnnatttgagaccctagtccagngcggtggaattcgagcctttcccagaagggaggagaagccggaatgattatgggttggactttcgctgaggctagtagcagacgtgtctgcccagtggtctggggggcaggaaggtagaaggaatgctgttgagaagagctttactggggagatctgccaaaccaaagagggtagacttgacggagttcaggactcatgagatagtcttgagccactgggtattgtggcaaaaacagtattctaagaacattagcttggtcctggtgtacaaggtaaattacggcaaggagaaacagataaggataccatctaggagcctgtttatgatccacatgatgtggtggagatttctaactgaggttgggtgggagagaacagagagattctgaagaacaaacagcaggattgctgtaaagggtgaaagagagaagattcattcn

SEQ ID NO: 30765 - DNA, 466 bp, Homo sapiens
  misc_feature (1)...(466): n = A,T,C or G
agccccagcttcgcagaccctannnaagtgggcgctcgtaacaccnccangacctcttccggtaacagtgaccagtgactcccccaagctctggatcctggtattgggagctgtatttggtttctcctcgtatggccccattgccctgtttggagtcatagccaacgagagtgcccctcccaacttgtgtggcacctcccacgccattgtgggactcatggccaatgtgggcggctttctggctgggctgcccttcagcaccattgccaagcactacagttggagcacagccttctgggtggctgaagtgatttgtgcggccagcacggctgccttcttcctcctacgaaacatccgcaccaagatgggccgagtgtccaagaaggctgagtgaagagagtccaggttccggagcaccatcccacggtggccttccccctgcacgctctgcggagagaaaaggagg

SEQ ID NO: 30766 - DNA, 480 bp, Homo sapiens
  misc_feature (1)...(480): n = A,T,C or G
cgcccaattgagaccctggnaattgagacactaggcagngcggnggaattcctcttcttcatcttcgaggacaccacaggccttcccctcttcgtgggcagcgtgaggaaccccaaccccagtgcaccgcgggagctcaaggaacagcaggattccccgggcaacaaggacttcctccagagcctgaaaggcttcccccgcggagacaagcttttcggccctgacttaaaacttgtgccccccatggaggaggattacccccagtttggcagccccaagtgaggggccgtggctgtggcatccagagtccctgcctggaccagcctctccactcatgtgactctttccaacctgctttgtggcactggggcaggggccgggggcagtctgagagaggccattctttcccaacacctcttggggagtttagggtgggggggggcgcggctgggaggagggcaggcatcggggagccgggag

SEQ ID NO: 30767 - DNA, 421 bp, Homo sapiens
cgcgtgtggaagtctgtgaggcgcagaggtggggcaggccgtctggctagctaggcggctgggagcgttttcgtggcggggaacggaggttgaattgccctgcctgggctcatagggaaggaggatgtgaaggagcttgtgaaggcagaggaagattattgaataataaaatacagttttgaaaaaaatggatgaagaacctgaaagaactaagcgatgggaaggaggctatgaaagaacatgggagattcttaaagaagatgaatctggatcacttaaagctacaatagaagacattctattcaaggcaaagagaaaaagagtatttgagcaccatggacaagttcgacttggaatgatgcgccacctttatgtggtagtagatggatcaagaacaatggaagaccaagatttaaagcct

SEQ ID NO: 30768 - DNA, 503 bp, Homo sapiens
  misc_feature (1)...(503): n = A,T,C or G
tgggcctngccnccaatagataactgagtgcagtgngcgaggaaccactggattttacagggaagtgcacagatgggcctagcaaaaaattcacaaacctaatttatccaaagaatttttgccagtgtgttgtacttgagaaaaattataaactatacttttacctccgagatagggattgttccttctgccaaaatgcctttgaataactgcaatatgattcttagggaactttctggaattgctgtaaaaaatcagtacacgcatcttatccctgcatcttgcttttttctcccggattgcccctcagttcatttagtgtacacagcactacaaaaaacaggtttccctgcctcttaccgctccattctttcctccctgcacaaaggagaaagcggactgtagtttaaaaagcaagtagcagtgctacagcaggttgtctgcagcaggagagatggccttaaaggttgtgaacgtctccttatggagtatcgagaagctgc

SEQ ID NO: 30769 - DNA, 479 bp, Homo sapiens
  misc_feature (1)...(479): n = A,T,C or G
gtggggggnnnngccaactgagaccatcatcgagnccgtaagacancccgcactgccgcgttctacacgtggactacgcactcaaggtctgtgtggatatcccaggaacgtccaagctgctgctggagctgccactggtgatcggcaccattcccttgcacccttttggcagccgttcctccagcgtgggcagccacgccagcttcctgctggactggaggctgggggccttgccggagcggcctgaggctcctcctgagtactcggaggtggtagccgacactgaggaggcagccttggggcagagccccttcccgcttccgcaggaccccgacatgagccttgaaggcccgttcttcgcctacatccaagagttccgctaccgcccgccacccctgtactctgaggaggatccaaacccacccttgggggacatgaggccgcgctgcatgacttgctgaacggcacagggacccctt

SEQ ID NO: 30770 - DNA, 263 bp, Homo sapiens
  misc_feature (1)...(263): n = A,T,C or G
gagccgntttgaacctatgtgacgatcagcannnncnnccannnatngaacgcanggcccctgaaaggctctcctctgctttcctgccccctcactgtctctttctcgcagtccttaaccaccggttctcttctgagggtctctcatttttccttcttcatcctctgctgggcaggcgtctccagacccattaagtatattaatgagttcctggcaccagccctgtgcactcaggtaactgattgaacagcctttagtctgcg

SEQ ID NO: 30771 - DNA, 468 bp, Homo sapiens
  misc_feature (1)...(468): n = A,T,C or G
gcccnntnnnnnnnaaaataagagntctactcagagncgncgaanncggcccttctgttgctagaccgagcctgtgggatataccaaggcagaggagcccatagccatgaggagcctcggggccctgctcttgctgctgagcgcctgcctggcggtgagcgctggccctgtgccaacgccgcccgacaacatccaagtgcaggaaaacttcaatatctctcggatctatgggaagtggtacaacctggccatcggttccacctgcccctggctgaagaagatcatggacaggatgacagtgagcacgctggtgctgggagagggcgctacagaggcggagatcagcatgaccagcactcgttggcggaaaggtgtctgtgaggagacgtctggagcttatgagaaaacagatactgatgggaagtttctctatcacaaatccaaatggaacataaccatggagtcctn

SEQ ID NO: 30772 - DNA, 517 bp, Homo sapiens
  misc_feature (1)...(517): n = A,T,C or G
aggagaannnnnnnnnnannttagaacatcgtccaagtggagttagaacacgctgagctgtggtccaccgtccaaggtgctgcagaaagcagctaggctcttttaggatgtttctattctggttgctgccttcgtggtgtaacttttaagaacacttacgggaatgtgctcatagaaccatcacctgtcctgagaataaaactcctggaatcatgatcaagtccagtgttaacgtggcccaacctgtctgtacttctggggagagaccaggaacatcactggactcctcatccccgtaattatttagagaagatgcaagcagcagatagtctccatgcggctggtactttttttgttgttttttgagacagggtcttgctctgtcacctgggctggagtgcagagcggcgatcatggctccctgaggcctcaacctactaggctcaagctgtctgcccgccttatcctcccaagtagctgggaccacaggcacccaccaccaccatgcttggctaac

SEQ ID NO: 30773 - DNA, 496 bp, Homo sapiens
  misc_feature (1)...(496): n = A,T,C or G
ggggagggatgccggctnnnnnncaccgactgacanncntaggancnngncgnggaattctcagntaaaaacttccaacaatgagggagtgagttaccaactttcaggaagccttgtttgggtcccagcccttttccctttgggtataatttgttggtatgacactgaactaacacattgcatctcgagctgctccctgctgagctctggagcccactaagggatgaaagcagctcctccttaggccttttgttgtggctttttctctttttggccaacaggagacaggaatttgggaattatgcagatggggtctctcagaatctagccctgtgaagaataggtgaaaagtctgtctgggcatggtgtcctggatagtcgtctggacatggtatcctgggtgtggagacttagtttctttctctgcagtaagaattcaccttcttttgttaatgtagataccagggaggggattcatgacaattgaatttctttg

SEQ ID NO: 30774 - DNA, 461 bp, Homo sapiens
  misc_feature (1)...(461): n = A,T,C or G
gcggtgctnaaactgactgcatacacttngcgtggaattcggtagatgggtgggaccctcagaccatcagggagctctggaaaagcacaggctcttctgatggtggggtgcgctgccatggctcgaatggcagtggggaggccttggaggcttccggatccttccgaggtggtggcctggggctggccgggggaaggggagatcccgggtttgaggggcagttacggaagatgaagcccatgccggggaagaggggcttcatcaggttgacggggcagaaggctgagccagtcgggttgaaatggactttgttcttgtcaggacaggaagtcaggaaggccaggtcaggacctggagacgtggcttcttcaaacacacgcactttctcacagccttctgggggctcccgtttgaagatgtagctatgattaggtcgaggggaggcagcaaaggcaaggact

SEQ ID NO: 30775 - DNA, 262 bp, Homo sapiens
  misc_feature (1)...(262): n = A,T,C or G
gagcggtncccctacttatnccntaggagtggcctcgcacnaccccngggnnggncccgaagcctccaaccacctgcacgcctgccaaggcctctctgttgcagacattatgtccctcgtcctgctcctttgtcttgctcagctctggggctgccactcagccccacatggcccacggctgatttatagacaaccgaactgcgatgatccagaaactgaggaagcagctctggtggctatagactacatcaatcaaaacctt

SEQ ID NO: 30776 - DNA, 227 bp, Homo sapiens
  misc_feature (1)...(227): n = A,T,C or G
gtggcatgcttcttgccccttgggcctccccccagcccctcctccccttcctgcacccgtacccccgtggtctttgaataaagtctgagtgggcggcnnanaaaaccaaaaaaaaaaaaaaaacagaaaaaaaaaaaaaaataacaaaaaataatgacaaagccaaaaagtggagaaaaagnnaactttnggggccggcttctgtgaagaaagcgcgaagcctcacc

SEQ ID NO: 30777 - DNA, 496 bp, Homo sapiens
  misc_feature (1)...(496): n = A,T,C or G
agagcggccnncnnccaataggatagatagcatatccaggggnggaattcgccctgcttggcctacgatgaccgcaagaaaagcatcaaagaagtggccaacgtgtgcaaccagagcctgatgaagctggtcacccccgaggacgacgagctggatgagctgagacctgggcagaggcaggcagagcccacccctgacgatgccctgccaaagcaggagggcacagccagtggtgagtggactccgtccctacacctcacctcctgtcgggggcccagggagccagatgtcataggagttgccttggggcctcacttaagcaaccaggactactttatgtatgtcactcacacaattgtagcagcaacccagcgcagtggcagcagtggttctcccccattctgcagacaggacacagggaagctgagtaccatggccacacactcgcagctagtgaagactggaaccggattggaacccaggcaggctgtctcca

SEQ ID NO: 30778 - DNA, 465 bp, Homo sapiens
  misc_feature (1)...(465): n = A,T,C or G
aggacgggccnnnnaaatgaagnccaggcngacagcagngncnggaannnaagatatactgaataatcttggaaagaaaaggctgagaacgtataactgaagacagaggaggaaagcagggtgacccctgatgttgccctacaaaatggaaaacaaaacacaccataacagaaaaacagaagatctgactctgcctttagccaggaaaacagcttgggggagtaaaaagtattatggaaaagagtgggcattttgcctggaaaaaaggtttctagagccatctgggctttccgggaacctggaccagactctggcccagtaggatgtccccgtgtcctccccagcagagcaggaacagggtgatacagctgttcacttcacagctaggagagatggaactgacttggcaggagatcatgtgcatcaccgagctgtagggtctgaatgctccaagtgagccatcan

SEQ ID NO: 30779 - DNA, 488 bp, Homo sapiens
  misc_feature (1)...(488): n = A,T,C or G
agatntcnnnaggggnnnnnnnatcgagaccactattccatgtcgtggaatttggtggggatggtggtggtgctccttcttggggggtgaggaggcgctgctgctgcgccccttggggctgctctccttgcttttccgcccagggctcttacaggtcttcagtcctttcccgctcttctcaccgagggtggacaccagcaggggcttcaccacttccttgacctcgatgctgaccgtctcccgggtcttgcgcttcttgatggggagtacggtctcctgcacagatcggatagaagactccttcacggctttctttttggcctcggcggcagcggctgccaccacactccccggctttcggccccgtttcttgggaatggcctgagggtcggcctcagcttttcgcttcctgccggggcgtttgatcaccatgacctgggtggatgtggtggccccacccccctcagccttgccccctggcgaagttt

SEQ ID NO: 30780 - DNA, 470 bp, Homo sapiens
  misc_feature (1)...(470): n = A,T,C or G
ngaagacgggtgnnccnnnactgaganactaggactctgcgggaancccaggngctggtgatcggcgagcttggcgtgggcaagaccagcatcatcaagcgctacgtccaccagctcttctcccagcactaccgggccaccatcggggtggacttcgccctcaaggtcctcaactgggacagcaggactctggtgcgcctgcagctgtgggacatcgcggggcaggagcgatttggcaacatgacccgagtatactacaaggaagctgttggtgcttttgtagtctttgatatatcaagaagttccacatttgaggcagtcttaaaatggaaaagtgatctggatagtaaagttcatcttccaaatggcagccctatccctgctgtcctcttggctaacaaatgtgaccagaacaaggacagtagccagagtccttcccaggtggaccaattctgcaaagaacatggctn

SEQ ID NO: 30781 - DNA, 475 bp, Homo sapiens
  misc_feature (1)...(475): n = A,T,C or G
aggaggcgggnnnccccnnnactgaganactgaggaacngtcgnggaanccgagcacatcagtgatgaatgcaagaggcgtttctataagaattggcataaatctaagaagaaggcctttaccaagtactgcaagaaatggcaggatgaggatggcaagaagcagctggagaaggacttcagcagcatgaagaagtactgccaagtcatccgtgtcattgcccacacccagatgcgcctgcttcctctgcgccagaagaaggcccacctgatggagatccaggtgaacggaggcactgtggccgagaagctggactgggcccgcgagaggcttgagcagcaggtacctgtgaaccaagtgtttgggcaggatgagatgatcgacgtcatcggggtgaccaagggcaaaggctacaaaggggtcaccagtcgttggcacaccaagaagctgccccgcaagacccaccgaggcctgg

SEQ ID NO: 30782 - DNA, 475 bp, Homo sapiens
  misc_feature (1)...(475): n = A,T,C or G
aggaggacccgnnnccccnnnactgaganactgaggaccntncgnggaanccgccggaagtcccacctgccagaaggcgtagaacaacatggttctgcctggcactgcgtgctgaagaaatacccctggatcattatcatccccctcagatggctcgctgcaagatctaccatcaaagggagtggtgagagaggaatcgattccagctttctctgtgggggaggtgacagctctcgccccaggcttctgagggcttcaccagggggcactgccagcttccagaacacacccttatcctcccagggattggatctgcctgccgaatgggggccaggcataagtgtggtgcagagatgccaaggcagcctacgagagtcctgaaggcctccgatacctgatcctgcaggctggcagacgggcgggtgacacccacagactcttttgttatggctcctaanacagggaaggcaagagg

SEQ ID NO: 30783 - DNA, 260 bp, Homo sapiens
  misc_feature (1)...(260): n = A,T,C or G
gagcggttcccctaggtatcactngggatgccctcgaacnngcnnanacnccgcttaaggcatgctgggaattgtagtttttcgcagcctaacgtgttcagggacgttcttgactgaacctgataatagtttcgcgcaacactttggacagtgaggacccagggacaaaataggtcttttttgaggccgtgaggggctcccaggctgggagctggctggttcttaagtagtgagctccccatcagcagaaggatttaagg

SEQ ID NO: 30784 - DNA, 269 bp, Homo sapiens
  misc_feature (1)...(269): n = A,T,C or G
acgctcccccgtatgatnccctctcaagtaggatcagcanngnccnggnnnnnngagnngaccggncaagggccaggtggacaccgtacatctgcagacgttttctggagaatttcacacgggtgcaggaggagccggagctggtgtgcactctgggtgactgtgacgtcatccaagccctggatctcagagtcccactcatggacgtgggggagacggccatggtcactgctgactccaagtactgctacggcccccaaggcagcagg

SEQ ID NO: 30785 - DNA, 499 bp, Homo sapiens
  misc_feature (1)...(499): n = A,T,C or G
ggaggggcnnnccccccaatagatatccatatgcagtgtgcnggaattcgtcttcttctgttatgtaatcccaggggagggcagggggatctcatagactcccgaaccgtgtttacagcacagaggacacgtgtctatttatacaagctctgtgcgtcttagactgattatacaagcaggactattttcattcttctgccagcatcttcctgtaagagcagagggcttgggcgtcatactggggagtgggggttcaattgtctgtaagacagaactgcagacctccccaaacgtaaatctttcacatagatgaatttttaatggaaatcaatttctctcctccaaataagcttttgatttcttagaagataaagactgcttactgttgattcctaacattgtatttcctttcttttccccttctctccggtctgtccaacctgtcggcagctgtccgtacctggcggtgaaaatcacccctgccatccctgcagtcgct

SEQ ID NO: 30786 - DNA, 220 bp, Homo sapiens
cgcactccaaaactgtcacactgccgatggtgcgtggcacagccagcttcctccctgtccctccatagggcctgtgcagtcttaccagcctggggaacggcattctcagcagcctgcacaatggactgtattaatcacgtagaacgagagggaaaaagaaagctaaatttctattagcataagaaatagaatcttagagcattccatctccaattctctg

SEQ ID NO: 30787 - DNA, 478 bp, Homo sapiens
  misc_feature (1)...(478): n = A,T,C or G
ggggagcggggcccnnnnaactgagaccttgagnatcnntcggaagngcggnggaantcgggaagactggaccccagggtgggcggagcaaaggtagcatcagccgacaccattctcagcctatcccctgtgctgttgaagcaccctggagggcttcctgagggatggatacaccatttgcctgcattcctttactcagtgagtattcacgctgggctcaggccagcccagcctgcagggtcttcttgtccagctggtatccaatctccaatccctgtggcaaggtggtggggggatggaagggctgaatcccaaaatgcaggagagagcctccaaagggacctggaggcagcagaggatcctggaagctctaggtttgtccccatgggtgtccanggcagtgggagaggtcatggaggaccctgtctcagctgggccacctggggactctntcagctacagaactgtggtgagaccc

SEQ ID NO: 30788 - DNA, 476 bp, Homo sapiens
  misc_feature (1)...(476): n = A,T,C or G
aggggaacggagccggnnccctgagancctgggatcatacgacanngcgnggaatttccagaacgctgtgtcgctaacaaccagtgaagacccaagggctagggtgcagttctggtagccgggcaggaaaccagggccagatttgctcaccctaaaaacgaagtgtgagggcttccagtggctggctctgcttggagcccagagacattttcatccaatctgtattttagcgcctcgtatcagccaggctaaaggctgaaaagagatttgctactgaacctctcttaagtctccctgcatcgcctcgtacataatacaagtgaggtgtactggggactgcggtaactttcttgcctctgtcaccccgtctttgctgacacccagttccatcagttctttgctttcagatggtaatgttgattcctaattccctgtgaacctgcagagataatcgccttaagtcttacttctgtagn

SEQ ID NO: 30789 - DNA, 474 bp, Homo sapiens
  misc_feature (1)...(474): n = A,T,C or G
gggagcgggcccnnnnactgagnaactgntatcctcggccgngcgnggaattcttctttacttcctccacggagtcggcacactatggctgccctctgggctcccagaacccacaacatgaaagaaatggtgctaccgagctcaagcctgggcctttgaatccggacacaaaaccctctagcttggaaatgaatatgctgcactttacaaccactgcactacctgactcaggaatcggctctcgaaggtgaagcgagaggaaccagacctcatcagcccaacatcaaagacaccatcggaacagcagcgcccgcagcacccaccccgcaccggcgactccatcttcacggccaccccctgcggcggacggttgaccaccagccaccacatcatcccagagctgagctcctccagcgggatgacgccgtccccaccacctccctcttcttctttttcatccttctgtctctttgg

SEQ ID NO: 30790 - DNA, 520 bp, Homo sapiens
  misc_feature (1)...(520): n = A,T,C or G
aggcccncnnnnnnaattgaaaatcgattcagctattccgcagtggagcaattcggctgctgctcatgctgcaggcatgcatgatgccattatggctttccctgaaggtgagagattcctttgcagagagtcccctcccctcctggtgttgtcctgctaatccctgacccctgttccctccgtttcgtaagaaacgtgtggtgggtaatatccacagggtacaggacacaggtgggcgagcggggactgaagctgagcggcggggagaagcagcgcgtcgccattgcccgcaccatcctcaaggctccgggcatcattctgctggatgaggtgcgccctgggtctcctcccctccttcctgccttgtgtatgctcaagccgttcctcctgggcactgtccccacctagaacagataccatgaattcaaatctcacaaaacacactttccagttctcaagcccaaacaaggctcttgtgtattcttgaggcctcagccagcagcctgcctccttccattga

SEQ ID NO: 30791 - DNA, 453 bp, Homo sapiens
  misc_feature (1)...(453): n = A,T,C or G
nacttgagaccctgagacccgtcgaganccnnaanctactncgggaccccacgtcactcacaaggacctgcggtgttgctctgcatccttcaacacgattgcattcatcgcctcactcgcctgcaccacaggctcactgaccgtcatcatccgccgtgacccccgacctcacccctgccgatccctgtaacacttcttctctacgcctttccaccaccctgatcttgcggcaagatccccaagacgatcttacccttcagggattcccacactatcctccactgatgtccccatcaccccagctgaccccaacaacactgcaccattccctccaactcccaatatttgtgcacgaatccctgtcacccctccaccccagaaccaccttcacttnctcccgggatctggcccactgaccccaacaccgtatccccatttttgccgctcagattt

SEQ ID NO: 30792 - DNA, 515 bp, Homo sapiens
  misc_feature (1)...(515): n = A,T,C or G
aaggccccncnnncattagacaatcgattcagctgtgcggaattcatctgcacacttcactatattgtaagttgttgctaatataaaagaataagaaaacagaaaagtattactgttaaacaataatagagaaatgtatactttatttataaatttctccctctagctgatcatacagttgaccagttcagggtgcccgctgctggttggatgccaggcggaatgtcagggtgttctctggtgtctgttgtggctgtgggatccacagttactgggcggagccctgtggtggctgtggtgccatggaggggctgcgatcttctgtggagctggaccctgagctgactccagggaagctggatgaggagatgggctgccaccccatgacgcgagtcctcaagtcactttccacagcctcgatgggaagacagaggtgtgtccacacttcatgggcttactgctgggtctcttacttttattgactctgtctgttaagaaccaactctgtgtaagag

SEQ ID NO: 30793 - DNA, 476 bp, Homo sapiens
  misc_feature (1)...(476): n = A,T,C or G
nggcccccnattgcagaccctagtcatagaggtgcaattccagttacaggcgggtgcctcacaccaatccaccagcatatgaattctcttggggtccccgaagcaacctggaaatcagcaagatggaagtcctggggttcgtggccaaactgcataagaaggaaccgcagcactggccagtgcagtaccgtgaggccctagcagacgaggccgacagggccagagccaaggccagagctgaagccagtatgagggccagggccagtgctagggccggcatccacctctggtgagggttggtgaaaagttggccagtgggtccccgtgaggacgaactactgtcctgagtcataagtaatatgggtggggcgagggtcttatttctgtagaaatcgtgtgactttaaggatttagattttgtatcttatgttttgtaacatttaataattactgttaaaatgctgtttgtaaatgag

SEQ ID NO: 30794 - DNA, 457 bp, Homo sapiens
  misc_feature (1)...(457): n = A,T,C or G
natgagnaactcgagatctcggaagngcggnggaattcggccggtctgcaggactccacccggatccgcatcactgacaacatgttctgtgctggttacaagcctgatgaagggaaacgaggggatgcctgtgaaggtgacagtgggggaccctttgtcatgaagagcccctttaacaaccgctggtatcaaatgggcatcgtctcatggggtgaaggctgtgaccgggatgggaaatatggcttctacacacatgtgttccgcctgaagaagtggatacagaaggtcattgatcagtttggagagtagggggccactcatattctgggctcctggaaccaatcccgtgaaagaattatttttgtgtttctaaaactatggttcccaataaaagtgactctcagcgagcctcaatgctcccagtgctattcatgggcagctctctgggctcaagaag

SEQ ID NO: 30795 - DNA, 515 bp, Homo sapiens
  misc_feature (1)...(515): n = A,T,C or G
aagccnnnnnnnnattgaaaatagaatccctgtccagagaggngcaattcccgcccggctccccatggcagagggtgacgctgctgctggggctgctgctccctcctgccgcccccttctggctcctcaatgtgctcttccccccgcacaccacgcccaaggctgagctcagtaaccacacacggcccgtcatcctcgtgcccggctgcctggggaatcagctagaagccaagctggacaaaccagatgtggtgaactggatgtgctaccgcaagacagaggacttcttcaccatctggctggatctcaacatgttcctaccccttggggtagactgctggatcgataacaccagggttgtctacaaccggagctctgggctcgtgtccaacgcccctggtgtccagatccgcgtccctggctttggcaagacctactctgtggagtacctggacagcagcaagctggcagggtacctgcacacactggtgcagaacctggtcaacaatggctac

SEQ ID NO: 30796 - DNA, 514 bp, Homo sapiens
  misc_feature (1)...(514): n = A,T,C or G
aggcncccnnnnaatagacatcgagcaccgtccgagtggngcaattccatatgaaaaacataggacctattgggcaagtgtcacagttgagtcaaaagaaatacagcttctaggtcgggcgcggtggctcacgcctgtaatcccagcactttgggaggctgaggcgggcagatcacaaggtcaggaaatcgagaccatcctggctaacacagtgaaaccctgtctctactaaaaagatacaaaaaatgagctgggcctggtggcgggcgcctgtagtcccagctactcgggaggctgaggcaggagaatggcgtgaacccaggaggcggagcttgcaagggagccgagatcacgccactgcactccagcctgggtgacagagtgagactctgtctcaaaaaaaaaaaaaaaaagggagggaatcccggtttttaaaggtgggggggaaatccttcctttctttggaacctaataaaaaccttccttgggcccaacttttagtgagagggacata

SEQ ID NO: 30797 - DNA, 511 bp, Homo sapiens
  misc_feature (1)...(511): n = A,T,C or G
gagcccnccnnncattggacctctgtcnagcgtggaggaattccagatgaggaagtggcaggcaggcaggctggccccggagacttctctctggccctgctccctccgagcgctccgccgttgcccgcctggcccctacggagtccttagccaggatggaggctgttgtgaacttgtaccaagaggtgatgaagcacgcagatccccggatccagggctaccctctgatggggtcccccttgctaatgacctccattctcctgacctacgtgtacttcgttctctcacttgggcctcgcatcatggctaatcggaagcccttccagctccgtggcttcatgattgtctacaacttctcactggtggcactctccctctacattgtctatgagttcctgatgtcgggctggctgagcacctatacctggcgctgtgaccctgtggactattccaacagccctgaggcacttaagatggttcgggtggcctggctcttcctcttctccaagtt

SEQ ID NO: 30798 - DNA, 475 bp, Homo sapiens
  misc_feature (1)...(475): n = A,T,C or G
aggaggagccgcgcccgcnnaactgagaaattganatccgtggaagngcggggaantctttgttctcctgcgacatggattcttactgacatgattatagataaagctcggtacacattttcactgcatttctcttctgcccattgtgattgatcattcctgatttctgaaagtaactgggttgtgggggagggtggcgtgcgctgtgcaccccaggggtggggtctgagtccttgctgccgctccccccactgaggagtgctgctgtctgctcttgttttgaacagcgccatcatgaccgggtcctataacaacttcttcaggatgtttgatagagacacgcggagggatgtgaccctggaggcctcgagagagagcagcaaaccgcgcgccagcctcaaaccccggaaggtgtgtacggngggtaagcggaggaaagacgagatcagtgtggacagtctggacttcaacaaga

SEQ ID NO: 30799 - DNA, 484 bp, Homo sapiens
  misc_feature (1)...(484): n = A,T,C or G
cgcttctnnaactggacctcatgcatgtgcaggaactctcctgtcctgccagctcttaagacgtgtgagcagagaggtttattgttctttgatctggaccttggtgatgaattccctgcatcgtttgaaggatgtaaaagaatttctaggagctttgtaagcaagcagaacctgtctagagcagcgcctttgggtttacctcttaaacccttgatccatgactgcctttttgctcagctgaaggggtccttagaacaaagctgtggtttgtttcttgctgtttttactctgtcctctgtgcgtgcgtctcctactggtactcgtgggaagggttaggtggaaaagaagcaggccctgttctcacgtttgcttttgtgttcccaaggagccaccttcctcgtcacgtttggaaactcagagaaacctgaaactatgacttgtcgtctttccaataaccagagatacttgtttctggatggagacn

SEQ ID NO: 30800 - DNA, 473 bp, Homo sapiens
  misc_feature (1)...(473): n = A,T,C or G
nggaggcgggntccctnnnncctgagatactgaggtcgcgtcgnggaatccatgtggctgacgctttcctagaaactttgtttctggatgagccaggatgtgtggtgtggtagatagaccctcctagtcagaggactaggagttggtggtccagattttaactttctttttccggtagtggtcttcaccaagttacctctggggccatcagtgtctgtatctgtagcacaaagcggttgagtttggtttaagtagctatggcaaatggggagatatctttggcttagcacgattctctttgaggagaaaagaatgggcttcttggaccagnttagagaatttgatgatttgctgatccagcanatatgtattcaacccatagtatgtgttaggaacagccccaggtgctggagataatattagtgaacaaaataaacctagatctctgctctcccagagcttacagtgcagng

SEQ ID NO: 30801 - DNA, 458 bp, Homo sapiens
cgcattccccctatggaaagcttaatgatagtccctcaaccgcgcgccaggagccgacagagtttccgcacccgggagggagatgcggccggggctcatgctccttgcagttgtaatttagattcgagaagtgggttatcctttgactggaaaagaaaagtagctgcagtattcccccagcacttgctgagagcatgccgaatgccaggctgtgaggctcgagagacaagcagtggaagagttgcgggctgtttcatctctggattgtaaatctgagcctccttctggcccctggaaggggacagcatcaccatggaatgattcctaaccagcataatgctggagccgggagccaccaacctgcagttttcaaaaaggcccggttggacactggattggatcacattcttccatcttctgatcgtcctacattctgggctaagatagaagtgggattg

SEQ ID NO: 30802 - DNA, 456 bp, Homo sapiens
  misc_feature (1)...(456): n = A,T,C or G
nacctgagntccgtagacnctcgngnaancnnanaggaatacataatggtaatacatttgaggaataatcctaacacatcaagttaaagtaagctgtttttgatcccccttttgaaaaggatgccagtttagttgttacataccaagtgccagaggctgagtttttttttttcctggggaaaatattgcattcgttgaaaacaaaaccacactgagttaccatttcatgttcactaggatgactgcggccaaaaagatggaaaattacaagggctgttggggatgggaaacaattggaagcttcatgccctgctggttggaaagtaaaagggtgcagtcactttgggaaagtttggcagttcttcaaatggttaaacgtaaagctactatatggcctagcaattccccttacgggcatatgcccaaaaaaattgaaaaaatatgttcagggctacc

SEQ ID NO: 30803 - DNA, 485 bp, Homo sapiens
  misc_feature (1)...(485): n = A,T,C or G
tgccggctnnaaatgggaacttaggctccgcagnggcgggaanctgggaanncaggcctggccaactaattgctgatgtggcccccagtgccatccgggagaatgacatcaagagctactttggccgtaaggtggccattgatgcctctatgagcatttatcagttcctgattgctgttcgccagggtggggatgtgctgcagaatgaggagggtgagaccaccagccacctgatgggcatgttctaccgcaccattcgcatgatggagaacggcatcaagcccgtgtatgtctttgatggcaagccgccacagctcaagtcaggcgagctggccaaacgcagtgagcggcgggctgaggcagagaagcagctgcagcacgctcaggctgctggggccgagcaggaggtggaaaaattcactaagcggctggtgaaggtcactaagcagcacaatgatgagtgcaaacatctgctgagcctcatg

SEQ ID NO: 30804 - DNA, 457 bp, Homo sapiens
  misc_feature (1)...(457): n = A,T,C or G
nactggagnactgaggacgntgcgnggnaaccgnagactgcaccatcattgtgtgggacatccagaacctgcagaaggtgaacaccatccgggcccatgacaacccggtgtgcacgctggtctgctcacacaacgtgctcttcagcggctccctgaaggccatcaaggtctgggacatcgtgggcactgagctgaagttgaagaaggagctcacaggcctcaaccactgggtgcgggccctggtggctgcccagagctacctgtacagcggctcctaccagacaatcaagatctgggacatccgaacccttgactgcatccacgtcctgcagacgtctggtggcagcgtctactccattgctgtgacaaatcaccacattgtctgtggcacctacgagaacctcatccacgtgtgggacattgagtccaaggagcaggtgcggaccctcacgggcct

SEQ ID NO: 30805 - DNA, 459 bp, Homo sapiens
  misc_feature (1)...(459): n = A,T,C or G
tacggaggtacggctatcntncgnaagngcggnggaantcgatgaagaggatgaggatgacgaggacgaggatgaagaagaggaagatgattagaatggggactcctctgaagatggcggcgagtcctctgagtccagcagcgaggacgagagcgaggatggggatgagaatgaagaggatgacgaggacgaagacgacgacgaggatgacgatgaggatgaagataatgagtccgagggcagcagctccagctcctcctcctcaggggactcctcagactctgactccaactgaggctcagccccaccccagggcagccagggagagcccaggagctcccctccccaactgaccacctttgtttctcccccatgttctgtcccttgcccccctggcctcccccactttttttctttctttaaaaaaaaaaaaaaatacggtgggggtggggggctggg

SEQ ID NO: 30806 - DNA, 457 bp, Homo sapiens
  misc_feature (1)...(457): n = A,T,C or G
catgacgccaataggatgcgtcggcaagngncgnggaanncangaaactgggtgagaagatggcccagtttgatgctaaaaagtttgcttagacccaacctaataaggacacaccaccgaaagagaagggttcacgggaagagaaacagaagccccaggctgagcggaaggaggagaaaaaggcggctgcccctgctcctgaggaggagatggatgaatgtgagcaggcgctggctgctgagcccaaggccaaggaccccttcgctcacctgcccaagagtacctttgtgttggatgaatttaagcgcaagtactccaatgaggacacactctctgtggcactgccatatttctgggagcactttgataaggacggctggtccctgtggtactcaaagtatcgctttcctgaagaactcactcagaccttcatgagctgccatctcatcactggaag

SEQ ID NO: 30807 - DNA, 521 bp, Homo sapiens
  misc_feature (1)...(521): n = A,T,C or G
nactgtatctccgtccagcgtggnggaattccggagctcgtgggtggcaagggtggcagccgtcctcttctcacagagatcttcgtggagcttggtctgtaacacagaagcagtgatgagcaaggtctcttgtgccctgaagcccagcgaggtgtccacacttcacccttggctgggctgtgtgccaggaaaccctcccggtccaaggtcttcacaaccacgccacgcccctttccgagacagggctaccctccaactcctctccacccggccagccaggcactcactttgtggaatcaccatcaggaaaactatcttaacctatcaatcagcagactttcttccttctctaattctgacataatatttgagatttcaaagaacccatcttgaactaaaatgtaaataaaggctgagctctaagttgttngcctttttcggatgccnctaaatnaaacccaacttttggggaaccgcaaagtaaacaaatgnncaaagagaggccgggcctggctcttcgg

SEQ ID NO: 30808 - DNA, 475 bp, Homo sapiens
  misc_feature (1)...(475): n = A,T,C or G
agtcgatacccttngnannngcggtcgtagaccctagtcagtgtggtggaattcggaatgactatctggacatctatgccatcggggtgggcaagctggatgtggactggagagaactgaatgagctagggcccaagaaggatggcgagaggcatgccttcattctgcacgacacaaaggctctgcaccaggtctttgaacatatgctggatgtctccaagctcacagacaccatctgcggggtggggaacatgtcagcaaacgcctctgaccaggagaggacaccctggcatgtcactattaagcccaagagccaagagacctgccggggggccctcatctccgaccaatgggtcctgacagcagctcattgcttccgcgatggcaacgaccactccctgtggagggtcaatgtgggagaccccaaatcccagtggggcaaagaattccttattgagaaggcggtgatctcccc

SEQ ID NO: 30809 - DNA, 500 bp, Homo sapiens
  misc_feature (1)...(500): n = A,T,C or G
agggnctnnnnnnnnaatagagatcgatgtgcagtgngcaggaatccgatttctgtatgcttttatgcggcgggtcctttcccccctcgagtatggaacagatttcttgatttttctccccttcttcccagctggtgaaactggctaaacgcctcaagaaggagaaagtaaatgttgacattatcaattttggggaagaggtgagtagggactgattggagggcattgacttaatttggtcataaacagaatggtccttaaccctgaggagtgcgggtactgtggcagagtagtgcagaaatgggaaagaacagggagcaaggcctgaagaagggcatcatgtgttctttcctccccaggaggtgaacacagaaaagctgacagcctttgtaaacacgttgaatggcaaagatggaaccggttctcatctggtgacagtgcctcctgggcccagtttggctgatgctctcatcagttctccgattttggctggtgaaggt

SEQ ID NO: 30810 - DNA, 499 bp, Homo sapiens
  misc_feature (1)...(499): n = A,T,C or G
ggcggagggccncaactgaagccncctagngangctncgcaagngccgcggaantcttaccacagttgggcaactgtgaaaagatgtcactgtcttccaaagtgtccctcccccctatacctgcagtaagcaatatcaaatccctgtctttccccaaacttgactctgatgacagcaatcagaagacagccaagctggcgagcactttccatagcacatcctgcctccgcaatggcacgttccagaattccctaaagccttccacccaaagcagtgccagtgagctcaatgggcatcacactcttgggctttcagctttgaacttggacagtggcacagagatgccagccctgacatcctcccagatgccttccctctctgttttgtctgtgtgcacagaggaatcatcacctccaaatactggtcccacggtcacccctcctaatttctcagtgtcacaagtgcccaacatgcccagctgtccccaggcctattctga

SEQ ID NO: 30811 - DNA, 467 bp, Homo sapiens
  misc_feature (1)...(467): n = A,T,C or G
agccggnttnnnnnacaactagattcatatgcagagncgncgaantcagcctactttccaagcggagccatgtctggtaacggcaatgcggctgcaacggcggaagaaaacagcccaaagatgagagtgattcgcgtgggtacccgcaagagccagcttgctcgcatacagacggacagtgtggtggcaacattgaaagcctcgtaccctggcctgcagtttgaaatcattgctatgtccaccacaggggacaagattcttgatactgcactctctaagattggagagaaaagcctgtttaccaaggagcttgaacatgccctggagaagaatgaagtggacctggttgttcactccttgaaggacctgcccactgtgcttcctcctggcttcaccatcggagccatctgcaagcgggaaaaccctcatgatgctgttgtctttcacccaaaatttgttgagaagaa

SEQ ID NO: 30812 - DNA, 465 bp, Homo sapiens
  misc_feature (1)...(465): n = A,T,C or G
ggccggnnnnnnnaaaatagatcccctacgcagcgtcgtggaattcgtgagcttaggccgctggttttggcgatttttgtctgattgcaatgtctggacgtggtaagcaaggaggcaaagctcgcgccaaagcgaaatcccgctcttctcgcgctggtctccagttcccggtgggccgagtgcaccgcctgctccgtaaaggcaactacgcagagcgggttggggcaggcgcgccggtgtacctggcggcggtgttagagtacctgaccgccgagatcctggagctggccggcaacgcggctcgcgacaacaagaagactcgcatcatcccgcgccacttgcagctggccatccgcaacgacgaggagctcaacaaactgctaggccgggtgaccattgctcagggcggcgtccttcctaacatccaggccgtgcttctgcctaagaagaccgagagtcaccaca

SEQ ID NO: 30813 - DNA, 469 bp, Homo sapiens
gttcgagaccctagtcagtgtggggtaattcgcagcctgcgccggcgtcctgccggcttcgtctcctcagcggccatgaggcggacaggccccgaggaggaggcctgcggcgtgtggctggacgcggcggcgctgaagaggcggaaagtgcagacacatttaatcaaaccaggcaccaaaatgctaacactccttcctggagaaagaaaggctaatatttattttactcaaagaagagctccatctacaggcattcaccagagaagcattgcttccttcttcaccttgcagccaggaaagacaaatggcagtgaccagaagagtgtttcatctcatacagaaagtcagatcaacaaagagtccaagaaaaatgcgacccagctagaccatttgatcccaggcttagcacacgattgcatggcatcccctttagccacttcaaccactgcagacatccaggaagctggac

SEQ ID NO: 30814 - DNA, 453 bp, Homo sapiens
  misc_feature (1)...(453): n = A,T,C or G
naccgagnatcctaggacgctgcgnggnaacctgagaacctcatgcacatcagctacgaggctggaatcctggagaaccccaagaaccaatcgcctccaggtctctacacgaagacccaggacccagccaaagcccccaacacccctgacattctcgagatcgagttcaaaaaaggggtccctgtgaaggtgaccaacgtcaaggatggcaccacccaccagacctccttggagctcttcatgtacctgaacgaagtcgcgggcaagcatggcgtgggccgtattgacatcgtggagaaccgcttcattggaatgaagtcccgaggtatctacgagaccccagcaggcaccatcctttaccatgctcatttagacatcgaggccttcaccatggaccgggaagtgcgcaaaatcaaacaaggcctgggcttgaaatttgctgagctggtgtat

SEQ ID NO: 30815 - DNA, 457 bp, Homo sapiens
  misc_feature (1)...(457): n = A,T,C or G
nctcggtagcactacgccagngnggnggaattcggctgatttatagacaaccgaactgcgatgatccagaaactgaggaagcagctctggtggctatagactacatcaatcaaaaccttccttggggatacaaacacaccttgaaccagattgatgaagtaaaggtgtggcctcagcagccctccggagagctgtttgagattgaaatagacaccctggaaaccacctgccatgtgctggaccccacccctgtggcaagatgcagcgtgaggcagctgaaggagcatgctgtcgaaggagactgtgatttccagctgttgaaactagatggcaagttttccgtggtatacgcaaaatgtgattccagtccagactcagccgaggacgtgcgcaaggtgtggcaagactgccccctgctggccccgctgaacgacaccagggtggtgcacgccgcgan

SEQ ID NO: 30816 - DNA, 543 bp, Homo sapiens
  misc_feature (1)...(543): n = A,T,C or G
ccgacgcccgcnnnnnnnnnaattgatcatcgtccgagngggcaattcgggtggggccctggtgctggctgaccagggtgtgtgctgcattgatgagttcgacaagatggctgatgccgaccgcacagccatccacgaggtcatggagcagcagaccatctccattgccaaggccggcattctcaccacactcaatgctcgctgctccatcctggctgccgccaaccctgcctacgggcgctacaaccctcgccgcagcctggagcagaacatacagctacctgctgcactgctctcccggtttgacctcctctggctgattcaggaccggcccgaccgagacaatgacctacggttggcccagcacatcacctatgtgcaccagcacagccggcagcccccctcccagtttgaacctctggacatgaagctcatgaggcgttacatagccatgtgccgcgagaagcaccccatggtgccagagtctctggctgactacatcacagcagcatacgtggagatgaagcgagaggctngngctaa

SEQ ID NO: 30817 - DNA, 457 bp, Homo sapiens
  misc_feature (1)...(457): n = A,T,C or G
attgaatgcagtacctaggccgngnggtggaattcggnggagcacaaaagggtcatcatctctgccccctctgctgacgcccccatgttcgtcatgggtgtgaaccatgagaagtatgacaacagcctcaagatcatcagcaatgcctcctgcaccaccaactgcttagcacccctggccaaggacatccatgacaactttggtatcgaggaaggactcatgaccacagtccatgccatcactgccacccagaatactgtggatggcccctccggcaaactgtggcgtgatggccgcggggctctccaaaacatcatccctgcctctactggcgctgccaaggctgtgggcaaggtcatccctgagctgaacgggaagctcactggcatggccttgcgtgtccccactgcctacgtgtcagaggtggacctgacctgccgtatagaaaaacctgcca

SEQ ID NO: 30818 - DNA, 457 bp, Homo sapiens
  misc_feature (1)...(457): n = A,T,C or G
nttcgatagcactacnccagngcggnggaattcggcggaggtgcaggtcctggtgcttgatggtcgaggccatctcctgggccgcctggcggccatcgtggctaaacaggtactgctgggtaagtcgctgctcgtggcccctctgtcatgggcccccgctggaggtcagtgatgagcaacattcaccatctttcgtttgagtctcacggccatgagatcaaccccatgcaccgctctgagacctgccagccactcttccccagggttggggactccaggctcaagaagccggaaggtggtggtcgtacgctgtgaaggcatcaacatttctggcaatttctacagaaacaagttgaagtacctggctttcctccgcaagcggatgaacaccaacccttcccgaggcccctaccacttccgggcccccagccgcatcttctggcggaccgtgcgaggt

SEQ ID NO: 30819 - DNA, 521 bp, Homo sapiens
  misc_feature (1)...(521): n = A,T,C or G
nttcgaccttcgtccagcgtggtggaattctgcgtccacaggcctgatccaacccagcaggtgctcttgcgggtgaggaccacatctcggttggttagacgtgtccccccagccctctgccaggacctangagttggggtgaggggctgggttgcagggaaatgttgaatcccaaaagcagatttcccaggcaggcactgtcctgacccaacctgccgccagccacctgtcaagctggacctctgggcttttctctccaaatgctcttgttctcaggaaagggccaagactcaccccaggcacaagataagtaggaatcaggtgtgagccagtggtcaggagatttgggtctagactctgtgtggccagggtcattgctcangctcgcanggctaaggaggagggaggcagggggagacatataatttctagaacttctgaggttctaggacaggggccagcanactgtgacccttangccagtctttnttacaataaangtctttagttcttttgaacag

SEQ ID NO: 30820 - DNA, 413 bp, Homo sapiens
tgactcccagaacaaccagtatattttgaccaaacccagagattcaaccatcccacgtgcagatcaccactttataaaggacattgttaccataggaatgctgtctttgccttgtggctggctatgtacagccataggattgcctacaatgtttggttatattatttgtggtgtacttctgggaccttcaggactaaatagtattaaggtaagaacaaaattggattgttttggtatctgtttaacagaatataaaaagagaattcatgaagactaaaaagtattgaatgtgattaatgcagataccagcttcgtataaaccatttcaaagatgtcctttcaggtgtcacgggaagtctctgaaccctcaggaagtcgctgtgcctgttagtgaaggggcggtgttactggaa

SEQ ID NO: 30821 - DNA, 458 bp, Homo sapiens
attgactcgagaccactaggcagtgtggtggaattccttggggtctgggaggcccaggctaagccatgtggcagggaccgtcttgccctgctggccacactctggagaagcacttctcagccaaggcacccctgccctgggactggcagggcaggggcaggggcagggacagtggacaggcggcccgaggacttacggtcggcacttctctgttctcccgtgtcagcgtgtggtgtcgcctgcatgggtcgtacctggatggtgtgtccaccatcgacacggaggggctggatttgtttctcaggcaatcctgtattttaattttagatgtatttcctgaagcatatttttcatagaatgtagcgcgtaaatagctttttaaataacttcttttttataagagtaaaagtatctttaggaatttctttctatagagttcttcattaacatttatacgg

SEQ ID NO: 30822 - DNA, 456 bp, Homo sapiens
  misc_feature (1)...(456): n = A,T,C or G
nctgagtagcgtgcaccangccgngnggtggaatgctacctgcttcctgggtgaaggcgtctgcgaaggcggttggaggtggcccgcccgccggtcccatcggccaggagaagggagacccaaagcctgggtgagcgtcccctttggcctggagccaggggtcaggggctggttggtgcctgcccaacccgtcctgctggggctggactccgcaggacctggggaaagcggcctgggcgtggaatctggagacgggtccaccctgcctgcgagtgttagggtcagagaccctcccctgagactctctggggcccccgcaagggcccgtgcggcctggagcgatcatcttggcgctcccttctggaaaaggggcttttgtcctccaagagcacatggaggctctgagtgggtcagccctccggatcgggagggattaccgttcttcacgggatttag

SEQ ID NO: 30823 - DNA, 525 bp, Homo sapiens
  misc_feature (1)...(525): n = A,T,C or G
cattgatnatcgancagcgttgcggaattcctatactagactttgaatcctcctcttcaccaccccctctcctggctgccactgtccttgcctccacaccaccaggcgccaccgccgctgctgctgctgctggaatgggaccgaggcccatggcaggatccactgaccagattgcacatttacggccgcagactcgccccagtgtgtatgttgctatatatccatacactcctcggaaagaggatgaactanagctgagaaaaggggagatgtttttagtgtttgagcgctgccaggatggctggttcaaagggacatccatgcataccagcaagataggggttttccctggcaattatgtggcaccagtcacaagggcggtgacaaatgcttcccaagctaaagtccctatgtctacagctggccagacaagtcggngagtgaccatggtcagtccttccacggcaggagggcctgcccagaagctccagggaaatggcgtggctgggagtccccagtgtgtcn

SEQ ID NO: 30824 - DNA, 531 bp, Homo sapiens
  misc_feature (1)...(531): n = A,T,C or G
gcaattgatcaccctcgcgaggngcattgaagctctgtccgccattcagaaactcatggtcaggagcgcagacctccacccattgtcagagctgcctgaaaaccggccttgtgaaaatggcagtacccattctgcgggagaattttttacaggacctgtccagccagggtctcctcacaacattggaacttctcgtggtgtacaaaatgcttccagaactcagaacctgttcgagaaacttcagagtaccccaggggcagcaaacaagtgtgaccctagtacaccagcacctgccagctcagctgccctgaaccgcagcagagctcccacttctgtcacccctgtggctccaggaaagggtctggctcagccaccacaggcctatttcaatggctcccttccacctcagacagtaggacatcaggctcatggaagagaacagtccacactcccaagacaaacactccccatctctggtagtcagactggcagctctggagtgatctcccctcaagagttacttgagaagct

SEQ ID NO: 30825 - DNA, 467 bp, Homo sapiens
  misc_feature (1)...(467): n = A,T,C or G
ntcgaaactcgtagaccctaggcagagtggcggaattcattgagcacctaccatatgcccggaacggcgctaggtggacagacagcgttatacaggtgaagtccagcccgcatgaagctttacattgtagttcaggacacctgatgctgattaacccgaaacagagccaagccagcccacctaaaggagcaggagcacgcccagtggcatcattgtgactgtactgctgattggctggcagcctggggagtgtctggcccaggttatacgatacccagggccctcacatcattcatggtggacttcactggcccaaagtgtaaagatctttaaggttgcagagcctgaggcctgtgatcagatgtacgagagcttagcgcgactccattcaaactactacaaacacaagtaccctcgcgccagagacaccatcttcagtggcctgtcgttggaagagtacaagctgn

SEQ ID NO: 30826 - DNA, 253 bp, Homo sapiens
  misc_feature (1)...(253): n = A,T,C or G
ccgagaggtgaattctaaccgggccggaggcgcgcagccgggacgccacgccgccggtgtcccccatcaacatggaagaccaagagcgcatcaaagtggagcgcaagcggctgcggaaccggctggcggccaccaagtgccggaagcggaagctggagcgcatcgcgcgcctggaggacaaggtgaagacgctcaaggcccagaacgcggggctgtcgagtaccgccggcctcctccgggagcaggtggcccn

SEQ ID NO: 30827 - DNA, 483 bp, Homo sapiens
  misc_feature (1)...(483): n = A,T,C or G
cattgagcccatgngagnggcnggaactagagccatagttaacgccggactctttggggcaacaccacccagaagcctttggaatgtaacgaaggcaatgctgctccctgagtccagtccccgcccccaaacccagcccaggtgccttcagctacttcggcttcttaaaccctgcagtgttaaacagaggcattgagaaaggggaaaggcgggtatttttaaaagccaaagattgacccagttacttgagggtagggaggcgggcccagtgcaggaggctgcatccctggcctgctggtgcccaccgggggctgtgcctgtgccgggccgcaaggaagctggctgcccccattcctgctgctgctgctgctgctgctctgtggctgtttcaaagactgggcgaaaggctgtccggagggcagaccaggtgccttgccgcagagaaaacaccaaagtctcctgttcgctcataaagaagttttn

SEQ ID NO: 30828 - DNA, 488 bp, Homo sapiens
  misc_feature (1)...(488): n = A,T,C or G
agggtcccnnaggggggnnattgaaaccctatcgagaccatagtcagtgtggtggaattcgcagctcagcatggctagggtactgggagcacccgttgcactggggttgtggagcctatgctggtctctggccattgccacccctcttcctccgactagtgcccatgggaatgttgctgaaggcgagaccaagccagacccagacgtgactgaacgctgctcagatggctggagctttgatgctaccaccctggatgacaatggaaccatgctgttttttaaaggggagtttgtgtggaagagtcacaaatgggaccgggagttaatctcagagagatggaagaatttccccagccctgtggatgctgcattccgtcaaggtcacaacagtgtctttctgatcaagggggacaaagtctgggtataccctcctgaaaagaaggagaaaggatacccaaagttgctccaagatgaatttcctggaatcn

SEQ ID NO: 30829 - DNA, 472 bp, Homo sapiens
  misc_feature (1)...(472): n = A,T,C or G
ntctgatagcgctcgcagggacgnggcattccaaattatgattcctacgccagctacgacgtgaacggcaatgattatgacccatctccacgatatgatgccagcaatgaaaataaacacggcactcgttgtgcgggagaagttgctgcttcagcaaacaattcctactgcatcgtgggcatagcgtacaatgccaaaataggaggcatccgcatgctggacggcgatgtcacagatgtggtcgaggcaaagtcgctgggcatcagacccaactacatcgacatttacagtgccagctgggggccggacgacgacggcaagacggtggacgggcccggccgactggctaagcaggctttcgagtatggcattaaaaagggccggcagggcctgggctccattttcgtctgggcatctgggaatggcgggagagagggggactactgctcgtgcgatggctacaccaacagcg

SEQ ID NO: 30830 - DNA, 472 bp, Homo sapiens
  misc_feature (1)...(472): n = A,T,C or G
nattgatcgacgtcactaggccgnngcgtggaattcgacgctcatccgtgatgcttccgcgtgtcggaggaccaggtgccacctcaagagagaggccgtgggcggcgagccgcgggcgtttactcttagcagaagctcacctgtaagttttgagaacttagaaaccgatgccttccctctcatcagtcgtgaggcgcagtctcctggccgctgggttcgttcctccttgacatctctggagacgcatcgaggagctattgttctctggcgtcggaggttgcgctgtgtccgcggcgttgagggccccttgctaactggaacacggggaaggcggccctgtgaggtttagtgaactcaatcaaagaggtcctgcaagtggagtagactccctgaagcaagactgccatctggaccgccgagtaatggcggtgttacctggagaacgtgaaacagtctctaaacacttactaga

SEQ ID NO: 30831 - DNA, 470 bp, Homo sapiens
  misc_feature (1)...(470): n = A,T,C or G
nctgagactgaggccactgcaaggacncnnnngtgacagagaggactgctcatgtgattttacgatacgtaattcacctctgggacctcaaccacgaagggacatggcaaggacaggggacgtgtgtctattacacagactttgtcatggagctcactctcctgtccctggacctcatgcaccatattcacatgttgttatttggcaacatctgattatccatggccagcctggtcatctttatgcagctgcgttacctgcttcatgaggtgcaacgtcgaattcgtcgacacacgaactatctacgtgtggctggaaacatggaggccaggtttgcagttgcaactccagaggagctggctgtcaacaatgacgactgtgccatctgttgggactccatgcaggctgcgcggaaactgccctgcggacatcttttccacaactcctgtcttcgttcctggctacaacan

SEQ ID NO: 30832 - DNA, 459 bp, Homo sapiens
  misc_feature (1)...(459): n = A,T,C or G
ttcctgagntacctgcnaatcctngnaanngcnnngnaatnncaccttccaccagaacctgtgggtctccagtccccatcccatcaccaccatcttccaactccccactggaacccagcagtctcgtatctccatcagtgaggacagagtgagatatggtgtctggctcaggcacttggcagcacttgaggggtcctcatatgtctcctgcccagcaaggatctgactaaagcagtcgtgggtgtgggaggggcctgcaggcatgcctgggttgggggcagctggccctgggcaccctggtgcaggtccagtctgccctctggatggcccctcctcttacccatattactactttgtaaccagggaggtgatgcagcgtgacatatcagccggcgacttcatcgagcatgccgagttctcggggaacctgtatggcacgagcaaagtggcggtgcatgg

SEQ ID NO: 30833 - DNA, 454 bp, Homo sapiens
  misc_feature (1)...(454): n = A,T,C or G
nctgagacctgaggacgtgcggnggaattcctggccaggtgcccgccgtgtgtgagattctcgtgagggaccctgaaaacaacagcatgggctacaggaggagcaagagcacggacaattttgcctttctgaagaagagctcctttaagcggaagtccacctccaatcttgcagacctcaggacggcccatgatgcacgggtaccacagaggaccctgagcagttcctccactgactcccaaaagcttgggtcaggaaggaccaaacgctggaggagcccgataagggccaaggactttgacagagtcttcaaacttgtgagcaatgtgactgaggctgcctggaggagggagagtcctaggagtggggccccatcccctggagaggccagcctgagactccaggcacacagccggctgcatgacgactactcccgccgcgtctccaggagcag

SEQ ID NO: 30834 - DNA, 500 bp, Homo sapiens
  misc_feature (1)...(500): n = A,T,C or G
tgactttcagggcaccttcncaactgataccctagccangngcnggaattccggtgatggtgttactgggctgctcaggggctggtggtcaggtgaggggctccccaggtgggcctggagagtccaggcactcccttcctgcggatgtgggaaggacatggggtcctgggaggagctgctgggaaggggcatgagtcagggtgggggtggcgcagcagctgcggggctgtgactcacaggagtcgggccctggaagtccccgcgtcctctccaggggaccctgtgtgtgttctgcaggttggttcccaggacctgggggggacctccagccccgggaacctggccgtgctggggaggcgagtggctggtgcagccccctggttgctctgggtgcatcgggaggcttcagagcctgccccagagggggagaagcttcacttcccgggaagcatgggaggcctggaggaggtctttggcaggtcccctctcgggaaatcccc

SEQ ID NO: 30835 - DNA, 486 bp, Homo sapiens
  misc_feature (1)...(486): n = A,T,C or G
gatgcataccctcgccangncgattgatgaccctctgcagggcgcggaaccgctcccactcgctgaccatgtgatccgcccacctaggccttccaaagtgctgggattacaggcgtgagccaccgcgcctggctacagcttctttcttatatttttgttccattattggaaggcaacttcaatgaacaaacatcttccaaaacttttgaatttttcttctgcttgctaaatactattttgtaaagtttcaattactagttcgaatccacacctcaataaatagatatgtattagagaaggaatggaaaaatatttactcattaagaataccaacacatgaaagtgatttcagagtatggagtcttgagtcaaaaacaaaggacccttcccggaagcttccttttttgcttcagtttttgaatttgactgaaggaaggtggaaatgatcactcgagcccctaatgaattctccttagtaaaatactg

SEQ ID NO: 30836 - DNA, 474 bp, Homo sapiens
  misc_feature (1)...(474): n = A,T,C or G
gaaaagaccggacccccnnaactgaaacctgagtatccctcgacangcggnggaattcctctggctggccctgctccctattggtttgatgtgactgagggctatcagccatcatagcacctccttcaggaagcctcccttgatcactcaccccacgctgcctgggttgtggacctccaatgcaccactccctgtgttcataacctcctggttcttatccctctacatcactgatgtgagccccatgagggctggtgtgtcttagtccctgacgtgtccctagggccttcctggcatagggcatggcaggtagtaggcactcaatagatgtttgttgattgaagggatgaatatatgagtgagtggaaaggtgggtaatggatagatggacagtggatggatggacggatggatggataatgaagtgacggattgatgaatggtatagaaatgaatgaatggacagacacattg

SEQ ID NO: 30837 - DNA, 453 bp, Homo sapiens
  misc_feature (1)...(453): n = A,T,C or G
accgagttcctaggacntgcgnggnaaccccaacatctgcagcctggatttccacccgtacggcgagtttgtagcctctggttcccaggacacaaacatcaagctctgggacatcaggaggaaaggctgtgtcttccgatacagggggcacagccaggccgtgcggtgtctccggttcagccccgatgggaagtggttggcgtcggccgcagatgaccacaccgtgaagctctgggatctcactgccggcaagatgatgtctgagttccctggtcacacggggcctgtcaacgtggtcgagtttcaccccaacgagtacctcctggcctccggcagctctgacaggacaatccgcttctgggacctggagaagttccaggtggtgagctgcatcgaaggggagcctgggcccgtcaggagcgtcctcttcaacccaaatggctgcttgctgtn

SEQ ID NO: 30838 - DNA, 474 bp, Homo sapiens
  misc_feature (1)...(474): n = A,T,C or G
gatgataccctcgcaggncagtgagaccctaggcagggcgcggaaccgctcccaccgctaccatctggtcaacctggcaggcatgcaggtcttggccaacacgagccacctctgggtggaggaggaggtctggcggatggagatctacctctccctgggagtgctggccctcggcacgttgtccctgctggccgtgacctcactgccgtccattgcaaactcgctcaactggagggagttcagcttcgttcagtcctcactgggctttgtggccctcgtgctgagcacactgcacacgctcacctacggctggacccgcgccttcgaggagagccgctacaagttctacctgcctcccaccttcacgctcacgctgctggtgccctgcgtcgtcatcctggccaaagccctgtttctcctgccctgcatcagccgcagactcgccaggatccggagaggctgggagagggaaag

SEQ ID NO: 30839 - DNA, 456 bp, Homo sapiens
  misc_feature (1)...(456): n = A,T,C or G
tctgaaaaccgtagaccntcggaagngcggnggaattccctcagatggggtggcggcgggccccagcccttgccccaagtctctaaggaagggtctggcctggcccgcccagatccgagctgctgcgtacgcgcggggctgggagctgcaaaaacgcccggggcccagggtgagcggctgggccctcgggggacccggcgcgcgcgggggctccagctccgccctgttgggggccagagcaggagggaggccgccccagcttgttctgggccgcagccctgccgaccgcacgggacaggcgccgcgtcctctctgggcctccaagacgcagactagaagcccatagctgctgggaagatgggcaccccaggtctccgcgcacggccttcccagggccacggtgaaacatggatgcgacactcaggcaccttcccggcccccggcgaaaacgcaaag

SEQ ID NO: 30840 - DNA, 494 bp, Homo sapiens
  misc_feature (1)...(494): n = A,T,C or G
catcgagcacgatcgatggccnctagcgagncaccgggcacagccagcttccttcaggagttggaagagtggtacacatggctagacaatgctttggtgctagatgccctgatgcgagtggccaatgaggagtcagagcacaatcaagcctccattgtgttccctcctccaggggcttctgaggagaatggcctgcctcacacgtcagccagaacccagctgccccagtcaatgaagattatgcatgagatcatgtacaaactggaagtgctctatgtcctctgcgtgctgctgatggggcgtcagcgaaaccaggttcacagaatgattgcagagttcaagctgatccctggacttaataatttgtttgacaaactgatttggaggaagcattcagcatctgcccttgtcctccatggtcacaaccagaactgtgactgtagcccggacatcaccttgaagatacagtttttgaggcttcttcagagcttcag

SEQ ID NO: 30841 - DNA, 512 bp, Homo sapiens
  misc_feature (1)...(512): n = A,T,C or G
aaggccncnnnnnaatagacnatcgatcagcgntgtggaattctcgggacgcgggcctgcaggcgccatggtcttcctcaccgcgcagctctggctgcggaatcgcgtcaccgaccgctactttcggatccaggaggtgctgaagcacgccaggcacttccggggaaggaaaaatcgctgctacaggttggcggtcagaaccgtgattcgagcctttgtgaaatgcaccaaagcccgatacctgaagaaaaagaacatgaggaccctctggattaatcgaattacagctgctagccaggaacatggactgaagtatccagcgctcattgggaatttagttaagtgccaggtggagctcaacaggaaagtcctagcggatctggccatctacgagccaaagactttcaaatctttggctgccttggccagtaggaggcgacacgaaggatttgctgctgccttgngggatgggaaggaacctgaaggcattttttccagagtggtgcagtacc

SEQ ID NO: 30842 - DNA, 503 bp, Homo sapiens
  misc_feature (1)...(503): n = A,T,C or G
tgtgcctgccnccaaatgaaaactggagtcatggcagnggcgggaattccaggcgggcggatcacgaggtcaggagatcaagaccacggtgaaaccccgtttctactaaaaatacaaaaaaaattaaccgggcgcagcggcgggtgcctgtggtcccagctactcgggaggctgaggcaggagaatggcgtgagcccgggaggcggagcttgcagtgaaccgagattggtcactgcactccagcctgggcgacagggcaagactccgtctcataaaaaaaaaaaaaaaaaaaaaaaaaaaaaaaaaaaaaaaataaantaaaannnnnnnnnnnnnnnnagggttnnntggntccttacccccccattctttcctcttattgagaagaaaaaagaggactgccatttaaaaagaccttacttaggggtctggatggtctcgggtgttttttattagggggtttatgttataaaaaaaaactttatgagtggtggtagggtgtg

SEQ ID NO: 30843 - DNA, 451 bp, Homo sapiens
  misc_feature (1)...(451): n = A,T,C or G
ncctcgagtagcactagcacgngncgnggaattcggcatgcacagtgagctatggggcgtggtccatggggccaccgtcctctccccaacggttgtctttggcaccctggcctctctctatctgggagccttggaccacacagctgacaggctacaggcaatcctgggtgttccttggaaggacaagaactgcacctcccggctggatgcgcacaaggtcctgtctgccctgcaggctgtacagggcctgctagtggcccagggcagggctgatagccaggcccagctgctgctgtccatggtggtgggcgtgttcacagccccaggcctgcacctgaagcagccgtttgtgcagggcctggctctctatacccctgtggtcctcccacgctctctggacttcacagaactggatgttgctgctgagaagattgacaggttcatgcaggcn

SEQ ID NO: 30844 - DNA, 542 bp, Homo sapiens
  misc_feature (1)...(542): n = A,T,C or G
agttctagcaggccnnnnnaattgaaatcgaccacgtccacgnggngcaattcccatcatcgccagctgcacactcttggggctctacctctttttcaaaatattctcccaggagtacatcaacctcctgctgtccatgtatttcttcgtgctgggaatcctggccctgtcccacaccatcagccccttcatgaataagttttttccagccagctttccaaatcgacagtaccagctgctcttcacacagggttctggggaaaacaaggaagagatcatcaattatgaatttgacaccaaggacctggtgtgcctgggcctgagcagcatcgttggcgtctggtacctgctgaggaagcactggattgccaacaacctttttggcctggccttctcccttaatggagtagagctcctgcacctcaacaatgtcagcactggctgcatcctgctgggcggactcttcatctacgatgtcttctgggtatttggcaccaatgtgatggtgacagtggccaagtccttcgaggcaccaataaaat

SEQ ID NO: 30845 - DNA, 455 bp, Homo sapiens
  misc_feature (1)...(455): n = A,T,C or G
nctgagnccctgangatctagtgaagngcggnggaattccagntgtaacaaaaccgctcaagtctgccttaaagagccttacaagccagccagtccctgcagctccacaaactgacccatcctgggccttgttctccacagaatgggtctgctccttcccctggcactctgcatcctagtcctgtgctgcggagcaatgtctccaccccagctggccctcaacccctcggctctgctctcccggggctgcaatgactcagatgtgctggcagttgcaggctttgccctgcgggatattaacaaagacagaaaggatggctatgtgctgagactcaaccgagtgaacgacgcccaggaatacagacggggtggcctgggatctctgttctatcttacactggatgtgctagagactgactgccatgtgctcagaaagaaggcatggcaagactgtg

SEQ ID NO: 30846 - DNA, 483 bp, Homo sapiens
  misc_feature (1)...(483): n = A,T,C or G
gggcttgatnccnttnnnnnnnttcgtagtccctagtcagtgtggtggaattcctctcccccagtaaggtccacggtgtgcgctatggacagcctgcgaccagtgagactgcagaagtaccctcaagcagcggcggtcccttagtgacagtgtctacacccctccaccaagtgtcccccacgggcctggagcccagccacagcctgctgagtacagaagccaagctggtctcagcagctgggggccccctcccccctgtcagcaccctgacagcactgcacagcttggagcagacatccccaggcctcaaccagcagccccagaacctcatcatggcctcacttcctggggtcatgaccatcgggcctggtgagcctgcctccctgggtcctacgttcaccaacacaggtgcctccaccctggtcatcggcctggcctccacgcaggcacagagtgtgccggtcatcaacagcatgggcagcn

SEQ ID NO: 30847 - DNA, 524 bp, Homo sapiens
  misc_feature (1)...(524): n = A,T,C or G
nattgacatcgatcagcgtgcggaagncccgctgncgcgcctcctgcggagaaggcccctgtaaagaagaaggcggccaaaaaggctgggggtacgcctcgtaaggcgtctggtcccccggtgtcagagctcatcaccaaggctgtggccgcctctaaagagcgtagcggagtttctctggctgctctgaaaaaagcgttggctgccgccggctatgatgtggagaaaaacaacagccgtatcaaacttggtctcaagagcctggtgagcaagggcactctggtgcaaacgaaaggcaccggtgcttctggctcctttaaactcaacaagaaggcagcctccggggaagccaagcccaaggttaaaaaggcgggcggaaccaaacctaataagccagttggggcagccaacaagcccaagaaggcggctggcggcgcaactccgaagaagagcgctaagaaaacaccgaagaaagcgaagaagccggccgcggccactgtaacccaagaaagtggctaagagcc

SEQ ID NO: 30848 - DNA, 494 bp, Homo sapiens
  misc_feature (1)...(494): n = A,T,C or G
tggagccnggggnnnaattgaaatcgatcactgtggagcaaggcctgctttccccacagacatgccttccgtttggagggccgcggcaccccgtccgaggcgaaggaacccccccagccgcgagggagagaaatgaagggaatttctgcagcggcatgaaagctctgcagctaggtcctctcatcagccatttgtcctttcaaactgtattgtgatacgggcaggatcagtccacgggagagaagacgagcctcccggctgtttctccgccggtctacttcccatatttcttttctttgccctcctgattcttggctggcccagggatgacttcctcgctgcagcggccctggcgggtgccctggctaccatggaccatcctgctggtcagcactgcggctggtccacctcattcatttaaccgagatgagacaataatcattgctttggcatcagtctctgtattagctggtttgatagttgccttatgcttt

SEQ ID NO: 30849 - DNA, 532 bp, Homo sapiens
  misc_feature (1)...(532): n = A,T,C or G
agttatacttaagggggntnnncnaggggnnnnnngaatcgagnaccatttttgagggccgtatgcccagggcaaaaaggcagaaaggagtcccaaccatggcataaaaggagagggagctcccatccagggcaaaaaggcatattcggttgctaatcacggcacaaaggtagagggtattacaaaccatgggaaaaaagcagaagggtcccccagtgaaggcaaaaaggcagaagggtcccccatccaaggcataaaggcatacgcagctgccaatcagggtaaaaagacagagtcagcttatgtccagggctgaaatacagatgtggcccagagcccagaggcaccaaagcaagaggctcctgccaagaagaagtctggttcaaagaaaaaagggcccccagatgccgacggtcctctctatctcccctacaagacgctggtctccacggttgggagcatggtgttcaacgagggcgaggcccagcggctcatcgagatcctgtctgagaaggctggcatcattcaggag

SEQ ID NO: 30850 - DNA, 493 bp, Homo sapiens
  misc_feature (1)...(493): n = A,T,C or G
aggcgnnnagacgccaccctaaatngaccttagntgngcgnngananncangaannncaagagcctaccctctgggctggatgactacccccgggcttcacacccttcagtaaccgagcggcacctggacctgcgatgttgggtggcactgggtgcccgtgtgctgacgcggctggcagagcatctgggtgaggctgaggtagctgctgagctgggcccactggctgcctcactggaggcagcagagagcctggatgagctgcactgggccccagagctaggagtctttgcagactttgggaaccacacaaaagcagtacagctgaagcccacgccccctcaggggctcgttcgggtggtgggtcggccccaacctcaactgcagtatgtagatgctcttggctatgtcagtctttttcccttgctgctgcgactgctggaccccacctcatcccgccttgggcccctgcttgacattctagccgacagccgg

SEQ ID NO: 30851 - DNA, 489 bp, Homo sapiens
  misc_feature (1)...(489): n = A,T,C or G
cggtttcncaggngcncnntttgagacccttgtgatgatcatacggcagngccgcggaanncgnaagtaaagttttattggaacacagtcctgcctgtatgtttatgatttgtccctcgttttcccatgccgcagtggcaggcagggggtgatctcagctgagactggccacaaagcttgaaatgcctcctgcctagccccttctagaaaacactggctgagccctggtataaacaatcaatatttgtcttaagtaaaagaagaaatatatgacataaaatccaaattcatccgagatctaaactcttcatgtcactttggaaaaaggcattttggaaggattgtcctgtgtgttgcaacaaggtctccggtgaactgatcttagtgattcttgctgttttgaaacgcacgtgtttctgttgtaggaccctcactacgtccagcaggcgctgaccaacgtcttgctgatggacgccgtcgtgggcacat

SEQ ID NO: 30852 - DNA, 394 bp, Homo sapiens
gccaccttgaaactgattttcgggcctgactttgacgtgtggttgctggtgagctcttgatcttgggccgttggtccactgacgcttttaagcgaccttggcggatctccctagatctagaaacccttttacctggcccgactgatgtagccagtggtctctggtgacccctgcaagctcagagatggggctgttgtgtgccaggcatgagcttccccaagaggcagagggcatacatcccatttatacattccctaagcccacccctgtgtcctcaggcaccacctgccctggtcagctccagccagtccctgctggagtggtgccaggaagtcaccactgtctaccgtggcgttcgcatcaccaacttcaccacattctggcgcaacggctg

SEQ ID NO: 30853 - DNA, 420 bp, Homo sapiens
ctttctcttgctgtggggtgtcacctggggcccagtgacagaagcagccatattttatgagacgcagcccagcctgtgggcagagtccgaatcactgctgaaacccttggccaatgtgacgctgacgtgccaggcccgcctggagactccagacttccagctgttcaagaatggggtggcccaggagcctgtgcaccttgactcacctgccatcaagcaccagttcctgctgacgggtgacacccagggccgctaccgctgccgctcgggcttgtccacaggatggacccagctgagcaagctcctggagctgacagggccaaagtccttgcctgctccctggctctcgatggcgccagtgtcctggatcacccccggcctgaaaacaacagcagtgtgccgaggtgtgctgcggagtgt

SEQ ID NO: 30854 - DNA, 479 bp, Homo sapiens
  misc_feature (1)...(479): n = A,T,C or G
nggcccggctttcgagacccctgnntttcgagnatccactagtcagtgtgatgggtgagatagagaatgagtaaggcacgcatgccgtaaaaactgaagtactcccagatttggatcgccacgatatagtatatcgcgcgcggctgtgagggtgttttcatgtgttctccttatgagcaaaaaagggaagtggcaagccacttcccttgtacgagctaattattttttgctttcttctttcaataccttaacggtatagcggccatcagcctgacggtatgcaccgtgaatatcggtttcaaagcccggatagtgagcgccgatttcacacagcatctgcaggaactccagaaccggacggctttcttcggtgatcatttcacccggcattaccagaggaactcccggcgggtacggaaggatcatattggcgttaatacgacctaccatttcgtcgaggtaaacttcttcggtcataa

SEQ ID NO: 30855 - DNA, 473 bp, Homo sapiens
  misc_feature (1)...(473): n = A,T,C or G
gggacaagctttgatnccctnnnattgagntccactantcagagtggtggaattcgaactgcggatggaagctgcggaagaggccctgatggggcccaccatcccggacccaagtcttcttcctggcgggcctctcgtctccttcctggtttgggcggaagccatcacctggatgcctacgtgggaagggacctcgaatgtgggaccccagcccctctccagctcgaaatccctccacagccacggggacaccctgcacctattcccacgggacaggctggacccagagactctggacccggggcctccccttgagtagagacccgccctctgactgatggacgccgctgacctggggtcagacccgtgggctggacccctgcccaccccgcaggaaccctgaggcctaggggagctgttgagccttcagtgtctgcatgtgggaagtgggctccttcacctacctcacaggg

SEQ ID NO: 30856 - DNA, 472 bp, Homo sapiens
agcccgcctttgagatccctagtcatagaggtgcaattccgacttgatccagaattacgttgaccccactccggaccccaacactgcctacgcctcctacccaggtgcatctgtggacaactaccaacagccacccttcacccagaacgcggagaccaccgagggctaccagccgccccgtgtgtactgagcggcggctaacgtgggatgggggacagagagggccctcccctctgccctggactttaccatgagcctcctggaactgccagcccctctctttcacctgttgcatgctgtgcagctgacacacagctaaggagcctcatagcctggcgggggctggcagagccacaccccaagtgcctgtgcccagagggcttcagtcagccgctcactcctgcagggcacttttaggaaaaggcttttagctagtgtccctcctcgcttttaatgacctcagccccgcctg

SEQ ID NO: 30857 - DNA, 473 bp, Homo sapiens
  misc_feature (1)...(473): n = A,T,C or G
ggcccccttttgagaccctagnatcgtagaccctagtccaagtggtggaattcctccagacgccgaagtcgcgggcgctcatggcgggcctggaggtactgttcgcatcggcagcgccggccatcacctgcaggcaggacgcgctcgtctgcttcttgcattgggaagtggtgacacacggttacttcggcttgggtgtcggtgaccagccgggtcccaatgataagaagtcagaactgctgccagctgggtggaacaacaataaagacctgtatgtcctccggtatgagtataaggatgggtccagaaagctccttgtgaaagccatcaccgtggagagcagcatgatcctcaatgtgctggaatatggctcacagcaagtggcagacttgaccctgaacttggatgattatatcgatgcagaacacctgggtgacttccacaggacctacaagaacagtgaggagcttcgg

SEQ ID NO: 30858 - DNA, 472 bp, Homo sapiens
ggcccggcttttgagaccctagtcatagaggagcaattccgacaccagggtggtgcacgccgcgaaagctgccctggccgccttcaacgctcagaacaacggctccaattttcagctggaggaaatttcccgggctcagcttgtgcccctcccaccttctacctatgtggagtttacagtgtctggcactgactgtgttgctaaagaggccacagaggcagccaagtgtaacctgctggcagaaaagcaatatggcttttgtaaggcaacactcagtgagaagcttggtggggcagaggttgcagtgacctgcacggtgttccaaacacagcccgtgacctcacagccccaaccagaaggtgccaatgaagcagtccccacccccgtggtggacccagatgcacctccgtcccctccacttggcgcacctggactccctccagctggctcacccccagactcccatgtgtta

SEQ ID NO: 30859 - DNA, 529 bp, Homo sapiens
  misc_feature (1)...(529): n = A,T,C or G
agagaggannagcaacnctgatcatcctccgngttttggaattccatctcgtgtggcggaattcgaattgtaccacaatcccaagattgcccttttgaatgtcgagctcgagttgtaagctgagaaagacaatgctgagataagagtccacacagttgaggattatcaggcaattgttgatgctgagaggaacattctctatgacaagttagagaagatccatcattctggagccaaagttgtcttgtccaaactccccattggggatgtggccacccagtactttgctgacagggacatgttctgtgctggccgagtacctgaggaggatctgaagaggacaatgatggcctgtggaggctcaatccagaccagtgtgaatgctctgtcagcagatgtgctgggtcgatgccaggtgtttgaagagacccagattggaggcgagaggtacaatttttttactggctgccccaaggccaagacatgcaccttcattctccgtggcggcgccgagcagtttatggaggaa

SEQ ID NO: 30860 - DNA, 243 bp, Homo sapiens
  misc_feature (1)...(243): n = A,T,C or G
tggngntccaagccttggctcaataccaaaaggacgcccctgaccaccaggaactgaaccttgatgtgtccctccaactgcccagccgcagctccaagatcacccaccgtatccactgggaatctgccagcctcctgcgatcagaagagaccaaggaaaatgagggtttcacagtcacagctgaaggaaaaggccaaggcaccttgtcggtggtgacaatgtaccatgctaaggccaaagatc

SEQ ID NO: 30861 - DNA, 499 bp, Homo sapiens
  misc_feature (1)...(499): n = A,T,C or G
agaggccnnnnnnnaactgagaactagcgccgtcggcanggngcaattccagaaaaacttctcactataaagcatgtgttcaaggattaccaatgcaaatgggcagcaattaacctggagaccccatgcctatggcagtctcaagaacggaactagagatgctatgtttgaaaatcgacgcatgattaaagcgatacttctggaagcatgcagggcacgcgggccggccatgacgcacagactctgtacagccctgcagacctcagccaccatgctaacaggcggacacttttaccatgcaatcaagggcacgggatcagctgctttgggaagacttatttccaccccctccagtctctcatgctggagcgcagtggcgtgatctcgactcactgcaacctctgcctcctgggttcaagcgattgttctgcctcagcctcctgagtatgtgggactacaggcacgcaccaccacgcccagctaatgtttgtatttttag

SEQ ID NO: 30862 - DNA, 475 bp, Homo sapiens
  misc_feature (1)...(475): n = A,T,C or G
nttgagtccctagtcagtgtgctgtggtgatccatacgccacgtggtggaattccctacagctctctcctcggcccaggtcctgctgcacgtgacttgtgacatccgatttaggcttctcaggagagggcagggacacaggtcccatgagtgccttttactgggggtggggattgagaggtggccctgggggccctggccacgtccctcgctgactgtgctggtctccgtgcagtgtcaacagcatctccaccctggagcctgtgagccggtgccagcgcctgagtgagctgtacctgcggaggaaccgcatccccagcctggctgagctcttctacctgaaggggctgccgcgtctgcgggtgctgtggctggccgagaacccgtgctgcggcaccagcccccaccgctaccgcatgaccgtgctgcgcaccctgccgcgcctacagaagctggacaaccaggctgtgacggag

SEQ ID NO: 30863 - DNA, 473 bp, Homo sapiens
  misc_feature (1)...(473): n = A,T,C or G
attggagaccattgagagcactcggaanngcangcctgtgttagtaaggccctttgaagttgtggaaaagagcaggggcgcagaccactatgaatcctcacatcgcctgagccaggcacaatatctgcctcatgtattctttataataaacttattttgcacagaagggaaactagaggctccgagttagccagtttgaccaaggtagctcagcggactcaggtctgcattgccaccaaagttcatgcgaggctttgaaaagcacacatcttctccttgggctacaagtgagcaccgtggtggaggactgtttccgggtagtctttgcttccaggttctggaatccaggggacagcacacctccagcccagcagagctgctcctatgctttccctgtccttccagctggtcagcaagagcttagccagcactgtggtgtgagtgtgatccagcaaggccccaacgcccagcct

SEQ ID NO: 30864 - DNA, 468 bp, Homo sapiens
ggcactcattcgagaccatagtctttgaggagcatttcaacccggctgcaaccttccaccctccattcctccttcttctcccttagcctgtggtctcaaaaacttaaaacctcttcaactcacacctgacctaaaacctaagtgtcttattttcttctgcaacaccgctgggccccaatacaaactcgacaatgattccaaatagccagaaaacggcactttcgagttctccatcctacaagttctagataattcttgtcataaaatgggcaaatggtctgaggtgcctgacgtccaggcattcttttacacattggtccctccctagtctctgctcccaatgtgactcatcccaaatctttcttctttctctcctttctgttccttcggtctccaccccaagttccgagtcctctgaatccttcttttctatggactcatctgacctccccccttctccccaggctg

SEQ ID NO: 30865 - DNA, 511 bp, Homo sapiens
  misc_feature (1)...(511): n = A,T,C or G
agaggccnngcnttnnctcnnncnnccttgaaacctatgngcangncccgatgaattccgtgcgtaancccactaactctgccccggnccacgcacctgctggctgcctggggcagcctgtcaactgcagtactcattgctgttctgtcctttccacaggcaatcgaaaatatcgacaccttaaccaacctggagagtttgtttttggggaaaaacaaaattactaaacttcagaacctggatgcgctcaccaacctgacagtcctcagtatgcagagcaaccggctgaccaagatcgagggtctgcagaacctggtgaacctgcgggagctgtaccttagccacaatggcatcgaggtcatcgagggcctggagaacaatgtaagacacccactgtctgtctggggctgtgtgggcggtgggcaccaagcgggcaggcacctggccagccagcacacactgggcctctcggccggtgtcaagaagatgcccttgctctggaaggttatan

SEQ ID NO: 30866 - DNA, 479 bp, Homo sapiens
  misc_feature (1)...(479): n = A,T,C or G
ggggtncccggggccnnnnncattgagnaaactgagatcctacgacanngcgnggaattccctggaactgaaggagggtgggaaggttttaattattttaaaaatagagatggggactcactatgttgcccaggctggtctcaaactactgggctcaagtgaacctccttcctcggctcccaaagtgctgggattacaagcgtgagccactgtcccagcagggaggtgttttttttaaagctgattcactggaggcagggtgggcaagtggcactgctggtggccacccctcacagtccctgctgcccccagtaccgcctggcacccatcccccgggcccgccacgactttgcctgcgccagcctgatcttcgtctgcatcctgctcgtccatgtcctgctcatgcccaggtcagttgcagggaggggtgtggggtccggcctgctgggatccaggctggaaggtgactatgaacctgc

SEQ ID NO: 30867 - DNA, 470 bp, Homo sapiens
  misc_feature (1)...(470): n = A,T,C or G
aaaaaaaattagataacctnnttttgataacatagtccatgtgctggaattcggaccggctggagatgccactgatagacctggcgctaatcctgtacccaccctcctacgtgccctacacggggcacctatccgatgactctctgtcccgaaaatactgcctgacctggtttgaggacgccctgaacggggttttgtaacgcgcagaggcaatccaaccacactgtgtgaatgcaggcgataggatggagaagttccggcagaagtactggaacaagcttcagaccctgaggcagcagcccttcgcctatgggaccctgaccgtgcgcagcctgctggacaccagggagcactgtctgaacgagttcaacttcccggatccctactccaaagtgaagcagcgggagaatggcgtggcgctgaggtgcttccccggggtcgtgcgctccctggacgcgctgggctgggag

SEQ ID NO: 30868 - DNA, 473 bp, Homo sapiens
  misc_feature (1)...(473): n = A,T,C or G
agaaaaaaaanttcgagacccctagtcctgtgaggtcgaattcgcatgcagcggcagtcgacaacaggaggcagaggcatcatggacggtccccggggatggctggtgctctgtgtgctgcacatatcgctggcctgtatggcgaccgaggacttgtgccgagcgccagacggcaataaaggggtggcttgataacctgacaaacaggggcggccaggcctcatgggggagcatggtgagccgggggcccctggcatccggacaggcatccaaggccttaaaggagaccagggggaacctgggccctctggaaaccccggcaaggtgggctacccagggcccagcggccccctcggggcccgtggcatcccgggaattaaaggcaccaagggcagcccaggaaacatcaaggaccagccgaggccagccttctccgccattcggcggaaccccccaatggggggcaacgtggn

SEQ ID NO: 30869 - DNA, 469 bp, Homo sapiens
  misc_feature (1)...(469): n = A,T,C or G
gaaaaaaaangttgagtccatcatcattgaggtgcaattccagcattctgaaggaagccaactggctcgtggcagggccaggagcagagacgggggaccctctcatgaagcccaagcaagtgagccgagacctgggccttgcagcggacctgtccggtggggcggaaggagcagctgcacagccccaggctgtgttacgccagccggaactgcgggtcatctctgatggcgagcagggtggacagcagggccaccggctggaccatggcggtcacctggagatgagaaaggcccgcgggggggaccatgtgcctgtgtcccacgagcagccgagaggcggggaggacgctgctgtccaggagcccaggcagaggccagagccagagctggggctcaaacgagctgtcccggggggccagaggccggacaatgccaagcccaaccgggacctgaaactgcaggctggctc

SEQ ID NO: 30870 - DNA, 490 bp, Homo sapiens
  misc_feature (1)...(490): n = A,T,C or G
agaatattgaagcgtctcgcannntctagttaccccctggaangccgcggaannncagnnggagccgctctctccggagggaacgtaggcgtttttggtccacattccgggagatagaacgcaggcgcggagaaaggtccagggctggggagagagatcggagaaggagccgctcgcgatccccgcaccgaagacgctcccgatctccaagacgacatagatccacatctccttccccttctcgactgaaagaaagaagagatgaggaaaagaaagaaacaaatgaaacaaagagcaaagaacggcagattacctgaggaagacttagagggcaaaacagaggaagaaatagaaatgatgaagttaatgtgatttgcctcctttgactccacaaaaggtaagaaggtggatggctcttgaaatgcctatgccataaatgtctctcagaagaggaagtacaggcagttcatgaatcgaaaaggtggattcc

SEQ ID NO: 30871 - DNA, 474 bp, Homo sapiens
  misc_feature (1)...(474): n = A,T,C or G
nntgacactgataacctaggccagngcggtggaattccgagcgcgagcggcgccgggaccgggatcgtgaccgtgaccgtgaccgcgagcacaaacggggggagcggggcagtgagcggggcagggatgaggcccgaggtgggggcggtggccaggacaacgggctggagggtctgggcaacgacagccgagacatgtacatggagtctgagggcggcgacggctacctggctccggagaatgggtatttgatggaggctgcgccggagtgaagaggtcgtcctctccatctgctgtgtttggacgcgttcctgcccagccccttgctgtcatcccctcccccaaccttggccacttgagtttgtcctccaagggtaggtgtctcatttgttctggccccttggatttaaaaataaaattaatttcctgttgataacnnnnnncnnanncngaccancccnncccccncncaat

SEQ ID NO: 30872 - DNA, 503 bp, Homo sapiens
  misc_feature (1)...(503): n = A,T,C or G
tgggggggggngggagggaggttaggggnnccatcgaatacactcacagtggtgcaattcggagaatgctgagcgaaggtcaggtgtccctaaggtctgaagaactgaaaggctggaatgtctcctggtgggcaagtgcggggtcaggggtcacagccagcctggaggcctccttccctaactccttgtgggagccacctggagactcaggaatgagcctgcctggggcatgggtcaccgtgcaggaccccagacacacctgggttgaaaccctactgtctccaagcttgggggtcacttccattcttgaacctcagctgccacacctggggggttacacctgtcccgccgtgctcacgttgtgtgtgaggactgggacgacaccgagtaccagacagttttgggccgtcggtgtcgctcagcccctgtgtgctggctccgaccagcagagaccctgacaggtgccttcagacccacctgtgctgaccagtgggggccacggg

SEQ ID NO: 30873 - DNA, 500 bp, Homo sapiens
  misc_feature (1)...(500): n = A,T,C or G
tggccccnnnaggcccanccagcnangacctagcnagnctncgcgaangcggnggaattccgggggagagaggcggcgccccggggccccgaggcggagttcgagtctgacagcggagtcgtgcttcgtcgcatctgggaggctgagaaggacctgtttatctctgatttctggagttcagcactagaaaccatcaatagatgtctcacaaaacatctggaacaactgaaggcccctgtggggactctttcagacatctttggaaacctgcatcttgactcattgccagaggagtcagatgtggccactgattctatcccaagagagatcttggtcacaggaacctgccatttgaagtgtgtgtgttacggcattgggaactttgccacctgcatcgtagctagaaaccagctaacgtttttgctgcttttgatggaaaagtgccacattcccacaagtcactgttgggtatatgaccctctgtttagccaactttgaat

SEQ ID NO: 30874 - DNA, 487 bp, Homo sapiens
  misc_feature (1)...(487): n = A,T,C or G
natctcacctaggtngacttagntgngcnagcaanancnnnnaanannngagagctgnctatgacctgcacaacaacgtacccttcatcggcttgtaccagactatgaccaagaaggcggccatcaccgcacagcggacatacttctccaacgacagcttttatgtggtggtggtggagaagaccgaagaccaagcctgcgggggctccctgcctttctaccccttcgcagaagatgaaccggtcgatcaagggcaccgccagaaaaccctgtcagtgctggtgtctcaagcagtcacgtctgaggcatacgtcagagggatgctcttttgcctgggtatatttctctccttttacctgctgaccgtcctcctggcctgctgggagaactggaggcagaagaagaagaccctgctggtggccattgaccgagcctgcccagaaagcggtcaccctcgagtcctggctgattcttttcctgggcagtc

SEQ ID NO: 30875 - DNA, 521 bp, Homo sapiens
  misc_feature (1)...(521): n = A,T,C or G
cttcgaacttcagtnagcgtggnggaattcgtgacaccccaccccagtcccgtggagggggtctgggcccacccttcacaactgcctttcaaggacagttcagacaaagggccctgcatggaaagagagacctccctttgccttttgcacacgcacctggaaaagacacagaagccaacctgagaacccctggtgctattttaaaggagacatattgctgaacagcagtgagaaaagtctgcaggaactgctgcctgagccaagccagagaaccgaagacccggccggccctggcctcacaggcgtgtgcccatgcagtcacccaaatgcacgcgtgacaacaatgccgggagggtggggggggtgcacaggtagccccgaccctctcaggcattccagacacagaacatcaaagtgagcgagtactgcgctggctgtggcttcagagaacctgtatgtgccacgtggaaaaacaagacaccagagcccaccagacagtgccggccagcagagaagcagag

SEQ ID NO: 30876 - DNA, 464 bp, Homo sapiens
  misc_feature (1)...(464): n = A,T,C or G
agccgnnnnnnnnnnccttcagatcccactcgaagcggcgggaattccctgcctgaaacagacctgcatgaagttctacgcacgcgtctgcagaagtggctcaggcctggttggccgccagcttgaggagttcctgaaccagagctcgcccttctacttctggatgaatggtgaccgcatcgactccctgctggagaacgaccggcagcagacgcacatgctggatgtcatgcaggaccacttcagccgcgcgtccagcatcatagacgagctcttccaggacaggttcttcacccgggagccccaggatacctaccactacctgcccttcagcctgccccaccggaggcctcacttcttctttcccaagtcccgcatcgtccgcagcttgatgcccttctctccgtacgagcccctgaacttccacgccatgttccagcccttccttgagatgatacacgagg

SEQ ID NO: 30877 - DNA, 424 bp, Homo sapiens
  misc_feature (1)...(424): n = A,T,C or G
ggaggtccnnaggtgcccggaactgagacccatagaagtgcggtggaattcggcagcgcggaggccgcacgatgcctggagttactgtaaaagacgtgaaccagcaggagttcgtcagagctctggcagccttcctcaaaaagtccgggaagctgaaagtccccgaatgggtggataccgtcaagctggccaagcacaaagagcttgctccctacgatgagaactggttctacacgcgagctgcttccacagcgcggcacctgtacctccggggtggcgctggggttggctccatgaccaagatctatgggggacgtcagagaaacggcgtcatgcccagccacttcagccgaggctccaagagtgtggcccgccgggtcctccaagccctggaggggctgaaaatggtggaaaaggaccaaga

SEQ ID NO: 30878 - DNA, 463 bp, Homo sapiens
  misc_feature (1)...(463): n = A,T,C or G
tattgagaatccatgcganggcctcaaaacnnccgccaagaggggctgggagcagttggaagttacttgcaccccatacctgaaattttccctcaactttatctggaatgtggaggaccatatgaatcccaagttgccaaacatcagcctggatgtgctacagcccagttttcctgagatcttgctggaatcccacatggtcatgatccgggggaacagtggcctcaaacccaaggacaatgagttcacgtccaaaccctggcactggcctatcaactatcagggcctacgcttctcaagggtcaatgacacagatttccgagtctatctgcttggcaccccggtggtttggtggctgaatctgttgagcatcgccctctacctcctctcagggagcatcattgcttgacccatgcagagaggggcacggctgccagcggaggttgcagggtcgacccacgtc

SEQ ID NO: 30879 - DNA, 492 bp, Homo sapiens
  misc_feature (1)...(492): n = A,T,C or G
tgtgtccnnagccgccccaatcgagaccctagctgagagtcttcggaancagcncncagaaaangaaaggaacacgcagcttctgaaagtgagtaacatcacgttggatagcaagggnttttattttattctggattctgaaggtagaataacttctgattagctacagacatagctatatatgggtaccatattttgctttgtgttgttggaacagtggaagctgtttgagctgtataggctagaaagctacccttagtccactattagaagagaggaagatggaggaagagttccaagttaattttattatcgctcacaacaatcaaatttcttctgtaaagaaaaagggcactcactagtaatgttttagggcactcactagtaatgttttaaaaagtattagcatagggataatcactggcacaaatacaccttcctgcatagctgaggaactaccaaaacaaaacagatcatatagtgtaagatttt

SEQ ID NO: 30880 - DNA, 450 bp, Homo sapiens
  misc_feature (1)...(450): n = A,T,C or G
natcgatgactgtcctcagnggcgngcattctccgtgtctgcacggataggcagaggtgggtggcgcagccgtcagagggacgggagcgtgtgcatccgtttgtcttatccctcataccccactctgggagcacaggaggaacccaagtctgttagatcagtaaactgaaggagcctgctgagctcgtggggctccacgccttgactttgcagccgcagatggagtgtggtacagaaagatcaggggccctggaagccaccagaagcttggactaggaagggagagctgagcctccagggccgtggcatctgttggccatgtgctgggacgggagggagcactggtggccatgccacagtgacaaggtgaaggccctggatggtccacaagacacagcctgtgtttctctccagatcgcaggcccagccagcaggcatggggcccccagc

SEQ ID NO: 30881 - DNA, 486 bp, Homo sapiens
  misc_feature (1)...(486): n = A,T,C or G
aggcggttnnnnaaattgactccgtccgcgtggngcaattcgntatttgaccaaggaacagtggctatgaaaccaggcagaccttgtttaaaatttatctttatcagctactagctgtgtgggccttggcaagtcacttaacaattccaggtacgtgtttcataatttgtgaagtagagctaataatgctgggctcctaaaattgctatctggtaaaagaaaatatcatagcctgtctatctctctctctatctatccatctacctgtctgtgtgtctgtctgtctattatctatctatctatctatctatctatctatctatctatctatgtatctatctatctactattatctactattatctatctatttatctgcctgtctatctttctatcaatctattatctatctgctatcacctatctacctacttacctatcatctatcttcctatctactctcctatctacctacctatttaccag

SEQ ID NO: 30882 - DNA, 482 bp, Homo sapiens
  misc_feature (1)...(482): n = A,T,C or G
gggtttnnnaaatgactgatcgcgtcgcgcgnngcaantncaggagctgtcgggaagatcagaagccagtcatggatgaccagcgcgaccttatctccaacaatgagcaactgcccatgctgggccggcgccctggggccccggagagcaagtgcagccgcggagccctgtacacaggcttttccatcctggtgactctgctcctcgctggccaggccaccaccgcctacttcctgtaccagcagcagggccggctggacaaactgacagtcacctcccagaacctgcagctggagaacctgcgcatgaagcttcccaagcctcccaaggctgtgagcaagatgcgcatggccaccccgctgctgatgcaggcgctgcccatgggagccctgccccaggggcccatgcagaatgccaccaagtatggcaacatgacagaggaccatgtgatgcacctgctccagaatgctgacccccttgag

SEQ ID NO: 30883 - DNA, 509 bp, Homo sapiens
  misc_feature (1)...(509): n = A,T,C or G
ggaagtgccngaaaannntttgaatcgagtaccatcccgagnggngcaattccccggctcatcatcagcactgtcgtggggtgggagtcgggggtaaaggttccgtctgaccctgaggggttgaggatattcaggtggtccagcctcccgcagaagacttccctgtcacccttggcagacaggtttcttctcacacggccctggcccatccactcgccatgaagccctctgtgctcagggtgaagggagccccctccattctggcactgcactgtgggcatgagcttgccttaaaaagaaaggagaggccaggcacggtggctcgtgccctataatcccggcacactgggaggccaaggtgggaggattgctggagtccaggagtttctacatgggagactctgtctctacaaatttttttttttttttgagacagagtctcactttgtcacccaggctggagttcaggggcgtgatctcggttcaagcaacctccgcctcctgggtta

SEQ ID NO: 30884 - DNA, 474 bp, Homo sapiens
  misc_feature (1)...(474): n = A,T,C or G
nttgaaacctatgcaggggatagagaccttctttagtgccnggcacacgctgtcatccacgtgttacctaagagagctttccagcctgtgctaagaaaactgccccacatcatctgcagtaggacgggggagttggagccctggtcaggccactctgctactgaccacagttttctcatctctaaaaaggcgcagtaacaatataattaccgtatgcagtcccccaggatacagggtcaaaggagagcacaaccatcgcagttggaagcccatggggcagcccagtgcagatgcatctgacttacgaaacttcagtgacacctgctctgtgccagacactgaagatggagcagtgaacagcactgacccagcctgtcctcctgttgcctgcaggccagaagcaaggtctcgctgtgttaccctggctggagtgcagtggctacttacaggcatgatcatagcatactgcagcct

SEQ ID NO: 30885 - DNA, 479 bp, Homo sapiens
  misc_feature (1)...(479): n = A,T,C or G
attgatacccttggannnccctgagaccnntcgaagngcggggaantatgggagccgacagatcgccatcgcggccatggtggccaacttcaccaagcccacagccgacgcgccctcgctgctgcagcatgacgaggtggagacctacttccatgagtttggccacgtgatgcaccagctctgctcccaggcggagttcgccatgttcagcgggacccacgtggagcgggactttgtggaggcgccgtcgcagatgctggagaactgggtgtgggagcaggagccgctgctgcggatgtcgcggcactaccgcacaggcagcgccgtgtcccgggagctcctggagaagctcattgagtcccggcaggccaacacaggcctcttcaacctgcgccagatcgtcctcgccaaggtggaccaggccctgcacacgcagacggacgcagaccccgccgaggagtatgcgcggctctgccagg

SEQ ID NO: 30886 - DNA, 469 bp, Homo sapiens
  misc_feature (1)...(469): n = A,T,C or G
aggcggctnnnaatagaactgggagctaacgacanngcgtggaattcgagcaaggggaaggatcgggagtacacagacatcatccggaagcaggtcctgtggaccagggcggacacggagcgtgactgcgtgaaggggcccaccacgctggccgagttctgcgtgaagagcaaggcgccggctcccgacgagggctcaaacctcttctacgacgactactaccaggacggggaggtggagtgatgaggccgacagctgcttcggggacgatgaggatgactctggcacggaggagtcctgacaccaccagaataaacttgccgagtttacctcactagggccggacccgtggctccttagacgacagactacctcacggaggttttgtgctggtccccgtctcctctggttgtttcgttttggctttttctccttccccatgtctgttctgggttttcacgtgcttcaa

SEQ ID NO: 30887 - DNA, 484 bp, Homo sapiens
  misc_feature (1)...(484): n = A,T,C or G
agcggtgnnnnnnaattgaactgcgtcacagtgggcgaatccgtactctccagttctggggctccccgagtgaggagggaacgggaagtcggtgccttggtttcagctgatttggggggaaatgccttaatttcactctcctcccttctccagcctcaggggaggatctggaggatccactactgtctttaagatgcagagtggaggggaggtgggcacccaccctgcgattctccaccctttccccttctttcgtcctcaccatctctgcagacccctctcctcctccttcctcttggnctccacaactgaggggaggctggtgcccaagctgtggcctgcagtctgtgaggagggctgtcttgcctcacactcctcacagcctacttccccttccccggggctgagagggtgaaagtgtgtggggaaggagaggactggtttcctgggttctcaggggccaggaggagtaacagaaccaggg

SEQ ID NO: 30888 - DNA, 483 bp, Homo sapiens
  misc_feature (1)...(483): n = A,T,C or G
cgacgtccaatgagaaccntntttgagagcnttaggaagngcggnggaanncgggacatgaagcgtcgcggggtctccttcccctgaccttcagaatccaggcttccggtaggaccacagcaggggcattgatcacaatgacccacctgttctagacattaatgaagtagggggagaaaagacaggtgcccccatcctggagggctcttctctcctgaaacactagctgctttgcactatggtgggcttcaggcattacactttccaccaagaccatggagagctttccacattccgtccctaagagacatccctgggctctgtcctgtctgtccccgcagtgtctgtgtctgatgaggcccgcgcagaagtgaatggcctgaaggcctctcgcttcttcagtctcgctgagcggctgaatgtgggtgccgcacctttcatctggctcttcatccgccctccgtggncggngagcggaagctg

SEQ ID NO: 30889 - DNA, 484 bp, Homo sapiens
  misc_feature (1)...(484): n = A,T,C or G
ggtccccagggccccatgagacccctagtggctgcgaaanncnnnnnnnnnngnnataacnataggtttacagtctttatttgtttaaaagtaaagcacattgtatgtatttatttggcaatacatgaggccattaagaccctgagcctaaggtaccacagttagtctcatttgcctcttgtcctgtgaactccacttagaatgtcattgaacttgggcagacataattctagtgtctgttccaaacgcactgtgtcacagaagctagaattaccattagaggcacaaacccctgagaatacacaagggggcacgcttccagtagatgtgttggggaaggaggagggcagaggggacaggggacaggattcagctttgtggtgggtcctgagggttcctaccaggggtagccaggatctgggaaacagatcagcgactctagtctgaagtggctgcctggttcggaggctgccttcagcaagat

SEQ ID NO: 30890 - DNA, 461 bp, Homo sapiens
  misc_feature (1)...(461): n = A,T,C or G
atttgagaccactgtcgagngccgtggaatnccgcccctggaccgggacacgggccggctggagccctcggcacacaggctgctggtggccaccgtgtgcacgcagtttgggctctggacgccacactatctgatcctgctggggcacacggtcatcatctcgcgagggaagcccgtggacgcacactacctggggctactgcactttgtgaaggatttctccaaactcctggccttctccagcagctttgtgacaccacttctctaccgctacatgaaccagagcttccccagcaagctccaacggctgatgaaaaagctgccctgcggggaccggcactgctccccggaccacatgggggtgcagcaggtgctggcgtaggcggcccagccctcctggggagacgtgactctggtggacgcagagcacttagttaccctggacgctccccacatccttc

SEQ ID NO: 30891 - DNA, 493 bp, Homo sapiens
  misc_feature (1)...(493): n = A,T,C or G
tggtcccnnagggccccatgagaccnccaggtacctgcagaagngcgnggaannngnnagaggagagacactgaccacttcttcttttgaagattctaccagtttccattctgtctgttgtcacctctagaaataccacatcatgtttttttccttgaaatctttcagtataaaaccagcaaagaaggcagtacggagggggtcacagagtcccacgcatccctgctggcacagtgccgggctctgacccaagcgtgcgggtactcagaaggtaagggctctcgggggtggggcggtggcccctccagcctcacacagatacctgacgtacctaatcatgtgactgtcactgcacctgtcaaaaccacccctgggtagtgcctttgcccattaatccaggtcatgccaggtagggagatgcactgtctttagcatgcttacagggtctctgtggttgtgctggccaagagggcacacggtgtctcttagcaan

SEQ ID NO: 30892 - DNA, 470 bp, Homo sapiens
  misc_feature (1)...(470): n = A,T,C or G
aggaagtggcttttgaaaccctttttgatacctagtcagngcggggaatccggccgaccttcgcccgaggcaccggggcgccgggacggcgaagatgtcggcttccttagtccgggcaactgtccgggctgtgagcaagaggaagctgcagcccacccgggcagccctcaccctgacaccttcagcagtaaacaagataaaacaacttcttaaagataagcctgagcatgtaggtgtaaaagttggtgtccgaaccaggggctgtaatggcctttcttatactctagaatatacaaagacaaaaggagattctgatgaagaagttattcaagatgaattgaggccatcaagctgcagatggtcttacaaatggaacctcaaatgagctcaactaacaacttctaccaaggacccctggactgacccactggccctttcactggcctaaagagttcccctctggaggacac

SEQ ID NO: 30893 - DNA, 473 bp, Homo sapiens
  misc_feature (1)...(473): n = A,T,C or G
cggaagtgnnttttgagccccccctgatgatactaggcagngcggnggaattctccagcaccatgtctggtttgactgtcccaccagcccggcacggcccttttccgttttcgttgctgcttttggtcctgctcggccccagagtgggccttgccatctcctttggtttgcccattaactctcgcatgtgcctccgtgaggagattaacaaggacctgctactgactggcgcgtacgaaatctccgaccagtctgggggcgctggcggcctgcgcagccacctcaagatcacagattctgctggccatattctctactccaaagaggatgcaaccaaggggaaatttgcctttaccactgaagattatgacatgtttgaagtgtgttttgagagcatgggaacagggcggatacctgaccaactcgtgatcctagacatgaagcatggagtggaggcgaaaaattacgaagag

SEQ ID NO: 30894 - DNA, 463 bp, Homo sapiens
  misc_feature (1)...(463): n = A,T,C or G
ntttgatagcactctttgatggcgtaanncgggcagataccgtgctgccggggctggactgcaccttttctaagggctatcaaggtctcacaaactgtttgatggccgccctgccggaggacactgtagtgtttgagaagcgtgtgaagaccatccactggaacgggtccttccaggaggcagcctttcccggggagacctttccagtgtcggtagagtgtgaggatggagaccggttcccggcgcaccatgtcatcgtcaccgtgcccttaggttttcttagggaacatttggacaccttctttgaccctcccctgccggctgagaaggcagaagcaatcaggaagataggctttgggaccaacaacaaaatcttcctggagtttgaggagcccttctgggagccagactgccagctgatccagctggtgtgggaggacacgtcgcccctggaggatgctgg

SEQ ID NO: 30895 - DNA, 471 bp, Homo sapiens
  misc_feature (1)...(471): n = A,T,C or G
catcgagaccctaattcgatgacattagnccagngcggnggaantcgccaaactgggcatccgctacatcctcaatgtcacccccaacctcttaaacttcttttagaagaatggtgactttcactacaagcagatccccatctccgaccactggagccagaacctgtcgcggttctttccggaggccattgagttcattgatgaggccttgtcccagaactgcggggtgctcgtccactgcttggcgggggtcagccgttctgtcaccgtcactgtggcctacctcatgcagaagctccacctctctctcaacgatgcctatgacctggtcaagaggaagaagtctaacatctcccccaacttcaacttcatggggcagttgctggactttgagcgcagcttgcggctggaggagcgccactcgcaggagcagggcagtggggggcaggcatctgcggcctccaacccgcc

SEQ ID NO: 30896 - DNA, 468 bp, Homo sapiens
  misc_feature (1)...(468): n = A,T,C or G
gaaccgccnnttttgagaccccatcgatngcntgaaanccagccncccaacacacgagtgttcacccgcctggatgagacacctctgtggacttgttagtgaaggctgtttatttgggcaatgctggaggccgtgcaggtgggaggtgggacaggggcaagaggccggggcccaggcaggagctgacagcccaccagtggtgctcccctgagaagcaacctcagtgggtggcttggggtctgctgggctgtccccacactgacaccctggctgcagggcccccctgtgtccccagtgaggggtctcgggagctgtgtgtcctactcagggccatccctgcagcccatgctctctgggtgaccagttgccagcagtgtcccccctgccttgggcggaggctgaggaccccagggtgggagggaaggtgcggtgggggctcatccaatgctgtccagcctgagggtccct

SEQ ID NO: 30897 - DNA, 544 bp, Homo sapiens
  misc_feature (1)...(544): n = A,T,C or G
aggtnnnnaggaggccnnnnnnnnattgacatcgatccatgtccgagtggtgcaattccttatattaaatgacagcaggtgtctcttggcccagtggaaataattgatgtggtgctatactatggctttatgtctttatccttgacacatgggttctccccacagtcccccaaaaagagaggatttaaatatgtataggtttacttacaaacatctgcccaaagggtattagagtagcatggaaagtggaaaatcatttagacttgttgaacttctgctttgtgctgaatactgtgctagaaattcaatggactcagtgtccctgtgaggagagggtcctgctgagctgatggggaagcgaagcccagcctggtgcagcctggcctggagtcacacagcgtgtgtgaaagagcctagaaccaagccgcgcctggcccaggggggaagcagccctgccagtgcacgcagacttgttcccgtgtcactgacctcatcctcatcgtgggttgctctggtttgccttggtcaatattaatcatttccc

SEQ ID NO: 30898 - DNA, 473 bp, Homo sapiens
  misc_feature (1)...(473): n = A,T,C or G
cgcaccgcaatcgatgacctaatcgagcgccgttaatncggnggatggacagaccgacatcccattcacgaggctgggacgaagccaccggagacagtcgtgcagtgtggcccgggtgggtctgggtctcttgctgttgctgatgggggccgggctggccgtccaaggctggttcctcctgcagctgcactggcgtctaggagagatggtcacccgcctgcctgacggacctgcaggctcctgggagcagctgatacaagagcgaaggtctcacgaggtcaacccagcagcgcatctcacaggggccaactccagcttgaccggcagcggggggccgctgttatgggagactcagctgggcctggccttcctgaggggcctcagctaccacgatggggcccttgtggtcaccaaagctggctactactacatctactccaaggtgcagctgggcggtgtgggctgcccgctgg

SEQ ID NO: 30899 - DNA, 479 bp, Homo sapiens
  misc_feature (1)...(479): n = A,T,C or G
cggacggcctttgagnaccttctatctagactacgcgnaanngcggnggaannccgnggcagaagaagatggacactccatcatagtggaaccggagattatgggtaaatatgtggtctgttttgatccccttgagggatcttccgacatctattggcttgtgtccggtggaaccatttttggcatctatagaaagaaatcaactgatgagccttctgagaaggatgctctgcaaccaggccgtaacctggtggcagccggctacgcactgtatggcagtgccaccatgctggtccttgccatggactgtggggtcaactgcttcatgctggacccggccatctgggatttcattttggtggacaaggatgtgaatataaaaaagaaaggtataatctactgccttatcgagggctacgccaaggactttgaccctgccgtcactgagtacatccagaggaagaagttccccccagatt

SEQ ID NO: 30900 - DNA, 486 bp, Homo sapiens
  misc_feature (1)...(486): n = A,T,C or G
tgcggcctnnnnnnnaattgagctgcattanctctaggccanngcgnggaattctttcttttgtatttgccttgaaaggccaaaatatttttatattgccacagactttgcctcctatttaaaaatgaactccatgtccgtcgtttcccaccaggagactatgtaccatgtgtgtgtctctatgtattctggggtcttgaaacaggtttctcatggggatggtcattcaccacagtccagaggggcagaacaggcggcgcttgccttgcccagggggcctggggaacgtgggccctcatctcagatctgcccccagtatgtttaggacgcgagccccagaaggatctgggagtaaacttaacattcactgtgtctctgctctgcatccgccatttgtgtgtgtttctggactgtgggctgtgtgtaccttggttggtgactcagtgagaagaagcaggaatgccagagatactgtgaatgttctga

SEQ ID NO: 30901 - DNA, 473 bp, Homo sapiens
  misc_feature (1)...(473): n = A,T,C or G
nctcgatagcactacgctagngcggnggaattcagggaggaggcggctgctcccaggtggcatctccctgcccttgggtgcaaagtgctgccctcaccactctcccacctcccctacttccttgaaaaccactctgatgtcacaactgagtgtctgttccgtttcagatacccagggctgctgcccagttctgtaaacgcagcccagctaaagctctgctgtctcaagtgtgcatttatacccaggtgatttggacggagcagctaccatggcgtggacgccttcactgaactccgggctgcagtgcagggagctcagagcagtgctgctaccaaacagtttttaactttgaacaactgtgtcaggcaatggatttgaattttaagtgtattaatagctgtgctctgtgtcgtangcaaaattccactgaaggagcctctgtgccctgcagccggcagcgcggctgaagcatn

SEQ ID NO: 30902 - DNA, 470 bp, Homo sapiens
  misc_feature (1)...(470): n = A,T,C or G
cgccgagcttcgagagcctgtnttgagcgcgctcgacacncagggcccancgaggcggccttcacggcggtcaactgtcaggggaagacctattttttcaagggttttcagtactggcgctttgaggatggtgtcctggaccctgttgacccccgaaagatctctgacggcttcgatggcatcccggacaacgtggatgcagccttggccctccctgcccatagctacagtggccgggagcggccctacttcttcaaggggaaacagcactgtgagtaccagttcctgcaccagcccaggcaggaggagtgcgaaggcagctccctgtcggctgtgtttgaacactttgccatgatgcagcgggacagctgggaggacatcttcgagcttctcttctggggcagaacctctgctggtaccagacagccccagttcattatccgggactggcacggggtgccagggcaagg

SEQ ID NO: 30903 - DNA, 482 bp, Homo sapiens
  misc_feature (1)...(482): n = A,T,C or G
ggcacagccttttgagngccttcctcatgatgacactaggacagngcggnggaanncgagagattcaaagcctgcacgactctgtttcccccgtcccttctgtatttaatttgctctaagtcatttgcactggttggagttgtggagacggccttgagtctcggtgcgagtgtgcgtgagtgtgagccaccttggcaagtgcctgcgcagggcccggccgccctccatctgggccgggtgactgggcgccggctgtgtgcccgaggcctcaccctgccctcgcctagtctggaagctccgaccgacatcacggagcagccttcaagcattccattacgccccatctcgctctgtgcccctccccaccagggcttcagcaggagccctggactcatcatcaataaacactgttacngcgnaaaaaaaaaaaaaaaaaaaaaaaaaaaaaaagcgccctttttaattaaaggggcctgttaaac

SEQ ID NO: 30904 - DNA, 471 bp, Homo sapiens
  misc_feature (1)...(471): n = A,T,C or G
gggagcgggccngnnnaatcgagaaaactanntatactggaagnngcgnggaanncgtagagcaactacacaattagtgcttcataaaacatagattgagatacttagcctatcagttttgtcctctaccttcacttttccaggtttaacagctctagttgctttcatcttttttgtatatctgtggtatattgaaatgactaaacagtaagttttgattgagaattctaggttgagaaataagtaggctgaatgtagtaattccagcccttatacattggctttctgctcctatcaggaggttcccatgatccctcggccccactatgcccaacctggctgtgtctacttcatctgtttgctccgagatgacttgctgcttcgtcagggtatgtatacaggagctaatcctacttgtcagaggtgacctttctgaatagtaggaagtctctgctgtctccatcatagtca

SEQ ID NO: 30905 - DNA, 533 bp, Homo sapiens
  misc_feature (1)...(533): n = A,T,C or G
ggggnaggagcgnnnnnnnnncttgacatcgtccacgggggaatcccgctcttgacttcacagaactggatgttgctgctgagaagattgacaggttcatgcaggctgtgacaggatggaagactggctgctccctgatgggagccagtgtggacagcaccctggctttcaacacctacgtccacttccaagggaagatgaagggcttctccctgctggccgagccccaggagttctgggtggacaacagcacctcagtgtctgttcccatgctctctggcatgggcaccttccagcactggagtgacatccaggacaacttctcggtgactcaagtgcccttcactgagagcgcctgcctgctgctgatccagcctcactatgcctctgacctggacaaggtggagggtctcactttccagcaaaactccctcaactggatgaagaaactgtctccccggaccatccacctgaccatgccccaactggtgctgcaaggatcttatgacctgcangacctgctcgcccaggct

SEQ ID NO: 30906 - DNA, 466 bp, Homo sapiens
  misc_feature (1)...(466): n = A,T,C or G
tgccnntnnnnnnnnncccaaaagactagcagaagncncgnggaatttctgaggcaggagaatcgcttgaacccaggaggcagagattgcagtaagccaagatcgtgccattgcactccagcctgaacagagcgagactccgtctcaaaaaaaaaaaaaaaaaaagggggccgttcaattttaaggggccttttaaaaccccttgaaaaccctgaaggggccctttaaggagacagcattctgttttttcccccccccccgccctttttttgaccctggagggggccaccccaatgggcttttcttaaaaaaaggagaaaatgggctccctttgttggattgggggtgttattcttccgttggggaaccggccgtcttgcaaggactccacccggatcccaataattgacaacatgttttgggctgtttttttttcaagccgcctttgttagctgtgaggacgagg

SEQ ID NO: 30907 - DNA, 481 bp, Homo sapiens
  misc_feature (1)...(481): n = A,T,C or G
nattggagaccccttgcagnggcggatgatagccgttgctcctgccgcagacattgtcggtgctcactttgcacctggacctgctctttgttcaccaccaccacctgcctctgggcccacctcaggcccctgcccctccaggccgacctccagctctgcagcagactatgcaagccatgctgcactttgggggccggctggcccagagccttcgggggactttcaaggaagctgcttcagacccctctgactctccaaaccttcccacaccagggagctggtgggagcagttgacccacgcctcccgggtctatgcctctgggggcactgagggctttcctctttcccgatgggcaccggggcgtcatgggactgcagctgaagaaggtgcacaggagagacccctgcccacagatgagatggcaccaggcaggggcctctggttgggaagactatttggagtgcctgggggccccacaag

SEQ ID NO: 30908 - DNA, 473 bp, Homo sapiens
ggcacgttttgatagcctctttgtagcctacccggcggggaatcggggttggaggctgtggtgagctatgatggcgccctgcactctttcctgaacaagtttgagaccctgtctacaaaagaagaaaggctgtgcctgcgtctagcccctgcctctcttcggtccatttttctccctttgtcttaggagtctgaggctctggcccacccctccccaccttcagtgtgtttccttccacggggtgaggtacaaagagggagggctggggtcagggctgggcacagggcgggatgaggtgggtgagggtacccgtgagcttctcgccaggtctcctgccccacccacaactcccccagccgctgaggagcccccgtcagagctggggttgaagaggcagcttgtccccccaccttcaggaatggcagcctgcagcaactggaacaaggccccaccgtaaagctctgtgtgtcccg

SEQ ID NO: 30909 - DNA, 436 bp, Homo sapiens
gcaggagaaccccttgaaccggggaggcgaaggttgcagtgagtcgaggtcgcgccactgcactccagcctgagcgacagagcaagactccacctcaaaaaaaaaaaaaaaaaaaaaagattttggggggggggcccaccccaccctttgaaaaaaaaaaaatttggtttttttaaaaaaaaaaaaattggggggccaaattttttttggataaccgggaaaaggggcccccaaacccccaatttttttttttttttccggggtttaaaagggggaaaaacccaagggggggggttttttccccttttttaaaaaaaaaaatcctttttttttaaaaaaaaaatttttttttggaaaaaaaaattattggcttgaaaagggaatcaaaaccttgggggggaaaacaaccgtttttaaaggaaaaaagtttttttaa

SEQ ID NO: 30910 - DNA, 466 bp, Homo sapiens
  misc_feature (1)...(466): n = A,T,C or G
nattgacncccattgagancntaggcagngngcnggaattcgagcccaccagcagtggtggagatgtcggtccatgagcgcacacacaagactgagggactgtcggccctcccaggtggtgtcaacacaacatcacacacaggtgggggggcctgatagcccagcacccatgatacagggcctaccaatgcttaaaaccacacccagggagcccacagaggcactcagtgggtggtggggtgatggatacacatctatcaggcacagggcggaggtgggcaccactgagttgcactcagcaaacacattgggtatcttgtgcccaaggcctgtatttgtggagctgatgttctagtgagagacagtaaatgtgacaaaagtaaaatatatcagatggtgagaaaacagaaaaatgagatcagaagtggagatgttggggccaggcacagtggcccaggcctgtaat

SEQ ID NO: 30911 - DNA, 468 bp, Homo sapiens
  misc_feature (1)...(468): n = A,T,C or G
natcgaagaccatgtcgagngccgntgaanncgagcacctgggttggtcccgaagcctccaaccacctgcacgcctgccagggcctctctgttgcagccatgaagtccctcgtcctgctcctttgtcttgctcagctctggggctgccactcatccccacatggcccagggctgatttatagacaaccgaactgcgatgatccataaactgaggaagcagctctggtggctatagactacatcaatcaaaaccttccttggggatacaaacacaccttgaaccagattgatgaagtaaaggtgtggactcaccagccctccggagagctgtttgagattgaaatagacaccctggaaaccacctgccatgtgctggaccccacccctgtggcaagatgcagcgtgaggcaactgaaggagcatgctgtcgaaggagactgtgatttccagctgttgaaactagatggg

SEQ ID NO: 30912 - DNA, 274 bp, Homo sapiens
gacactgtcgctttgtaccagcaagggtcattgtatcctagatgacttgattgtaaccaatacttctgagggccacctgtatgtggtgtccaacgctggctgctgggagaaagatttggccctcatgcaggacaaggtcagggagcttcagaaccagggcagagatgtgggcctggaggtgttggataatgccctgctagctctgcaaggccccacttgagcccaggtactacaggccggcgtggcagatgacctgaggaaactgcccttcatg

SEQ ID NO: 30913 - DNA, 492 bp, Homo sapiens
  misc_feature (1)...(492): n = A,T,C or G
ngatcgatncccctcnnnannnnnccnatcgaagaccactantcagtgtcgtggaattcctgcctgcaccgtcgtcacggcccagcctgcaggtgatcttcctcgcgcccccgcctgactctgagtgcccctccctcagtcagacacagtgtcgtcgccctgcaggaagccagggggcccgtctgctgctcgtggccaggctgggccttggggtgcccgaccccctccagagcaagccccttagatgcccggcagggtcctctctaccctcccatcccctgggaggtttccccacactgtgtccagtgtgaggctgaagttgagatcatagcacaggaggctctggggtccttgaagaatgaggcgcttgatgatgagcaggatctgagtgctgcctggaggaggtttgaggtcatcaatggacaggcagcttgtcccagtacttggaacttggggcagcagagctgcctagctgggcacaacctgggcccn

SEQ ID NO: 30914 - DNA, 486 bp, Homo sapiens
  misc_feature (1)...(486): n = A,T,C or G
naatcggagancccctangccagngncgngttagacgtgcctttgtgtgaagacactgaaagtgtgctgctctccaggaacctacggtcccgactgtctcgcatgccagggcggattccagaggccctgcagcgggaatggccactgcagcggagatgggagcagacagggcgacgggtcctgccggtgccacatggggtaccagggcccgctgtgcactgactgcatggacggctacttcagctcgctccggaacgagacccacagcatctgcacagtcaggaccggcctctccgattcttacccgccttgctgtctgtctcttggatgttggcgtggcgtgggccacgcatggatccgtggccggaacacgcacacccagccaggctacagctccagagtatggatagctgccttctctccagcctgtgacgagtcctgcaagacgtgctcgggcctgaccaacagagactgcggcgagtgtgg

SEQ ID NO: 30915 - DNA, 471 bp, Homo sapiens
  misc_feature (1)...(471): n = A,T,C or G
aatcgatnagcctccgtagagcgccgttaanncggngaggnnagccaaggcccttgtaaatgactactgctgtttggggccggcatccattcagacgctgattcagatattcagtgccagcccgagattctgctgtcagttcatgacctccgttaccgcgctctatgacctgtcatcagatgacctcattccacctatggacttgcttgaaatgattgtcacctggatttttgaggacccaaggttgattctcatcacttttttaaatactccgagtgcggccaatctgccaataggattcttacagctcaccccgctcgttggattgatccgctggtgcgtgaaggcacccctggcttataaaaggaataagaagccccccttatccaatggccatgtcagcaacaaggtcacaaaggacccgggcgtggggatggacagagactcccacctcttgtactcaaaactccn

SEQ ID NO: 30916 - DNA, 480 bp, Homo sapiens
  misc_feature (1)...(480): n = A,T,C or G
aganactgcatatgatnaccactcatagagcgccgtaanaccanccaactagcgggccgaaccaggagcaggtgtccccacttaccctcctcaagttgtgcaaccaggagtctggtggccagactgccctgaagagtcccccaggagtctgcagcagagaccccaccccagagcagacccacaggctggcccgggccatgatggccttcactgccgacctgttctccctggtggctcaaacgtccacctgccccaacctcatcctgtcacccctgagtgtggccctggcgctgtctcacctggcactaggtgctcagaaccacacgttgcagaggctgcaacaggtgctgcacgcaggctcagggccctgcctcccccatctgctgagccgcctctgccaggacctgggccccggcgcgttccgactggctgccaggatgtacctgcagaaaggatttcccatcaaagaagatttcctgg

SEQ ID NO: 30917 - DNA, 558 bp, Homo sapiens
  misc_feature (1)...(558): n = A,T,C or G
tcacatcattaagtcacttttagcatctacatacattctttacatacaattattatcataaagttacaaacacacaccnaagcgcggcacccngntttgagaccttcgaganctctcgccangngcnnggaancccgnggacgacggcaccatgaagggagaggngctgcctgccctgaccgacaactacatgtacctggncattgatgatgagaccaaggaggctgccattgtggatccggtgcatccccagaaggtcgtggacgcggcgagaaagcacggggtgaaactgaccacagtgctcaccacccaccaccactgggaccatgctggcgggaatgagaaactggtcaagctggagtcgggactgaaggtgtacgggggtgacgaccgtatcggggccctgactcacaagatcactcacctgtccacactgcaggtggggtctctgaacgtcaagtgcctggcgaccccgtgccacacttcaggacacatttgttacttcgtgagcaagcccggaggctcggagccccctgccgtgttcacaggtgacacctt

SEQ ID NO: 30918 - DNA, 495 bp, Homo sapiens
  misc_feature (1)...(495): n = A,T,C or G
aggagattcncnaggggnnnnnnnaatcgaagaccctattcgagtgtcgtggaattccttctaatgattagaatgtggctgaagtgcaagtgtgtgtcactgtggtttctgctttgttctcccttggattgtctgccgcaggggctgcctgtcacgagggcactcaagctgcctgcagagaggcccatacggggagcatctaaggtcccgccaacagctggcaccaacttgccaaccatccgggaagaagaccctccagccccagtcaagcttgcaaatggctgtggctctggctgatgtctcaactgcaacctcttgaaagactccaagccagaatgttcctgaatttctgaccccccaagactgtgagatatattaaatgtgtattgttattttaaaaaaaaaaaannaaaaaaaaaaacaataaaacaaacncnncgctcctaaatttnnaanntttttgttataccaatattcatcctctgaaatcattta

SEQ ID NO: 30919 - DNA, 462 bp, Homo sapiens
  misc_feature (1)...(462): n = A,T,C or G
natgagacctatcgaagncgctggaaancgncgngaccggctgggccacactcaacgtgggacgaagcttcgcctactgtttgactacgtgcgtgcagcctcccctcgatgacggccctcgaaaagagcatgcacctcggccggcttccctctcgcccacctctacccggcagtgggggcagacagagcggagccaagatgcgaatgggccctggaagaaagcggtacttttcccctgttccttggagtcagtattttgagtccatggaagatgtagaagtagagaatgaaactggcaaggatacttttcgagtctacaagagtggttcagagggtccagtcctgctccttctgcatggaggaggtcattctgccctttcttgggctgtgttcacggcagcgattattagtagagttcagtgtaggattgtagctttggatctgcgaagtcatggtgaaacn

SEQ ID NO: 30920 - DNA, 484 bp, Homo sapiens
  misc_feature (1)...(484): n = A,T,C or G
natcgcgatccctagtccagtgtggngtagttcttcctattgtatctagttatctatccaaataaacactgatgataaattgaatcaatagtttcaggtctaaaaaacattaccttgaatcaatttatcatcagtgtttatttctattgtatctagttatctatccaaataattgtattggcttagcggagactgtatgttaagtgtattagttttagattgtgaaattgtgcagtttaggtaaacatcaaatccctttatttttgtacagcagatttccagcattagaaccatgtagaacaaatatactagatgttaaagattacacaataaaggaacttggcaaacccccnnaaaaaaaaaaaaaaaaaaaaaaaaaaaaaaaaaaaaaaaannnggggcccccccttttattaaaagggccctttaaacccccggaaacacccctgggggggtttttttatacccccctttttgttttccg

SEQ ID NO: 30921 - DNA, 482 bp, Homo sapiens
  misc_feature (1)...(482): n = A,T,C or G
ngatcgagaccatagtccatgtggtgtaattccccggctcgagcggctgcacacacaagtaacattgagctgcatggacaggagccttgagctggcgtgtgggaattgagcgccatgtcaggctgttgtgggtatccccctggcagggccagctaggcctgtggttccctgctccgactctcagggctgcctccctgagctccagggccagaatgcctggatgcctgggtagccagtttggggagtgggctgcaaggggcagccagcagctcccactggtgtgtcactgcatccattgccacctcctgttcgtgacctgacagggtgacacagcccctttcacactctgtcctcctatcttcctgggtagatgccctggtgtagggctgagtactgaatggtcttccatccccagcaagggggtgcagcccagggtcaggcccttcaaagccagggcagaggatgcacggtggctagagccg

SEQ ID NO: 30922 - DNA, 472 bp, Homo sapiens
  misc_feature (1)...(472): n = A,T,C or G
ntttgacagacgtccgctaggacacgngcgnggaantcgacgcgggggggcaccgacggagttctaatgacggccgtgattggtgcaggatcctgctaatctcaggaaggcccgtagagaagggcagacactggcctcagatacctgacctggtaccctctatgaggcctgcggtgctgggctccccagaccgagcacccccagaagatgaggggcctgtcatggtgaagctagaggactctgaggaggagggtgaggctgccttatgggacccaggccctgaagctgcacgcctgcgtttccggtgcttccactatgaggaggccacagggccccaagaggccctggcccagctccgagagctgtgtcgccagtggctgcgtccagaggtcacagtccaggtgcagggccaggaggtcctatcagagaagatggagccctccagtttccagcccctacctgaaactgagcg

SEQ ID NO: 30923 - DNA, 473 bp, Homo sapiens
  misc_feature (1)...(473): n = A,T,C or G
ggcccaggcttttgagaccatgncctggaggacgatttccaggtggcccgtgtggacgtcagcagcaaggtggaggtggtgtgggctgacaactcaaagaccatcatcctgccccagcacttgtacaacatagagtctgagattgaggagtcagactacgattcggtagaaggcagcaccagcggggcatcctcggatgaatgggaagatgatagtgacagctgggagacggacaatgggctggtggaggacgagcaccccaagatagaggagccccccatcccacccctggagcagccggtggcccctgaggacaagggagtggtgatcagtgaagaggcagccacagctgccgtccagggggctgtggccatggctgcccccatggccgggctgatggagaaggctggcaaggacgggccacccaagagcttccgggagttgaaagaggccatcaagatcctggagagcct

SEQ ID NO: 30924 - DNA, 459 bp, Homo sapiens
  misc_feature (1)...(459): n = A,T,C or G
ctcgagaccctagatcgagnggcgtaattcacactggggtgggaagagggggacatggaggtggagagctcttgtcgggtggaggctggcggagagtggggagcagcaggaatgtaaagctggacacgggcaggacacgccctgcctgagctccgaccctattagacctgcaatcagggctgagcatgaggctatcaggtccggctcagccgggagtggaaggtgggtgtgggatccaggcggaaggtaggggttgacccaaattgctctgttcagccaggcttggggccccaggttctgcctcttcaaaggtgactctaagggagggctcctggcagctggggccttgtgttcctggagcaggccttcagctgagctggggcatctggcagaggacacacaatccagccccgatggattgagccgcggcctgcaggtcttcgtccaggctcgggtctt

SEQ ID NO: 30925 - DNA, 483 bp, Homo sapiens
  misc_feature (1)...(483): n = A,T,C or G
gcagtcccgggggcncgncnaatcgagnccctntttgtagaccctaggccangtggnggaattcccacgccaaggggctaggcagggcttcgcggggcctggcccaaggtctccagcagagcaataacatcttcccaggttgggttgccacagacaccgtgccctggagcccccagcccatcccatctggtgctaccctgtctgcctggcagcctagcctcacccctcctgtccggtcacctgggggtccttggtaaggatgcagccacatggggccggtttatgcacctgggcgagaacctgactggggcaggggatgctcaggggcctgcaggtctcccacagagctgcttttctgcccgcctcaccctgtgggtttgtatttcttgccgggtcaaaataggcagagactcgtgcctttcctcctcagggccggcggcagggtgtggacccagctggccgctggaccgttcccttnctcan

SEQ ID NO: 30926 - DNA, 503 bp, Homo sapiens
  misc_feature (1)...(503): n = A,T,C or G
agccctggaacaccgtccagagtngggttagacgaacgctgggccatgggaccctggaggcagagctggagccacggctgttggaggcgttgcagggcctattcatggctgaggtggccgcggggggctggcattctgtgtgtgtgagtgagactggggatatttatatctggggctggaatgaatcagggcagctggccctgcccaccaggaacctggcagaggatggagagactgtcgcaagggaagccacagaactgaatgaagatggttctcaggtgaagagaacgggtggggctgaggatggagcccctgcccccttcatagctgtccagcccttcccggcattactggatctccccatgggctcagatgcagtcaaggccagctgtggatcccggcacacagctgtggtgacacgtgagtggggctgggaggcactccgctccactcgagctggtgcctacggaagggggtgtggtcgacggaaaaacttctgtctt

SEQ ID NO: 30927 - DNA, 513 bp, Homo sapiens
  misc_feature (1)...(513): n = A,T,C or G
aggtttgatncccctnnngnnnnnncctcgatccacagtccagagtggnggaattcggngttccccctcagcccgtgagcagccatgtccaaccccagcgccccaccaccatatgaagaccgcaaccccctgtacccaggccctctgccccctgggggctatgggcagccatctgtcctgccaggagggtatcctgcctaccctggctacccgcagcctggctacggtcaccctgctggctacccacagcccatgccccccacccacccgatgcccatgaactacggtgagtcctggaagggcagatggaaggtgggtgggagggacagcacttggagcagatgaggccaccgcctcctgccccttttctcttctagtttcccttaaatccctttctcatcttctctgttgagatctctccctctgtttctgtctttgttaccctccactttttgcctcagcaactggcccccagccacttgctgccccctttgttcaaggagatccatgagg

SEQ ID NO: 30928 - DNA, 488 bp, Homo sapiens
  misc_feature (1)...(488): n = A,T,C or G
agggccccaggncccccctaggtggcattgagagcgtcgaancacacnnngcagtgagacgtctgtgcctagcaatatttccagttgaccaaatattctaatcttttttcatttatatgcaaaagaaatagttttaagtaactttttatagcaagatgatacaatggtatgagtgtaatctaaacttccttgtggtattaccttgcatgctgctacttttattttattccttgtaattaagtcacaggcaggacccagtttccagagagcaggcggggccgcccagtgggtcaggcacagggagccccggtcctatcttagagcccctgagcttcaaggaaggggcgggcgtgtcgccgcctctggcatcgcctccggatgccttacaccacgccttcacctgcagtcgcctagaaaacttgctctcaaacttcagggttttttcttccttcaaattttggaccaaagtctcatttctgtgttttgcn

SEQ ID NO: 30929 - DNA, 472 bp, Homo sapiens
  misc_feature (1)...(472): n = A,T,C or G
nactgatagcactagttagagcgcnggaattcgaaagaagtggagacagtcctttcccaccattcctgcctttaagccaaagaaacaagctgtgcaggcatggtcccttaaggcacagtgggagctgagctggaaggggccacgtggatgggcaaagcttgtcaaagatgccccctccaggagagagccaggatgcccagatgaactgactgaaggaaaagcaagaaacagtttcttgcttggaagccaggtacaggagaggcagcatgcttgggctgacccagcatctcccagcaagacctcatctgtggagctgccacagagaagtttgtagccaggtactgcattctctcccatcctggggcagcactccccagagctgtgccagcagggggggctgtgccaacctgttcttagagtgtagctgtaagggcagtgcccatgtgtacattctgcctagagtgtagcctaa

SEQ ID NO: 30930 - DNA, 475 bp, Homo sapiens
  misc_feature (1)...(475): n = A,T,C or G
gggagcgcttttgagacactctttgagagcctccccaggcggggaattcggactggagggcagcacccacgtggggcagggggctgcccggtatgaggttgctgttagatacagggaccaggtgggactgttgctgaggtggctgttgcggctgctgaggctgctgtggctgtggctgctgtggctgcggtggctgctgctgtggaggctgtggctgctgcggctgctggggctgctgtggctgttgccaggcagtgacattgcctagcgacagccccccaggtgaactaaaggctggtaaggaggagagctctgcactggtcaactggtaatctgtgttgtaggcagtgggcatggaagagaaggggaggccctggctgagtaaactcggcgttgccacagaaaccactggggtggtgagcgaatgagtagactgngagaccccaaggcgctgggcattgttcaagtgatgcat

SEQ ID NO: 30931 - DNA, 463 bp, Homo sapiens
  misc_feature (1)...(463): n = A,T,C or G
ttcgagaccctatncgagacactaaacacggaggcgcgggggtctgcttaacagtgcttggacggaacccggcgctcgtttcccaccccggtcggccgcccatagccagccctacgtcacctctggaccgcacgctcggactgccgccaaggcccccgccgccgctccagcgccgcgcagccaccgccgccgccgccgcctctccttagtcgccgccatgacgaccgcgtccacctcgcaggtgcgccagaactaccaccaggactcagaggccgccatcaaccgccagatcaacctggagctctacgcctcctacgtttacctgtccatgtcttgctactttgaccgcgatgatgtggctttgaagaactttgccaaatactttcttcaccaatctcatgaggagagggaacatgctgagaaactgatgaagctgcagaaccaacgaggtggccgaatcttg

SEQ ID NO: 30932 - DNA, 517 bp, Homo sapiens
  misc_feature (1)...(517): n = A,T,C or G
agagcgcggnnnnnaattgacaatcgatcccctgctccgagnggngcaattccagagaacaaccctgcattccccacacaacacccacaatcagccactgcgggcgaggagggcacgaggccaggttcccaagagctcaggaacatggagctgatccaggacacctcccgcccgccactggagtacgtgaagggggtcccgctcatcaagtactttgcagaggcactggggcccctgcagagcttccaggcccggcctgatgacctgctcatcagcacctaccccaagtccggcactacctgggtaagccagattctggacatgatctaccagggtggtgacctggagaagtgtcaccgagctcccatcttcatgcgggtgcccttccttgagttcaaagccccagggattccctcagggatggagactctgaaagacacaccggccccacgactcctgaagacacacctgcccctggctctgctcccccagactctgttggatcagaaggtcaagg

SEQ ID NO: 30933 - DNA, 516 bp, Homo sapiens
  misc_feature (1)...(516): n = A,T,C or G
cgcggcccccccccatcganaatcgatcccctgntcagagtggtgcaattccacgcgtgtgatcgtccgtgcgtctagcctttgcccacgcagctttcagtcatggcctccggtaacgcgcgcatcggaaagccagcccctgacttcaaggccacagcggtggttgatggcgccttcaaagaggtgaagctgtcggactacaaagggaagtacgtggtcctctttttctaccctctggacttcacttttgtgtgccccaccgagatcatcgcgttcagcaaccgtgcagaggacttccgcaagctgggctgtgaagtgctgggcgtctcggtggactctcagttcacccacctggcttggatcaacaccccccggaaagagggaggcttgggccccctgaacatccccctgcttgctgacgtgaccagacgcttgtctgaggattacggcgtgctgaaaacagatgagggcattgcctacaggggcctctttatcatcgatggcaagggtgtcctt

SEQ ID NO: 30934 - DNA, 512 bp, Homo sapiens
  misc_feature (1)...(512): n = A,T,C or G
agaggcccccnnncatagatcttctgtcagcgtggaggaattcggccaggtccccacctcccgggagtgcgtgggctttgaggctgtgcaggaagtgccggtggggctggtgcagccggccagcgcaaccctgtacgactactacaaccccggtgagcactgcaggacaccctgaaattcaggagaactttggcataggtgccctcctatgggacaatggacaccggggtagtgagggggcagagagccctggggctccctgggactgaggaggcagaatggaggggcctgtgccctaactcctctctgttctccagagcgcagatgttctgtgttttacggggcaccaagtaagagcagactcttggccaccttgtgttctgctgaagtctgccagtgtgctgagggtgagactgagggcctggggcggggcagtggaggcgggatggccggggccccccccacactgtctgatgggttccccaacttcagggaagtgccctcgccagcgn

SEQ ID NO: 30935 - DNA, 515 bp, Homo sapiens
  misc_feature (1)...(515): n = A,T,C or G
cgcgccccccccnncatagaattatgaccaccgctcagagaggagcaattccgcgggtccacacgtgagatcgtccgtgcgtctagcctttgcccacgcagctttcagtcatggtctgcgggcacgcgcgcatcagaaagccaacccctgacttcaaggccacagcggtggttgatggcgccttcaaagaggtgaagctgacggactacaaagggaagcacgtggtcctctttttctaccctctggacttcacttttgcgtgccccaccgagatcatcgcgttcagcaaccgtgcaaaggacttccgcaagctgagctgtgaagtgctgggcgtctcggtggactctcaattcacccacctggcttggatcaacaccccccggaaagagggaggcttgggccccctgaacattcccctgcttgctgacgtgaccagacgcttgtctgaggattacggcgtgctgaaaacacatgagggcattgcctacaggggcctctgtatcatcgatggcaag

SEQ ID NO: 30936 - DNA, 495 bp, Homo sapiens
  misc_feature (1)...(495): n = A,T,C or G
cgcccccccgnagannnnattgagaccatatcgatgaccctaggccagngcggnggaattcccacggcagcatctgatcagcagcctggcagaggcaaggccagaggaactgactccccacgtgatggtgctcctggcccagcacctggcccggcaccggttgcgggagccccagcttctggaagccattgcccacttcctggtggttcaggaaacgcaactcagcagcaaggtggtacagaagttggtcctgccctttgggcgactgaactacctgcccctggaacagcagtttatgccctgccttgagaggatcctggctcgggaagcaggggtggcacccctggctacagtcaacatcttgatgtcactgtgccaactgcggtgcctgcccttcagagccctgcactttgttttttcccctggcttcatcaactacatcagtggcacccctcatgctctgattgtgcgtcgctacctctccctgctggacan

SEQ ID NO: 30937 - DNA, 509 bp, Homo sapiens
  misc_feature (1)...(509): n = A,T,C or G
gaggccgcccnnctttggacatcagtcagcgtggaggaattcgttcaggaactgcatctgnggctgggttggtgtccgtggcagaagcctggacttcaggctgttgccatgggaagttcccttacctcacgctccctgaggatgcctgaaggtaggtggggctgggaaactgaggcacaagagtctggccatagagtaggcctggagcctggggtgtgctttaaaggcagagggttcagtgaggatggggctagggcacatcggcttgctgctctcacatctccctgtggtctctccttggcaggtgtttgagaagtcccccctgcgggtgaagaacttcgggatctggcttggctatgactcccggagcggcacccacaacatgtaccgggaataccgggacctgaccaccgcaggcgctgtcacccagtgctaccgagacatgggtgcccggcaccgcgcccgagcccactccattcagatcatgaaggtggaggagatcgcggccc

SEQ ID NO: 30938 - DNA, 421 bp, Homo sapiens
  misc_feature (1)...(421): n = A,T,C or G
ccccgatggcagccagtccccatatggtggttctggaaactgaggcacagggcttaagtagcagacccaggatctgtccctgggccatctgactcagcccagtgaggggtggcctgggggaccttcctgggcggtatcccgtttttgcccttaagaggtggggtggggtcctctgagcttcaagctgctgggctcagtcttccaccctccacgcagcgagggggataaagtgaagatcgcgcagggtgtctcgggctccatccaggacaaaggatccattcagaagttcgtgccctacctcatagcaggcatccaacacggctgccaggatatcggggcccgcagcctgtctgtccttcggtccatgatgtactcaggagagctcangtttgagaagcggaccatgtcngcccagattgag

SEQ ID NO: 30939 - DNA, 474 bp, Homo sapiens
  misc_feature (1)...(474): n = A,T,C or G
aggcatcccnnnatttgagaccactagtgagtgtcgtggaaanccctcactgctgggccagggtcatgcctatataagttggcatggcagggacaatggtggtcagttgctcttacatgagctaagtttggagacctgaggaccctttgtcctcgctgggtgggccaaggtctgggacctgtcttggactgtgggagactcaccctcaccttgccaggcctctcccctgcaggactggcattgcactagtctgaggtggccactgcctttgatcaacctttgtgtgcgagggtctaagtagggtcgaacacagaagtgggaaggagaggggtgggccaggggctaatggtgtcactgtgtaaagtttttgacatactagctctataaatatatgaatatggacaaaacaaaacacacctaaactgacgaacttgtacttgaaatatgcaaatggggcgcccgtctctcgtgtag

SEQ ID NO: 30940 - DNA, 449 bp, Homo sapiens
  misc_feature (1)...(449): n = A,T,C or G
nctcgagatcgtatgcagtgtggnggaattcccctgtatgtcactgcagacctcaccctggaggacaaccggcgggtgattgtcatggagaagggaccccttcccagccccactgcagggctggaggagagcagtggccagggaccaagctcaccggtggccctgctggggcaggttcaggacttccagcagtctgcagagtgccagccgaaggaagagggttccagggacccggcagacccgagccagcagggcagagtgagaaaccttagagagaagttccaggccttgaactctgtcggttgatgctgactcctgggggagggaggagtcatgttggaggttggggaagaacctgggcatccttcccctcaagcctgggctcatggagcccctgcccagggccctcaggtgggcggaaagtccatcccctccgcccttcaggaagg

SEQ ID NO: 30941 - DNA, 494 bp, Homo sapiens
  misc_feature (1)...(494): n = A,T,C or G
cgcccccccccgnngnncnntttgaaaccctaatcgatgaccactaggcagngnggnggaattccccacctctgccttgtggccctgtgtgaggcagaagaggcccctcctgccagctccacaccccatgtcgtggggtctcgctttaactggaagctcttctggcagtttctgcacccccacctgctggtcctgggggtagccgtcgtgctggccttgggtgcggcactcgtgaatgtacagatccccctgctcctgggccagctggtagaggtcgtggccaagtacacaagggaccacgtagggagtttcatgactgagtcccagaatctcagcacccacctgcttatcctctatggtgtccagggactgctgaccttcgggtacctggtgctgctgtcccacgttggcgagcgcatggctgtggacatgcggagggccctcttcagctccctgctccgacaagacatcaccttctttgacgccaataagaa

SEQ ID NO: 30942 - DNA, 488 bp, Homo sapiens
  misc_feature (1)...(488): n = A,T,C or G
tgtggccnnnaggggcccnaatcgagaccacattgatngtcggtggaaacggaccacgccgnggatctgatccagaaaggctacatgcggatccagcagtttcggaaggcggatggtttctatgcggcttggttgtcacggggcagcagcacctggctcacagcctttgtgttgaaggtcctgagtttggcccaggagcaggtaggaggctcgcctgagaaactgcaggagacatctaactggcttctgtcccagcagcaggctgacggctcgttccaggacctctctccagtgatacataggagcatgcaggggggtttggtgggcaatgatgagactgtggcactcacagcctttgtgaccatcgcccttcatcatgggctggccgtcttccaggatgagggtgcagagccattgaagcagagagtggaagcctccatctcaaaggcaaactcatttttgggggagaaagcaagtgctgggctcct

SEQ ID NO: 30943 - DNA, 513 bp, Homo sapiens
  misc_feature (1)...(513): n = A,T,C or G
gcgccccccccccatagacatagaaccaccgttcagagaggngcaattcacggcgtggcctctcagcctcgagcctgatccggggatggcctctgcctccaccacaatgcatactaccaccattgcagagcctgatccagggatgtctggatggccggatggcagaatggagacctccacccccaccataatggacattgtcgtcattgcaggtgtgattgctgctgtggccatcgtcctagtctccctcctcttcgtcatgctgcgctacatgtaccggcacaagggcacgtaccacaccaatgaggccaagggcacggagtttgctgagagtgcagatgcagccctgcagggagaccctgccctccaagaagcttgtgattgccaggcaaaaggagcactttatttgagggacaacagactttccttccctgaatggcctcccccatcttcatcaggaaaaatacaccccatcgcccagcacccctgctgataccaccagacagagagagn

SEQ ID NO: 30944 - DNA, 495 bp, Homo sapiens
  misc_feature (1)...(495): n = A,T,C or G
tctcgagtcccctttnncgnggcttgagaccactactcagtgtggtggaattcgttttgtcagaagcgtccgcgccgcgaggaggaggccctgctggtttctgtgcgggctcttgtcaggatggtgaagctgttcatcggaaacctgccccgggaggctacagagcaggagattcgctcactcttcgagcagtatgggaaggtgctggaatgtgacatcattaagaattacggctttgtgcacatagaagacaagacggcagctgaggatgccatacgcaacctgcaccattacaagcttcatggggtgaacatcaacgtggaagccagcaagaataagagcaaaacctcaacaaagttgcatgtgggcaacatcagtcccacctgcaccaataaggagcttcgagccaagtttgaggagtatggtccggtcatcgaatgtgacatcgtgaaagattatgccttcgtacacatggagcgggcagaggatgcagtg

SEQ ID NO: 30945 - DNA, 513 bp, Homo sapiens
  misc_feature (1)...(513): n = A,T,C or G
aaggccnnnnnnnncatttgacctcgatcccctgctccgagaggagcaattcgttgaacgtggagtgactgttagcagggacccggcaggtgagcagggaccctagatggatgctctcctgcctctccactccctcagcgtgtgtggacgctacccgggggcagctagtcgcggcggcgtctctgtggctctgaggtccctggctctctgctgcctccctggagggtcgcagccatgctctgctcaccatggccggtgctgcacttgcctccctggagggtcgcagccatgctctgctcaccatggccggcgctgcctgcacttgccttcctggagggtcgcagccatgctccggtcaccatggccggtgctgcacttgccttcctggagggtcgcagccatgctctgctcaccatggccggtgctgcacttgcttccctggagggtcacagccatgctctgctcaccatggccggtgctgtacttgcctccctggagggtcgcagccatgcc

SEQ ID NO: 30946 - DNA, 506 bp, Homo sapiens
  misc_feature (1)...(506): n = A,T,C or G
aggcncccnnnnnaaagacatcgaccagcgtgggaattcccccagctacatccagctccctgaggcagagntgagaatggagagaaagttacctctcctgactctggggctcttggcggctgggttctgccctgctgtcctctgccaccctaacagcccacttgacgaggagaatctgacccaggagaaccaagaccgagggacacacgtggacctcggattagcctccgccaacgtggacttcgctttcagcctgtacaagcagttagtcctgaaggcccctgataagaatgtcatcttctccccactgagcatctccaccggcttggccttcctgtctctgggggcccataataccaccctgacagagattctcaaaggcctcaagttcaacctcacggagacttctgaggcagaaattcaccagagcttccagcacctgctgcgcaccctcaatcagtccagcgatgagctgcagctgagtatgggaaatgccatgtttgtcn

SEQ ID NO: 30947 - DNA, 490 bp, Homo sapiens
  misc_feature (1)...(490): n = A,T,C or G
gtgtcccagnngacccnaactgagaccctttgaaggccgtggaaanncgcgcgngctgggcgtgcgcggctgcggtacggcgtgttggtcccagcggttcagctgtggtagggacgtgccgtaggccggaatgttaccggctgttggatctgtggatgaggaagaggatcctgcggaggaggattgtcctgaattggttcccattgagacgacgcaaagcgaggaggaggaaaagtctggcctcggcgccaagatcccagtcacaattatcaccgggtatttaggtgctgggaagacaacacttctgaactatattttgacagagcaacatagtaaaagagtagcggtcattttaaatgaatctggggaaggaagtgcgctggagaaatccttagctgtcagccaaggtggagagctctatgaagagtggctggaacttagaaacggntgcctctgctgttcagtgaagtgaggaatgtgtttactgtgt

SEQ ID NO: 30948 - DNA, 496 bp, Homo sapiens
  misc_feature (1)...(496): n = A,T,C or G
cgcccccccgnnnnccnnattgagaccctttgatgatactaggaagngccgnggaattcgcatgttgtgtgaggatcccggggccgccgcgtcgctcgggccccgttatggccgtctccatcacgctcaaaacgctgcagcagcagaccttcaagatccgcatggagcctgacgagacggtgaaggtgctaaaggagaagatagaagctgagaagggtcgtgatgccttccccgtggctggacagaaactcatctatgccggcaagatcttgagtgacgatgtccctatcagggactatcgcatcgatgagaagaactttgtggtcgtcatggtgaccaagaccaaagccggccagggtacctcagcacccccagaggcctcacccacagctgccccagagtcctctacatccttcccgcctgcccccacctcaggcatgtcccatcccccacctgccgccagagaggacaagagcccatcagaggaatccgcccn

SEQ ID NO: 30949 - DNA, 493 bp, Homo sapiens
  misc_feature (1)...(493): n = A,T,C or G
agatgtccnnnaggggcccnacactgagantcccattgagngtcggtggaaaccaccgacggttggataaatgagggtacctgcgcacccagataggacaatctgtggttttattggagtttttaaagcagtatggtgctatagcaagacagatgggcagagcagggtagaatgcaaggaacaaaaattttcgtatgtgaaaaaggtggcattacgattaagagggagtgagggccaagtcagcaatattattctggagcagatgattagcccttgttctctcacgccatacgtgaaaacttaattctgcatggaatcagcgtcagcgacagacatccatgggggcctgtgtgcaccatcttatgtggagaaatgagcagcaacaatggatggaatggaccctgggctagatagaatctggcagtctatgtggcagaaatcagcaaaaacacgattgtaaaagcaaacaagtaattagagaaatcacgtgctg

SEQ ID NO: 30950 - DNA, 496 bp, Homo sapiens
  misc_feature (1)...(496): n = A,T,C or G
tgtggccnnagnaaccccnattcgagaccacattgaagagcggtggaaatccctgtcttaaatggccaaatatgatctaaagaacagtaacagggagcaaaatgaaaagggaagggtgagagtatggagaagtcagaaaaatgagtctgttaatgaagaaagaatgaccctattaaagccaccaaactttgatttccttgtgtgggaaatcatttttccaattttcactgtggaggtatgtgttaccagcgcctcagggctaaagacagagagtcttctgttttccctgggacgtttgaatgacctgtgtctgccatggggcccagtgctctccaccagcaattgctgctggcctcggcgctgacaggtcaacactggcgctgaaggaggcccttgttgctccaggggctgcccacgtgagcacaagagttagaggtttttgtgtttttgtctggttggtttagttttcattagtacctcctgcagaggctctgan

SEQ ID NO: 30951 - DNA, 482 bp, Homo sapiens
  misc_feature (1)...(482): n = A,T,C or G
ggtggccnnagggcccnacctgagaccctttgatagcgtggaaaccacgcgcccggggggagaggcgggggtaatcctgggaatggtgacgcttgggaacatgctctcgtttctgcttgccgggaaggtgcagccgtcagaccaagttggcaaagtcatctacaagcagttcaaacagatccgcctcacggacacgctgggcaggctctcgcacatcctggagatggaccacttcgccctggtggtgcacgagcagatccagtaccacagcaccgggaagtccagtcagcggcagatggtgttcggggtggtcaccgccattgacttgctgaacttcgtggccgcccaggagcgggaccagaagtgaagtccggagcgctgggcggtgcggagcgggcccgccacccttgcccacttctccttcgctttcctgagccctaaacacacgcgtgattggtaactgcctggcctggcaccgttan

SEQ ID NO: 30952 - DNA, 491 bp, Homo sapiens
  misc_feature (1)...(491): n = A,T,C or G
tgtgtccnnagggccccntttgaaaccctactgatgtctctaggacagngcggnggaattccaagatgctgtgtgggccctcaggctcccagcttgtcctgctcaagctggagagatctttgaccctgaaccagcgtgtggccctgatctgcctgccgcctgaatggtatgtggtgcctccagggaccaagtgtgagattgcaggctggggtgagaccaaaggtacgggtaatgacacagtcctaaatgtggccttgctgaacgtcatctccaaccaggagtgtaacatcaagcaccgaggacatgtgcgggagagcgagatgtgcactgagggactgttggcccctgtgggggcctgtgaggttggtggcagggccctgggccagccctggaagggtatggggggctagaaatgaactattttatcatgaagcaggctagtcatggctgtggcccggngccctcatcagttctcctacctgccagagtga

SEQ ID NO: 30953 - DNA, 450 bp, Homo sapiens
  misc_feature (1)...(450): n = A,T,C or G
aattgattcgcagtacctagtccangtggtggaattccagctgtctacttttcactggtgcttggtaaggagtctgttgcaatcattcagcaaaagaccctgttcttccaggtcagtcctccagcttgggcctttacgaccccagtattttctgcttctgatcctgtcgagttacagccaccaccgtcacactgtaagtgggctccaaacagtttggtgcataacatgcaagacagcgttactttaaagttaatcagcaagattggaggctgggtagaggaggaaagtcggtttgttatgtccaaatccatgtttttttcacagagttctttattatgaagttttgttcagcaaggctagtcctatagtggatgaagacgtcagtgaatccattaaataccagctttggagtcagctctaccacctcgaagccgtgtagcagtgggcgag

SEQ ID NO: 30954 - DNA, 483 bp, Homo sapiens
  misc_feature (1)...(483): n = A,T,C or G
gtgctcnngggggccnactgagaccccctgangncgtcggaaacagcccccgcaccggtaccacatccaccggcgaaagagctttgatgcctctgacacactgtccctgcccttgtgagcagccacgtggggctggatggtgatgagggcggggctggctcagactggcccagatccccagggagggtcacagagcgagactgggctcgacaagggtgagcgcccaagtctctggagcacagcctgggcctcttccatcacccacacctgtacctaagggaggtaggacccccgctccacgtaccccggtgcttccagggtgatctgcctgcaggctggcatgacatgaatgggtcctgtttattgcgctcttgtgtactgcaggcacagtccttagggggcttatctcatggagcccccacagcagccaggagtgtaggcactgctgtacccccaccctgcaggtggngagaccgaagcagn

SEQ ID NO: 30955 - DNA, 514 bp, Homo sapiens
  misc_feature (1)...(514): n = A,T,C or G
aggcccgnnnnnnntttgacttctgaccactcagtccatgtggtggaattcacggcgtggcctctcagcctcgagcctgatccggggatggcctctgcctccaccacaatgcatactaccaccattgcagagcctgatccagggatgtctggatggccggatggcagaatggagacctccacccccaccataatggacattgtcgtcattgcaggtgtgattgctgctgtggccatcgtcctagtctccctcctcttcgtcatgctgcgctacatgtaccggcacaagggcacgtaccacaccaatgaggccaagggcacggagtttgctgagagtgcagatgcagccctgcagggagaccctgccctccaagatgctggtgatagcagcagaaaggagtactttatttgagggacaacagacttcacttccctgaatgcctcccccatctccatcaggaaaaatacaccccatcgcccagcacccctgctgataccaccagacagagagagag

SEQ ID NO: 30956 - DNA, 496 bp, Homo sapiens
  misc_feature (1)...(496): n = A,T,C or G
ggtgtccnaggaannccnaactgagaccacatcgagagtcctggaagnngcgnnggaaacggaccacgccgtggatctgatccagaaaggctacatgcggatccagcattttcggaatgcggatggttcctatgcggcttggttgtcacggggcagcagcacctggctcacagcctttgtgttgaaggtcctgagtttggcccaggagcaggtaggaggctcgcctgagaaactgcaggagacatctaactggcttctgtcccagcagcaggctgacggctcgttccaggacctctctccagtgatacataggagcatgcaggggggtttggtgggcaatgatgagactgtggcactcacagcctttgtgaccatcgcccttcatcatgggctggccgtcttccaggatgagggtgcagagccattgaagcagagagtggaagcctccatctcaaaggcaaactcatttttgggggagaaagcaagtgctgggctt

SEQ ID NO: 30957 - DNA, 450 bp, Homo sapiens
  misc_feature (1)...(450): n = A,T,C or G
atcgagtaccctagcccagngnggnggaattccagtacctcaccgtgctggcctccttggggcccccccggcctgccacttcagtcaactccactgaggagactgccactacagttgttgctgctgcctcctccaccagcatccctagctcagaggccacgaccccaaccccaggagcctccccaccagcccctgaaatggaaaggcctccagctcctgagtcagtgggcacagaggagatgcctgaggatggagagcccgatgcagcagagctccgccggcgccgcctgcagaagctggagtctcctgttgcccactgacactgccccagcccagccccagcctctgctcttttgagcagccctcgctggaacatgtcctgccaccaagtgccagctccctctctgtctgcaccagggagtagtacccccagctctgagaaagaggcgn

SEQ ID NO: 30958 - DNA, 470 bp, Homo sapiens
  misc_feature (1)...(470): n = A,T,C or G
ntttgatgacctccntagggacgngcaanncatgagatttactgcaaccgcattcgagtctttgacaccagaactgaggcttggctggactgtcccccgactccagtgctgcctgaggggcgccggagccactcggcctttggctacaatggggagctgtacatctttggtggttataatgcaaggctgaaccggcacttccatgacctctggaagtttaatcctgtgtcctttacctggaaaaagattgaaccgaaggggaaggggccatgtccccgccggcgccagtgctgctgtattgttggtgacaagattgtcctctttgggggtaccagtccatctcctgaggaaggcctgggagatgaatttgaccttatagatcattctgacttacacattttggactttagccctagtctgaagactctgtgcaaactggccgtgattcagtataacctagaccagtcctg

SEQ ID NO: 30959 - DNA, 451 bp, Homo sapiens
  misc_feature (1)...(451): n = A,T,C or G
nctcgagtagcactacnccagngcggnggaattcgccgtctctcgctaatgtctccagctgcctggaaggcagcatggggctgcggtcactctggggcagtcttctggcctcactgactcctccaccattgcctcccccagacccccctgcccctcccactcttcttcataactgccacctttgccagaagctccagagagactccccaacctgccatgcctgcctccaccccaaccgtacagtccccactgcgctgtccagcccctggtaccatacctatggcctggctcccccctggccttggagcccggtgcccctttcacttcctcagcctcagcaatgttcccttttcagtgtcatggagctggctcgcctcaagtctttcgttttcccaggctaggtagggctgtgaggaatgcattaagagggtttgggagtttctgagaacct

SEQ ID NO: 30960 - DNA, 449 bp, Homo sapiens
attgttcgcagtccctagtccgtgtggtggaattccagactcagagagaacccaccatggtgctgtctcctgccgacaagaccaacgtcaaggccgcctggggtaaggtcggcgcgcacgctggcgagtatggtgcggaggccctggagaggatgttcctgtccttccccaccaccaagacctacttcccgcacttcgacctgagccacggctctgcccaggttaagggccacggcaagaaggtggccgacgcgctgaccaacgccgtggcgcacgtggacgacatgcccaacgcgctgtccgccctgagcgacctgcacgcgcacaagcttcgggtggacccggtcaacttcaagctcctaagccactgcctgctggtgaccctggccgcccacctccccgccgagttcacccctgcggtgcacgcctccctggacaagttcctggct

SEQ ID NO: 30961 - DNA, 472 bp, Homo sapiens
  misc_feature (1)...(472): n = A,T,C or G
natcgagatccctgtcgaatgtcgtggaattcgcggcgacgcacctcacgtcgagaatcgggaggaggagactgcaaggataggcccaggtcagtgcgagggacggtggtggggagggggtcagaacatgaggaaagcccagtctgagaccccaatccgtgccttcacccccacacttagcaatcccccacccccaccccttcttcgtcctccattttggtgcctgcagaggcctggagatggatctgcagagaagatggtgggctttgcgggagagaagggcacagactggctcccctcgcccccccgagggtacatggggcctctctggtggaaaaaaaatgaaatttaaaaaaggcctttgaaatccagggctctgaattttgaaaggtgggtagtcgggcctctgtccttcgggctgatcagttcaccaagaaatgagtccattttctctctgtctcctaagagtaat

SEQ ID NO: 30962 - DNA, 485 bp, Homo sapiens
  misc_feature (1)...(485): n = A,T,C or G
acttgaaactcgagagccntagtccagngcgctggtgggggcaagcgacaaacccgatcgtcccagctatcgcgtgatgaaatatctactcgaccaggggtatcacgtcattccggtttcgccaaaagttgccggcaaaacgctgctgggccagaaggggtatggcacgctggcagacgttccggaaaaagtcgatatggtcgatgttttccgtaattcaaaagcggcgtggggcgtggcacaggaagctattgccattggcgcgaaaactctctggatgcaactgggggtgattaatgagcaagcggcagtactggcacgggatgccgggttaaatgtggtgatggatcgctgcccggctattgagatccctcgcctgggcctggccaaataaaaaatccccggaaggcaaaaaccttccggggatttgttcagggattagttacgcagacgcggggcctggagttgtttgcggatggtctgcg

SEQ ID NO: 30963 - DNA, 459 bp, Homo sapiens
  misc_feature (1)...(459): n = A,T,C or G
ggggccggnnnnnnccttgactgagtncactcgacgngncgnggaattcctgcagcaagcgtggggcgcgggaacccgagcaggactctccagtcctcagtcaccttggacaaagaagtgtggatcctcagattccatcttttccaactccaaggtgccatggcagagaaggtgctggtaacaggtggggctggctacattggcagccacacggtgctggagctgctggaggctggctacttgcctgtggtcatcgataacttccataatgccttccgtggagggggctccctgcctgagagcctgcggcgggtccaggagctgacaggccgctctgtggagtttgaggagatggacattttggaccagggagccctacagcgtctcttcaaaaaggtgggtgcaggctgggcacggtggctcacgcctgtaattccagcactttggaaggccgaggtg

SEQ ID NO: 30964 - DNA, 454 bp, Homo sapiens
  misc_feature (1)...(454): n = A,T,C or G
gcggttgnnnnnaacggatagcacgcatgtggcgggcancaggaggtctgatcgccagtctcagttctgcctgactctaaagctctcgatcctccaatcttgtcaaatttgctttattataagaatcaccaaaggccatggttataaatatagattctcaagatcttcctctgaagattctaatttaggtatcagctgggacccaataatcacgcattcattgttgagaccaatttgggaaacagtgaataagactagtgtttctcaaactctagtgagtgtatgaatcctgtggggatcaactgcagattacggtacagtggtaggtctggggtggggcctggggttctatgtttccaacaaggtcgcaagtgatgactgtgctgtgggtccacagccgcacttgaagcagtgaggaactaagccttgctgctcagctcacaataggaccctt

SEQ ID NO: 30965 - DNA, 449 bp, Homo sapiens
  misc_feature (1)...(449): n = A,T,C or G
gcgccgnnnnacctgggattaggctagacgngcgnggaattgtatattgcaggtgcttggtattttttaatgattttggaagaaactagggtgacttaggcaatgaacccaatcaggctgttggatgtgtagaactgtgtaccataagccataagcctttacagttttgtcaatctgacatcagaaattactcagttacaatgtttttagcttaattttctaaatgcaattagagtgcaaagcttacaggaaatactggatctaacgggaagaaaaataaataaaacaggtatacataaatgatagattgattcacctgaaattatttctttaaaatttggagaaggccgggcgcggtggctcacgcctgtaatcccagcactttgggaggccgaggcgggcggatcacgaggtcaggagatcgagaccatcccggctaaaacggtgaa

SEQ ID NO: 30966 - DNA, 458 bp, Homo sapiens
  misc_feature (1)...(458): n = A,T,C or G
agcggtttntnnaaaagatagcgcacgatgtgtcgnggcattcggcgcatatttcaacgtgctcatcaacctgagggacatcacagacgaggcatttaaggaccagatccaccatcgtgtttccagcctcctgcaggaagccaagacccaggctgcactggtgctggactgcttggagacccggcaggagtgacggtgcgggaggcctctccgggctctgtggcccctccctcgcccatccccagagggcagagctgtgacctcggtggggacacagcttgttcatgtggggcccggagggtaggtgggcaggcagcggggcatcgcctgggaatggaggcgctggcagggacagaaggcccctagtcccatgtgacctccagtaaagttttggcaccaaacctgtgttgtgtgttggcggttttgggggcagggctgagagctgagctgcgggtctt

SEQ ID NO: 30967 - DNA, 461 bp, Homo sapiens
  misc_feature (1)...(461): n = A,T,C or G
aggggcggnnnnnnccttgactgcgtncntacgccgngncgnggaattcgtatggttgaaaatggtgtctcactgaaagtaacactgaaatggacaaacttcctgtaggttctgagccttcagttccaggacattgtgggaccccagaggctgtcctgtccacttgccttctgaggacatcagctcggtgtccccagcctccgtgctgtgggcacagctgtggtttgggtgctgagcaaaggatgctgtagtcttggccctgtggagcttggctgttgggacaggaggtacaaaggggagtggtgcctgtggacacaggactagaccccaggacatcagggcctcgggctcatggtcctatcaccctggatggtatacgcagctgcacacgtggaattgctcaaacaattcaggcccaacttttctgccacggaaggggtgctgcttccctcacgtaacan

SEQ ID NO: 30968 - DNA, 459 bp, Homo sapiens
  misc_feature (1)...(459): n = A,T,C or G
ggggccggnnnnnnattgacttgcgatcatcgacangncgnggaattccgaagtactgcgggcagtgtttgaatatggccctgaacaatgtgtccctgtcctccggtgatcagaggagcagggtggcctaccgctcttcccatggcgacctcagaccgcgggcgtcagcgttggcgatggtctccggagacggcttcctcgtttccaggcctgaagcgattcatctaggacctcggcaggcggtgcgaccaagcgttcgggccgagagccgtcgagtggatggtggcggccggagcccaagggaaccagatggccggggccggagccgccaagccagattctcaccttacccaatccctgccgttgaacccgatctcctaagaagtgtgctgcaacagcgtttgattgcattaggaggtgttatcgcagctcgaatttcagtttaaacgaacacctttc

SEQ ID NO: 30969 - DNA, 488 bp, Homo sapiens
  misc_feature (1)...(488): n = A,T,C or G
ttcgagatccctagtccagngngtcggaatcactacagactgagagagaacccaccatggtgctgtctcctgccgacaagaccaacgtcaaggccgcctggggtaaggtcggcgcgcacgctggcgagtatggtgcggaggccctggagaggatgttcctgtccttccccaccaccaagacctacttcccgcacttcgacctgagccacggctctgcccaggttaagggccacggcaagaaggtggccgacgcgctgaccaacgccgtggcgcacgtggacgacatgcccaacgcgctgtccgccctgagcgacctgcacgcgcacaagcttcgggtggacccggtcaacttcaagctcctaagccactgcctgctggtgaccctggccgcccacctccccgccgagttcacccctgcggtgcacgcctccctggacaagttcctggcttctgtgagcaccgtgctgacctccaaataccggtaagct

SEQ ID NO: 30970 - DNA, 486 bp, Homo sapiens
  misc_feature (1)...(486): n = A,T,C or G
tgctggcnnnnnnnnattgatttgagnaccctagtccangnggnggaattctgagtctcagcccaggtggaccttaggaagggctggatccctgtccctgaacaccaaataccgagacagctgatgaggctggctcagtgtgtgacggaggcccccgggagtcagcagagccgagcgtacagtgcacatcaggcagagcaggccacgggcagggacgacgcatcgggacagggctctgcaggggaccgtgactacaggccagctgtgagtggtcccctacagaggctgcccacccaaggtttggttggggtgaaacatgatgacaacacatacacttaagaaggtgggaaccgggggccgggcgcggtggctcacacctgtaatgccagcactttgggcagctgaggcgagtggatcacctgaggtcaggagttcgaaccagcctggccaacatggtgaaactgcatctctactaaaaatacacga

SEQ ID NO: 30971 - DNA, 441 bp, Homo sapiens
gcccactgctgccgtctgccctgcagggtgctctccagcagtggctggggcctgcgtggccttggcgggccaagatcgccatcggcctgctggagttcgtggaggagctcttccacggctcttacgggactttctacatgtgtgagaccacactggccaacgtgggctacacagccacctacgacttcaagatggccgacctgcagcaggtggcacccgaggccaccgtgcgccgcttcctgcagggccgccgctgcgagcacagcaccgactgcacctacgggcgcgactgcagggccccgtgtgacaggctcatgaggcagtgcaagggcgacctcatccagcccaacctggccaaggtgtgcgcactgctacggggctacctgctgcctggcgcgcccgccgacctccgcgaggagctgggcacacagctgcgcacct

SEQ ID NO: 30972 - DNA, 498 bp, Homo sapiens
  misc_feature (1)...(498): n = A,T,C or G
tgggggaggggnngnnnnnnnatcgtactacattcacagtggcggaattcattaagtggggtacctgaagatgccacaaaagaagagattcttaatgcttttcggactcctgatggcatgcctgtaaagaacttgcagttgaaggagtataacacaggttacgactatggctatgtctgcgtggagttttcactcttggaagatgccatcggatgcatggaggccaaccagggaactctaatgatccaggacaaagaagttaccctggagtatgtatcaagcctggatttttggtactgcaaacgatgtaaggcaaacattggtgggcaccgatcttcctgttcattctgcaagaacccaagagaagtgacagaggccaagcaagaattaataacctaccctcagcctcagaaaacatccataccagcaccattggaaaaacagcccaaccagcccctaagaccagctgataaggaacctgaacccaggaagagggaa

SEQ ID NO: 30973 - DNA, 499 bp, Homo sapiens
  misc_feature (1)...(499): n = A,T,C or G
tgggggggccaggggnnnnattganattgatncacctatccgcgtggtggaattccagaaggatggcgagagcagcaagggccagtggggctggacgtgtggagaccaagggggctgtgatgggacccgggcagacaggggccactggctttgcccaggccctctgtgtgaggggcagctgtctgagcagagcagaggtgtggtttatgttttagcagatgtcggggagcacaagggccagtcaggaaggagagggtggaggggatcaaagagtgactctacatccaggtcaggataagcatcttgttacatgtccgagtgcaaacccagagccagcactgagttgtaaagttctgagcctcaagggagaggccagggctgtgggtggcctcagggagccgtgggatggtaagagggggcacagagctagaggagcagtcagagggctggatcacaggcaccaaagaggaaggggtctaggaggaaggggtctagcagt

SEQ ID NO: 30974 - DNA, 467 bp, Homo sapiens
  misc_feature (1)...(467): n = A,T,C or G
atgcggnttnnnnnannccaggttgcaaagcagaagtgcggaggaattntancaggggggcacatgggatggagtagacatcaacaaccaggacattgctgacatttttgaagctttcgtgtgggagccagctatggtgcggatcaatgctctgacagcagactctgaggctgcgcgcctgatcgtgtctgtagatgaaaccatcaagaacccccgctcgactgtggatgctcccacagcagcaggccggggccgtggtcgtggccgcccccactgagaggcaccccacccatcacatggctggctggctgctgggtgcacttaccctccttggcttgggtacttcattttacaaggaaggggtagccattggcccactctcttcttactggaggctatttagataaaactggagacttcaaaaaaaacaagaaaaaacaccgggcacattgaaataactggcccag

SEQ ID NO: 30975 - DNA, 466 bp, Homo sapiens
  misc_feature (1)...(466): n = A,T,C or G
tgccccctnnnnnnanncctggggngctaagcagaancgccgaannntanaaaactaagcatggcttgatctggaggggcccactgtgaatattaattactttgtttaaaaaaacattcaaagatataatataaaagttgaagagccttataaaccaccgccagaagtaactgatgagaacaatttgatgtctgcttttcccaggttttaaataatcagttttcattataccaccttttcattttttgaaaagtcacactggcttaaaaacattatttttcattctgctcctttttctttctgtgttttatttttcccatgcactcataccatcccctttgttctgcaacttgatttcatttcacagtcctgcggacactcttgcctataagtgctcactcactcttacttgtctttttgatgacgtgtctgtctccccaccagacctgggagcgactcgagggcn

SEQ ID NO: 30976 - DNA, 498 bp, Homo sapiens
  misc_feature (1)...(498): n = A,T,C or G
tgggtggcccaggggnnnattgaaattgatccactatccgngaggcggaattctagaggagttggagagaaggcgcaaagaagaagaggagaggagacgggcagaagaagaaaagaggagagttgaaagagaacaggagtgccgatggcgggagatggaggagcaccggcaggcagagaggctccagaggcagttgcaacaagaacaagcatatctcctgtctctacagcatgaccataggaggccgcacccgcagcactcgcagcagccgccaccaccgcagcaggaaaggagcaagccaagcttccatgctcccgagcccaaagcccactacgagcctgctgaccgagcgcgagaggttcctgtgagaacaacatctcgctcccctgttctgtcccgtcgagattccccactgcagggcagtgggcagcagaatagccaggcaggacagagaaactccaccagtattgagcccaggcttctgtgggagagagtgga

SEQ ID NO: 30977 - DNA, 498 bp, Homo sapiens
  misc_feature (1)...(498): n = A,T,C or G
nttttgaccactgtccgtgtgttggaattcggtgagtgggtctgcctagtgggtggggaagggccccagtgctgtttctaccccaacctgccagtcttctttctccattttctaaggagatgatccctactcaagtgcagagccccatgtgtcaggtgtgaaacggtcccgctcaggtgagggcgaggtgagcggccttatgcgcaaggtgccacgagtgagccttgaacgcctggacctggacctcacagctgacagccagccacccgtcttcaaggtcttcccaggcagtaccactgaggactacaaccttattgttattgaacgtggcgctgccgctgcagctaccggccagccagggactgcgcctgcaggaacccctggtgccccacccctggctggcatggccattgtcaaggaggaggagacggaggctgccattggagcccctcctactgccactgagggccctgagaccaaacctgtgcttatggctct

SEQ ID NO: 30978 - DNA, 467 bp, Homo sapiens
  misc_feature (1)...(467): n = A,T,C or G
gaggtcngnaactgagaccatgagagcntctggagngccgnggaattcgcaagtagagttttattggaacacagtcctgcctgtttgattatgaaatgttcctcggtgctcccatgccgcagtggcaggcagggggtgatctcagctgagactggccacaaagcttgaaatgcctcctgcctagccccttatagaaaacactggctgagccctggtataaacaatcaatatttgtcttaagtaagagaagaaatatatgacataaaatccaaattcatccgtgatctaaactcttcatgtcactttggaaaaaggcattttggaaggattgtcctgtgtgttgcaacaaggtctccggtgaactgatcttagtgattcttgctgttttgaaacgcacgtgtttctgttgtaggaccctcactacgtccagcaggcgctgaccaacgtcttgctgatggacgccgtcg

SEQ ID NO: 30979 - DNA, 504 bp, Homo sapiens
  misc_feature (1)...(504): n = A,T,C or G
aggggnnaattgatcactgtccgngngttggaaaccgttgcaagaggagaagagggacctggaaggtattcgggaatccctcctgcggttgaaggaggctcgtgccggaggggatgatgatggcgaggagttagaaaaggctcaactgcgtttcttcgaattcaagagaaggcagcttgtctagctcgtgaacttgtataacgacctggttcagcagaaagacatcctgaaaaaagaagtccaagaagaacaggagatcctacagtgtttaaaatgtgaacatgacaaagaatctagattgttggaaaaacatgatgagagtgtcacagatgtcaccgaagtgcctcacgatttcgagaaaataaagccagtggagtacaggctgcaatataaagaacgccagctacagtacctcctgcagaatcacttgccaactctgttggaagaaaagcagagagcatttgaaattcttgacagaggccctctcagcttagacaacactct

SEQ ID NO: 30980 - DNA, 530 bp, Homo sapiens
  misc_feature (1)...(530): n = A,T,C or G
agggttcgnnnnnggggggnnnngnnngaatcgaacacantnagngaatcgaaacacatcccangnggncgaantcgncaaatacaggagtctggagaacccaactataatatatttcttaaaggtcaagtatgccttaacttttattcaattctgagtgtcattagcacaagggtcttgcacataattcagacacaataaatgctctctgtgtaaatgcatgaatacctgggattccctggtttgaatcccccagagtttggctcttttcccgcacaccatccatagtcctgcctggcctgaatggaaatgctcatggttgccactgaacctggccaaaggtttcccacatatacaggacacctggctccttccctgagcatctctcctcccagaagagattcctgtttagattgctaatagctgctccctgtgccacctaggttgagagggaagctcaagctataggatggcgagcttattgcctgccctttgagatcatttggatcacctgggttaaaggtataggc

SEQ ID NO: 30981 - DNA, 482 bp, Homo sapiens
  misc_feature (1)...(482): n = A,T,C or G
gagcgtnnnnnnaactgactgcgtgcagtgggcaattccacagtcttctctcctacttccatgaagacgcggccatcagggaagaggccttcctgcatgttgctgtggacatgtacttgaagctggtccagctcttcgtggctggggatacaagcacagtttcacctccagctggcaggagcctggagctcaagggtcagggcaaccccgtggaactgataacaaaagctcgtctttttctgctgcagttaatacctcggtgcccgaaaaagagcttctcacacgtggcagagctgctggctgatcgtggggactgcgacccagaggtgagcgccgccctccagagcagacagcaaggtgcccctgacgcttatctgctgcccaggagcctcatctcttctgacgggacctgccactgcacaccagcccagcttccgtgtaaataatttattacaagcataacatggagctcttgttgcacn

SEQ ID NO: 30982 - DNA, 486 bp, Homo sapiens
  misc_feature (1)...(486): n = A,T,C or G
naggctgnnnnaaactgacctagcactgtccgcaaggnccaattcagcggcccggctccggccgcccgcctctgccgccgcaatgatgatgatggcgctgagcaagaccttcgggcagaagcccgtgaagttccagctggaggacgacggcgagttctacatgatcggctccgaggtgggaaactacctccgtatgttccgaggttctctgtacaagagatacccctcactctggaggcgactagccactgtggaagagaggaagaaaatagttgcatcgtcaccatggtaaaaaaacanaacctaacactaaggatcacggatacacgactctagccaccagtgtgaccctgttaaaagcctcggaagtggcatagattctggatggcaacgatgagaagtacaaggctgtgtccatcagcacagagccccccacctacctcanggaacatgaggccaagaggaacagccagtgtgtacccaccc

SEQ ID NO: 30983 - DNA, 488 bp, Homo sapiens
  misc_feature (1)...(488): n = A,T,C or G
gatcgagnccctngggannnncnnatcgtagttcctagtccgtgtggtggaattcagttagaggactacttccccgactccgagaaccctgaagtggggggcctcatggcggtcctggctgtggttggaggcatcgatggtcgcctgcgcctgggtggccaagttgtgcacgatgactttggagaagtcaccatgactcgcatcaccctgaagggcaaaatcaccgtgcagttctctgacatgcggacgtgtcgcgtttgcccattgaatcagctgaaaccactccctgccgtggcctttaatgtgaacaacctgcccttcacagagcccatgctgtctgtctgggctcagttggtgaacctcgctggaagcaagttagaaaagcacaaaataaagaaatcgactaaacaggcctttgcaggacaagtggacctggacctgctgcggtgccagcagttgaagctatacatcctgaaagcaggtcgggn

SEQ ID NO: 30984 - DNA, 487 bp, Homo sapiens
  misc_feature (1)...(487): n = A,T,C or G
naggctgnnnnnaaatgaactagcagcgctcggcaaggnccaattcagcagaggcagggaccactcggggtctggtgtcggcacagccatggcgggcgcgttggtgcggaaagcggcggactatgtccgaagcaaggatttccgggactacctcatgagtacgcacttctggggcccagtagccaactggggtcttcccattgctgccatcaatgatatgaaaaagtctccagagattatcagtgggcggatgacatttgccctctgttgctattctttgacattcatgagatttgcctacaaggtacagcctcggaactggcttctgtttgcatgccacgcaacaaatgaagtagcccagctcatccagggagggcggcttatcaaacacgagatgactaanacggcatctgcataacaatggaaaaggaagaacaaaagtcttgaaagacagcaatttcagctgctggtgaagaacacagatttt

SEQ ID NO: 30985 - DNA, 459 bp, Homo sapiens
  misc_feature (1)...(459): n = A,T,C or G
gggcgggttttgagaccatgagaccgtcggganncctgggctgggctcctgcggagataccggatgccggaatgtccacggaaaactggcttggccagaccctttctctggactcagatccctggcggtggccagctcttgcctgcagagggaatctgggggccagaagagggcaggcttggcagccctcaactgacttgtggctgggcctcagcctcctcagcctccacaggtggcccactggagcctcagtcagtgtcctaatccaaggtgtctccagagcccggccccagccgtgggacaggagcccaccacagccccatttcccaggagcctcctctcaaggccttcctgggactcctcttgccttcatctgtgctcttgggaggccatcgtatggaccaaagccttcactgtcttcagagccatctggaaggacactgcaacctccgccccccg

SEQ ID NO: 30986 - DNA, 483 bp, Homo sapiens
  misc_feature (1)...(483): n = A,T,C or G
agaggctnnnnnnnnaattgagccgagtcacagtggngcaattccagttcattcagggacccagtcagtaaacaggtagttaacttcgtgtaaccaagcaagggttttgtttatcttttttaaagtagaaaaaagtgaggctcaaactctctctttctccttgtcataactattggtttacagtctttatttgtttaaaagtaaagcacattgtatgtatttatttggcaatacatgaggccattaaaaccctgagcctaaggtaccacagttagtctcatttgcctcttgtcctgtgaactccacttagaatgtcattgaacttgngcagacataattctagtgtctgttccaacgcactgtgtcacagaagctagaattaccattagaggcacaaacccctgagaatacacaagggggcacgcttccataaaatatgttgnggaggaggagggcacataggcacaggggacaggattcact

SEQ ID NO: 30987 - DNA, 460 bp, Homo sapiens
  misc_feature (1)...(460): n = A,T,C or G
tggtgntnnaaaggagcgtgagcaactgcanggcannggaattgcccacccttagctaaagcaaggacgatactaactgaccacagcctggcctcaagaaagcaccattttcacaaggcacgcaaatggctgtctgaacacctgtaattagaaggaatgctcaaaacccggacatttgtgggatcagcatttaacctcggccaacccctcaggaaggaggggcgcagggaggctgagtgcagccacgtccatgcagtcagtgtggccagcctggggggcctgtgaggactgagggagggtggggacccctgggtagaagaggccaagagctttgtgctctattgaggaagctgcagaggaggagagacccaaatcaacatggggtgttcatgctctgttccttgtacctcgaatggtggcactcttgccctctagacattgctaaggacttagaggttca

SEQ ID NO: 30988 - DNA, 475 bp, Homo sapiens
  misc_feature (1)...(475): n = A,T,C or G
ccatagataccantangcagngncgnggaattccttggaacttgcctgcctttccatccatggccagcagcacctgccctacctgccccacttgtccttagcctggacctctgacagcagcatctctaccttctccccaactcccaggaccacaggctcaggcaggggcctccatgggccccaggggaacactggggacttggcctctctctagggtacatggtgctggttcaggctgggagaggcagcccaggaagtctcatctggggagcaggcagccagcatctgggccttggcctggagcacaaagaccctggctttcattttctctcaggtgaaaggaaattaaggcaacaaaagaagcccggctcctggtcacctatgaagcctcagattccttcccatggagggagggagtggtttgcaggtggccaagttcctctaacttggctcacactcgacatgaaaattcaaa

SEQ ID NO: 30989 - DNA, 475 bp, Homo sapiens
  misc_feature (1)...(475): n = A,T,C or G
aggnncagccttagatnccntnnnactgagntctactantcagtgtggtggaattcgtttggcgttaaccacctgggtcactttctcttgacaaacttgctgctggacaagctgaaagcctcagccccttcgcggatcatcaacctctcgtccctggcccatgttgctgggcacatagactttgacgacttgaactggcagacgaggaagtataacaccaaagccgcctactgccagagcaagctcgccatcgtcctcttcaccaaggagctgagccggcggctgcaaggtacgggggcgctaggctcggcctccctcttgctttactctgagcctagagcggcctttccatgatcctaggctgatgggaggccaaacggtggatccagaacagagtcagcaaaagtagagcatgtggaccacgctgcccgcttctggtgcctgaagcagacatcactaatcgatcgttcttctg

SEQ ID NO: 30990 - DNA, 485 bp, Homo sapiens
  misc_feature (1)...(485): n = A,T,C or G
aaatgccggnttccccccctgagaccctatcagagtgcgggaattccaatggctctgtcagttacttcagttggtctcagtgacactgaggaagtcactcagtgtgtgagttggtttcttcttctgtaaaataagcagactcttcagtctgaaggattgaatgagagcctggcatacctgcctggagccctgagggcacatagaaggtaccagataaccgttatagcgcctccttttccccttctacttccagaaaccatggtgagagattttagacacgagttttccatgacttcaaagtagcaactagtaaaatggacctgcaagaggcctgccgaggccagctgtgctctcgtgggtggttacgtagccaacatggtccagggtttcttggaacaataaatatcctgtccgtaggtctgtgagctctgggtgttccatcctgacttgatacccctcccaaaggaccctaaaaagcanggagg

SEQ ID NO: 30991 - DNA, 521 bp, Homo sapiens
cattgacctcgaccactgctccgagtggtgcaattcgggaagagcaagtcctgttttgattgtgggaagttggaatggactccaagagcatgaggacatgcaggatgagaatttgagtgagacggcagggctagggaaggagtgtttagcttctctcatggaggcgcatcagccctggagcgtggcaggtgggcacctagaactcctcccagcataggcctctactgcccagccctcagcaacacagggcccacctgagggtcactggcctcacccgcagtgcaaggtctcggaacggtctgggctgccttctccccactctgtctgttcaacaataggaccttcagaagcgctcctaggctgtggccctaggatttttttctagtctttcttggagctcctggggctatgcccacacataacaccgccagtatttttggacaatttctacttatccaattcagttcattgaattattaatggtaatggaccaatattattagcttataagttcagataca

SEQ ID NO: 30992 - DNA, 485 bp, Homo sapiens
  misc_feature (1)...(485): n = A,T,C or G
tgcggccgnnnnnnnaattgagattcgatagcactaggccanngcgnggaattccagagcccggagctttctggggcctcgtgtttggcctgggagtggggcttctgcgtatgatcctggagttctcatacccagcgccagcctgtggggaggtggaccggaggccagcagtgctgaaggacttccactacctgtactttgcaatcctcctctgcgggctcactgccatcgtcattgtcattgtcagcctctgtacaactcccatccctgaggaacagctcacacgcctcacatggtggactcggaactgccccctctctgagctggagaaggaggcccacgagagcacaccggagatatccgagaggccagccggggagtgccctgcaggaggtggagcggcagagaactcgagcctgggccaggagcagcctgaagccccaagcaggtcctggggaaagttgctctggagctggttctgtggg

SEQ ID NO: 30993 - DNA, 484 bp, Homo sapiens
  misc_feature (1)...(484): n = A,T,C or G
agcgctggnnncaatgaaactanagcatcgcagnggcnggaantcggntggctgcctgaccacagacttcgccatgcagaatgttctgctgcagatggggctgcacgtgctggcggtgaacggcatgctgattcgtgaggcccggagctacatcttgcgctgccatggctgtttcaagacaacgtctgacatgagccgagtgttctgctcacactgtgggaacaagaccctgaagaaagtgtccgtgaccgtcagcgacgacagcaccctgcacatgcacttctcccgcaaccccaaggtgctgaacccccgcgggctgcggtactcgcttcccactcccaaagggggcagatacgccatcaacccccatctcaccgaggatcagcgcttccctcagctgcgactctcccagaaggccaggcagaaaaccaacgtgttcgcccctgactacatcgccggagtgtcaccctttgtcgagaatgag

SEQ ID NO: 30994 - DNA, 472 bp, Homo sapiens
  misc_feature (1)...(472): n = A,T,C or G
nggagcgannnnnnnnnaactgagaaactgcnaacngtcgaagaannccgncntnagntagnggccaagattcgcaaagcctcgcggcgaggaaagcacgagtattcaagcgcggctgaggccctccttggctagtgctgggacatggagccccggcagccaaggccaaccttgtgcattccgcccacgtaggcgcctggggccctggtcttcctcgactgcctctccactgcctgaaggtcatcaaatgcccctggaccacctcctacgtgccacacgctgtgttggccatccaaggttccatattgagcataaaacagccctctgccctaaaggagttaacctgttggaatcacatacaaaggattctgactaccaagcgccttgaagttaagttgaactctgaagacagattgcctggctacaaagctcagttccactacatatggtccaggaacttaagacaaantan

SEQ ID NO: 30995 - DNA, 483 bp, Homo sapiens
  misc_feature (1)...(483): n = A,T,C or G
agaattgataccctaggcagngctttgataaccttganaacctgngggaattaaaagtagttaatttttaaaaatcatgattttttattaagaagaacagatctcttatctaaaatattatgtttcttgctacatccctagctttttaaaacataataaggaagttgcttagtaaagctttgtgataaaagccaatgtttgtggacatgaacaagctcagaattatccttgatattatccaccttgtcttagtccatgagtgttgctataacaaaccaccaaagactgggtagtttagaaaaaacagaaatttatttttcacagttcttgaggctgggaattccaagatcaaggtgccagtaagatcagtgtctggcgagggccactctctgcttttaagaaggccttcccccagaggggattgacactgtgtcctcacatggtagaaaaggcagaaagcgggctctggaacctcatgctaag

SEQ ID NO: 30996 - DNA, 371 bp, Homo sapiens
  misc_feature (1)...(371): n = A,T,C or G
aggtttgatnaccttcggannncttntgataacctacggaagngccgnggaannccagctgttccaagcaggaggatgtggcaggggagggctgtgagtgagtagctctgtgtttagagttggggacaaggatgacaccgaaggtccaggagtccaggacagcaggtgctggccggtggggagcggggaggggcactgagatgggcagggcctggacattccacaccctggtgctgtgcagcctctggcagagcatccgacctcttggagcaagtttctgcctctggaaagggggcgggcccttttcacaacaggctggttgtaccgagtaaacaacacgatgccatgaaaaaaaaaaaaaaaaaaaaaaa

SEQ ID NO: 30997 - DNA, 477 bp, Homo sapiens
  misc_feature (1)...(477): n = A,T,C or G
aggttggagaccctcgaagngtcagagaacctggaanaagccaccctctgcccctgacccatggtggtccatctgcgcccctggtgttgaactgaggacctttgtgccattgtgagtcggggggggcaccacgagggactcgagtggaaatgccgggtgcaggtcagttggaggagcggctccactgatgttagacaagtgggacaaggtgtgaagccacaggatgggaggggcccttgggcagggcacagacaagggtgtgtccttcaacacaaaggatctcgtagaggaggggaggcctcagccagcactgacaagaggagggtgagggcagagaggggagcctgtggccttggaggcctcactgagcattccaggggcacggaagggtcagtcccacagctgggctgaggagcaagcgggaggtgggccgtgaaacgggcctctgggagggcctctgtgtgcaaccgggtgagc

SEQ ID NO: 30998 - DNA, 471 bp, Homo sapiens
  misc_feature (1)...(471): n = A,T,C or G
nctcgagatcgatagcccagtgcggggaattcggaacctgccccagggcaggcattgagatacaggagggtaaagaggaccctctcttagaaaaggagagcaggaggaagacacctgaggcctcagccattggacttcaccaagacccagaactgggtgatgctgctctgaggagccatctggatatgagctggcctctgttctcacagggcatttctgaacagcagagtgggctcagtgttctcctcagttctctccaggtcccccccaggggagaggattccctggaggtccctgtggagcagtttcgaatagaagagattgcagagggtagggaggaagcagttcttccaatcccagtagatgcaaaagttggctatggtacctcacagtcatgttctctgctaccttcccaagtcccttttgagaccagaggaccaaacgtggacagttctacagacatgttagtgg

SEQ ID NO: 30999 - DNA, 514 bp, Homo sapiens
  misc_feature (1)...(514): n = A,T,C or G
aggagccggnnnncattgacaatagatcccctgtcgagagnggngcaattccaaggtgaagcaggacatgcctccgccggggggctatgggcccatcgactacaaacggaacttgccgcgtcgaggactgtcgggctacagcatgctggccatagggattggaaccctgatctacgggcactggagcataatgaagtggaaccgtgagcgcaggcgcctacaaatcgaggacttcgaggctcgcatcgcgctgttgccactgttacaggcagaaaccgaccggaggaccttgcagatgcttcgggagaacctggaggaggaggccatcatcatgaaggacgtgcccgactggaaggtgggggagtctgtgttccacacaacccgctgggtgccccccttgatcggggagctgtacgggctgcgcaccacagaggaggctctccatgccagccacggcttcatgtggtacacgtaggccctgtgccctccggccacctggatccctgcccctccc

SEQ ID NO: 31000 - DNA, 504 bp, Homo sapiens
  misc_feature (1)...(504): n = A,T,C or G
agggaggggnggggnnnnaatcgatnatcgatnagcatcgcgcgnggncgaatacgaaggcagccccagaagtccaggaagatgtgaaggctttcaagacagatctgcctagctccctggtctcagtcagcctaaggaagccattttccggtccccaggagcaggagcagatctctgggaaggtcacacacctgattcagaacaatatgcctggaaactatgtcttcagttatgaccagtttttcagggacaagatcatggagaagaaacaggatcacacctaccgtgtgttcaagactgtgaaccgctgggctgatgcatatccctttgcccaacatttctctgaggcatctgtggcctcaaaggatgtgtccgtctggtgtagtaatgattacctgggcatgagccgacaccctcaggtcttgcaagccacacaggagaccctgcagcgtcatggtgctggagctggtggcacccgcaacatctcaggcaccagtaagtttt

SEQ ID NO: 31001 - DNA, 507 bp, Homo sapiens
  misc_feature (1)...(507): n = A,T,C or G
agggcaggggnnnnnnnnnnaattgatnctcgatctacagtggagcaagtcgcggnaagagcggctccatgaactacccagcaccccagtgtttccactgagctttcagatccaggcgtggggactggcaggagggacagcttctggtgggggacatttgagatgccccagagctgtagcagaagcagtgggaagaggaagggccagggctccagtcaatcaggcgttggggacccctctgcccaaccccccagaggctcagtttcacatctgccctgcgccctgccaggctgcccatagcagtgagcaccactgtcagggtcacctcgcagggaacctcaaccaggccggccgaggggccaaggagcctcctgtgcccatccgcttacgggagagagcctgcacattgcatccactgcggtgcctgcccacccactccatgggagcctgtctgtttctgcagagcccctcctgatttgggagttctcaggcaggaagggagggatt

SEQ ID NO: 31002 - DNA, 480 bp, Homo sapiens
  misc_feature (1)...(480): n = A,T,C or G
ngggcttggagaccctatnccagngtgttggaattctgtggtgagtgtgggcagcgccatgcgctctgagtccactgctgcagcagaacacaaagggaagatcatcatgcacgacccatttgccatgcggcccttttttggctacaacttcgggcactacctggaacactggctgagcatggaagggcgcaagggggcccagctgccccgtatcttccatgtcaactggttccggcgtgacgaggcagggcacttcctgtggccaggctttggggagaatgctcgggtgctagactggatctgccggcggttagagggggaggacagtgcccgagagacacccattgggctggtgccaaaggaaggagccttggatctcagcggcctcagagctatagacaccactcagctgttctccctccccaaggacttctgggaacaggaggttcgtgacattcggagctacctgacagagcaagt

SEQ ID NO: 31003 - DNA, 465 bp, Homo sapiens
  misc_feature (1)...(465): n = A,T,C or G
aactgcggttnnnnnnnnccaaaagtcctcacagaagcgncgagnnaacctgagcaagccacacgggcagacacagagggcacccttggcaaacctttataggcctggccagaccctgctgctcactcagctgccctgggggctgctttccctgggcacgggctccagggatcatctctgggcactcccttcctgccccaggccctggctctgcccttccctggggggcggagcagggtccaggtttcacacttgccacctcctggaggtcaagaagagcacagtccccgtgcctgctctgccactgtgctccagcaccgtgaccttgtgtgactcgtccgctgtctttggaccgctgtgtttcaatctgcaaaatggggatggggaaggttcaatcagcagatgacccccacgccttggcagatgtgacattgggggcctaggctggcaactcccggggcataa

SEQ ID NO: 31004 - DNA, 463 bp, Homo sapiens
  misc_feature (1)...(463): n = A,T,C or G
tggcnggttatgaaatcatgaactccggaannngcnggaantcgtccaatagagtaaccgttagccacatgtgggcattgaactcttgaaatttggctgatgcaactgagaaatcgaattgttaagggttaaaactttaaatttaagtggcctcacgtggatgacggctgctgtgttggacagcacagctacacatcagtgaggccagcaccagggactcagtgcaggttttggagcagctgcagcagcaacatgatgtgagggatagatgcactaggaggaccaatggagtttgccatgagggctgggcaagggtggtgcttggatgaggtgggaggccacatgtgtgagtgggaacagtgaaactatcacgaccatggataaaagaagggaggaacccatggctgaggaaagaggctccagccttgtggggagtaagtgggacttatggctagagatgacg

SEQ ID NO: 31005 - DNA, 462 bp, Homo sapiens
  misc_feature (1)...(462): n = A,T,C or G
tgccgnttnnnnnnnaattgagtctgtccaagncgcgaattccttgcagtgagctgagatggcgccactgcgctccagcttgggtgacagagtgagactctgcctcataaaaaaagacttaatgcaccaactatatccgctcatccagttattttgtagggttcatgtgagagttaaatgaagttgaaagattggaattaaactgacatagtctggaatgcttagggatgtagcttctgtacaatttggaacaaaggagaagttaagactgcattttaaaatatcactggccaagctgaatcagagggactaactctagagaggagattccagaggcagtgagggaatatataatggaaatttattaaggcttagtgactaaacttgagggtgagagaagaaaaaaaataaagatgtatgaggtttttagcttttgtgatcacagaaaataatgataccaan

SEQ ID NO: 31006 - DNA, 460 bp, Homo sapiens
  misc_feature (1)...(460): n = A,T,C or G
ggcgnttnnnnttactaagtctgtgcgtgtcgncgaattccagctttgcagttctcctggagttcgctgaggagcagctgcgagccgaccatgtcttcatttgcttccacaagaaccgcgaggacagagccgccttgctccgaaccttcagctttttgggctttgagattgtgagaccggggcatccccttgtccccaagagacccgacgcttgcttcatggcctacacgttcgagagagagtcttcgggagaggaggaggagtagggccgcctcggggctgggcatccggcccctggggccaccccttgtcagccgggtgggtaggaaccgtagactcgctcatctcgcctgggtttgtccgcatgttgtaatcgtgcaaataaacgctcactccgaanaaaaaaaaaaaaaaaaagaaaaaaaaaaaaaaaaaaaaaaaaactaaaacttctnggaaa

SEQ ID NO: 31007 - DNA, 474 bp, Homo sapiens
  misc_feature (1)...(474): n = A,T,C or G
cggacgttccnnatgagnncctctcagatnacactaggaagngcggnggaantccgggaagaacctcttggccatggtgatacaggggcccctcttccttctcttcacactactgctgcagcaccgaagccaactcctgccacagcccagggtgaggtctctgccactcctgggagaggaggacgaggatgtagcccgtgaacgggagcgggtggtccaaggagccacccagggggatgtgttggtgctgaggaacttgaccaaggtataccgtgggcagaggatgccagctgttgaccgcttgtgcctggggattccccctggtgagtgttttgggctgctgggtgtgaatggagcagggaagacgtccacgtttcgcatggtgacgggggacacattggccagcaggggcgaggctgtgctggcaggccacagcgtggcccgggaacccagtgctgcgcacctcagcatggg

SEQ ID NO: 31008 - DNA, 249 bp, Homo sapiens
  misc_feature (1)...(249): n = A,T,C or G
tatggggctangagcacggnttcctggatcccaccaacatacaaagcagccactcactgacccccaggaccaggatggcaaaggatgaagaggaccggaactgaccagccagctgtccctcttacctaaagacttaaaccaatgccctagtgagggggcattgggcattaagccctgacctttagatgctcatactttgactctatgagtactttcctataagtgtttgcttgtgttcacctgctaacn

SEQ ID NO: 31009 - DNA, 464 bp, Homo sapiens
  misc_feature (1)...(464): n = A,T,C or G
cggccggggtaggagatcacgatactccngaannggcnggaatctgnagatacttgcactgaagtcacagcgtccagcctgatcaaggtgaattttctgggatatgtggaggagaagggcaccatctgcttcccaggggacaccacaggcttctgtctgcactcggccatctatgcagcgaggcccgacgtgcgctgcatcatccacctgcacacaccggccacagcagcggtgtcggccatgaagtggggcctcctgcctgtctcccacaatgccctgttggtgggggacatggcctattatgacttcaatggggaaatggagcaggaagccgatcggatcaacctgcagaagtgccttggacccacctgcaagatcctggtgctaagaaaccatggagtggttgctctgggtgacacggtagaggaggcattttacaagatcttccacctgcaggctgcatg

SEQ ID NO: 31010 - DNA, 468 bp, Homo sapiens
  misc_feature (1)...(468): n = A,T,C or G
tganggagcngngccngnnncctgaaaaactgagacactcggacangcggnggaattccgggtccacgcgtgtgatcgtccgtgcgtctagcctttgcccacgcagctttcagtcatggcctccggtaacgcgcgcatcggaaagccagcccctgacttcaaggccacagcggtggttgatggcgccttcaaagaggtgaagctgtcggactacaaagggaagtacgtggtcctctttttctaccctctggacttcacttttgtgtgccccaccgagatcatcgcgttcagcaaccgtgcagaggacttccgcaagctgggctgtgaagtgctgggcgtctcggtggactctcagttcacccacctggcttggatcaacaccccccggaaagagggaggcttgggccccctgaacatccccctgcttgctgacgtgaccagacgcttgtctgaggattacggcgtgct

SEQ ID NO: 31011 - DNA, 497 bp, Homo sapiens
  misc_feature (1)...(497): n = A,T,C or G
tggttccnnagcggccccaatgagacccccttgggtaccttcagcaagngcggnggaannncagagaccagggaactagtcgccatcaagaaggttctccaggacaagaggttcaagaaccgagagctgcagatcatgcgtaagctggaccactgcaatattgtgaggctgagatactttttctactccagcggcgagaagaaagacgagctttacctaaatctggtgctggaatatgtgcccgagacagtgtaccgggtggcccgccacttcaccaaggccaagttgaccatccctatcctctatgtcaaggtgtacatgtaccagctcttccgcagcttggcctacatccactcccagggcgtgtgtcaccgcgacatcaagccccagaacctgctggtggaccctgacactgctgtcctcaagctctgcgattttggcagtgcaaagcagttggtccgaggggagcccaatgtctcctacatctgttctcgctt

SEQ ID NO: 31012 - DNA, 465 bp, Homo sapiens
  misc_feature (1)...(465): n = A,T,C or G
aagcnnnnntnnnnnttatgcgtgcatcctctgcagcgtcgtggaattcgccttggggaggaagatgggattggggtagactctgggaggctggctggcgggaggcctgggggctctgcagggcctggcaagctggcaaccggggactccaaccccccaggaggccgaatgctgagcttggcaatggtggcctggatggagctgatgggcacatccccaccgaggaccaggtcctgggagtcctgaggaaggtggttcttctggctgatgcttgcactggccaagggtttgcatggaggaggcacaccatggcgctgcaggacctgctccacgtgtctcaccactgcctcatagcagaacctgaggtgcagcttctcctgcagcatgtgctttctctgctgccgcatgcgccgcaccagctgaggcagctcaaggattccgttcccagcctccacctcctgcaca

SEQ ID NO: 31013 - DNA, 248 bp, Homo sapiens
  misc_feature (1)...(248): n = A,T,C or G
actagccgcacggccgcccgggaactgctgacgcttgatgagaaggacccacggcgtctgttcgaaggcaacgccctgctgcggcggctggtccgcattggggtgctggatgagggcaagatgaagctggattacatcctgggcctgaagatagaggatttcttagagagacgcctgcagacccaagtcttcaagctgggcttggccaagtccatccaccacgctcgcgtgctgatccgncagcgcca

SEQ ID NO: 31014 - DNA, 482 bp, Homo sapiens
  misc_feature (1)...(482): n = A,T,C or G
gccgntnnntttgactgagatcctcgcagnggcgggaantccttcacaagctggtcatgaggcgcaagggcatctctgggaaaggacctggggctggtgaggggcccggaggagcctttgcccgcgtgtcagactccatccctcctctgccgccaccgcagcagccacaggcagaggaggacgaggacgactgggaatcctagggggctccatgacaccttcccccccagacccagacttgggccgttgctctgacatggacacagccaggacaagctgctcagacctacttccttgggagggggtgacggaaccagcactgtgtggagaccagcttcaaggagcggaaggctggcttgaggccacacagctggggcggggacttctgtctgcctgtgctccatggggggacggctccacccagcctgcgccactgtgttcttctcttaagaggcttccagagaaaacggcacaccaatcaa

SEQ ID NO: 31015 - DNA, 456 bp, Homo sapiens
  misc_feature (1)...(456): n = A,T,C or G
nactggatgacctgaggacagngcggnggaattcagttcccgctgccccaccgggtcctgcgccgtcagcacaagccacgcttcaccaccaagaggcccaacaccttcttctaggtgcagggccctcgtccgggtgtgccccaaataaactcaggaacgccnaaaaaaaaaaaaaaaaaaaaaaaaaaaaaangggggccctttaatttaaaagggccctttaaaacccggtaaaaaaccccgagggggcttttaaatggccaaccattttttgtttaccccccccccgggtttttttttatcttggaaggggccccccccattttttttttaaaaaaaaaaaaaaaaaatcccctcatttggtggaagggggggtttttttttgggggcnccagnattgtaattcctgggatgcatgactatctgtacagaataaggtttttggagcacatgttg

SEQ ID NO: 31016 - DNA, 418 bp, Homo sapiens
  misc_feature (1)...(418): n = A,T,C or G
gcagggaggagggagagctgctgatggcctgagaggtccaaccgggccctggctgcagagctcaggtggtggggcttgcagggcagggctgtggccagggcaaagagcggccatcacagcttacgcatgactcgaaggtgtttatgaggacctactgtgtgccatgtgcctactgaggcttacacattcaaggcgttatcggaccctgaccagtgctcccaggtgccctgtaacacagtctgctggcctctgggagggcagtctcctaagttctttatggggtctgagcagggattgcagggatgatgcctccaggagaccaaggtggaccaggagctcctgccttctgtgagaaccaccttgggcagtctttccgaggtggtggcaagagcctggggcccagcctcccagggtcccn

SEQ ID NO: 31017 - DNA, 500 bp, Homo sapiens
  misc_feature (1)...(500): n = A,T,C or G
aagtnggcccgcncccnaatggaaattgagatccatacgcagngngcnggaattccacgtgggtttggtgtttgccacttgctggctgtgtggtcacgagaggctcctccgtatgtggcagaggtgggggttcgaggagacagtggcactgagccccgcacgcggcgggactggtgactctctgcccgctcctgctctgtgcagcaattgccgtccctcccaccacggttcctggtggccttgggatgggttcccgggggtctcctgctgtccggccccaactcctgttcccagtgcgcccccggagccctgtctctctaaatgaggctgacgtggcttggcctgaaggccctgccccgttactctgggtgcatagtgtatgcctttttcttcataactatttctgggaaagaaaaatatgctccattttattattgttccatattagaagacagacattgtggaaggaataatcaggttatccattcagtttcttagtt

SEQ ID NO: 31018 - DNA, 483 bp, Homo sapiens
  misc_feature (1)...(483): n = A,T,C or G
ggcggcttnnaatcgagttcatagtccgtgtggtggaattcggaggaggccatgcagtccctagcttgggagcttgggagctggagagcagggagcagcgtgtgcatggtttctcagctctgtagcaggcagggagctgctgtcttgggtttagtttgcctctcgaacagaaaaatacctgggatcagacttggccagccatctggtttcagccggaagctaacaccctcattctgagtccaggctagtgggtggtggctgaggacccagttggttgaggagtccaactagaaaccaggagaggtagcagaataattaaacccctataggggtggcaagggcctctggccctgggtggaatgtcccatttcctccatcactgagtgggcttccccaaggcagaaaggtttgtcccggagcaagaattttgtttgaatgcgtgtaacttaaattaaccttgtggacctctgctcagctccgctt

SEQ ID NO: 31019 - DNA, 466 bp, Homo sapiens
  misc_feature (1)...(466): n = A,T,C or G
aaaaaaatttgagaccctattccttgaggngcaattcgcgacagacagacgctgggacccacgacgacagaaggcgccgatggccgcgcctgctgagccctgcgcggggcagggggtctggaaccagacagagcctgaacctgccgccaccagcctgctgagcctgtgcttcctgagaacagcaggggtctgggtaccccccatgtacctctgggtccttggtcccatctacctcctcttcatccaccaccatggccggggctacctccggatgtccccactcttcaaagccaagatggtagctgccatccctgggagcctggaaccaggcaatgttcgggggaggcaggggacaggctggaacctggtgaagtcttaaagtagactcctcctatcggggtgtagaagggaatctgttaatcaaacagagcaatattagaaaggctacagaggtcaactcagtgga

SEQ ID NO: 31020 - DNA, 490 bp, Homo sapiens
cgcgctttgaatcattggaagagcgctggaattcacaccgccgaaagacggagagaactgtcacgctcagtccccacaagagtaaaacgagacggtggaagccctcttcccggcactgcacggcatcctgatcctcattcctctgtacccaggctgaaccgcccccagcacctttcccatccttgtcattggagctgggaggggccggaggccaccaacctgaagcacgtagtgccgagtgggcccccgtgaagccctgagtgtgtgactggagcgcctagggccacctccctttcctgcccagcccatcttcctggtccccaggtggctgcagctacaaggagctgtccgcgggcccccaggctgcctccaactcccctcttgacacgcccccctccccccaaatcatagtccctgtgtccccaagctgtggttcttcagattgccttcttcccctctgtgaacaacaggcctcagtgccccgtcttgg

SEQ ID NO: 31021 - DNA, 468 bp, Homo sapiens
  misc_feature (1)...(468): n = A,T,C or G
gaaaaaattganaccctnnnatcgagaacctagtcagtgtgctggaattccgggaggaccacggaacacaggaacctgcttctgaggagacttttcttctggactgacaacttccgaccctgctggccccaggtgctgccttctctgatggcttctccagcggcctcagtaccaccttagcagtcttctgccatgagctgccccacgaactgggtaggaatggcaggagcagggtggggtggactccagaaaggagatagctccaaggggtagagcttggaggctggtgggtggcatggatgaggggcaccccagcttactccctcccatcctgtcctctgtctccaataggtgactttgccatgctgctccagtcagggctgtcctttcggcggctgctgctgctgagcctcgtgtctggagccctgggattggggggtgcagtcctgggggtggggctcagcctgg

SEQ ID NO: 31022 - DNA, 487 bp, Homo sapiens
  misc_feature (1)...(487): n = A,T,C or G
gcccgttgnctattgccagggatcctacgcagagncctggaattcctaagagccaaaatgggagaggaaaagactcatatcaacattgtcgtcattggacacgtagattcgggcaagtccaccactactggccatctgatctataaatgcggtggcatcgactaaagaaccattgaaaaatttgagaaggaggctgctgagatgggaaagggctccttcaagtatgcctgggtcttggataaactgaaagctgagcgtgaacgtgggatcaccattgatatctccttgtggaaatttgagaccagcaagtactatgtgactatcattgatgccccaggacacagagactttatcaaaaacatgattacagggacatctcaggctgactgtgctgtcctgattgttgctgctggtgttggtgaatttgaagctggtatctccaagaatgggcagacccgagagcatgcccttctggcttacacactgg

SEQ ID NO: 31023 - DNA, 484 bp, Homo sapiens
  misc_feature (1)...(484): n = A,T,C or G
agcgcatgagaccttggaagagcgctggaattcccagccccttagacagaggccctcaagtctttctctttccctggtcccttgtatcccctgcaggctgagtgcatttggagggagtgagtggccctttcggatccagggaggctggtcctatggcctcatgttaaataggcggggcttgccttctggtgtcggacaagcttctgagacgtcatgaggagattctgcctttgccaggtgactgtctggggagcgggtctgctcccaaggggcctgagcagtccttggcctgctaaggtcttggaacttgcctgcctttccatccatggccagcagcacctgccctacctgccccacttgtccttagcctggacctctgacagcagcatctctaccttctccccagctcccaggaccacaggctcaggcaggggcctccatgggccccaggggaacactggggacttggcctctctctagggan

SEQ ID NO: 31024 - DNA, 485 bp, Homo sapiens
  misc_feature (1)...(485): n = A,T,C or G
agccggctnctatgaatgagtccatacgcagngngcnggaattcgctgccagctgggtctgggcctctgcgaccaggtagacgaccctgacttgcggcgctgcacgtacagcctatttgcagccttatcgggtctgatgggtgagggcctggcgccccacttggaacagatcaccacgctcatgctgctgtcactgcgttccaccgagggcattgtgcctcagtatgacgggagcagctccttccttctgtttgacgatgagagtgatggggaagaagaggaggagctcatggatgaggatgtggaagaagaggatgactcagagatctcagggtacagcgtggagaatgccttcttcgatgagaaggaagacacctgtgctgccgtgggggagatctctgtgaacaccagtgtggccttccttccatacatggaaagtgtctttgaagaagtatttaaactgctggagtgccctcacctgaatg

SEQ ID NO: 31025 - DNA, 468 bp, Homo sapiens
aaaaaaattttgagtccctagtccttgaggtgcaattccactggatgacaccaaactgattatccaccagacactcagcgtcttagaagatattgtggagaatatctcgggggagtccaccaagtctcgacagatttgctaccagtcgctgcaggaatctgttcaggtctccctggccctctttccagcttttatccatcagtcagatgtgactgatgagatgctgagcttcttcctcactctgtttcgaggccttagagtacagatgggtgtgcctttcactgagcaaatcatacagactttcctcaacatgtttaccagagagcagttagccgagagcatcctccacgagggcagcacaggctgccgggtggtggagaagtttctgaagatcctgcaggtggtggtccaggagccaggccaggtgttcaagcccttcctccccagcatcatcgccctgtgcatgga

SEQ ID NO: 31026 - DNA, 492 bp, Homo sapiens
  misc_feature (1)...(492): n = A,T,C or G
nttttgacaagcctccgaaannnctatcgtagactactcgnacagngccgcggaanncnaaaaacgtagtgggtgtgtattaacagaaaatgcttctgagaagtttatatctagtttggtctttaccctagttgtagttggaagagtgtagaacagagtttttctttctgagtgttctttttaacttcagtgttagtgctagtagtaaccttatatgtcatctctccagaggtcttcatcaaggattcacatggcagtcctgatctgaagggcatatttaaaatgtacttgtccagatttcactgctaaagattatgattcagtaggtctaggatgggcttcagccgtttgggttgattgtgatagcatacatgtctttagttgaggactgctggtattacctgcaattttgagataaagaaaagtgcaggaaaatcttcctccaggatcactaaagctgagccctagcttgttacctgtggaggcattgag

SEQ ID NO: 31027 - DNA, 486 bp, Homo sapiens
  misc_feature (1)...(486): n = A,T,C or G
ggattcgatccccttnnnnnntntaactgatgtncctagtccgtgtggtggaattcctcttggacctggtggacaggagctggggcggctgcaggtccctgcacagcaacgaggcattccttgctcaggcaagacacatcttgtcatctgttgaagaattcacagcagctcaggacagctctgcgatggtgggtgaagatgtcggctccctggctctggagagtaagtccctgcaaagccgccttgctgagcagcagcagcagcacgcccgggagatgagcgaggtgacggcggagctgcaccacacacacaaggagctggatgatttgagacaacatttagataaatctttggaagagaacagtaggttaaaatcgcttttgttgagtatgaaaaaggaagtgaagagtgcagacactgcagccacgttaaatttgcagatcgctggacttcaaacaagtgtgaagaggctgtgtggcgagattg

SEQ ID NO: 31028 - DNA, 516 bp, Homo sapiens
  misc_feature (1)...(516): n = A,T,C or G
agaggccgnncccctttagacaatcgatcccctgntcagagtggtggaattcgctgactgtggcggcggcggcctcgaggtgacaactgtctccgtcgcaggctccggcgggggcgcaggaggtcgcccggcgcgtcactgtcgggtcggcgagccacgggggccgccgcagcaccatggcgaccaccgtcagcactcagcgcgggccggtgtacatcggtgagctcccgcaggacttccttcgcatcacgcccacacagcagcagcggcaggtccagctggacgcccaggcggcccagcagctgcagtacggaggcgcagtgggcaccgtgggccgactgaacatcacggtggtacaggcaaagttggccaagaattacggcatgacccgcatggacccctactgccgactgcgcctgggctacgcggtgtacgagacgcccacggcacacaatggcgccaagaatccccgctggaataaggtcatccactgcacggtgcccccaggcgtggact

SEQ ID NO: 31029 - DNA, 484 bp, Homo sapiens
  misc_feature (1)...(484): n = A,T,C or G
ggatcgagatccntnnnnnnnnnnatcgtagtccctantccgtgtggtggaattcaagtagaggtgctgcctgccctgaccgacaactacatgtacctggtcattgatgatgagaccaaggaggctgccattgtggatccggtgcagccccagaaggtgcgcatggctgtgcctggctctccctgccctggtcacccagctcggagtcctcacccccgatgggtttcctaaccgcagtgtccttgcaactttgcctaagctaaatggaaattagtctccggccactctgttaacagggccccaagaagggtggaggcgagaagcagtgacacagaaagcgctgtgcagtacaatcctgggcacttgagtcttcttgggggctttctgcccctgcatgctgcctctgggggtggtgccctcaaagctggaggggcttggagcggtcgtangtggttgcaagagtgtcaagctgagcaggaaggag

SEQ ID NO: 31030 - DNA, 479 bp, Homo sapiens
ggattcgagatccctagtccagtgtggttgaatgacacatcctttgtcactgcctatagacttgtagctgctgtctctctttgtccctgcagagaatcacgtcctggaactgcatgttcttgcgactcttgggacttcatcttaacttctcgctgccccagccatgttttcaaccatggcatccctcccccaattagttccctgtcatcctcgtcaaccttctctgtaagtgcctggtaagcttgcccttgcttaagaactcaaaacatagctgtgctctatttttttgttgttgttgtgactgacagagtgagattccgtctcccaggctggggtgcggtggcgccttctcggctcgctgcagcctgcggcctcctggattcaggcgattctcctgcttcagccttccgagtggctgggatggcaggcactcaccaatatgcctgggtaatttttgtatttttaagtacatacaggat

SEQ ID NO: 31031 - DNA, 503 bp, Homo sapiens
  misc_feature (1)...(503): n = A,T,C or G
gtgggannggggntttgaaccctatnagngtttgataccatatcagagtggtggaattccggaatttacaggcagatttcaagctgatgtgtgataatgcaatgacatacaataggccagataccgtgtactacaagttggcgaagaagatccttcacgcaggctttaagatgatgagcaaacaggcagctcttttgggcaatgaagatacagctgttgaggaacctgtccctgaagttgtaccagtacaagtagaaactgccaagaaatccaaaaagccgagtagagaagttatcagctgcatgtttgagcctgaagggaatgcctgcagcttgacggacagtaccgcaaaggagcacgtgctggcgctggtggagcacgcagctgacgaagctcgggacaggatcaaccggttcctcccaggcggcaagatgggctatctgaagaggaacggggacgggagcctgctctacagcgtggtcaacacggccgagccggacgcc

SEQ ID NO: 31032 - DNA, 478 bp, Homo sapiens
  misc_feature (1)...(478): n = A,T,C or G
ngattgagaccatagtcagtgtgggtagattacctgttgaacacacctctgctttcccacactgccctgacacagtgggccccctgagaagaagatgggcatcaaggcttcaaacacagcagaggtgttctttgatggagtacgggtgccatcggagaacgtgctgggtgaggttgggagtggcttcaaggttgccatgcacatcctcaacaatggaaggtttggcatggctgcggccctggcaggtaccatgagaggcatcattgctaaggcggtgagtaccctgcccgagtccctaggtaacccaaacagaagtctcactgtcccccttgccatgtgtccctgatcacttgcaggcactccctacactagaaactcctcccctaccagcagcccgacttgctagcttaggtctccatccagcgtagactgaactctggttgtatgcaaaacccattcctctggcgcaagcccagcn

SEQ ID NO: 31033 - DNA, 262 bp, Homo sapiens
cagatgcgtgcaggagccactgggcacaacattcctcagaagctatccctaaatgccgagctgcagctggaccggcagagaccccgccagggccggcgggtgctgctgctgggctctcaacaggcaggcaccaccctgaacctggatctgagcggaaagcacagccccatctggcctaccaccatggccttccttcgagatgaggcagacttccgggacaagctgagccccattgtgctcagcctcaatgtgtcctaccgcc

SEQ ID NO: 31034 - DNA, 515 bp, Homo sapiens
  misc_feature (1)...(515): n = A,T,C or G
aggcgcncnnncccattgacatcgaaccactantcagagtggtggaattcctggcttctgctgaccgctgggccccagctcagaagggctatagctggtcccagaggcctggcctggccttccttcccttctcccatccctggcctggggcctctgggaccagctttctctcctggacaccgaggattggaaataagggcctggagctgagtagtagccagtctgctgtgaccacaggctcaggtccgaccctgctgcttggccacagcagtggctgggcaagtgggaaccactatctcttgggagcccccaaaagctgggaaatgctggaggaaccaggcctttcccgcttttgcctggctgcagggttcggctccgcccctgccccccagccctcgtgtgtccacaccgcagtgcctctgcccctcgggggactggacacacatcctgccagaggcgctacgaagctttgcccagatgaagccaggtgggctccgcgttcactcccactctcn

SEQ ID NO: 31035 - DNA, 482 bp, Homo sapiens
  misc_feature (1)...(482): n = A,T,C or G
gaccgtgccatcgagaccctcgatcgatgacactaggacagngcggnggaantccatgagcagcgtgggcttctgcactgaggtggaagaggacctcattgatgccgtcactgggctcagtggcagcgggcctgcctatgcattcatggctctggacgcattggctgatggtggggtgaagatgggtttgccacggcgcctggcaatccaactcggggcccaggctttgctgggagctgccaagatgctgctggactcggagcagcatccatgccagcttaaggacaatgtctgctcccctgggggagccaccatccacgccctgcactttctagagagtgggggcttccgctctctgctcatcaatgcagntgaggcctcctgtatccgaacacgagagctacagtccatggccgaccaagaaaagatctccccagctgcccttaagaagaccctcttagacagagtgaagctggaatccn

SEQ ID NO: 31036 - DNA, 469 bp, Homo sapiens
  misc_feature (1)...(469): n = A,T,C or G
nattcgagagcactaggtagagcgcngtaagnccacacttaaggggtggttttatttgtgcatagctttacaagattcccctctttatgtttagtgtgtagtgtttcacttgaatttgtagctctccaatttgtgtagaaaaacgtagtggttgtgtattaacagaaaatgcttctgagaagtttatatctagtaaggtctttaccctagttgtagttggaagagtgtagaacagagtttttctttctgagtgttctttttaacttcagtgttagtgctagtagtaaccttatatgtcatctctccagaggtcttcatcaaggattcacatggcagtcctgatctgaagggcatatttaaaatgtacttgtccagatttcactgctaaagattatgattcagtaggtctaggatgggcttcagccgtttgggttgattgtgatagcatacatgtctttagttgaggact

SEQ ID NO: 31037 - DNA, 476 bp, Homo sapiens
  misc_feature (1)...(476): n = A,T,C or G
tttgaaccatatccaggggttagttcgcttgtctccagtttaggagctgattgtcattctgccaagtcacctcattcttctgtttgaaagacttaaaaggaattcaaagctttctagtgacaagttaacatatgtgactgaggccgggcgcagtggttgacaattgtaatcccagcactttgggaggccgaggtgggtggatcacctgaggtcaggagtctgagaccagcctggccaacatggtaaaaccccatctctactaaaaatacaaaaattagccaggcatggtggtgtgggtgcctgtaatccaagctacctgggagcctgaggcaggagaatcgctggaacccgggaggtcgaggctgcagtgagctgagatctcaccactgcactccagcctgggcaacagagcgagactccatctcaaaaaaaaaaaaaaaaaaaggggcctgaaaatgggttgggtaattggttcn

SEQ ID NO: 31038 - DNA, 459 bp, Homo sapiens
  misc_feature (1)...(459): n = A,T,C or G
nctgaagaactcgagatcctcggaagngcggnggaattcgtcaaaaggattcaagttatggaagagtaaatgaataagataacattaaggttttgttgttgttttagtgagaggctggaaggccaccaggggcagttagctgtcagcaaggcagcagaagggctggggtcgctacataaggaaaatcagtactagggttgtaaactcaaatgactacagggccagcaaataataaaaaggagggctgcagggctgggtgggaactgtggcggctgctcagctcttcttacagtgctggcactgtgttgccagattgtctgctttgtcagaggacaaaattctgactttttatgtaaaatataattttaaaatgctgatattctgttcaaataacttaaaaacccaaaacaggcaaaagaggatgccagtttgcaatccctgaagtagagagagctcgtg

SEQ ID NO: 31039 - DNA, 467 bp, Homo sapiens
  misc_feature (1)...(467): n = A,T,C or G
ggggtagcgggttnnnnncctgagaactgagtacgtgcgggaacccggaggcctttgccggagcagaacaagcccatggagtctctggacttgaaggacaagaccaaggtgtgggctgggggtgcgggaggcctttggccggcggcagaacaagcccatggagtccctggacttgaaggacaagaccaaggtgtgggctgggggtgcgggaggcctttggccggcggcagaacaagcccatggagtccctggacttgaaggacaagaccaaggtgtgggctgggggtgcgggaggcctttggccggcagcagaacaagcccatggagtccctggacttgaaggacaagaccaaggtacgggctgggggtgcgggaggcctttggccggcagcagaacaagcccatggagtccctggacttgaaggacaagaccaangtgtgggctgggggtgcgggaggcctttggg

SEQ ID NO: 31040 - DNA, 483 bp, Homo sapiens
  misc_feature (1)...(483): n = A,T,C or G
ggaacgagcactgatnaccntcgtctgatgaccataggacagngcggnggaanncgtggccgggagcgggtgctacttcttcaagggtactcagggggtggtgggagactgatcaggcagtggagcagtcttggattcctttcacacttcactggggacaggcctcagcatgtgcccacccctgacccccacctcatgctgggagatcctaacttcaacagcctctgggatctccagtcttgccctggcccagccctcctaatgcccaccaccccgctcctcagggaaacagtactgggagtaccagttccagcaccagcccagtcaggaggagtgtgaaggcagctccctgtcggctgtgtttgaacactttgccatgatgcagcgggacagctgggaggacatcttcgagcttctcttctggggcagaacctctgctggtaccagacagccccagttcattagccgggactggcacggtgt

SEQ ID NO: 31041 - DNA, 446 bp, Homo sapiens
  misc_feature (1)...(446): n = A,T,C or G
nactgagacctgaggaccgtgtcggggaacccgggatgtctcctctgtggaactgctcatgaagtatcaccagggcatcaatgcagagattgaaacccggagcaagaacttcagtgcctgcctggagcttggcgagtccctgctgcagcggcagcaccaggcctcagaggagatccgcgagaaactgcagcaggtgatgtccaggaggaaagagatgaatgagaagtgggaagcccgctgggagcggctccgcatgttgctggaggtgtgccagttctcgagggatgcctctgtggctgaggcgtggctgattgcccaggagccctacctggccagcggggactttggacacacagtggacagtgtggagaagctcatcaagaggcatgaggcttttgagaagtccacggccagctgggcagagcgctttgctgccctggagaacn

SEQ ID NO: 31042 - DNA, 493 bp, Homo sapiens
  misc_feature (1)...(493): n = A,T,C or G
ngatcgagaccccntngnnannnnnnnatcgtagaacactagtcagtgtggtggaattcggtttgtctccaagtttaggagctgattgtcattctgccaagtcacctcattcttctgtttgaaagacttaaaaggaattcaaagctttctagtgacaagttaacatatgtgactgaggccgggcgcagtggttgacaattgtaatcccagcactttgggaggccgaggtgggtggatcacctgaggtcaggagtctgagaccagcctggccaacatggtaaaaccccatctctactaaaaatacaaaaattagccaggcatggtggtgtgggtgcctgtaatccaagctacctgggagcctgaggcaggagaatcgctggaacccgggaggtcgaggctgcagtgagctgagatctcaccactgcactccagcctgggcaacagagcgagactccatctcanaaaaaaaaaaaaaaaaaggggactgaaattg

SEQ ID NO: 31043 - DNA, 462 bp, Homo sapiens
  misc_feature (1)...(462): n = A,T,C or G
attgatacctatcgacangcgcgggaattccttactaggatagtgtttgtctcttcacaccagaaagaaccttggatttggggttcagtttgtgttctcatccaaggctgaagtggattgtcttacagaggtgcgtgtatgctggctttttggaactcaggtattttcctgtgagaagctccaagatcagcctacagatgcctgtttcacctttaatatgacaggtcctaactctagccaccatttactgtgctgcttctgtgggaaacagaagttccaactcttaggttccagggagatacctattttgccccaggatgaggagaggtaagggggatattcctgggtgccctgttgcctgctgagaatacaaacaagtaagcccttctgcacagttcacatgcagcttttcagatatgggttttgtttgtaacttagatatgcacattaaaagacagatct

SEQ ID NO: 31044 - DNA, 487 bp, Homo sapiens
  misc_feature (1)...(487): n = A,T,C or G
gggggccnnagggnnnnnaactgagaccctatcgagngccgtggaattcgggaacacaaacttgctggcgggaagagcccggaaagaaacctgtggatctcccttcgagatcatccaaagagaagaaaggtgacctcacattcgtgccccttagcagcactctgcagaaatgcctcctcagctgcaaaacggcctgaacctctcggccaaagttgtccagggaagcctggacagcctgccccaggcagtgagggagtttctcgagaataacgctgagctgtgtcagcctgatcacatccacatctgtgacggctctgaggaggagaatgggcggcttctgggccagatggaggaagagggcatcctcaggcggctgaagaagtatgacaactgctggttggctctcactgaccccagggatgtggccaggatcgaaagcaagacggttatcgtcacccaagagcaaagagacacagtgcccatcccc

SEQ ID NO: 31045 - DNA, 480 bp, Homo sapiens
  misc_feature (1)...(480): n = A,T,C or G
agcagtgcctttgagaccctataatatnaccctaggaagngcggnggaantcctggcctgcctttctttggtcagtccctgtggtcccccaccagcttcccctcccatatggctgcccaccaagccctgcccccagcccaagaggagcccccactgcctgcggggcagtgatgtctggccaccggctcacaccaatgacttggtcctggggtggcagaagcagcaggtgacaggagcagggcccctgtccctctcttctggccctgtggtacccaggccacacgttgtgcccgctcttagggctgaccggctgcagggaccaccagccgctgctactgtgggccgccccggggcagggtgggcagggcttttgtgggttatgaggacacagaagtccctgaggcccccagacctggcacagccaacctccttcctcccccggttgcccccaactctaaagcctcctccctcccagtgtcn

SEQ ID NO: 31046 - DNA, 511 bp, Homo sapiens
  misc_feature (1)...(511): n = A,T,C or G
tttgggggggggntgggnnagggagcccaggggnnnaattgaaattcatccactatccgcgnggtcgaattcggctttcagccaagctcagctcgggatgcgggacaggagaagggtcatcgggaacagcaccatttgcttcacacttgacttctgtcccttcttggaatgtattactttggagcggcatggcttctggtttatccttatattcccttttgggaaatactgtcacagggataccatggggcccaaacctttgaaagaaatggaagaaaaaaagaagacattaagttaacatctataattcaatttcttaaacgtaaacaacatttgatgcttatttatataacctttcccgaaaactatttcatattaaaaaacaagactacaaaaatctactatctcttcccccaaaagtccaaagaccttcatttctttaggttctacatttttggtaaaaacaaacagctgccctaagcaatgacagaatagttgactatacttaaag

SEQ ID NO: 31047 - DNA, 479 bp, Homo sapiens
  misc_feature (1)...(479): n = A,T,C or G
nttgagatcctggccagggcgtttgatccccatcgcagcagcaggcatcgtgggaaggtgaagagcttccctaaggatgacccgtctcagccggtccacctcacagccttcctgggatacaaggctggcatgactcacatggtgcgggaagtcgacaggccgggatccaaggtgaacaagaaggaggtggtggaggctgtgaccattgtagagacaccacccatggtggttgtgggcattgtgggctacgtggaaacccctcgaggcctccggaccttcaagactgtctttgctgagcacatcagtgatgaatgcaagaggcgtttctataagaattggcataaatctaagaagaaggcctttaccaagtactgcaagaaatggcaggatgaggatggcaagaagcagctggagaaggacttcagcagcatgaagaagtactgccaagtcatccgtgtcattgcccacacccagatgcg

SEQ ID NO: 31048 - DNA, 512 bp, Homo sapiens
  misc_feature (1)...(512): n = A,T,C or G
tggggtgccnnccatagaaatcgaccacgtcagcgaggagcaattcgcatcctgtacctgaaccaggaggtgcccaaggagttactggaattcctgagacttcggcacttccccacagaccccaaggctagcaactggggcaccctgagggagttcctgcctggcgacagcagctcccagcagcaccagcggcctgtcctgagcttccatgtggatccctatgtttgcaacccctccccagagtcgctgcccaacgtggtggtgaatggtgtgctccagggcctctacagcttcagcatcagcccagataaagcccagccaaaggcggcctgtcaccctgctcctctgccaccgatgccctgatcagtccagaggcctttggctgcctcctaagaaagtcatgtgcctctgtcctatgaactccatataaggctgggtcctcctttggcctggacccaggacttaattacccagtgcccagttgtgccacattcccactcaaggctcagaac

SEQ ID NO: 31049 - DNA, 490 bp, Homo sapiens
  misc_feature (1)...(490): n = A,T,C or G
atcgaaacccctnnnannnnnnatcgtagatcactagtccatgtggtggaattccaaagccaaagtcaatgccaaggccaaggatgaccagaccccacttcactgtgcagctcgcatcggccacacaaacatggtgaagctcctgctggaaaataacgccaaccccaacctggccaccaccgccgggcacacccccctgcacattgcagcccgtgagggccatgtggaaacagtcctggcccttctggaaaaggaagcatcccaggcctgcatgaccaagaaaggatttacccctctgcacgtggcggccaagtacgggaaggtgcgggtggcagagctgctgctggagcgggacgcacacccgaatgctgccggaaaaaatggcctgacccccctgcacgtggccgtccatcacaacaacctggacatcgtcaagctgctgcttccccggggcggctccccgcacagccctgcctggaatggctacacc

SEQ ID NO: 31050 - DNA, 486 bp, Homo sapiens
ggatcgagatccctagtccagtgtgctgtaattcctctcgctgcctgaacaacgcccgatacggcatcgcgtggcgcgtgcttggagcttctgagctttgcttgcgcacagcctgtgaggactccctctacaggatgcattttgtggtcctactgggcacgaaccagcttgttcttaacaagctggctgacatgctcactgagaataccctgggccttcacgcctgtctgcagctcggccgcttgaaggaccaggacaaggctgcccccgagatggtttctctgctgaagaggaataactgtgggaaagccctggacatcgcccgccaggcccgagacatgctgggggggaatgggatttctgacgagtatcacgtgatccggcacgccatgaacctggaggccgtgaacacctacgaaggtacacatgacattcacgccctgatccttgggagagctatcacgggaatccaggcgttcacggccc

SEQ ID NO: 31051 - DNA, 250 bp, Homo sapiens
caccttgcatgcagcccgactagcagtctataggcctgaggcttctgggtcctggtgacggggctggcatgaccccgggggtcgtacatgccagtccgcctcagacgaagagggaccgtcggcaagcgccctgtgagtgggccattcggaacatcggacagaagcccaaagagcccaattgtcacaattgtggaacccacattgggctgagatgcaaaacgctacgaggcaccccaaattacctgcccag

SEQ ID NO: 31052 - DNA, 492 bp, Homo sapiens
  misc_feature (1)...(492): n = A,T,C or G
gcccggccaactgatanccnttaatgatnatcatccgccangncgnggaanncangagcctgacatgactggccaactggtcgacctgcctgaatattacttctggggggattaactgacagagacccagcacatgatccagcgacgcatcatggagtctgtgaacgggctgaagtctctctcagcaggaagggtggtggttgtgaagaatcaggagcatcacaacgcattgggagtgatcctacaggtctcctcgaactccaccagcagagtattcacaaccctggtcttgtgtgataagcccttgtcccaggacccacaggacagggggccagccactgcagaggtgccctatccagatgacctcgtgggattcaagctgttcctgcctgaaaggccttgtgaccacaccgtggtcaagctccagccaggagatatggctgccatcaccaccaaggtgctccgggtgaatggggagaagatcttggaggn

SEQ ID NO: 31053 - DNA, 455 bp, Homo sapiens
  misc_feature (1)...(455): n = A,T,C or G
gagcgagcggnnnnaaactgacatagagcntaggacgngncgnggaattcacctctgtggcccggatggatgttatcaggaaggagggtgtccagagcggggaattgtgttatagggaaggtggagcatttgagagaaggggcatccgaggccaccagactcggaggtaagcttgccatggattcacatgggggccagtcgggcagccccatccatcagctgtccatcagctcatagctgtgtctccgccacaggttcccattaaggatgtcgaggcggggaatggtgaggaagagtcgggcatgggtgctggagaagaaggagcggcacaggcgccagggcagggaagtcagacctgacacccagtacaccggccgcaagcgcaagccccgcttctaagtcaccacgcggttctggaaaggcacttgcctctgcacttttctatattgttcagc

SEQ ID NO: 31054 - DNA, 452 bp, Homo sapiens
  misc_feature (1)...(452): n = A,T,C or G
ggcggcttttnnnnaacggatagcacancatgtggcnggacnncgnggagcaggtcacactgcaggacttgagtcagctcatcatccgaaactgcccctcctttgacattcacaccatccacgtgtgtctgcaccttgcagtcttacttggctttccatctgatggtcccctggtgtgtgccctggaacaggagcgaaggctccgcctccctccgaagccacctccccctttgcagccccttctccgaggtgggcaagggttggaagctgctctaagctgcccccgttttctgcggtatccacggcagcatctgatcagcagcctggcagaggcaaggccagaggaactgactccccacgtgatggtgctcctggcccagcacctggcccggcaccggttgcgggagccccagcttctggaagccattgcccacttcctggtggttcaggaa

SEQ ID NO: 31055 - DNA, 500 bp, Homo sapiens
  misc_feature (1)...(500): n = A,T,C or G
tgggntagggaggccaaggggnnnnattgaaattgatccactagtcagcgtggnggaattcgttgaagtacaccatgtagttcatggggaccacatcctcaaagagacaggccacttggccctccccgcagccctgggagtggttcttgccctcctttggctgaccgcagttgttccaacctagcatgggagtcaggccgatggcaaacgacagcacccagcagatggcaatgatgcccttagccctcgtgccggtcaccaagccattgtacctggggagaagagaccagcatcagagatctgagaagccagggttaagcagggccaagagttcagaaccccagagcagcacccgtttccacatttcctgactgtaaggtcttggaccagtcatttcctgccacctcgccccagcatcctcttccgttaagaggaagtaatatgccttgcctttttcacaggcttctgggaggtaacaggagagcaggcatccaagaaat

SEQ ID NO: 31056 - DNA, 495 bp, Homo sapiens
  misc_feature (1)...(495): n = A,T,C or G
gttttagggagcncaggggnnnttttgaaatcggtccactatccgtgtggtggaattccaacgtgtagatcctcgagaactgtggccgactgggtgtgttccgtagacacgctgttggcatttttcttactgatttgagttttctcaccagcagagaacagctgacggtctttccataagtgcttctaagagagatgtgtggtaccccgggctaagtagacagcaactgagccctccctcccaccccagggctcccagagcaacagggagcagggagcataggacctggccgcagccaggaatctacactgaccggctcagcccatgaagtatcttgggctgaagtcacaggatgagactgtttgtatctgtaactgtccttgtcatctgtcttgcagatttagaagaggaatcagaaagctgggacaactctgaggctgaagaggaggagaaagcccctgtgttgccagagagtacagaagggcgggagctgac

SEQ ID NO: 31057 - DNA, 495 bp, Homo sapiens
  misc_feature (1)...(495): n = A,T,C or G
tggtttaggggggntaggggnnnaattgatactcgatcagcgtggcgcaattcgatttttgtctgattgcaatgtctggacgtggtaagcaaggaggcaaagctcgcgccaaagcgaaatcccgctcttctcgcgctggactacagttcccgcggggccgagtgcaccgcctgctccgtanaggcaactacgcagagcgggttggggcaggcgcgccggtgtacctggcggcggtgttatagtacctgaccgccgagatcctggagctggccgtcaacgcggctcgcgacaacaagaagactcgcatcatcccgcgccacttgcagctggccatccgcaacgacgaggagctcaacaaactgctaggccgggtgaccattgctcagggcggcgtccttcctaacatccaggccgtgcttctgcctaagaagaccgagagtcaccacaaggccaagggcaagtgatttgacaggtatctgagctcccggaaacgct

SEQ ID NO: 31058 - DNA, 492 bp, Homo sapiens
  misc_feature (1)...(492): n = A,T,C or G
naatcgatgaccatcgtncangnggngtcgtagaccctagtccatgtggtggaattcgtgtgatcgtccgtgcgtctagcctttgcccacgcagctttcagtcatggcctccagtaacgcgcgcatcggaaagccagcccctgacttcaaggccacagcggtggttgatggcgccttcaaagaggtgaagctgtcggactacaaagggaagtacgtggtcctctttttctaccctctggacttcacttttgtgtgccccaccgagatcatcgcgttcagcaaccgtgcagaggacttccgcaagctgggctgtgaagtgctgggcgtctcggtggactctcagttcacccacctggcttggatcaacaccccccggaaagagggaggcttgggccccctgaacatccccctgcttgctgacgtgaccagacgcttgtctgaggattacggcgtgctgaaaacagatgagggcattgcctacaggggcctctn

SEQ ID NO: 31059 - DNA, 465 bp, Homo sapiens
  misc_feature (1)...(465): n = A,T,C or G
nattcgagacctcgagaccatagtccatgtggtggaattctgcttgtatttcctgccttagaacaggacccagccagcggggtggcccagcaactgctggtgggctttctaaagcacctatctaagccacaagcctgccaaggctcccccactgctggataaagcccaaacagccactcatgtcctccaggacctgccctaacctttctttttctggctcatcttctgccatttcctcccctacactccttaaactctccccaggcctctgcctgtgctgctcctcggcccgggatgccattatcccttcaccaggctcatctccaagagtcttccctcctgcccacagacagctcaccctcactgcaccaccagggttaggatgggggctgtgacttaaagttgtggacgccccagctctccagggatgtacaggggctatgctgggacaaaagagcagctgtc

SEQ ID NO: 31060 - DNA, 462 bp, Homo sapiens
  misc_feature (1)...(462): n = A,T,C or G
aatgagaatgagagcttcggccangngcnggaattcctggggttggtcacccatctggtcaccaagctccgggccaacgtgaacgctcgcacctttgcgggaaacacacccctgcacctggcagctggactggggtacccgaccctcacccgcctccttctgaaggctggtgctgacatccatgctgaaaacgaggagcccctgtgcccactgccttcaccccctacctctgatagcgactcggactctgaagggcctgagaaggacacccgaagcagcttccggggccacacgcctcttgacctcacttgcagcaccaaggtgaagaccttgctgctaaatgctgctcagaacaccatggagccacccctgaccccgcccagcccagcagggccgggactgtcacttggtgatacagctctgcagaacctggagcagctgctagacgggccagaagcccag

SEQ ID NO: 31061 - DNA, 486 bp, Homo sapiens
  misc_feature (1)...(486): n = A,T,C or G
nctcgaganccntagtccagngtggngtagttcggcatcgacatcctgtactcgggctcccagaaggccctgaacgcccctccagggacctcgctcatctccttcagtgacaaggccaaaaagaagatgtactcccgcaagacgaagcccttctccttctacctggacatcaagtggctggccaacttctggggctgtgacgaccagcccaggatgtaccatcacacaatccccgtcatcagcctgtacagcctgagagagagcctggccctcattgcggaacagggcctggagaacagctggcgccagcaccgcgaggccgcggcgtatctgcatgggcgcctgcaggcactggggctgcagctcttcgtgaaggacccggcgctccggcttcccacagtcaccactgtggctgtacccgctggctatgactggagagacatcgtcagctacgtcatagaccacttcgacattgagatcatgggt

SEQ ID NO: 31062 - DNA, 508 bp, Homo sapiens
  misc_feature (1)...(508): n = A,T,C or G
aggatgtcgcngcagtgccccccaatagatacccctcgtagagacccntccgnanngngcnggaannnngagaaacccgccccccggccctgtgtgcagcggcagccccaggggttttttgtcacctttttcatgaccccgtcctcagcgcctgcaaatgaggacaggctcgtacaaaaaggccggggtgcttgcgggcctacatgctgatccccatgtcactgggtggcttggagaattcccgggatggcagcaacacaggcagggagaccccccacccctaccccacactctgatcaccgccagggtcatggtagaacatttgcctcaagctttgcagtgggatctgcattaactgtcattcaggacaccaagagcttaaagcaaacccccgtctctatcctgaaagcagtccccctccacagagtgatgtctctgtagacagtcccaggcgcgacaggtcttccgaggacccgttagcagattggcccctccggccctgcctgct

SEQ ID NO: 31063 - DNA, 494 bp, Homo sapiens
  misc_feature (1)...(494): n = A,T,C or G
tggcctcnnaagggcccccctaaaanntcctaaagngcccagaagngcgnggaannngnaagagggtggatcggatggatcagcgttgctccaagctgctcgtggctgggggccattcgggcaactcaccctggacagtcagcttggggaattggcatggccagcatttctgcggggggactctaatgaaggatcagtggatactgactgcccggcagtgcttctcctcctgccatatgcctctcacgggctatgaggtatggttgggcaccctgttccagaacccacaacatggagagccacgcctacagcgggtcccagtagccaagatgctgtgtgggccctcaagctctcagcttgtcctgctcaagctggagagatctgtgaccctgaaccagcgtgtggccctgatctgcctgccgcctgaatgatatgtggagcctccacggaccaagtgtgagattgcacgccggggtgagaccaaaggtacgggn

SEQ ID NO: 31064 - DNA, 470 bp, Homo sapiens
  misc_feature (1)...(470): n = A,T,C or G
atcgagttccatagcaatcngccnggacntcctacttgccatgctccaggacatgaaaagactgaagataataaactttcacagtccagtatccttcaggaactgtgtgtgtcttaagaccgaagttcaatatggtatttttggtactgtcttccttcagcagtgcatattcttttgcaaagttctttggtttgacaagcattagtgacaaaggcagaaaagatttatcagccatgctaaaagagtgaagaattttgatctttagagacactagttttggccaacttaagattttacgttaatttttacatagtatttgacactcatgcaaaataatgtgaaaacatctagatttagtagtttattctgcgccttttgttaaaactgaagattttggaaaatggttgtcactgctcttccagcctatgaatatttttgtgaaatggaaccatggatttatgtctggatan

SEQ ID NO: 31065 - DNA, 473 bp, Homo sapiens
  misc_feature (1)...(473): n = A,T,C or G
tacgggactccttcgaangcctgataccctccgcaactgcgccttctntgaattcattggcatgatccaagagatccagcaggctgctgagcgcctggagcggaactttgtggacagccggcagctcaaggtatgtgccacctgctttgacctctcggtcagcctgctgcgtgtcttggagatgactatcacactggtgcctgagatattccttgactggacccggcctacctctgagatgctgctgcggcgtcttgcacagctgctaaaccaggtgctgaaccgggtgacagctgagaggaacctgtttgatcgtgtggtcaccctacggctgcctggcctagagagcgtggaccactatcccattctggtggcagtgacgggcatcctggtgcagctcctggtgcgtggcccagcctcagagagagagcaagccacatcagtgctcctggcagaatcctgcttccagctcg

SEQ ID NO: 31066 - DNA, 468 bp, Homo sapiens
  misc_feature (1)...(468): n = A,T,C or G
attgatagcctcgctagngacgngcaattctttcttacaaagggagcttctcctgtgtctgcagtttctcaaaataatctgctcaaaatagtgctgatgccaaagaggcagatttgggggtggtacattctggtctgtgacaggccctacaaggcagggactaggattgttctcgggcgaatggggcagcggccccgtgagtgcagagagcaaatttcaggatgtttggaggagaggacaccagacttgttgacaggttggatgtgcgggcaaaggcaagagaagagtcaaggttggtgcctgagctttcggtctgagcattggatggacagtggggcctggttcaggacacagtcaggaggcagaagcaacaccgatcactccaatggggaaaaatgtaatgaanaaatcactatacaggacgactcangagacagaaaccacacccatcactccaatgggaaaaan

SEQ ID NO: 31067 - DNA, 469 bp, Homo sapiens
  misc_feature (1)...(469): n = A,T,C or G
taatgatagacatcgaagngacgngcaattcgtggtgcatgcctgtaatcccagctactcgggaggctaaggaaggagattcgctggaacctgggaggtagaggttgcagtgagccaagattgtgccactgtactccagcctgtgcattgggagcgagactccatctcaataaataaataaataaataaatggataaattgtatgtgagtgataactcagtaaagctggtttatttaaaacaacaacaataacaaaaaacacgctaggtgcaatggcttacgtttgtaatcctagcactttgggaagccaaagcagaaggattgcttgagcccacaagtttcagaacagcttgggcgacatagcacgaccccatctttgcgaaaaatgaaaatttagccgggtccccccaccgcctaacctcctcctgccccctgtatggtcaggctgggtggggatgggagaggcctg

SEQ ID NO: 31068 - DNA, 470 bp, Homo sapiens
  misc_feature (1)...(470): n = A,T,C or G
natcgatagcgctacgctagngacgngcaattccaggacagctgtgtggatgtggacgagtgtgcccaggccctgcacgactgtcgccccagccaggactgccataacttgcctggctcctatcagtgcacctgccctgatggttaccgcaagatcgggcccgagtgtgtggacatagacgagtgccgctaccgctactgccagcaccgctgcgtgaacctgcctggctccttccgctgccagtgcgagccgggcttccagctggggcctaacaaccgctcctgtgttgatgtgaacgagtgtgacatgggggccccatgcgagcagcgctgcttcaactcctatgggaccttcctgtgtcgctgccaccagggctatgagctgcatcgggatggcttctcctgcagtgatattgatgagtgtagctactccagctacctctgtcagtaccgctgcgtcaacgagccagg

SEQ ID NO: 31069 - DNA, 471 bp, Homo sapiens
  misc_feature (1)...(471): n = A,T,C or G
nctgatagcctacgtagngacgggcaattcggagcttgaagttgaccgggtccacccgaagctcctaagccactgcctgctggtgaccctggccgcccacctccccgccgagttcacccctgcggtgcacgcctccctggacaagttcctggcttctgtgagcaccgtgctgacctccaaataccgttaagctggagcctcggtggccatgcttcttgccccttgggcctccccccagcccctcctccccttcctgcacccgtacccccgtggtctttgaataaagtctgagtgggcggcaaaaaaaaaaaaaaaaaaaaaaaaaaaaaaaaaaaaaaaaaaaaaaaaaaaaaaaaaaaaggccccctctatataaaaaggggcccaaaaaacccctgtaaacccccgttgtggttttttttaagccccccccttttgtggtgcccccccccccggttttttttttaaggg

SEQ ID NO: 31070 - DNA, 488 bp, Homo sapiens
  misc_feature (1)...(488): n = A,T,C or G
gggaattgatngccctcgnannnaacatagnaccctcaggaagngcggnggaattcggcgggcgcctgtagtcccagctgcttgggaggctgaggcaggagaatggcgtgaacccgggaggcggagcttgcagtgagccgagatcccgccactgcactccagcctgggcgacagagcgagactctgtctcanaaaaaaaaaaaaaaaaaatccttcccgggggggcttttttaaaaaatatggaaaaaggggcggtattaaaaaatggcaaacttaattaatttaaaacccaaccttaggggattcctttaccaaatttataatggactccttttggaaaaaacccgggaaggacatttgggtttaacaatcggatggggctaagaatccctggaattaacaaaaataaaagcccttggccttggatctctttttaccaccccagtggccctaggggagagggaaaaccccgggttgaataaaaaagg

SEQ ID NO: 31071 - DNA, 529 bp, Homo sapiens
  misc_feature (1)...(529): n = A,T,C or G
ccgaaaagaannncccgnnnnnnnnnnntttggagcnccaatcgatgactgtccgngnggcgcgaaacggnttcccaggtggaatgggctaacacaggagatgatgggaacctgtcccgcagtccctgcatgaccattggccctgctggcctggcgatgtgggcatcctggggttcttagggtcccagaacaagccccaggcaagctggaacttgggtggggaggggacatgaggaggataaacagctgactgtggcttcaaggacatcagggccaccccaagtcctcagtgtcctactcctggcaaggagttgggtttggatcaaaagtgtttaaaattaatatgttgtcagtgattagaacaacactgtttacataaaaaccatttttctaattctaacaagttagaatgtgaggaaggaatgaacatgagtgtttaggaacctgccctttggtgctgggctggcgtcccgcactgnggtgtcctcgctgtctgggggctgctctgctgccccggcccaggtcccct

SEQ ID NO: 31072 - DNA, 470 bp, Homo sapiens
  misc_feature (1)...(470): n = A,T,C or G
nactgatagcactcggtagnngcgngcaattcagcatgtccctgctcttccgcctgctcaccaagctctggatctgctgtcgcgatgagggcccagcgagcgagccggacgaggcgctggtggatgaatgctgcctgctgcccagccagctgcttatccccagcctggactggctgccagccagcgacggcctggttagccgcctgcagcccaagcagccccttcgtctgcagtttggccgggcgcccacgctgcctggcagtgctgccaccctgcagctcgacggcctcgccagggccccaggccagcccaagatcgaccacctgcggaggctgcaccttggcgcttgccccacggaggaatgcaaggcctgcaccaggtgcggctgtgtcaccatgctcaagtcgcccaacagaaccacggcggtgaagcagtgggagcagcgctggatcaagaactgcctgtgcggg

SEQ ID NO: 31073 - DNA, 503 bp, Homo sapiens
  misc_feature (1)...(503): n = A,T,C or G
aaattgatgaccgatccgngnggcgcaatncattntagattgaattgaagcaatagaacagtgtatgtttagggaaaatttgtttcaaataacctctgagtaacagcagggtcttattcaacatgctcaaaggaacctaacattcatgagaacaccagaaaggcaagaatttcaagggttattttaactaaaaatctgaggagacagaatgagaagaggcctatcctttagacattaaacacatgattaaacacaagtcatccaaagagagtgcaccagctgtagaacaaaagggacagagtggatgcatcagagaaactccttcaatcatataaaattaatttatgacaaactgaatttaagaaaaccagaggccgggtgcggtggctcacgcctgtaatcccagcaccttgggaggctgaggcaggcagattgcttcagctcaggagtttgagaccagcctgggcaacatggtgaaaccctgtctctcttataaataaaaa

SEQ ID NO: 31074 - DNA, 276 bp, Homo sapiens
ctatatggccgggaccgcaggatgggtgtcggcgtgaccaggcctgagctccctgtctctcctcagtgacatcgtctttaaaccctgcgtggcaatccctgacgcaccgccgtgatgcccacggaagacagggcgacctggaagtccaactacttccttaacatcatcgtaagtgcacggtagagcgcctctgctcttcatgttgccccagcgcaaataaggacagtcagctgctatgtgctgagggtctactcacaccggctactgaattaagcc

SEQ ID NO: 31075 - DNA, 494 bp, Homo sapiens
  misc_feature (1)...(494): n = A,T,C or G
cggcgcggnnnnnnccttgaactgcattgctgtcgcgcgnggngcaattccaagaatgtgcctcttcatgtgcttgtgtgcaacgcagcaacttttgctctaccctggagtctcaccaaagatggcctggagaccacctttcaagtgaatcatctggggcacttctaccttgtccagctcctccaggatgttttgtgccgctcagctcctgcccgtgtcattgtggtctcctcagagtcccatcgatttacagatattaacgactccttgggaaaactggacttcagtcgcctctctccaacaaaaaacgactattgggcgatgctggcttataacaggtccaagctctgcaacatcctcttctccaacgagctgcaccgtcgcctctccccacgcggggtcacgtcgaacgcagtgcatcctggaaatatgatgtactccaacattcatcgcagctggtgggtgtacacactgctgtttaccttggcgaggcc

SEQ ID NO: 31076 - DNA, 515 bp, Homo sapiens
  misc_feature (1)...(515): n = A,T,C or G
agggccnnnnnnnttttgaaatcgaaccactgntcagagtggtggaattccagccgttaagtgggctttgctattcacaagggcctctgggtgtcctggcagagaggggagatggcacaggcaccaggtgctagggtgccagggcctcccgagaaggaacaggtgcaaagcaggcaattagcccagaaggtatccgtggggcaggcagcctagatctgatgggggaagccaccaggattacatcatctgctgtaacaactgctctgaaaagaagatatttttcaacctgaacttgcagtagctagtggagaggcaggtcactgaaaggcagtcaggtgagatgccctgtctggcccaaaacgatctcggaccctcggtgctggtctcactctggtgaggctgtccctgatgcttggccttctctccagggaaccagtggatgaggtgctgcagatccccccatccctgctgacatgcggcggctgccagcagaacatcggggaccgctacttccn

SEQ ID NO: 31077 - DNA, 503 bp, Homo sapiens
  misc_feature (1)...(503): n = A,T,C or G
naattgatgcccgatccgagngccgcaanncgnncgccaaggctcaggaagctcggtatttcactgtcactagccaatgaggcctttaaggaaaaaacagataagactgtaggagtttatatggatccgttaactcacttgtacaagacattgggaaagatactgggggtggggggaaacaatacagagtttcaaaagataaatagagactgtcataatcaccacatgtcctggcagccagggctacggggtcaggagaagctttattccctggcctgcagcactgcaagagaccctaggaggaggagagctccgccaggccctgcaggctgggcagcctgccttcggccacatttcctaacaccactcagcagagccctgccagcaaaggccagtgtgcaaaaaatgttatgccctatatatgtttgggaagtgcacaataatttaaacagctttcttatttcttaacttctctgggtaatttgggtgctacttgatcttgg

SEQ ID NO: 31078 - DNA, 510 bp, Homo sapiens
  misc_feature (1)...(510): n = A,T,C or G
cggggtanttnnnnnnnnnagggctcgagatacgntgtccagngnggtggaattcctatcacaggcgtcagatactaataaaggtttgtggcagaaacctcccttcaaataaaggttcaatcccttaaattgcagttagaactttcaggaacctatcataccctaagcatcaccatgctttgataaaattgggtgtttcctttatatagatattaatttagttaaactttcaccaatatcttacacttatataacaggctttatataagggcctcagcagcgtaatttcacctgaggcagagaattatcctaattttgcaggtgagagctgtggctcacggggccagagccatgaaaacggtgcacgggagctgggagagctggcctcggtctccagttctctgcacatgtcccacctctcaatcttgttgcttcagtcaaagacagtgtcaatctttcccatgtgaggacctacttaattgggaattaaaatatttatacatttagtgg

SEQ ID NO: 31079 - DNA, 512 bp, Homo sapiens
  misc_feature (1)...(512): n = A,T,C or G
agggccccnnnnntttggacatcagtcagcgtgtgggaattccccgaggcccctgccgccgccgctcccgctgctgtcgccgcgcagagccggagcaggagccacggccgagaggagggaggaggaggaggaggaggtggaggaggtggaggaggtggaggangcgcccgaccggggggatcgtcagtatttaaacagatcacatcatgcgtgagtacaagctagtggtccttggttcaggaggcgttgggaagtctgctctgacagttcagtttgttcagggaatttttgttgaaaaatatgacccaacgatagaagattcctacagaaagcaagttgaagtcgattgccaacagtgtatgctcgaaatcctggatactgcagggacagagcaatttacagcaatgagggatttgtatatgaagaacggccaaggttntgcactagtatattctattacagctcagtccacgtttaacgacttacaggacctgagggaacagattttacgg

SEQ ID NO: 31080 - DNA, 493 bp, Homo sapiens
  misc_feature (1)...(493): n = A,T,C or G
cgccccccccgngnnnnnnatgaaaacctaatgatntccctagtccagtgcggnggaattcagatctcagaaaatgaaaggaacacgcagcttctgaaagtgagtaacatcacgttggatagcaagggtagtaaacaattctggattctgaaggtagaataacttctgagagctacagacatagctatatatgggtaccatattttgttttgtgttgttggaacagtggaagctgtttgagctgtataggctagaaagctacccttagtccactagtagaagagaggaagatggaggaagagttccaagttaattttattatcgctcacaacaatcaaatttcttctgtaaagaaaaagggcactcactagtaatgttttagggcactcactagtaatgttttaaaaagtattagcatagggataatcactggcacaaatacaccttcctgcatagctgaggaactaccaaaacaaaacagatcatatagtgt

SEQ ID NO: 31081 - DNA, 535 bp, Homo sapiens
  misc_feature (1)...(535): n = A,T,C or G
ggatatcgancnncncccgnnnagnnccnnnnaaattgagnnccaatcgatgaccgtccgngnngggcaanncggcaaccccggtgtttggctgggttctagcgtagccgtctgtgtggccggtgggggacctgcggtcggagtgggagggccagtctgcacccaagaggtggaagaggacgggctttaggctggaagcgccttagaggagccatttttccaggtggggccccaggcagaggctccgacagggagcctggccatagtcgcgcagccggggaggtggagcgcgtcccagacccgagcccccgacctcagccaaacccattccttctgtccttggaggccagaggggactctgagcatcggaaaggatgcctggtttgcttttatgtgaaccgacagagctttacaacatcctgaatcaggccacaaaactctccagattaacagaccccaactatctctgtttattggatgtccgttccaaatgggagtatgacgaaagccatgtgatcactgcccttcgagtgaa

SEQ ID NO: 31082 - DNA, 497 bp, Homo sapiens
  misc_feature (1)...(497): n = A,T,C or G
nattgagcaccatcggagngctgcaanncccggccggcttcaagccacactggaccgctccctgctcaagacctacgagcaggtgctggagaaccttgaatctaagaggttccagctggtggattcaaggtctcaagggcggttcctgggcaccgagccggagccggatgcagtaggactggactcgggccatatccgtggtgccgtcaacatgcctttcatggacttcctgactgaggatggcttcgagaagggcccagaagagctccgtgctctgttccagaccaagaaggtggatctctcgcagcctctcattgccacgtgccgcaagggagtcaccgcctgccacgtggccttggctgcctacctctgcggcaagcctgatgtggccgtgtacgatggctcctggtccgagtggtttcgccgggcccccccagagagccgtgtgtcccagggaaagtctgagaaggcctgagccgtgacctcttttcttactg

SEQ ID NO: 31083 - DNA, 469 bp, Homo sapiens
  misc_feature (1)...(469): n = A,T,C or G
ggggagagccgggttnnnnnnnaattgtagaactgaggaccntgcgnnggaacccgagaaccagtcaagcttacgggtatgctggtggccgtgactattagctagccagaccggcatgttgctttcagatattcaggatccaccactgattccaaggctaaacagagaggaagtgagtttcccacattaaagttagctaaaagaagtcagcagacatatgtgtcatgactttgacctgaatctggggtaagagccttagctccagtttttgaaggagctcatgcaagagtcagctccatatgtgtttctccttgtgagtgcatgtgtgtacttgcaggcacttaatgtacattgtgtgtttaaatgagtgttagtgtgttgatctgtacttggggtgaatgaatgggtaaatgtatgtatgtgaacatatgaacacaggtgtgttgtgggagtgcaagagaatgcatgg

SEQ ID NO: 31084 - DNA, 483 bp, Homo sapiens
  misc_feature (1)...(483): n = A,T,C or G
cattacgcccccctggtangctttgcaagngccgcggaantccgnnggaggggtggccgcatggagtgagtactgtctctggccaccgagcagagccagtgacagcagcgtcctggtaggcaggcaggcgtatcaggtttcagaggatgcggctgggaacgggagtagaggtgaggggtcgttgcatctgtcgcggtgtgtatcttttgggggttcagcgccaccagcgacttgggcctcattcatcgcgcttacatttctccacctcatttgaagaacgagcttcgtagcccacggagctgaggacctcactgtcacccaggctggagtgcagtggtgcaatcacagctcactggcagcctcgacctcctgagctcaagagctcctccacctcagcctcctgagtagctggggccacaggtatatgagctccctgaaagcacaaagcagttatttccatcttcagatcattcagagattatg

SEQ ID NO: 31085 - DNA, 467 bp, Homo sapiens
  misc_feature (1)...(467): n = A,T,C or G
cggccagggttttgtaccatggagagcattgngaanngncgnggaantcgcctcctgtcaggacacccagcctttcttgaagatggcagcccatctctttccttttctttgctgcctcccctcgacctaggcgtagctacatcttcaaacgggagcccccagaaggctgtgagaaagtgcgtgtgtttgaagaagccacgtctccaggtcctgacctggccttcctgacttcctgtcctgacaagaacaaagtccatttcaacccgactggctcagccttctgccccgtcaacctgatgaagcccctcttccccggcatgggcttcatcttccgtaactgcccctcaaacccgggatcttctcttcccccggccagccccaggccaccacctcggaaggatccggaagcctccaaggcctccccactgccattcgagccatggcagcgcaccccaccatcataagag

SEQ ID NO: 31086 - DNA, 488 bp, Homo sapiens
  misc_feature (1)...(488): n = A,T,C or G
tgggatcnnaggggggnntttgannccctatcgtagaccctagtccatgtggtggaattctgtaggagagtggctctctcagatctctcagggcgtctggttatagggaaacaagtggagcagggacgtggctttaattggagcactcggctgggctgcttggggagactcttccgtgcgttcttcctctggatagaaccaccacctcctgggcgtcactgacaagctccatcttaacctccaaagccacagaactaggggctcagagccagagctggcagccgccagccaaaatgatgccattgcctgagctgacagccaagcccttctgtgggtcacctttctcctcacccagccccttgctcttcccttttgaaaggcccgtgtgttttctttccttaccctgtgcttgctcatgtctactccggttttctctaccacatccttagagccatcacctggcacgcaggcgccttacattctacggt

SEQ ID NO: 31087 - DNA, 494 bp, Homo sapiens
  misc_feature (1)...(494): n = A,T,C or G
ccccccccccgacgaccnttttgagacccttttgagatcactaggacanngcgnggaattcaagatgatgtaaaaatggccctgaaaaaagacagggaaagcatgggactccggtacattgaggtgttcaagtcccacagaaccgagatggattgggtgttgaagcacagtggtcccaacagtgccgacagcgccaacgatggcttcgtgcggcttcgaggactcccatttggatgcacaaaggaagaaattgttcagttcttctcagggttggaaattgtgccaaacgggatcacattgcctgtggaccccgaaggcaagattacaggggaagcgttcgtgcagtttgcctcgcaggagttagctgagaaggctctagggaaacacaaggagaggatagggcacaggtacattgaggtgtttaagagcagccaggaggaagttaggtcatactcagatccccctctgaagttcatgtccgtgcagcggccagg

SEQ ID NO: 31088 - DNA, 487 bp, Homo sapiens
  misc_feature (1)...(487): n = A,T,C or G
gcggcccgtaagatgccctctagnnactctccggaangccgnggaannatgncctgggcgtgctcccccgggcacctactcctaagagtacccattacatatcagtttccctcaccaagctcagccccctctgccctctggtgagtctcctgagtccctttggagtccctctcttgctcccatgcagacaactggaagcaggagctgacaaaattcatcagccccgaccagctgcctgtggagtttggggggaccatgactgaccccgatggcaaccccaagtgcctgaccaagatcaactatgggggtgaggtgcccaagagctactacctgtgcgagcaggtgaggctgcagtatgagcacacgaggtccgtgggccgcggctcctccctgcaggtggagaacgagatcctgttcccgggctgtgtgctcaggtggcagtttgcttcagatggtggggacatcggctttggggttttcctgaaat

SEQ ID NO: 31089 - DNA, 493 bp, Homo sapiens
  misc_feature (1)...(493): n = A,T,C or G
tgtggcccnagggcccacnaactgagaccanattgaagngcggtggaaancggcaagaggatcccttgagtccagaagtttgaggttctagtgagctgatcatgccacttcacgccagcctgggtgacagagtgagattctgtctcaaaaaaataaataagaaaaggaaaagaatcatatgctgaagttgctggtgagaatcttttatccgtgacattgtggagaaggaaaaagatgtttgtgctggttttgctgtctcaccccaaactgcaaaacttaggaccatagcatgtgataactgcttagttaagatggaaaaggcatgaaatttgtgggtgaaagacgtaaacaaaaacatcttccagctgatggcaccatgttgcaccagaaagcactgagcctatacgaaggtttcaaaggtttcagcaagggttcccctgaaatgagtgccaccaggccatttactgtaaggaatagttacacagattcaggg

SEQ ID NO: 31090 - DNA, 499 bp, Homo sapiens
  misc_feature (1)...(499): n = A,T,C or G
aggtgtcccnnaggggnnncnaacctcgatgacccnatcgaagagcggtggaaancggcaagaggatcccttgagtccagaagtttgaggttctagtgagctgatcatgccactgcacgccagcctgggtgacagagtgagattctgtctcaaaaaaataaataagaaaaggaaaagaatcatatgctgaagttgctggtgagaatcttttatccgtgacattgtggagaaggaaaaagatgtttgtgctggttttgctgtctcaccccaaactgcaaaacttaggaccatagcatgtgataactgcttagttaagatggaaaaggcatgaaatttgtgggtgaaagacgtaaacaaaaacatcttccagctgatggcaccatgttgcaccagaaagcactgagcctatacgaaggtttcaaaggtttcagcaagggttcccctgaaatgagtgccaccaggccatttactgtaaggaatagttacacagattcaggaa

SEQ ID NO: 31091 - DNA, 494 bp, Homo sapiens
  misc_feature (1)...(494): n = A,T,C or G
ggggccagcggccngtaagatgcctactgagactcctcggaagngcggnggaantcancgctgccactgacttctgctcccaccactccacggaccctgctcttgccaaagttaacagtggcctcctagttgctaaacacagctccaacttcctggtcctgttcatgctaggagcctctggcactgttgacccactcttccttcctgaaactctctcctacctttgcgatgccacactcttctggctttcctcctgcctccctggctgttgcttctttgttcctttgaagcctcctctgtctgttctcactccaccccagaactctgtcctcagccccaggacctacgtactttccttgggtgactgtacccgtccttagcttcaggtgtctttggtagacacataaactcccatctaaggtcacttattcattaaaaaaaaaaaattaaaaaactttcccctaccaggcaagcaggggttgttttatttaaac

SEQ ID NO: 31092 - DNA, 493 bp, Homo sapiens
  misc_feature (1)...(493): n = A,T,C or G
gcgtccnaaggcgnccntttgagaccatatcgatgaccctaggcagnngcgnggaattcggcaagaggatcccttgagtccagaagtttgaggttctagtgagctgatcatgccactgcacgccagcctgggtgacagagtgagattctgtctcaaaaaaataaataagaaaaggaaaagaatcatatgctgaagttgctggtgagaatcttttatccgtgacattgtggagaaggaaaaagatgtttgtgctggttttgctgtctcaccccaaactgcaaaacttaggaccatagcatgtgataactgcttagttaagatggaaaaggcatgaaatttgtgggtgaaagacgtaaacaaaaacatcttccagctgatggcaccatgttgcaccagaaagcactgagcctatacgaaggtttcaaaggtttcagcaagggttcccctgaaatgagtgccaccaggccatttactgtaaggaatagttacacag

SEQ ID NO: 31093 - DNA, 493 bp, Homo sapiens
  misc_feature (1)...(493): n = A,T,C or G
agtgtcccnaggggccccnaatcgagaccatattgaagagccggtggaaacgacggcccttgtaaaatgccaagtcttcctgagaagagaggccaaagagggatgggaaggagggtccgtcaagtggcactgagactcctttcaggttcggagtgaacttctcctattacggcctgagtctggatgtgtcggggctggggctgaacgtgtaccagacacagctgttgttcggggctgtggaactgccctccaagctgctggtctacttgtcggtgcgctacgcaggacgccgcctcacgcaagccgggacactgctgggcacggccctggcgttcggcactagactgctagtgtcctccggtgagcccagtcccataggttctgcccaccccagaagccgggccaggaaccctgcccactccccggagaccccacctcctggccaagaacccactcctcccccagatccctgctcttacccagtgagctcaga

SEQ ID NO: 31094 - DNA, 506 bp, Homo sapiens
  misc_feature (1)...(506): n = A,T,C or G
agaatggcccnnnnnaggccggccaatagatanccntanatagagagccgtaanncatgccannggcggnggcggcggnggcggnggtggctcctccggctatggctcctactaccaaggtgacaactacaactcaccggtgcccccaaaacacgctgggaagaagcagccgcacgggggccagcagaagcccccctacggctcgggctaccagtcccaccagggccagcagcagtcctacaaccagagcccctacagcaactatggccctccacagggcaagcagaaaggctataaccatggacaaggcagctactcctactcgaactcctacaactctcccgggggcgggggcggatccgactacaactacgagagcaaattcaactacagtggtagtggaggccgaagcggcgggaacagctacggcttaagcggggcatcctacaacccagggtcacacggnggctacggcggaggttctgggggcggctcctcataccaag

SEQ ID NO: 31095 - DNA, 448 bp, Homo sapiens
  misc_feature (1)...(448): n = A,T,C or G
agcggctgnnnnnaactgactgcattcntggngcgggacncgaactatttgcattcacaccaacagtgtattttttgtttcagcaactcaggggaatgagactcttctcttcagccagatgggaaattccttgcaggcagagaccatttcttggcttctctcctgctgaagagtccccatacctagaactgggcacagagtgggcactgcatagtccctgaggatgagcaggggctaattctgccccccttgtgaccctccatccctcccttgggagaggaggccattgtctaccatttagtttctgtatctggttcctgctgagatcggctggcatggggtccctctgaaatgctgacttagtttggattctcccaaaagcggtccctgaaatgaggactggggtgcatgtggtttatttgggaggtgattgcacgaagcattggtn

SEQ ID NO: 31096 - DNA, 424 bp, Homo sapiens
acaaatcacacgtgggtctggcgcacgggcatgaagcccagtgcacggaggacccagtgccacctgcctcgcccgccatcccggccagcttacattgccatagcagtcctcgtcgtcttccgacatagccggcaggtaagcggtgagcttcggaggcgtctgttggtgcaggttctcccacgtgacggactcgaagaacgggtgtgctttaagaggtccgtatccttccatttcctcacagcctaaccgctttgtggcatctaaaaccttaagtaacaatcaagacaagtcactgccagggtgaaaacgtgattctgaccaaagaaacccaaacctggtagccgggcacggtggctcatgcctgtcatcccagcactttgggaggctgaggcgggcagatcacctgaggtcaggagttcgaaac

SEQ ID NO: 31097 - DNA, 461 bp, Homo sapiens
  misc_feature (1)...(461): n = A,T,C or G
nttcgagatctctagtccatgtggtggaattccggagcctcgctcggcctcggnggagccacgagaggtgggagttggacccgcagcgggccaggagccctgtcattggaggacccgccaaaaaggaagcaaaccctctttttctttatccaaccccaaatagctagggcctagggggaagactcacatatcgataaatggtttgttgcccgttttattctctgggaaatacaactgatcttaccaaagaaataacctgtctcttgccgtgtttacttagagccatagaatacctgtttcagagctgaaggggacctgagcccatgataatccattacctcgtgagaaagcggaaaaactgacttcagcttgcccagatggcgcagagaatgggtttcccgtaaccccgcctgtgtctttccttcagcctcgtcccaaatgccgtgggagggaaggcactc

SEQ ID NO: 31098 - DNA, 463 bp, Homo sapiens
  misc_feature (1)...(463): n = A,T,C or G
nattgagncccgtagaccatagtcagtgtggtggaattcctgaatcactgggacttaagtcaataagtggcagccaccaggcaggcccagctggagccaaaccaaggcctggattctcctcgtggatgtctggcacagcatgagccctgatgtgcgctttctgctcctgctcctgctcctgccccttcggaggcctgtgccagtggcagctgggcccggagacaccaggccggcactgctctccttcgaggcacccgtgtttgtgccgacgctgactcccggttgtctgcagcagccacgtggccgaaatggagcctctccacgggggctccttccccagcccctggatggcacagcagcctctcctgtctgtcaccacgtgtgacctgctcccttactcttcagccgctcatccacgtctgcaggggcatctaactctgtcccagggtatcccagaccctgg

SEQ ID NO: 31099 - DNA, 460 bp, Homo sapiens
  misc_feature (1)...(460): n = A,T,C or G
nttgagaatcgtagacactaggccgagtggtggaattcgcttttccagggtcatgccttggcatttgctcactgtacctgataaggaaagtggccttgtagcaaaatttgacttgaattttgacagtctcaattatgaaactctcagcccctggagacaagactatttgtatcaccagtgagagttactagtcattttatatccattaactcacaagggatgtacagtgtattttatagataaaattgaagctcaaaagagtgcagtaacttggccaggtctacatatttaggtaaatggtagcaccaggattcgggcctgctgttttctgattccaaggctagcattccattctgcctctgcattttgtgtaccactggggcaccaactgatgccttctggagtgtttgatatcctgggggccatgtgtctgattttcccaaatgaagaaagaaaggaa

SEQ ID NO: 31100 - DNA, 464 bp, Homo sapiens
  misc_feature (1)...(464): n = A,T,C or G
nttttgagacctgtagcnactgtggnggaattcacccgctcgagccgggttcgtgctggggccccacgaagatcagctcgccggcaactacaggtgccgctaccgctcctgggtgccccacaccttcgaatcggagctcagcgaccctgtggagctcctggtggcagaaagctgatgcagccgcgggcccagggtgctgttggtgtcctcagaagtgccggggattctggactggctccctcccctcctgttgcagcacaaggccggggtctctggggggctggagaagcctccctcattcctcccaggaattaataaatgtgaagagagctctgtttaaaaaaaaaaaaaaaaaaaaaaaaggcggccgttcgagtttaaagggcccgttaaaacccgttgatcaccctcgattggcctttttagttgccacccttttgttgttggcccctcccccgtgcttt

SEQ ID NO: 31101 - DNA, 429 bp, Homo sapiens
gtgtgtgtgtgttaaccaaggtctaattgagcacagtaaaatgcaccacggagaattttggttggccaaagagttctacatgatagggtgggaaggtgcggggcctctcccatcctgggcctcagctgtgggcctagacagaccctggctagttagggaacccccacgctgacaccaaatggcatgtcaggaaccgagccatccattgggaagtttgtggccccctccttctgacctgttccccacttaggctcactttgcttccgcctaggctttgacttcaagacttgcaacgtgctggtggctttggagcagcaatccccagatattgcccagtgcgtccatctggacagaaatgaggaggatgtgggggcaggagatcaggtagctcggcactgcatgtgggagctgtgtgttgagctggctggg

SEQ ID NO: 31102 - DNA, 473 bp, Homo sapiens
  misc_feature (1)...(473): n = A,T,C or G
natcgagaccactgtcgagngtcgttgaattctggcaatggcccaggagactggagataacctgtactggggctcagtcactggttctcagagcaatgccgtgtcgcccaccccggctcctcgcaacccatccgaccccatgccccaggccccagccctgtggattgaaaccacagcctacgccctgctgcacctcctgcttcacgagggcaaagcatagatggcagaccaggctgcggcctggctcacccgtcagggcagcttccaagggggattccgcagtacccaagacacggtgattgccctggatgccctgtctgcctactggattgcctcccacaccactgaggagaggggtctcaatgtgactctcagctccacaggccggaatgggttcaagtcccacgcgctgcagctgaacaaccgccagattcgcggcctggaggaggagctgcagttttccttgggcagcn

SEQ ID NO: 31103 - DNA, 477 bp, Homo sapiens
  misc_feature (1)...(477): n = A,T,C or G
natcgaagaccctactcgcagaccataggccangtggtggaattccgcggggtcgcggttcctgcggtcctggacttggccccagacagccggcagggtcgtggtcagaacgccggccgggaccatctgcacaggcgctcgacagctccaagacgctgcggccaagcagaaagttgaacagaacgcggctcccagccacaccaagttcagcatttaccctcccattccaggagaggagagctctctgaggtgggcaggaaagaaatttgaggagatcccaattgcacacattaaagcatcccacaacaacacacagatgcaggtagtctctgctagtaatgagccccttgcctttgcttactgtggcacagagggatttcggaatgccaagaagggcacaggcatcgcagcacagacagcaggcatagccgcagcggcgagagctaaacaaaagggcgtgatccacatgcgagttgg

SEQ ID NO: 31104 - DNA, 498 bp, Homo sapiens
  misc_feature (1)...(498): n = A,T,C or G
caggccgnagggcccccccaggtangcaaagaaggtctcggaanncncnttgggaactctagtctcgcctcgggttgcaatggaccccaactgctcctgtgccgctgcaggtgtctcctgcacctgcgccagctcctgcaagtgcaaagagtgcaaatgcacctcctgcaagaagagctgctgctcctgctgccctgtgggctgtgccaagtgtgcccagggctgcatctgcaaaggggcatcggagaagtgcagctgctgcgcctgatgtcgggacagccctgctcccaagtacaaatagagtgacccgtaaaatccaggattttttgttttttgctacaatcttgacccctttgctacattcctttttttctgtgaaatatgtgaataataattaaacacttagacttgnnaaaaaaaaaaaaaaaaaaaaaaaaaaaaaaaaaaaaaaaaanccccgcccccctcatttaaaagggccccttaaaccccctttag

SEQ ID NO: 31105 - DNA, 470 bp, Homo sapiens
  misc_feature (1)...(470): n = A,T,C or G
ntcgatacgtgnaacataggcaagngcggnggaattcctgcggcgcctcaagtccgacgtcctttcccagctgcctgccaagcagcgcaagatagtggtgattgccccaggacggatcaatgccaggaccagagctgccctggatgctgcagccaaggaaatgaccaccaaggacaaaactaaacagcagcagaaagatgccctcattctcttcttcaacagaacagctgaagctaaaatcccatctgtcattgaatatatcttggacctactggaaagtggaagagagaagtttttagtatttgcacaccataaggtggtcctggacgcaattacgcaagagcttgagagaaagcacgtgcagcacatccgcatcgatggctccacctcatcagctgagcgggaggacctgtgccagcagttccaactgtcggagaggcatgctgtggccgtgctgtccatcaccgctg

SEQ ID NO: 31106 - DNA, 482 bp, Homo sapiens
  misc_feature (1)...(482): n = A,T,C or G
cccccccccccccccccnattgagacctntnatggagaccgtaggccagngncgnggaantccagagagaacccaccatggtgctgtctcctgccgacaagaccaacgtcaaggccgcctggggtaaggtcggcgcgcacgctggcgagtatggtgcggaggccctggagaggatgttcctgtccttccccaccaccaagacctacttcccgcacttcgacctgagccacggctctgcccaggttaagggccacggcaagaaggtggccgacgcgctgaccaacgccgtggcgcacgtggacgacatgcccaacgcgctgtccgccctgagcgacctgcacgcgcacaagcttcgggtggacccggtcaacttcaagctcctaagccactgcctgctggtgaccctggccgcccacctccccgccgagatcacccctgcggtgcacgcctccctggacaagttcctggcttctgtgagcacc

SEQ ID NO: 31107 - DNA, 466 bp, Homo sapiens
  misc_feature (1)...(466): n = A,T,C or G
aggacggnnnnnnnncctgagaactgagaacctcggggaanccgagcagnccccacgatgcccacaggcatcagctgacgtgtccccccaaataacaaatccctaactttcctataatgtaacggagacagggcagactgtgcccatctcctctcctcaccagctgtgtacctgggcgagtcactttacctccttgagcctcagtttcctcatctgtaagatgggtagaaagaaagactctgcagtcagggtgctgtggcgggttagtgagctctatgagtggtatccacgtccgggattcttgtgactgccgttgtgcccttttccagggctgcatgtctgccctgggtccacctgcagtggcacactcaggcctctaagcccccagtgggcacatttcctaggcagcaagaagcctgagcatgcccccaggaccagcccatcccccaagccctttgtcccctgc

SEQ ID NO: 31108 - DNA, 494 bp, Homo sapiens
  misc_feature (1)...(494): n = A,T,C or G
nggggctcgatgtccccctngnnnnnngnntttgtatatccctagtcagtgtggtggaattcgagcctggagcccagtgagcacagacattagaaccggggctggcacgttcagagaacctttgcccaattctgaagctgtgggtggaagatgagaagccacacagagagcctccgaataacataggagcctcttggccatcttgaggtgctgatgagatgaggatcggcctgaccctcgagcccagcagagcagggcagcccagaagcagatgacactgtcccaaatgtgtggccaccctggagtcagctcagtccctgcacggtccaggggatccccctctactcggtctgcctggcggagcaaagggtgagccctctagaggaaaatgtcgccatcctagacctctgcagtctttcctatgcgttcagcaacagtttaccgggcatgccacgagacaggaccacagcaccgaaaaccacgagaaaaaaaga

SEQ ID NO: 31109 - DNA, 491 bp, Homo sapiens
  misc_feature (1)...(491): n = A,T,C or G
nttcgaaganccatagnncagngttcgaggaccataggccgtgtggtggaatacggaggatctcagcaggcctctagccgcttccagatgcagtctggggagtgggctgaaggtgaagggaggaaggctgtgggccactctcccttctgagaggcagctgcagctcaggccctaatacactctttgccctgtggcctctcccttttccccccttctggttggaggagggagaagtgggaagtagcttgggaactggtttgtccacataaacttccccattgttccttggcccgccctcagggcagagccccctgcccaggctgggtaagagatgggcttggtccagcagggaccctgagggaacaaacccttttccttctggggagagagtgcccccccctaccatgtagttgaacaggggctaggagctccccactcccctccctctaacagcaggctgtgtgggtttcaattcccatccttcccacccn

SEQ ID NO: 31110 - DNA, 451 bp, Homo sapiens
cccgacgatccctcgaccagaatcagattcaggagctcagtttctttttcacttgggtctctggattcctgtcatagggaagggatatcaggaggggaagaggcctttctagaattttctttgagcaggtttacaatttagcttacatttttcgactgtgaacgtgaataggctgctttttgctttcttctttccagaccccacagtagagcacttttcacttatttgggggaggcttcaggggactgttctcaccttaactcagccagaaagatgccctagttgtgatcaaaggtaactcgaggtggagggtagccctggggcccctcgacatcaccgtcattgatggagcctgaaccgtgtgctcctcggcagatgctgttgttgttacttccctccaagaggctggaaaagggctcagagctgctgagcaggaaccggagggtgaccc

SEQ ID NO: 31111 - DNA, 464 bp, Homo sapiens
  misc_feature (1)...(464): n = A,T,C or G
ntggtgtntnacccagcctgcacgcatctgcanggcannanaggtaagggaaggcctccgggtacccaagtgctgacaggccttagaagaccaaggattgacaggtcctgctcccccagagctcaggggtgcagagcccaggcccgcctccctcagacctaagtaagagtccagactctagctgcctcctccctcagacccgaagtctgggcccccagcccctcctccctcagaccctggagtccaggcctcagaccctcctcccttacatgcaggagtacaggccccacccctcctccctcagacccaggagtgcagttccccagcccctcctccgtcagacccaggagtacaggggcttattctctgaaggtattcgatcaactgggctctgattacctgaaatacaaacccattttggcagtgactccaattcccttcagcccctggggctgaggggcagc

SEQ ID NO: 31112 - DNA, 477 bp, Homo sapiens
  misc_feature (1)...(477): n = A,T,C or G
cttgcctaggaagccatcgaanacctaagacctctgttgtacccccccngnntttgcgagctggccggggagggatgctgggacattttctcccgcacacgggtctttgtctcggcgccggggagatgcccggccagggtgcggggtccgactggacggagcgtaactcttctgcagagccgcccgctgtggccgggaccgagggtggcggcggcggatcagctggatactcttgttaccagaattccaaaggttctgatagaatcaaagatggatacaaagtgaactcacacatagctaagctgcaagagttatggaaaactccccaaaatcaaacaatccacctctctaaatcaatgatggaggcgtcctttttcaagcatccagacctcaccacaggccagaagcgttacctgtgcagcattgctaaaatctataatgcanactatctgaagatgtaatgaagaggcagtacat

SEQ ID NO: 31113 - DNA, 467 bp, Homo sapiens
  misc_feature (1)...(467): n = A,T,C or G
aggcngctnnaaaagaacttacagcctccgccanngcgnggaantcgtcaggacctgggcgggtggtcctgagtgctggcccgtgtgcttgaaagggtgtggtgctattgggtcctactgtgttccccagggcccgcagcccccggaagccaatagactccctcagggactctcggtccctcagctactcgcctgtggagcgtagccgtccctcgccccagccctcaccacgggaccagcagagcagcagcagtgagcggggttcccggagaggccagcgtggggacagccgctcccccagccacaagcgcaggagggagacacctagccctcggcccatgagacaccgctcctccaggtctacataaattgtctttgggggattccaccacacccaatgctctggagccacaaggagtgtcccttcttccccagcanaagccggggagggtccttgtctgctctct

SEQ ID NO: 31114 - DNA, 483 bp, Homo sapiens
  misc_feature (1)...(483): n = A,T,C or G
gatgaaaccatttgannnnnccccagngtacaaacgcagngccgngcaanntatgccaacgatgactgcaccaaaaccgtcctggaactggaagaaacacaaagaaatgtgagcagctccctcctagagaagcaggaaaagctgtcggtgattcaggcagacttcgacacactcgaggccgacctcacccggcttggggccctcaaacgacagaacctttcagagatcgtggccctgcagacacgccttaagcacctgcaggctgtgaaggaggggcgctacgtgttcctgttccgctccaagcagtccctagtgctggagcgccagcgcctggacaagcgactggctctcatcgccaccatcctggaccgcgtgcgggacgagtacccccagttccaggaggccctgcacaaggtcagccagatgatcgccaacaagctcgagtcaccagggccctcctagggagcagcctggactccgcct

SEQ ID NO: 31115 - DNA, 468 bp, Homo sapiens
  misc_feature (1)...(468): n = A,T,C or G
naggtgntnaccacggtcncgactaccntttgtcgtggaattcggttggagtctgacgggtaggcgagacgcgcaggcgcagagagccccagccacgccggcccaggtggcctcagcgagggatgcggagacgcccctgaacgaccatggcatcggccgacgagctgaccttccatgaattcgaggaggccactaatcttctggctgacaccccagatgcagccaccaccagcagaagcgatcagctgaccccacaagggcacgtggctgtggccgtgggctcaggtggcagctatggagccgaggatgaggtggaggaggagagtgacaaggccgcgctcctgcaggagcagcagcagcagcagcagccgggattctggaccttcagctactatcagagcttctttgacgtggacacctcacaggtcctggaccggatcaaaggctcactgctgccccggcctggcc

SEQ ID NO: 31116 - DNA, 480 bp, Homo sapiens
  misc_feature (1)...(480): n = A,T,C or G
cgcggcttttgatcggccatcagntactganancannaannnnnnnanctntgtattcatcgacctctcagagcgagtggctcttaagctcgatcagaccttccccttcagcctgatgaggaggatggccgtgttcaagtacgtctcagggtcttcagccgagaggagggcagcccatagccggaaactgaacccggtgcctggctcctaccccacacagagctgccaccctcacctgtccccaagccaccctgtgtcccagacgcagcacgccagtggtcagaagctggcctcctggccctcctgcacccccgggcacatgcccaccttgcctccgtaccagcctgcctccggcctgtgctatgtgcagaaccactttggtccaaaccccacctcctccagtgtctacccagcttctgcgggcacctgcctgggcatccagccccccacgcctgtgaacagccttgcactgtgtatttn

SEQ ID NO: 31117 - DNA, 509 bp, Homo sapiens
  misc_feature (1)...(509): n = A,T,C or G
agggttgatncccctnnnnnnnnnatagaacncccantccgagtggtggaattccgcagaagcagccgccagcgcctattacaacccaggcaatcctcacaacgtctacatgcccacgagccagccgccgccacctccctactacccaccggaagagaagaagacccagtaggccctcctgcctccctgcctcccaccctcatctctctaccctacccctcccatcggggctgtgctggggcttggggaggggagggggcgccttgttctccctccaggtctgatcataaacaattaccaggaactagcattgtgggacattagggcccccggcctcgggagaggtgccgcccagcttcccatgccagcccggagcccacagtgctgcccagcgtacctccctcaccgtctggggctcttctgggagcacggagcatcccctgttcctgtttcactctcagcttctcccctcgaagggactctctggccacctcctccaccgcagtcca

SEQ ID NO: 31118 - DNA, 468 bp, Homo sapiens
  misc_feature (1)...(468): n = A,T,C or G
ctgagcctttgacgcgatgagttcgtcggacngaccccgcngttttgctattctgcacacgctcttcatccagcgttttcggcacgagaccacctttaccatcctgcggcgcttcggctacagcgatgccctggagctgactgcggactatctctcccctctgatccacgtgccccccggctgcagcacggagctcaaccaccttggctaccagtttgtgcagagagtgtttgagaagcacgaccgggaccgcgacggcgccctctcgcccgtggagctgcaaagccttttcagtgtgttcccagcancnccctggggccccgagctcccacgcacagtccgcacagaggccggccggttgcccctgcacggatacctctgccagtggaccctggtgacctacctggacgtccggagctgccttggacacctaggctacctgggctaccccaccctctgtgagcaggg

SEQ ID NO: 31119 - DNA, 488 bp, Homo sapiens
  misc_feature (1)...(488): n = A,T,C or G
gggcgggananaacccagggntgtccagggttgcctgcannnncnnnnaannnaanancttnttggaggaggtgcgcaagggcaacctggagcgatattgcgtggaggagacgtgcagctacgaggaggccgtcgaggctgtggagtcctccacggctacggatgtgttctgggccaagtacacagcttgtgagacagcgaggacgcctcgagataagcttgctgcatgtctggaaggtaactgtgctgagggtctgggtacgaactaccgagggcatgtgaacatcacccggtcaggcattgagtgccagctatggaggagtcgctacccacataagcctgaaatcaactccactacccatcctggggccgacctacaggagaatttctgccgcaaccccgacagcagcaccatgggaccctggtgctacactacagaccccaccgtgaggaggcaggaatgcagcatccctgtctgggcccagatt

SEQ ID NO: 31120 - DNA, 484 bp, Homo sapiens
  misc_feature (1)...(484): n = A,T,C or G
agcgctgnnnnnnaactgacatcacaccntggnacanccanatcaccctaggaccaagaagaacacagacattgtcaagcgctggagcgaccgccaggcccccagcactgagctcagtaccagtggcagctcccactccaagtcctgtgaccagctcaggtgtggcccctacctcagcagcggggacatcgctgacgcgctcagcgtgcactcggccggctcctctagctccgacgtggaggagatcaacatcagcttcgtcccggagtctcctgatggccaggaaaagaagttctgtgaatcagcctcacagtcatccccggagacctccggcatcagctcagcctccagcagcacctcgttctccttaagcctccaccacgcccgtggctgccacacgcacccacaagcgctctgtctcagggctctgcaactccagctccgcgctgccgctctacaaccagcaggtgggcgactgctgtan

SEQ ID NO: 31121 - DNA, 496 bp, Homo sapiens
  misc_feature (1)...(496): n = A,T,C or G
agcattgatcccactcaganggggtagacncacatggccgcttgnggaaggaggcgtcttggcccgggcagcagtggcggcagcgcccgagagagggtgagcttgtcggccacagactgctacattgtgcatgagatctacaatggggagaatgcccaagaccagtttgagtacgagctggagcaggccctggaagcccagtacaagtacattgtgattgagcccactcgcattggcgacgagacagcccgctggatcaccgtgggcaactgcctgcacaagacggccgtgctggcgggcaccgcctgcctcttcaccccgttggcgctgcccttagattattcccactacatttccctgcccgctggtgtgctgagcctggcctgctgcaccctctatgggatctcctggcagtttgacccttgctgcaagtaccaagtggagtacgacgcctataaactgtcgcgcctgcctctgcacacactcacctcctcca

SEQ ID NO: 31122 - DNA, 473 bp, Homo sapiens
  misc_feature (1)...(473): n = A,T,C or G
gttgagnctatagcagcgcccatganttcgtgaganagccngccaattgagctattaaactgcaagaacagcacagaattattagctgggagtgatgctgtattgggcaggggcggcctgatctccatgcggcttgctcagagtgggtaaaccaggttggctgaaacgagggtttacgtgcaggaaagctcctgaaagttggttttaaggagagtggtgacttgtgcaaaatgatgctttaaaaatcaatttggctggggtgtgcaggaaggatggggagggagaaaccaaagataggtaacagacatttgccagatgataacggtggggaagaggggcaggtgtaaagaggaggtagatctttcagggacccctgcttgatgccgcctgctgtccccactgcatcctagcattctctcttcactcttgatagagacaggcctgaaatgacaggccacttgcaggcaatgccn

SEQ ID NO: 31123 - DNA, 495 bp, Homo sapiens
  misc_feature (1)...(495): n = A,T,C or G
agtngcccccnnnaatagaaatcgtgtgcatgngccgggcgcgaccaccttccgtaaacgcctggaaaaagcggngctggcaattgaagtaaaacattacgccatagaaaacgtgcctgcggatgcggatatcgtcgttactcatgccagtctggaagggcgcgtgaaacgtgtgacggataaaccactgatattgattaataactatattggcgatccaaaactcgacactttatttaatcaattaaccgccgaacataaacactgattacagaggtaaaaatgaaaaccaaagttgctgctatttatggcaagcgggatgtccgtctgcgcgtatttgaactgccagaaattaccgataatgaattactggtgagtgtaatttctgacagcgtctgtttatcgacctggaaagcggcgttactcggtagtgaacataaacgcgtacccgacgatttagaaaatcatccggtcattaccgggcatgaatgtgcc

SEQ ID NO: 31124 - DNA, 494 bp, Homo sapiens
  misc_feature (1)...(494): n = A,T,C or G
gagtnnccccnnnnaactgaaaatagatgcgtgngcaggaacncggcctcagntgtatatcagaatcttcagagcactgcgatgttcaggggtgagtcaggtctgtatatgtgcacggggtcttctgaagggtcagtttctgtaatcactttcaggtgtgtcagggccttgtgcagtaacagtgcacacagaagttagtgtttctgtgggctaagggttgtagctctgtatcaagattctgggagtgggtctggatttctggtgtgtggacttaagaagctgtgtcagacttgggggaggggcgttcatgtataactgggttcacataggccaagactcccaggtgcattttaagcagagcctcaggtgtgttagaggtcccaggggcagagaggctatatgtgctgtcagaggccttggggacatttaaggcagagcctctagtgacaggtcctgggacagtgggagccaagggcaagtgctatagttgcagt

SEQ ID NO: 31125 - DNA, 475 bp, Homo sapiens
  misc_feature (1)...(475): n = A,T,C or G
tctcgagatccctagtccatgtggtggaattcggtcagacctggctggggcccagctatgacctctctggtctggtcctcccaggggttgaggtgactggccagtatgagagggagaaggctgggttctcatggatcgaagtgaccttcaagaaccccctggtatgggttcacgcatcccctgaacacgtggtggtgactcggaaccgaagaagctctgcgtacaagtggaaggagacgctattctcagtgatgcccggcctgaagatgaccatggacaagacgggtctcctgctgctcagtgacccagacaaagtgaccatcggcctgttgttctgggatggccgtggggaggggctccggctccttctgcgtgacactgaccgcttctccagccacgttggagggacccttggccagttttaccaggaggtgctctggggatctccagcagcatcagatgacggcagacgcan

SEQ ID NO: 31126 - DNA, 462 bp, Homo sapiens
  misc_feature (1)...(462): n = A,T,C or G
gggccggggtttgatacctttgagaagctggaaannccgaagaggcccctgggggcggacgggcgcgtctccaccgttttcgcagagggatacttgtgaatttttagtggtgtgcggcctcagggccgggcggggctggggttagggactgcggagggaagtggtgcgtgttttttgtcctgaggggtaagtaaaagctcgctcttgtccggaatgctttcagaaattaacggataaatctccacctccaccaattttagtgtcccattgccaaattttcttgagttgttttaatcatctaatgaagtcaggtgccagaaggcaactggatctcgccaggcggccttgaagtttgttaaaaagtagggaccacagcatcatgaaaaataccaaattctgagtaaaatgctgaaatcccgtaccttcttagcttgccggggtaaggatggtacgatttaacgg

SEQ ID NO: 31127 - DNA, 238 bp, Homo sapiens
  misc_feature (1)...(238): n = A,T,C or G
tctatctggacaangnnncgngnnaactgattttttaatgttaccagtaaggcttccagttaacagtaggctatttattagttaagtttggagggagcctgaagatatacaagctctgactgcgtgaggggttggctctccaaccctcacattgttcaaggctcaactgcacctttcctacctaactaccccaccctctgatgtagtaggataaatataaaaacacttagaaatcctg

SEQ ID NO: 31128 - DNA, 456 bp, Homo sapiens
  misc_feature (1)...(456): n = A,T,C or G
atacacactccagatgatgggataacgtttcccaacatacaacggtgcacagaggctaaatgggaagagaacagcgatgcgacttcttggtcacaataaaaacgtgatgagattatgctttttacgcggcattctgaggacactttgctaataaagagcaggaagagcttccatgagggagattcctggtttgtttctggggaaaatgtggagtctagatcaaagaaggaaaacgtgcctaacacttgtggccctggcatctcctggtttgaaccaataaccaagaccagaccctggagggagccactgcgggagcagaactgtcaggggcagcacctggacggtcggggctacctggcaggcccaggcagagaggctggngagacctactgaggccatttgtgagagcaacccttcaggaatcgcttcagtttcacagacctgacttcatctccc

SEQ ID NO: 31129 - DNA, 500 bp, Homo sapiens
  misc_feature (1)...(500): n = A,T,C or G
agcatagatcaccgtccatagtgggttagaanaacacactcgagatgttgggataactttcccaactccaagttccagcgaggctaaattggaagagaacagtgatgtgacttcttggtcagaagaaaaacgtgaagagaaaatgctctttaccggttatcctgaggacagaaagttaaaaaagaacaagaagaattcccatgaaggagtttcctggtttgttcctgtggaaaatgtggagtctagatcaaagaaggaaaacgtgcctaacacttgtggccctggcatctcctggtttgaaccaataaccaagaccagaccctggagggagccactgcgggagcagaactgtcaggggcagcacctggacggtcggggctacctggcaggcccaggcagagaggctggcagagacctactgaggccatttgtgagagcaacccttcaggaatcgcttcagtttcacagacctgacttcatctcccgctctggggagcgga

SEQ ID NO: 31130 - DNA, 454 bp, Homo sapiens
  misc_feature (1)...(454): n = A,T,C or G
gagggccggnnnnacctgaactgagtncntaggccangncgnggaattcggcggaggtgcaggtcctggtgcttgatggtcgaggccatctcctgggccgcctggcggccatcgtggctaaacaggtactgctgggccggaaggtggtggtcgtacgctgtgaaggcatcaacatttctggcaatttctacagaaacaagttgaagtacctggctttcctccgcaagcggatgaacaccaacccttcccgaggcccctaccacttccgggcccccagccgcatcttctggcggaccgtgcgaggtatgctgccccacaaaaccaagcgaggccaggccgctctggaccgtctcaaggtgtttgacggcatcccaccgccctacgacaagaaaaagcggatggtggttcctgctgccctcaaggtcgtgcgtctgaagcctacaagaaagtttgc

SEQ ID NO: 31131 - DNA, 516 bp, Homo sapiens
  misc_feature (1)...(516): n = A,T,C or G
agacgggcggnnnnnnnnnnnaaactgatantcatcngagngngcnggaattccagacgggctcagacaatgagctccaggaaatgtccaatcagggaagtaagtacgtcaatattgaaattcaaaatgctgtcaacggggtgaaacagataaagactctcatagaaaaaacaaacgaagagcgcaagacactgctcagcaacctataagaagccaagaagaagaaagaggatgccctaaatgagaccagggaatcagagacaaagctgaaggagctcccaggagtgtgcaatgagaccatgatggccctctgggaagagtgtaagccctgcctgaaacagacctgcatgaagttctacgcacgcgtctgcagaagtggctcaagcctgggtggccgccagcttgaggagttcctgaaccagagctcgcccttctacttctggatgaatggtgaccgcatcgactccctgctggagaacgaccggcagcagacgcacatgctggatgtcatgcaag

SEQ ID NO: 31132 - DNA, 498 bp, Homo sapiens
  misc_feature (1)...(498): n = A,T,C or G
aggggccncgccncaattgaaactganagcactcgcagngngcnggaattcgnggagggcctgcgtgtctttgacaaggagagcaatggcacggtcatgggtgctgagcttcggcacgtccttgccaccctgggagagaagatgactgaggctgaagtggagcagctgttagctgggcaagaggatgccaatggctgcatcaattatgaagcctttgtcaagcacatcatgtcagggtgaagcagagtcttccaggtgcctggcccttggctttagccataccagggtgagttaaagagaggccccggctgggtgagctgagatggagtcctcgacttatcaccacaccactgccccaaggaccttacaggccctccctgttaataaacagctctaacacggccaggctgggctctgggattctgaaaaaaaaaaacctttgccctggtcaaggaaaaagcgccctctatcgtcttcattgatgaattggatgccacc

SEQ ID NO: 31133 - DNA, 544 bp, Homo sapiens
  misc_feature (1)...(544): n = A,T,C or G
ngggatttgatcagccctcngnnnnnnncatcggagcatcagtccgtgtggngcaattccatcacgttggaaagcaagggtagtaaacaattctggattctgaaggtagaataacttctgagagctacagacatagctatatatgggtaccatattttgttttgtgttgttggaacagtggaagctgtttgagctgtataggctagaaagctacccttagtccactagtagaagagaggaagatggaggaagagttccaagttaattttattatcgctcacaacaatcaaatttcttctgtaaagaaaaagggcactcactagtaatgttttagggcactcactagtaatgttttaaaaagtattagcatagggataatcactggcacaaatacaccttcctgcatagctgaggaactaccaaaacaaaacagatcatatagtgtaagattttaaataaatgacttacaatgaaactgcaacagatgtaaatatctgtgggccatantaccctatcagtacatttattaagcagaaactgcagn

SEQ ID NO: 31134 - DNA, 473 bp, Homo sapiens
  misc_feature (1)...(473): n = A,T,C or G
aggacggggnnnnnncctgatgnactgactatgctaggaagngcggnggaannngggcgctccttcacgccgtaggcaagcggggcggcggctgcggtacctgcccaccgggagctttcccttccttctcctgctgctgctgctctgcatccagctcgggggaggacagaagaaaaaggagaatcttttagctgaaaaagtagagcagctgatggaatggagttccagacgctcaatcttccgaatgaatggtgataaattccgaaaatttataaaggcaccacctcgaaactattccatgattgttatgttcactgctcttcagcctcagcggcagtgttctgtgtgcaggcaagctaatgaagaatatcaaatactggcgaactcctggcgctattcatctgctttttgtaacaagctcttcttcagtatggtggactatgatgaggggacagacgttnttcagcagctcn

SEQ ID NO: 31135 - DNA, 464 bp, Homo sapiens
  misc_feature (1)...(464): n = A,T,C or G
agccggnttnntnnanccatggacccctcgcagagccgcgaanttacaaagatagagacagaccagaataccaacagagatggagatgggaagagagacagcaggaaacagaattgttggggatgcagagccagaggccgaaatctccaccaagcagggctgggggtgagggtggggccttgcctgggcccctcccccagtggtcaagatggaatggagggctgaagatgggaggaagtgggagaggtgggacccaagacacccctggcgggtgtgcccaggtgggcgtggctagcccaacccctcatgacccagcatggcttgagacacaccacgaacccggccacccctgagcaccggcgtgctcctggcatgagcagtgtggaggggctgacccagatgggcagcagctcagaggcgagtgagccactccattcaattcctgcaggcgagatccatggtgg

SEQ ID NO: 31136 - DNA, 535 bp, Homo sapiens
  misc_feature (1)...(535): n = A,T,C or G
cgcaatttgatcatctntcagngnggngcatttgacggaccatcaatgagtacctggccgtagtcgatgctcctcccctggacctccggttcaacccctcgggctacctcttgctggcttcagaaaaggatgctgcagccatggagagcaacgtgaaagtgcagaggcaggagggagccaaagtttctctgatgtctcctgatcagcttcggaacaagtttccctggataaacacagagggagtggctttggcgtcttatgggatggaggacgaaggttggtttgacccctggtgtctgctccaggggcttcggcgaaaggtccagtccttgggagtccttttctgccagggagaggtgacacgttttgtctcttcatctcaacgcatgttgaccacagatgacaaagcggtggtcttgaaaaggatccatgaagtccatgtgaagatggaccgcagccttgagtaccagcctgtggaatgcgccattgtgatcaacgcagcccgagccttgtctgcgcanatcgcagcacttgc

SEQ ID NO: 31137 - DNA, 535 bp, Homo sapiens
  misc_feature (1)...(535): n = A,T,C or G
ggattgaaaccctcnnannnccattgagcatcgtccgngnngggcaantcccagccccaggcctgcacctgaagcagccgtttgtgcagggcctggctctctatacccctgtggtcctcccacgctctctggacttcacagaactggatgttgctgctgagaagattgacaggttcatgcaggctgtgacaggatggaagactggctgctccctgatgggagccagtgtggacagcaccctggctttcaacacctacgtccacttccaagggaagatgaagggcttctccctgctggccgagccccaggagttctgggtggacaacagcacctcagtgtctgttcccatgctctctggcatgggcaccttccagcactggagtgacatccaggacaacttctcggtgactcaagtgcccttcactgagagcgcctgcctgctgctgatccagcctcactatgcctctgaccttggacaggtggagggtctcactttccagcaaaacttccttcaactggatgaggaaactgtctn

SEQ ID NO: 31138 - DNA, 475 bp, Homo sapiens
  misc_feature (1)...(475): n = A,T,C or G
aggacgggccngnnnactgagaaaactanantactaggaagngccgnggaantccggacaagtgcagctgctgcgcctgatgctgggacagccccgctcccagatgtaaagaacgcgacttccacaaacctggattttttatgtacaaccctgaccctgaccgtttgctatattcctttttctatgaaataatgtgaatgataataaaacagctttgacttgaaaaaaaaaaaaaaaaaaaaaaaaaaaaaaaaaaaaaaaaaaaaaaaaaaaaaaaaaaaaaaaaaaaaaaaaaaaaaaaaaaaaaaaaaaannnnggggcccccaaaaaaaaaggggggggaaaaaccccccgaaaacccctcggggggtttttttaaaccccccctttttttttttccccccccccccggttttttttttgtgggggggggggcccccccccttttttttttaaaaaaaaaaaagaagagtt

SEQ ID NO: 31139 - DNA, 526 bp, Homo sapiens
  misc_feature (1)...(526): n = A,T,C or G
atttgacacccctcagggggcattgatgtccgttcgctgngctgtgcattggaactcacacgcctggtttcgggggaaaggggaaagcatgattctcccgtgtgcttgctcccaccggctgtgtgcgagcctggggagggggagggattgcctgtggcaggagagaggcacactgctaagtcagcctgagcccctggggtaggctgcgctcaggaaggtccctgcccggaaaaatgacgtgctcaccagagccgtttggtgtagaaactgaaatctgtagaattgccagtagtatagacaaccttatatggacatgcaggcagctgatcctcgtgaaaatcagggcagacataatttaatcctaaaatgtttcctaccatttttcttttccagtggctagaaagtttgaaatggtggggagaggggatgctgatctcggcagttgtagcttctttgaaggttggttgcggngctggggaaggggtacttgtcatgccacactgcatgtncatttgagctggggtct

SEQ ID NO: 31140 - DNA, 464 bp, Homo sapiens
  misc_feature (1)...(464): n = A,T,C or G
natcgagaatcgtatgccctgtggcggaattcgacagactcctgtcccatcccagagacccctcgtgatcgttccctggcacgtgggccgtggcccggctgggtcggctgaagaactgcggatggaagctgcggaagaggccctgatggggcccaccatcccggacccaagtcttcttcctggcgggcctctcgtctccttcctggattgggcggaagccatcacctggatgcctacgtgggaagggacctcgaatgtgggaccccagcccctctccagctcgaaatccctccacagccacggggacaccctgcacctattcccacgggacaggctggacccagagactctggacccggggcctccccttgagtagagacccgccctctgactgatggacgccgctgacctggggtcagacccgtgggctggacccctgcccaccccgcaggaaccctgaggcc

SEQ ID NO: 31141 - DNA, 467 bp, Homo sapiens
  misc_feature (1)...(467): n = A,T,C or G
natcgagnatcgtgagccntagccgngnggnggaattcattcagtcattcagccaagcctcctcctctagcagcaatttccagctggttaacactatcctgggcaaatgttttaccctgtcctccagcctccctgcttcccttctggccctggaagactgagtctggacggcagagtggagggactgggaggctgtggctgcctccctccctcagcccggctgggactgtctcccggaccccagtgctggggtgggggaagggggacggagaatgactcacgcagggccccagggtggggtgaggaggttcctgctctggcacgtctaggcggaagggagtggagatggggctggttcctgctgcagtgaggggaacagatgggacaataaagactggagactcagttgaataatacaaaactgtttattactacnctgncagaagacagcgaaaaaaaaaaaaaat

SEQ ID NO: 31142 - DNA, 529 bp, Homo sapiens
  misc_feature (1)...(529): n = A,T,C or G
cgcccattgagatcctcgngnnttttgacctcatccgngnggnggaattcgctcatcttctcaaaaacagaacatgccgagtttttgcactgcaagtccaaaaagtttacagactttgatgaagtccggcaggagattgaagcagagaccgacagggtcacggggaccaacaaaggcatctccccagtgcccatcaaccttcgagtctactcgccacacgtgttgaacttgaccctcatcgacctcccgggtatcaccaaggtgcctgtgggcgaccagcctccagacatcgagtaccagatcaaggacatgatcctgcagttcatcagccgggagagcagcctcattctggctgtcacgcccgccaacatggacctggccaactccgacgccctcaagctggccaaggaagtcgatccccaaggcctactggaccatcgtgtcatcaccaagcttgacctgatggacgagggcaccgacgccagggacgttttgagaacaagtgctcccgtgagaaaggctacattgg

SEQ ID NO: 31143 - DNA, 469 bp, Homo sapiens
  misc_feature (1)...(469): n = A,T,C or G
aggagcggccngnnncctgagaaactganaggcaaggaagngccgnggaannncaactccttggagtttgaagacccggagctgagtgccactctttgtgaactgagccttggtaacagcgcccaggaaagataccggctggaggaaccaggaacggagggcaagcagctgggccaagctgtgaatacggcccaggggtgtggcctgaaagtggcctgtgtctcagccgccgtatcggacgagtcagtggctggagacagtggtgtgtacgaggcttccgtgcagagactgggtgcttcagaagctgctgcatttgacggtgacgaatcggaagcagtgggtgcgacccgaattcagattgccctgaagtatgatgagaagaataagcaatttgcaatattaatcatccagctgagtaacctttctgctctgttgcagcaacaagaccagaaagtgaatatccgcgtgg

SEQ ID NO: 31144 - DNA, 497 bp, Homo sapiens
  misc_feature (1)...(497): n = A,T,C or G
aggtcccccaggggccccaactgagaccnccatttagctgcgtaagngcggnggaannncggacgctgaaagggaaactggccaggcagcacccagaggccttcagccatatcccagaggcatccttcctggaggaagaggatgaagaccccatcccacccagcaccacgaccaccattgccacctcagaacagagcacgggctcatgtgacaccagccccgacaccggctcgccctccctgagccccggcttcgaggacctgtcccatgtccagcctggctccccagccatcaacggccgcagccagacagatgacgaggagatgacgggcgaatagccctgctgcccggtgccttgagggggtctcagggcagcagcatacaaggtggcagcgggtaaccctgccttgttctgtcatccagggctcctttgctgccccgttctgtcacccagggctcctagggggacaaggctctctcccgaggggtgtggaatt

SEQ ID NO: 31145 - DNA, 533 bp, Homo sapiens
  misc_feature (1)...(533): n = A,T,C or G
ggggccattagagcntcctccgtgtngggtagtatcaacgccatcaccaagtcgggcctccacacctggccccccctccgcccacccctggggccccgtgcagcgagtcagagcggcagatccggagtacagtggactggagcgagtcagcgacatatggggagcacatctggttcgagaccaacgtgtccggggacttctgctacgttggggagcagtactgtgtagccaggatgctgcagaagtcagtgtctcgaagaaagtgcgcagcctgcaagattgtggtgcacacgccctgcatcgagcagctggagaaggtgggtgggtagctcagctttgcccgcccctgccctttgggtgctgaggccctttcagcgcgcactcacacccacatgttatacaaacggcctgccaggagtgacccagcactcggnggtgaagagtcaaggaccctggagccaaatgcctgcgttcgaatccttgctcctcactgattagctgctgtatccccactgcctggaacanacctggcn

SEQ ID NO: 31146 - DNA, 462 bp, Homo sapiens
  misc_feature (1)...(462): n = A,T,C or G
aggacgggggnnnnaacagaaataccggtagntcgnannnncnggnggnnnggntngtgcgtgagcttgggctctcagcccacccacctggaagcgcccatgtgtcaccttacccaggagagggcggcagaggctgcgagcaggacggcagccccctctccccacccccaggaccctgagatcctgcttcacgggctgcaagaagttggggggccaggattcggcgcggaggccgggggtgtgggtggggagactgcagagactcccgagacccccccaagtcagggcttttcgctggtctcgcagccccagcccagcagctgctgcagtcttgcatgttgtggatgcaagcattttgctgaggaaactgcatagcgttcccaggactctagggcccacgacccctcataagttaagagccgctgatctaatctaaccccactttcaccctcagttaacaag

SEQ ID NO: 31147 - DNA, 509 bp, Homo sapiens
  misc_feature (1)...(509): n = A,T,C or G
tggntgannnnnnaattganncccatcgagcacgtccgngnggnggaattcccttagcagtttccgcatgggccggaccgtggtcgtgctgggcggaggcatcagcggcttggccgccagttaccacctgagccgggccccctgcccccctaaggtggtcctagtggagagcagtgagcgtctgggaggctggattcgctccgttcgaggccctaatggtgctatctttgagcttggacctcggggaattaggccagcgggagccctaggggcccggaccttgctcctggtttctgagcttggcttggattcagaagtgctgcctgtccggggagaccacccagctgcccagaacaggttcctctacgtgggcggtgccctgcatgccctacccactggcctcagggggctactccgcccttcaccccccttctccaaacctctgttttgggctgggctgagggagctgaccaagccccggngcaaagagcctgatgagactgtgcaca

SEQ ID NO: 31148 - DNA, 494 bp, Homo sapiens
  misc_feature (1)...(494): n = A,T,C or G
gggtccccaagaggcccccactgagnccnccagttancnacagaagngcgnggaanncgggtggatcacgtgaggtcaggagttgaagaccagcctgaccgacagggagaaacccccgtctctaccagaaatgcaacattagctgggcgtgctggcgcatgcctgtagtcccagctactcgggaggtggaggcaggagaatcgcttgaacccaggaggcagaggttgcggtgagccaagattgcaccatgacactccagcctgggcaacaagagtgaaactccatctcaaaacaaaaaacaaaaaaccagcatgatttcaagagcagaaacagaagagcttaaaaaccagcataatgagaaagttaggaagcttcttaccaaagcatctggaaatatgcaagcaattcttgtgaactaaaattttcatactgtactatcaaacactagaactcacttattccatctttctgtattttgggactcaattatccac

SEQ ID NO: 31149 - DNA, 550 bp, Homo sapiens
  misc_feature (1)...(550): n = A,T,C or G
aggtnnnaagcaggccnnnnnnncattgaaatcgatnactagtcagagtggtggaattcctgttgtcctctggacatatttatcaatataattgggttttaaatagtataaaagaaaacttgtgatctatataatttatgtatcaccttcattgtaaatttagcaggaaatgcatcacaattatgatttttttttttgcaccagtgaaacaataaagatgctattaccaaaaaaaaaaaaaaaaaaaaaaaaaaaaaaaaaaaaaaaaaaaaaaaaaaaaaaaaaaaaaaaaaaaaaaaaaaaaaaaaaaaaaaaaanngggggcccgttccaaaaaaagggggccaaaaacaccccgtttncccccggggggtttttttttcctgcccccacattttggggtcccccccccccggggttttttttgaggggggggggggcccccccccccccttttattaaaaaaaaaagaaagacgcccccctctccgtcaggaaaaatacactccatcgggcagcncccctgctgataccaccagacagatatanat

SEQ ID NO: 31150 - DNA, 545 bp, Homo sapiens
  misc_feature (1)...(545): n = A,T,C or G
aaggggnatggccggntcnnnnnnaaccttgatnatcgatccgcgtgngcaatncggaatactgtacggacatcactgagccttccattgtgagagctagtctacatggtggagagccaaccaccatcattatacaagatcttggaagtccagaaggtatcgctgttgatcaccttggccgcaacatcttctggacagactctaacctggatcgaatagaagtggcgaagctggacggcacgcagcgccgggtgctctttgagactgacctggtgaatcccagaggcattgtaacggattccgtgagagggaacctttactggacagactggaacagagataaccccaagattgaaacttcctacatggacggcacgaaccggaggatccttgtgcaggatgacctgggcttgcccaatggactgaccttcgatgcgttctcatctcagctctgctgggtggatgcaggcaccaatcgggcggaatgcctgaaccccagtcagcccagcagacgcaaggctctcgaagggctccagtatcctttt

SEQ ID NO: 31151 - DNA, 517 bp, Homo sapiens
attgacatcgatcacatccagaaggggcaattcctatacatgattatcttgagattcattaatgttgtttatatcagtatttcattcgttttgattgctgaatagcattccactaaatggttatattgcaatttgttcatccattcacctgttgataggcatttaaattgtttatagtttttgactgttacaaatgaagttgtcacaagtgttagaattgaaatatgttttcatgtctcttggataaatgcctgggcatggaatgggtacatcatatggtaggtgtgtgtttaacaacttaagaaagtgccaaactgttttccaaaattgtatcattttacattcccaccagcagtgtaagagttccagttcctccacatcttcaccaatacttggtgtagtcagtctttttttaaaattttaaccattctagtatgtggatagtgatatctcattgtgattttagtttgtgtttcttgagtgactaatgatgttgagcatcctttcatatgcttat

SEQ ID NO: 31152 - DNA, 491 bp, Homo sapiens
  misc_feature (1)...(491): n = A,T,C or G
ttttgatnaaccttcggannnntatcgtagactctacggaagngccgcggaanncctgagctccaacgatgcctttgttctgaaaaccccctttttcgcctacctgtgggtgtgtacaggagccagcgaggcagagaagacgggggcccaggagctgctcagggtgctgcgggcccaacctgtgcaggtggcagaaggcagcgagccagatggcttctgggaggccctgggcgggaaggctgcctaccgcacatccccacggctgaaggacaagaagatggatgcccatcctcctcgcctctttgcctgctccaacaagattggacgttttgtgatcgaagaggttcctggtgagctcatgcaggaagacctggcaacggatgacgtcatgcttctggacacctgggaccaggtctttgtctgggttggaaaggattctcaagaagaagaaaagacagaagccttgacttctgctaagcggtacatcgagg

SEQ ID NO: 31153 - DNA, 487 bp, Homo sapiens
  misc_feature (1)...(487): n = A,T,C or G
aggtaattgaataccctgcggcangntgttgagaccactcggacangccggaaccatggcagtgaccaaggagctcttacagatggacctgtactcgctgctaggcattgatgagaaggcagcggacagagaggtaaagaaggcgtataggcagaaggccctctcctgccacccagacaaaaatccagataatcccagagcagctgaactcttccaccagctttctcaggccttggaggtgctgaccgatgctgcagccagggctgcatatgacaaggtcaggaaagccaagaagcaagcagcagagaggacccagaaacttgatgagaaaaggaagaaagtgaagcttgacctggaggcccgggagcggcaggcccaggcccaggagagtgaggaggaagaggagagccggagcaccaggacactagagcaagagatcgaacgcctgagagaagagggttcccggagctggaggaacagcatagcg

SEQ ID NO: 31154 - DNA, 518 bp, Homo sapiens
  misc_feature (1)...(518): n = A,T,C or G
attgacatcgatcgccggtggcaancaccggctccaattttcagctggaggaaatttcccgggctcagcttgtgcccctcccaccttctacctatgtggagtttacagtgtctggcactgactgtgttgctaaagaggccacagaggcagccaagtgtaacctgctggcagaaaagcaatatggcttttgtaaggcaacactcaacgagaagcttggtggggcacaggttgcagtgacctgcacggtgttccaaacacagcccgtgacctcacagccccaaccagaaggtgccaatgaagcagtccccacccccgtggtggacccagatgcacctccgttccctccacttggcgcacctggactccctgcagctggctcacccccaaactcccatgtgttactggcagctcctccaggacaccagttgcaccgggcgcactacgacctgcgccacaccttcatgggtgtggtctcattgcggtcaccctcaggagaagtgtcgcacccccggaaaacc

SEQ ID NO: 31155 - DNA, 521 bp, Homo sapiens
  misc_feature (1)...(521): n = A,T,C or G
nattggacatctgtncgcgtggnggaattctcctgaacctggtgccgctggccgagagcgtggtgaagctgacggcggtgtgcatggagtgcttccgggaagccgcctataccaagaggctcggcacagagaaggaggtcgaggtgattgggggagcagacaagtaccactccgtgtgtcggctctgctacttcaagaaggcctcaggccagcctgccgggccggacaacaaagagaactgcccagtgccaggaaagccaggggaagccgtggctgccaggaagctctttgccccacagcagattctgcaatgcagccctgccaactgagggacctgcaagggccgcccgctcccttcctgccactgccgcctactggacgctgccctgcatgctgcccagccactccaggaggaagtcgggaggcgtggagggtgaccacaccttggccttctgggaactctcctttgtgtggctgccccacctgccgcatgctccctcctctcctacccactggtctgg

SEQ ID NO: 31156 - DNA, 492 bp, Homo sapiens
  misc_feature (1)...(492): n = A,T,C or G
cgccccccccgnnnanccnatctgagaccacattgagngccgtggaaancgccgaccgaggcgngcaaagactccagaattggaggcatgatgaagactctgctgctgtttgtggggcttctgctgacctgggagagtgggcaggtcctgggggaccagacggtctcagacaatgagctccaggaaatgtccaatcagggaagtaagtacgtcaataaggaaattcaaaatgctgtcaacggggtgaaacagataaagactctcatagaaaaaacaaacgaagagcgcaagacactgctcagcaacctagaagaagccaagaagaagaaagaggatgccctaaatgagaccagggaatcagagacaaagctgaaggagctcccaggagtgtgcaatgagaccatgatggccctctgggaagagtgtaagccctgcctgaaacagacctgcatgaagttctacgcacgcgtctgcagaagtggctcatgcctg

SEQ ID NO: 31157 - DNA, 231 bp, Homo sapiens
  misc_feature (1)...(231): n = A,T,C or G
aggccgcncggggaggcagggagntggggggggcaaggcccctgggcctcatcatggcctcacctggggcaagacttggggcctctgggcccccatcgcatccacacctggcggctctgtgaagagccggagagctcctatggctgcctctgcttagaggggaggcccatgatgaagcgggctccactgagcaccctggcctgctccagccacttcggacgtgtcaccaat

SEQ ID NO: 31158 - DNA, 473 bp, Homo sapiens
  misc_feature (1)...(473): n = A,T,C or G
gagggtnnnnnaactagaaactgcnatcgntcggaaanncacgacatgcccaacgcgctgtccgccctgagcgacctgcacgcgcacaagcttcgggtggacccggtcaacttcaagctcctaagccactgcctgctggtgaccctggccgcccacctccccgccgagttcacccctgcggtgcacgcctccctggacaagttcctggcttctgtgagcaccgtgctgacctccaaataccgttaagctggagcctcggtggccatgcttcttgccccttgggcctccccccagcccctcctccccttcctgcacccgtacccccgtggtctttgaataaagtctgagtgggcggcnnanaaaaaaaaaaaaaaaaaaaaaaaaggcgccctttcaatttaaagggccccttaaaaccccgttaaaaaccctgggggggccttttaattgcccacccttttttgtgtcccccc

SEQ ID NO: 31159 - DNA, 536 bp, Homo sapiens
  misc_feature (1)...(536): n = A,T,C or G
aggttnannnnaagggggnnacccaggggnnnnnnnnnaatcgaaacctcatcgaagcacctatccaggggggaattcccctgccacactgcgatcgcatcatcgcggtattcggttcgctgcgttcccgccgccaccgcctcggcgccctttcttggcccttgttcccccaaatgtctgactctgactctcggactgagaaacgcaagaaaaaaagaccaaatggcaaagcaaccttctgatgtaagttctgagtgtgaccgagaaggtagacaattgcagcctgcggagaggcctccccagctcagacctggggcccctacctccctacagacagagccacaaggtaatcctgaaggcaatcacggaggtgaaggggacagctgcccccacggcagccctcagggcccgctggccccacctgccagccctggcccttttgctaccagatccccgcttttcatctttatgagaagatcctccctgctgtctcgatcctccagtgggtatttctcttttgacacagacaggagccc

SEQ ID NO: 31160 - DNA, 513 bp, Homo sapiens
  misc_feature (1)...(513): n = A,T,C or G
agcgctccnnnnnaatagacttcgtccagcgtgggcaattccgtcctcgtggaagtgacatcgtctttaaaccctgcgtggcaatccctgacgcaccgccgtgatgcccagggaagacagggcgacctggaagtccaactacttccttaagatcatccaactattggatgattatccgaaatgtttcattgtgggagcagacaatgtgggctccaagcagatgcagcagatccgcatgtcccttcgcgggaaggctgtggtgctgatgggcaagaacaccatgatgcgcaaggccatccgagggcacctggaaaacaacccagctctggagaaactgctgcctcatatccgagggaatgtgggctttgtgttcaccaaggaggacctcactgagatcagggacatgttgctggccaataaggtgccagctgctgcccgtgctggtgccattgccccatgtgaagtcactgtgccagcccagaacactggtctcgggcccgagaagcctccttt

SEQ ID NO: 31161 - DNA, 517 bp, Homo sapiens
  misc_feature (1)...(517): n = A,T,C or G
aggcccgnnnnnnattgatttcgtccactcagtcagtgtggtggaattccacggatggtgtgaagcactccatgaaccccttctgtgagatcgcggtggaggaggctgtgcggctcaaggagaagaagctggtgaaggaggtcatcgccgtcagctgtgggcctgcacagtgccaggagacgattcgtaccgccctggccatgggtgcagaccgaggtatccacgtggaggtgcccccagcagaagcagaacgcttgggtcccctgcaggtggctcgggtcctggccaagctggcagagaaggagaaggtggacctggtgctgctgggcaaacaggccatcgatgatgactgtaaccagacagggcagatgacagctggatttcttgactggccacagggcacattcgcctcccaggtgacgctggagggggacaagttgaaagtggagcgggagatcgatgggggcctggagaccctgcgcctgaagctgccagctgtggtgacagctgacctgag

SEQ ID NO: 31162 - DNA, 468 bp, Homo sapiens
  misc_feature (1)...(468): n = A,T,C or G
gaggatnnnnaatgaaaacctgttagctgngaaannccacngaaagctgntatggatgatttcgcagcttttgtagagaagtgctgcaaggctgacgataaggagacctgctttgccgaggagggtaaaaaacttgttgctgcaagtcaagctgccttaggcttataacatcacatttaaaagcatctcagcctaccatgagaataagagaaagaaaatgaagatcaaaagcttattcatctgtttttctttttcgttggtgtaaagccaacaccctgtctaaaaaacataaatttctttaatcattttgcctcttttctctgtgcttcaattaataaaaaatggaaagaatctaaaaaaaaaaaaaaaaaaaaaaaaaanngggggccctttaaatttaaagggcccgttaaaaccccttgaaaaaccccaagggggccttttaattgccaaccatctgttgttgcg

SEQ ID NO: 31163 - DNA, 223 bp, Homo sapiens
catgcctgcggaccctccctctcctggcttcccgtctggtcatggcgagattctgggtctgcgtagccggtgctggcttctttcttgcatttttggttttgcattcgcgtttttgtggctctccagttttgaggaactttacttttgcagtttcctggagaactgagaaaattctttaccggctggatgtgggttggcctaagcacccagaatattttaccgg

SEQ ID NO: 31164 - DNA, 484 bp, Homo sapiens
  misc_feature (1)...(484): n = A,T,C or G
gcgcggntnnntactgacatcgcatcatcggcgagngcaattnaggggtgccgcaacagcagagtcctctggacctgaccagggagccgcagttggaacccgtggagcatagccaggtggcccacggtaccaatggcattcatgtcaccggcgggtctatgactatcactggcaacatctacatctacaatggaccagtactggggggaccaccgggtcctggagacctcccagctacccccgaacctccataccccattcccgaagagggggaccctggccctcccgggctctctacaccccaccaggaagatggcaaggcttggcacctagcggagacagagcactgtggtgccacaccctctaacaagggccccaaagaaccaatttatcacccatgactgacggagtctgagaaaaggcagaagaaggggggcacaagggcaccttctcccttgaggcttgcctgcccacgtgggattca

SEQ ID NO: 31165 - DNA, 483 bp, Homo sapiens
  misc_feature (1)...(483): n = A,T,C or G
ggcggccnnnaatcgagatcatagncagtgcggtggaattcggctggtggagccgctgcactctactccccagcgcgggctggagccaggcctgcctaactggccactgtcccatgcgggataccttcccggcagcacggctccctgctgccctctcctggagatccagggaaatggccctgaagagagcaacccaggctggcttcagcaagggaggaaaggaagcacccttattgttgagcacctactaggtgccaggcatgttatctaagtagatattagtatccatattttcagactcagaaactgccgtttagaggttaaggagctaggcagcagtcgctgtatcagaatctgtgtgtgttgcgcccgtctggtgctgctgttgctgggtgtgccggggtgaattaagtgggggtggctgtgcaggtgtttagtccacactctccaatgaccctttggacagctgcgcgatctcactgn

SEQ ID NO: 31166 - DNA, 484 bp, Homo sapiens
  misc_feature (1)...(484): n = A,T,C or G
gggccccttttgaaaccctctagggctaacagtacngncnngnaannnnnnnagnanacnagccaagatgctcagctttataggtgtgacctactcatgtgactttacctcagttttgtgatccccaaaatggacaaaggcgaagctacttcacagagctgttgagaggattaaatgaaacaatgcttgtaaagctctttgcaggagggagcctcggaagcagggcctggccggcaaagcacacctgctgtcaccagggaccacaggcagcatgaagacccccgtggagctggccgtcagtgggatgcagaccctcggccttcaacaccgctgccgaggtggctaccgggtcaaggccaggacgtcatatgtggatgagactctgtttggcagcccagcaggcacccggcctaccccaccggacttcgatccgccctgggtggagaaggctaacagaaccagaggcgtgggcaaagaggcatcg

SEQ ID NO: 31167 - DNA, 467 bp, Homo sapiens
  misc_feature (1)...(467): n = A,T,C or G
gaggtttcgggactgagaccactgaggngctgcgaaannncccggnncgagccactcagcctcgcccagccctgctcaagctgggagtcccctccattttgacacattttctgcagccacccccacacagcgcagcccacggacctcctttggctctctgacagacagcaatgaacaggcactggaaggaatggtacgggggctgaggcagggtggcgtgtccctcctaggccaggcacagcccctgacccaggaacaggggcggagctctttcatgcggggcaaccgagaccctcatctcaatgagcgagtgcaccgtgagcgggcgctacacagcacactcaaggcaaagctgcatgagctgcatgtcctagaagaagtgctgggtgaccctgagctgacaggagagaaactccgccaatggaacgagcataaccgggagctgtactcagagggcctgggggccg

SEQ ID NO: 31168 - DNA, 495 bp, Homo sapiens
  misc_feature (1)...(495): n = A,T,C or G
gggtgccccgaggnncccctaagagaccctaattagagtcgtcggaacnngcgcggaaganggnaggcatcggcgagccgggagcctgaccctcatctttcttccaaacaggctcaaatggtgctctgcaccgcagcctgggcaggagggaggcgcttctaggtctgccatgagacaggatagctgcttcccacgtgagctgggacaccccgacttttgtttaccacacaaaaagggagggggagagggcttcctttggacttgtcccgggacacctaggctagggtggggagagacgggccctggtggtggctcgggaggcgaagcgttgtcctcagccccgcgtggaactcatgtctggcacagcctggctgtggcctaacctgccgagagtccatcagcctccatcctaccccctgtgccttgtcacgccagacttcccacggctcctcgagatcccaacactgccagcatttcccttccttcctctcctgt

SEQ ID NO: 31169 - DNA, 483 bp, Homo sapiens
  misc_feature (1)...(483): n = A,T,C or G
nttcgagatccactagtccagngngttggagatccatagtccatgcggtggaattccaggtgtgaaacggtcccgctcatgtgagggcgaggtgagcggccttatgcgcaaggtgccacgagtgagccttgaacgcctggacctggacctcacagctgacagccagccacccgtcttcaaggtcttcccaggcagtaccactgaggactacaaccttattgttattgaacgtggcgctgccgctgcagctaccggccagccagggactgcgcctgcaggaacccctggtgccccacccctggctggcatggccattgtcaaggaggaggagacggaggctgccattggagctcctcctactgccactgagggccctgagaccaaacctgtgcttatggctcttgcggagggtcctggtgctgagggtccccgcctggcctcacctagtggcagcaccagctcagggctggaggtggtggctcc

SEQ ID NO: 31170 - DNA, 498 bp, Homo sapiens
  misc_feature (1)...(498): n = A,T,C or G
aggtnccccaagagggccccaatgagnccnaactgagatctcagtacangcggnggaanncgcttgatgcccttctctccgtacgagcccctgaacttccacgccatgttccagcccttccttgagatgatacacgaggctcagcaggccatggacatccacttccacagcccggccttccagcacccgccaacagaattcatacgagaaggcgacgatgaccggactgtgtgccgggagatccgccacaactccacgggctgcctgcggatgaaggaccagtgtgacaagtgccgggagatcttgtctgtggactgttccaccaacaacccctcccaggctaagctgcggcgggagctcgacgaatccctccaggtcgctgagaggttgaccaggaaatacaacgagctgctaaagtcctaccagtggaagatgctcaacacctcctccttgctggagcagctgaacgagcagtttaactgagtgtcccggctggca

SEQ ID NO: 31171 - DNA, 490 bp, Homo sapiens
  misc_feature (1)...(490): n = A,T,C or G
gggtcccgaggggcccctaagagacctcctagtggctgcgcaancgcnnganannnnnangcagggagacctcagcccccagcagaggaggagctgtgcattgggaagcccttcgacgccttcaccgacctcaagaacggttccctctttgccttccgagggcagtactgctatgaactggacgaaaaggcagtgaggcctgggtaccccaagctcatccgagatgtctggggcatcgagggccccatcgatgccgccttcacccgcatcaactgtcaggggaagacctacctcttcaagggtagtcagtactggcgctttgaggatggtgtcctggaccctgattacccccgaaatatctctgacggcttcgatggcatcccggacaacgtggatgcagccttggccctccctgcccatagctacagtggccgggagcgggtctacttcttcaaggagaaacagtactgggagtaccagttccagcacn

SEQ ID NO: 31172 - DNA, 468 bp, Homo sapiens
  misc_feature (1)...(468): n = A,T,C or G
agaaaaattcgagaccctagtccttgaggtgcaattccgtggatctgaccaccctgcacctgacccatcacgggaggctggggccatgtgaacagcatctccaccagacactgctgccagtggcatcccgcatgcctgtctgagccaccaccgtcagccagaaagactctggggtgcacagcaggcagtggctctgctgggacttgggctgtgcctatcaacgccacaaccaagcattgctcatctgtgacctccggtgcgtggctgaacccatgttccctcgcactggcagcgtgggagcggtcctgggttcctacagcccgagcagcctttggtcctgtccagcctcgcctgcttgcccatcccacggggagagacaccacctcatcgctgtgtgccttgcgtttccccgagcggtggcgaggtcgtgcatcctctcactggccgttcctggttcctcttctgtgn

SEQ ID NO: 31173 - DNA, 469 bp, Homo sapiens
aaaaaaaattcgagatccctatcctctgagggcatttcttcgttgcgtctgtagtgtcagcgtgatcattcgttgtgtctgtagtgtcagcgtgatcattcattgtgtctgtagtgtcagcgtcatcattgtgtctgtagtgtcagcgtgatcatttgttgtgtctttagtgtcagcgtgatcattcattgtgtctgtagtgtcagtgtgatcattcgttgtgatctacatgctcatatcccttttgtccacaaaggaaataattcgcctttaaatattaacatcatttcccctatgcaattttaagttttgataatgaaataaaacacaatgcagaatgattttgctataggttagatgaccactgtacttgataattgaaaaatggtttatgttcttagacaagccaatgaagcaatctcctgctcttggaacaaacaaaaaccacatgattaacctctcacaagat

SEQ ID NO: 31174 - DNA, 470 bp, Homo sapiens
  misc_feature (1)...(470): n = A,T,C or G
gaggcaggggatgagaccatcgagaccntcngcagngncgnggaattcgtggaaaccgctgcaggatgctgcgctcggtcttctcctcggcgttcgttgtgcttgttgccatctactgcctctcggtgtctggagctgggctccgaaatggacccagatgcttaatgaacggcgagtggggctaccacttcgaagacaccgcgggagcttacttgctcaaccgcactctatgggatcggtgcgaggcgccccctcgcgtggtcccctggaatgtgacgctcttctcgctgctggtggccgcctcctgcctggagatagtactgtgtgggatccagctggtgaacgcgaccattggtgtcttctgcggcgattgcaggaaaaaacaggacacccctcactgaggctgcactgaccggcgggttacacctgctccttcctggacgcctacctggctcgctcactcccttggg

SEQ ID NO: 31175 - DNA, 459 bp, Homo sapiens
  misc_feature (1)...(459): n = A,T,C or G
gagagcagggtggagactttgagacctnngaancccnggactgagctacgtgactcccaggcgaaggggcccatgggttgggctgcttgcctggttttgagcgggggctgcctgcacgctcccctagcctactcttgtgtttaggggatggtgggaacatatcccagtgcccttgcctcataatagatgtggtgactctcccggtagaccctagctagggtcctccatggcggggagggactcaggagaattgtagggattgggggaccctgcctgcctgggttgagaacagccctgctgcccttttgagccgagattttgaagtggatgcccgtcttgccagaaatgctgtgctcaccagaatgccccctccccttgcccttactggacttggccctgcctgatgccaagcacagaccctctcccggaggcctaccccccatatgtccttagagaggn

SEQ ID NO: 31176 - DNA, 493 bp, Homo sapiens
  misc_feature (1)...(493): n = A,T,C or G
atttggcttgatacaccactccgagnggncgaattcctgtcatatggtgaaagctgggtgggtgtgcctcacgtcctagctgtgtgggctgggacttttaactgcccctctctaaacccgatcttcattattatttcttaataattgtgtgcttctgagccagtcacttaaacactgagcctccctttcttctgctaggagctgaggagtttaatacctatgtcacagaatggctgtgaggatccaaggtggtgggataaattgggtgtctgtgtctgtgcctggcatgtatcaggccttccagaagcttggtggccggttcttgggctctgggaaggtagatagagcccagggaggggccctgtgttctttctgtgcccacagatgcagcctatccacgaggtgctgcggcacacaagcctggggcctctggaggccaagcgccagaacctgcgccgcgccttggaccagtatctgatggaattcaatgccn

SEQ ID NO: 31177 - DNA, 498 bp, Homo sapiens
  misc_feature (1)...(498): n = A,T,C or G
gcggagttgcccccctagtganaccctagngangctncggaanngcggcggaantcgccactgagcgcctgcaccaggacctggctgttcaggagcggcagagtgcggaggtgcagggcagcctggctctggtgagccgggccctggaggcagcagagcgagccttgcaggctcaggctcaggagctggaggagctgaaccgagagctccgtcagtgcaacctgcagcagttcatccagcagaccggggctgcgctgccaccgcccccacggcctgacaggggccctcctggcactcagtggcccccatgacgcanaactcctggaggtagcagcagctcctgccccagagtggtgtcctctggcagcccagccccaggctctgtgacagcctagtgagggctgcaagaccatcctgcccggaccacagaaggagagttggcggtcacagagggctcctctgccaggcagagggaagccctgggtttggcctcaggag

SEQ ID NO: 31178 - DNA, 503 bp, Homo sapiens
  misc_feature (1)...(503): n = A,T,C or G
ggtggggccnnnagtgcccaccctaaagngncctagnnnggcnngnaannacacnannananganggnagacgcacgctgagggttcagggcaatgaccactctgtcaccagagagcgcaggctggattaccaggaggggcccccgggagtggagatttcctgctggtctgtggagctgtagttctgatggaaggagctgtgcccaccctgtacacttggcttccccctgcaactgcagggccgcttctggggcctggaccaccatggggaggaagagtcccactcattacaaataaagaaaggtggtgtgagcctgggaaaaaaaaaaccaactccctgaatgaggtgcggacccccaaaaaaaattattaaaaacatccgtcttcattatgtccccaagggcccanaaaatnttnggggcccgccctttaatataagggggcctaaacacccgctgaaccccccccgtgttctttttttcctccccccttttttttctccn

SEQ ID NO: 31179 - DNA, 474 bp, Homo sapiens
  misc_feature (1)...(474): n = A,T,C or G
nattgagncccctgagacactcggccagngcggnggaattcctctcggagccactaatgaaccgcctggaagacaagtgcctggagttggtggagcactttggccccaatgagctgcggaaggtgctggtgatgctggcagctcagagccggcggtccgtgcccttgctgcgggccatctcctaccacctggtgcagaagcccttctctctgacgaaagatgtgctcttggacgtggcctatgcctatggcaaactcagctttcaccagacccaggtgtcccagcgcctggccaccgacctgctatccctcatgcccagcctgacttctggtgaggtggcccactgtgccaagtccttcgccttactcaagtggctcagcctgcccctgtttgaggcctttgcccagcacgtcctgaacagagcgcaggacatcaccctgccccacctgtgcagcgtacttctggcttttgcgn

SEQ ID NO: 31180 - DNA, 471 bp, Homo sapiens
  misc_feature (1)...(471): n = A,T,C or G
natggagaccttgagnacgtcgnggaanncctgaggtgaagacggagatgatgcaggtggatgaggtgcccagccaggacagccctggggcagccgagtccagcatctcaggagggatgggggacaaggttgaggaaagaggcaaagaggggcctgggaccccgactcgaagcagcgtcatcaccagtgctagggagctacactatgggcgagaggagagtgccgagcaggtgccacccccagctgaggctggccaggcccccactggccgacctgagcacccagcacccccgcctgagaagcatctgggcatctactccgtgttgcccaaccacaaggctgacgctgtattgagcatgccgtcttccgtgacctctggcctccacgtgcagcctgccctggctgtctccatggacttcagcacctatggggggctgctgccccagggcttcatccagagggagcttgtcn

SEQ ID NO: 31181 - DNA, 496 bp, Homo sapiens
  misc_feature (1)...(496): n = A,T,C or G
aggggccngcncccaatagaaattganggcatangcangngcnggaattccccgagtaagcacctcatccaggccacctcggaggagaatcagatcccctcgcacttgcctgcctgcccgtcgctccggcacgtcgccagcctgcggggcagcgccatcatcgagctcttccacagcagcattgctgaggttgaaaacgaggagctgaggcacctcatgtggtcctcggtggtgttctaccagaccccagggctggaggtgactgcctgcgtgctgctctccaccaaggctgtgtactttgtgctccacgacggcctccgccgctacttctcagagccactgcaggatttctggcatcagaaaaacaccgactacaacaacagccctttccacatctcccagtgcttcgtgctaaagcttagtgacctgcagtcagtcaatgtggggcttttcgaccagcatttccggctgacgggttccaccccgatgcaggtgg

SEQ ID NO: 31182 - DNA, 469 bp, Homo sapiens
  misc_feature (1)...(469): n = A,T,C or G
nttcgagtccgttagcccatcgcaaggacnnccncaccggagagggctgacagcagtggcagagtggtcagagagaagtggtcagcagacatgtggcgcttgggctgcctcatttgggaagtgttcagtgggcccctacctcgggcagcagccctacgcaaccctgggaagatccccaaaacgctggcgccccattactgtgagctggtgggagcaaaccccaaggtgcgtcccaacccagcccgcttcctgcagaactgccgggcacctggtggcttcatgagcaaccgctttgtagaaaccaacctcttcctggaggagattcagatcaaagagccagccgagaagcaaaaattcttccaggagctgagcaagagcctggacgcattccctgaggatttctgtcggcacaaggtgctgccccagctgctgaccgacttctacttacgtgacgctggggcccgttgcc

SEQ ID NO: 31183 - DNA, 482 bp, Homo sapiens
  misc_feature (1)...(482): n = A,T,C or G
agatggagaacatnnnanngnggatcgtagaccctagtcagtgtggtggaattcctgagtcatggccgggtgggcggcacagccttctccactggccggagtcagtgccaggtccttgccctttgtggaaagtcacaggtcacacgaggggccccgtgtcctgcctgtctgaagccaatgctgtctggttgcgccatttttgtgcttttatgtttaattttatgagggccacgggtctgtgttcgactcagcctcagggacgactctgacctcttggccacagaggactcacttgcccacaccgagggcgaccccgtcacagcctcaagtcactcccaagccccctccttgtctgtgcatccgggggcagctctggagggggtttgctggggaactggcgccatcgccgggactccagaaccgcagaagcctccccagctcacccctggaggacggccggctctccatagcaccagggctca

SEQ ID NO: 31184 - DNA, 479 bp, Homo sapiens
  misc_feature (1)...(479): n = A,T,C or G
aggggngagcggccncccccactgaganccctgggtacctacggaagngccgcggaanntancaccttcagcactctgcaggagctggtggaccactacaagaaggggaactacgggctctgccagaaactgtcggtgccctgcatgtcttgcaagccccagaagccttgggagaaagatgcctgggagatccctcgggaatccctcaagctggagaagaaacttggagctgggcagtttggggaagtctggatggccacctacaacaagcacaccaaggtggcagtgaagacgatgaagccagggagcatgtcggtggaggccttcctggcagaggccaacgtgatgaaaactctgcagcatgacaagctggtcaaacttcatgcggtggtcaccaaggagcccatctacatcatcacggagttcatggccaaaggaagcttgctggactttctgaaaagtgatgagggcagcaagca

SEQ ID NO: 31185 - DNA, 477 bp, Homo sapiens
  misc_feature (1)...(477): n = A,T,C or G
ngctcgagaccctagtcagtgtggattgatttccatggaggcggcggcccttctgttgctagaccgagcctgtgggatataccaaggcagaggagcccatagccatgaggagcctcggggccctgctcttgctgctgagcgcctgcctggcggtgagcgctggccctgtgccaacgccgcccgacaacatccaagtgcaggaaaacttcaatatctctcggatctatgggaagtggtacaacctggccatcggttccacctgcccctggctgaagaagatcatggacaggatgacagtgagcacgctggtgctgggagagggcgctacagaggcggagatcagcatgaccagcactcgttggcggaaaggtgtctgtgaggagacgtctggagcttatgagaaaacagatactgatgggaagtttctctatcacaaatccaaatggaacataaccatggagtcctatgtggtccaca

SEQ ID NO: 31186 - DNA, 485 bp, Homo sapiens
  misc_feature (1)...(485): n = A,T,C or G
aatgagaccatggaannnnccactgagttctctaggaagngcggcggaanttcacagactcagagagaacccaccatggtgctgtctcctgccgacaagaccaacgtcaaggccgcctggggatgttcctgtccttccccaccaccaagacctacttcccgcacttcgacctgagccacggctctgcccaggttaagggccacggcaagaaggtggccgacgcgctgaccaacgccgtggcgcacgtggacgacatgcccaacgcgctgtccgccctgagcgacctgcacgcgcacaagcttcgggtggacccggtcaacttcaagctcctaagccactgcctgctggtgaccctggccgcccacctccccgccgagttcacccctgcggtgcacgcctccctggacaagttcctggcttctgtgagcaccgtgctgacctccaaataccgttaagctggagcctcggtggccatgcttcttgcc

SEQ ID NO: 31187 - DNA, 470 bp, Homo sapiens
  misc_feature (1)...(470): n = A,T,C or G
naaatgaaanctttcgggantatncgggtacgtagctgaagagnccnggaannnccccgcagccaagggtgggctgccggtcctaggaggcgcacggtttgttagccagacaaaaatttactggggtgcccggagtgccaagtggcgggcaagcggtgggcttttcggcggggtctttaggatttgcagctccaggaagcgagatgtcgaagccgccacccaaaccagtcaaaccagggcaagttaaagtcttcagagccctgtatactgttgaacccagaactccagatgaattatactttgaggaaggcgatattatctacattactgacatgagcgataccaattggtggaaaggcacctcctaaggcaggactggactaattccaagcaactatgtggctgagcaggcagaatccattgacaatccattgcatgaagcaacaaaaagaggcaacttgagctggttn

SEQ ID NO: 31188 - DNA, 482 bp, Homo sapiens
  misc_feature (1)...(482): n = A,T,C or G
gatcgataaccctnnnnnnnnnatcgagaccactatcagtgtggtggaattcatcagatttcacgagacttaatcactatcaccagagcagcacagagagacctgcccccatgattcaattacctcccactgtgtccctcccatgacacatgggaattatgggagctacaattcaagatgagatttgggtaggaacacagccaaaccatatcaggcattgtccccataaactttttgtaaagcatcaatgatttcacccaagcttcattgtaaattttatatttgttcttacttaattttagcagaattcatgttgttctgataggggctcttttcaaattgatgtctcattcttcttagtgcctcaaactagatccttttcagacatattataacaagttagtatgcatttattttggtgcaaaagaaaattttaaatccatgcatagtttttccataatatgcattttccatgaacattn

SEQ ID NO: 31189 - DNA, 478 bp, Homo sapiens
gatcgagaccctagtccatgtggttggattcgcaattggttatccagctggttttcccatgggctatgcagcagcagctcctgcctattctcctaacatgtatcctggagcgaatcctaccttccaaacaggttacactcctggcacaccttacaaagtgtcctgttcccccaccagcggggctgtgccaccgtactcctcctccccgaacccctaccagactgccgtgtaccctgtgcgaagtgcctacccccagcagagcccgtatgcacagcaaggcacgtactacacacagccgctgtatgcagcacctcctcacgtcatccaccacaccacggtggtgcagcccaacggcatgcctgcaacggtgtaccctgctcccatcccccctcctagaggcaacggggtcaccatgggcatggtggctgggaccaccatggccatgtcagcaggtaccctgctgactgctcactcccca

SEQ ID NO: 31190 - DNA, 468 bp, Homo sapiens
  misc_feature (1)...(468): n = A,T,C or G
acgggcntnaaacggattgcgcagtatgtcgcgnggcattccacgcactgcttccttgatgggctgatccccctccctggtgttagggaagcgagagggagtggtgcaggtgggggactcggggcccctgtccggcctcgcatggtttgtggtttggggaagtatgtgttatgtgccatgacttgaaagttcagaacttcaaggctggtaaagatgggttgggggaggggttccaagtagttaacaagctgggttaggagccttgagtgcagtgtgagcccaaggccaggggaggcatggcctggggactggattcgagccttgtggtgaccttggattcagttggggctgctggacgctccctgggctgacagcgctgggcagaggcttggtttatgcactgccacccagccaggggactggatgctggccctgaacctgtacaaagcagcatttccttgtcctgag

SEQ ID NO: 31191 - DNA, 228 bp, Homo sapiens
  misc_feature (1)...(228): n = A,T,C or G
tatgggagncctcanatgtgaaactcaagctgtacgaccggagtctggagtcaaacccatagcagctgcaggccatgaggcacattgttacgggcaccacccgtccagccccctacatcatctttgggcctccaggcaccggcaagactgtcacgttagtggaagcaattaagcaggtggnggacgacttgccaaagcccacatcttggcctgcgctccatccaactg

SEQ ID NO: 31192 - DNA, 510 bp, Homo sapiens
  misc_feature (1)...(510): n = A,T,C or G
aggcctgcnnncatagacttcgtccacgtggggaattcccaccagtccaacagtgggtcagttacgccgacacggagttaataccagctgcctgtggagcaacgctgccggccctgggactccgaagctcggcccaggacccccaggctgtgctgggggccctgggcagggccctgagccccttggaggagtggcttcggctgcacacctacttggccggggaggcccccactctggctgacctggcggctgtcacagccttgctgctgcctttccgatacgtactaaacccacctgcccgccggatctggaataatgtgactcgctggtttgtcacgtgtgtccggcagccagaattccgagccgtgctaggagaagtggttctatactcaggagccaggcctctctctcatcagccaggccccgaggctcctgccctcccaaagacagctgctcagctcaagaaagaggcaaagaaacgggagaagctagagaaattcccacagaagc

SEQ ID NO: 31193 - DNA, 472 bp, Homo sapiens
  misc_feature (1)...(472): n = A,T,C or G
nctcgatagcgtacgctagngcgngcaattctctgaagttaatggtatggagcatgacctgatgcagagacggctcagaagagtcagctgcaccactgcgatccctacgcctgaggaaatgacaagattgagaagcatgaacagacaactccagataaatgttgactgtacactgaaagaagttgacctccttcaatctagaggaaactttgatccaaaagccatgaataatttttatgacaacatagaacctggcccagttgtaccacccaagccatctaaaaaagggtcccgctctgtcgcccaggctggagtgcagtggcatgatcatggctcattgcagcctcgacctcccgggctcgagccatcctcctgcctcagccacctgagtagctggggctgcggacgcacaccaccacgcccggctaatttgtgtattttttgtggagacagggtttcgccgtgttgcccg

SEQ ID NO: 31194 - DNA, 477 bp, Homo sapiens
  misc_feature (1)...(477): n = A,T,C or G
agaggcggnnnnnccnnaactgaaacctgagaacnctcgaagngcgnggaatcctgcgggtgcgagaggcccgcgccgccgtgcgcgctgcctacgaggctttctgccgctggagggaggtctccgccaaggagaggagttcattacttcggaagtgggacaatttaatgatacaaaataaggatgaccttgccagaataatcacagctgaaagtggaaagccactgaaggaggcacatggagaaattctctattccgcctttttcctagagtggttctctgaggaagcccgccgtgtttacggagacattatctacaccctggcaaaggacaggcgggccctggtcctcaagcagcccataggcgtggctgcagtcatcaccccgtggaatttccccagtgccatgatcacccggaaggtgggggccgtcctggcagccggctgtactgtcgtggtgaagcctgccgaagacactn

SEQ ID NO: 31195 - DNA, 475 bp, Homo sapiens
  misc_feature (1)...(475): n = A,T,C or G
agagccnnnnccccnncctgagacctgagaacgtcggggaancccgnngngcgagtttgacgcggtgctggccgacttcgcgtcgcccttccacgagcgccactttcactacgaggagcacctggagcgcatgaagcggcgcagcagcgccagcgtcagcgacagcagcggcttcagcgactcggagagtaagtgcggcccccgctaggatggcgccgggatctcccagctcccaggacctgccccgcgaaggctgcggcctcagttttcttatcagtaaactgaggaatggtttcctgaagctcaacgcagtangccgagtggtggcggggcccctgacgataatcacgggaaaggtcgctggagggcaggttggttcacttgccgcccacgggtgtgtcaccaggcaggcgagtttaagcagcttgtcccgactcagccagacaggactccctggacctgcaccaggcctttn

SEQ ID NO: 31196 - DNA, 473 bp, Homo sapiens
  misc_feature (1)...(473): n = A,T,C or G
aaaaaacttgagaccatagtcctcgaggngcgtttcttccgaaacaaaactgtgacaatcttttgggttgattctcgactgcttttcgagcatgcggagccagcaggcctccctgaaacactgcttctcggccagcccgtcctcctctacctctctcctctccgcgccctccgacctctctcggccccctcaccccagctccgacctctctcagccccatcgccccaactccaacctctcggccccatcgccccaccgcagctactcccctttcttccaaacttttgcagaaaaaacaaaaaaactacaaacaaaagcagccctctgcctcctccccagggaagaccctgaccgtgtacatagccctggtgctcctgcccagccacccctcagatgcgttcgcctctggccctggggtgtgtctcggtgacgttttctatcagacgtgctccctcccatcctccagccctgcg

SEQ ID NO: 31197 - DNA, 467 bp, Homo sapiens
  misc_feature (1)...(467): n = A,T,C or G
aaaaacaattgataaccctggctttgagcaccatntgcagcgcccagcggagggtggaacggcgtccgcgcgagcttgtgggccgcgctgctcctattggccgtggcgcttaggccggcggaggcggtgtccgatcccacgagcgtggcgtttgacgtgcggcccggcggcgtcgtgcattccttcttccataacgtgggcccgggggacaaatatacgtgtatgttcacttacgcctctcaaggagggaccaatgagcaatggcagatgagtctggggaccaacgaagaccaccagcacttcacctgcaccatctggaggccccaagggaagtcctatctgtacttcacacagttcaaggcagaggtgcggggcgctgagattgagtacgccatggcctactctaaagccgcatttgaaagggaaagtgatgtccctctgaaaactgaggaatttgaagtgaccat

SEQ ID NO: 31198 - DNA, 470 bp, Homo sapiens
  misc_feature (1)...(470): n = A,T,C or G
agaagaaattgaaaccttnnttttgagaacactantcagtgtggtggaattcagacgaccgaactgcgatgatccagatactgacgaagcagctctggtggctatacactacatcaatcaaaaccttccttggggatacaaacacaccttgaaccagattgatgaagtaaaggtgtggcctcaccatccctccggagagctgattgagattgaaatagacaccctggaaaccacctgcctgtgctggaccccacccctgtggcaagatgcagcgtgaggcagctgaaggagcatgctgtcgaaggagactgtgatttccagctgttgaaactagatggcaagttttccgtggtatacgcaaaatgtgattccagtccagactcagccgaggacgtgcgcaaggtgtgccaagactgccccctgctggccccgctgaacgacaccagggtggtgcacgccgcgaaagctgg

SEQ ID NO: 31199 - DNA, 505 bp, Homo sapiens
  misc_feature (1)...(505): n = A,T,C or G
ccttcgatcttctgtccagcgtggaggaatgcgggtcccgagtgctccgccgcccgccccgacccgggcccaaccgactgcacgggccgcgctcgtactggagcgaagagcggcctcctgaaggaagggaagggacgtgggggcggccacggcaggattaacctccatttcagctaatcatgggagagattaaagtctctcctgattataactggtttagaggtacagttccccttaaaaagattattgtggatgatgatgacagtaagatatggtcgctctatgacgcgggcccccgaagtatcaggtgtcctctcatattcctgccccctgtcagaggaactgcagatgtctttttccggcagattttggctctgactggatggggttaccgggttatcgctttgcagtatccagtttattgcgaccatctcgagttctgtgatggattcagaaaactgttagaccatttacantaggataaagctcatctttttggcgctcn

SEQ ID NO: 31200 - DNA, 465 bp, Homo sapiens
  misc_feature (1)...(465): n = A,T,C or G
attgagagccttcttgagcccgtaagnacaggcctccaaaatccatttcctcaacagatgcaaaataatagtagaattactggttttgatgaaaatgctgatgaggcttctacagcagagttgtctaagcctacagtccagccatggatagcaccccccatgcccagggccaaagagaatgagctgcaagcaggcccttggaacacaggcaggtccttggaacacagggtaaggactcttagatccagtgctttgctgacacaacaaagacttcacatttagggtagagaagtatttttaccatctcttttaattcctcttgaatatttagccatggtctatatatgctgtctgagaacataaaactatggtaattttagttttcttcttcatctccagcctcgtggcaatacagcttcactgatagctgtacccgctgtgcttcccagtttcactccatatgtg

SEQ ID NO: 31201 - DNA, 477 bp, Homo sapiens
  misc_feature (1)...(477): n = A,T,C or G
nggcctcgccatcgagaccactagttagagagccgtaagnccgaaaccgcagncctccggcgaccccgaactccgctccggagcctcagccccctggaaagtgatcccggcatccgagagccaagatgccggcccacttgctgcaggacgatatctctagctcctataccaccaccaccaccattacagcgcctccctccagggtcctgcagaatggaggagataagttggagacgatgcccctctacttggaagacgacattcgccctgatataaaagatgatatatatgaccccacctacaaggataaggaaggcccaagccccaaggttgaatatgtctggagaaacatcatccttatgtctctgctacacttgggagccctgtatgggatcactttgattcctacctgcaagttctacacctggctttggggggtattctactattttgtcagtgccctgggcataacagcag

SEQ ID NO: 31202 - DNA, 493 bp, Homo sapiens
  misc_feature (1)...(493): n = A,T,C or G
tggaaggggggggtggggnnnnaattgaactactatccctgtggtgcaattccccgttagcaggggaagaggccttatccttcgccacataacctggctcgcctctgggttatgggtggggaatcagtaagtcctactgctgttcaggccctgaccccagttcccaggaaagcacaaggctagtgccaccagaggtccaggccctttgctggaggctccatcaactccactaccagtgggctaccagcagctccactagggttcctagaggaggcagcccagctgcagaagaggacaggaggatctacggtgtggcagcagccctgtcttagatcactggtggcctgcaaagaaggctggtccttaacacacaaggttcccccagggcctctggagcacaagacctggcagaagtggtatccagcttagaggtgactgcctcagttttcccagcccatggactgatgggaaggtcaagaccctaatgatgctc

SEQ ID NO: 31203 - DNA, 526 bp, Homo sapiens
  misc_feature (1)...(526): n = A,T,C or G
cgggtancccgggggcccnnnnnaatcgatcaccgtccgtgtggnggaattcggcagagggcacagctgtgcaaaggccctgagaagggagcgactttggcaggtttgaggaaggaagagaggccagtgtgcctggagtggagtgagcagggcccgtgggtgcagaggaagctgcagaggtgggcaggggtgagaccagaagggcctcttggatcatggtcaggaggctgattttattctcgaggtaatgggagtttagggggaacgacacaatctggggtggggggcccaagcgggtctttgtaaaacttagatcacaccatgtcactcccgagcaatcctgtgttcataggacagagtcacatccccagtatcgcgttcaagtccttgaccctgccccacctccttcttccccatctccctcctgtgccccggctccagcccccaccatctgccgcacaccagtctgtcacacgatggcccctttgcacctgctctttcctcaccctggagctcccctccccag

SEQ ID NO: 31204 - DNA, 486 bp, Homo sapiens
  misc_feature (1)...(486): n = A,T,C or G
ggggaggggnggggnnntttgatatctatcacagtggngcaattcctctaatccattatcctccatcgaccaaccctacacccaaaacacccacaccccanactctgtctcataataaccttcgcaggactgggtgggacccaacaggtaagagctggggtggtgcccaatgaggcacccctcccggaagaaaaacacagggtagtggacggacaggaaaccctgcatttttcattcccagcaccaatggctggagggtccctggaagccttctgtttgggagatggccaacagggaagcagcccaattcctgggtgacttttccataagccagttttcatcagcataagaatagccctgctccaaggcggctgaggctgaggccctttgttagaaaatattctgcttccccagcccagctgcggagaggtgggaaccacagacagccctgggcacagacaggccgaatggccgctctatggcagg

SEQ ID NO: 31205 - DNA, 229 bp, Homo sapiens
  misc_feature (1)...(229): n = A,T,C or G
tggcggggnnnnnnnnnnncattggatcatacttagtgtggnggaattcgtttgcagggtccgtggactgtggtggtgatgtggtcctagccagtcagctactttgggaggctgaagcaggaggatcccttgagcccaagagtttgaggctgcagtgagctatgatcatggcactgcaccccaccctgggtgagatagtgaaaacctatctcttaaaaaaaaaaaaaaa

SEQ ID NO: 31206 - DNA, 493 bp, Homo sapiens
  misc_feature (1)...(493): n = A,T,C or G
atggaagggaggcaaggggnnnaattganatacctccactatccgcgtggnggaattccgtggacagtgcgtaatggggagggtcgcttctccagtgccagcaggcccttacacatgccccagctctgtcttgtcttcacagggagggaagagtgtagcttatctgaccccagggtgaaactctctgaatgcatttctgagtttgaatataactaagaatgtttttttctgagattgtggattcttgtcttcatacaattccaggtatgttaagctactgcgacagatacagcgaaggcataaaacatgtcctacagacttttggacccattccagagttttccagggccactgctgagaaggttaaccaggacatgtgcatgaaggtccctgatgacccggagcacttagctgccaggaggcagtggagggacgagtgcctcatgagactcgccaagttgaagagtcaagtgcagccccagtgaatttcttg

SEQ ID NO: 31207 - DNA, 519 bp, Homo sapiens
  misc_feature (1)...(519): n = A,T,C or G
nattgaacttcgatcgcgtggngcaattcgcagaaggtgcgatattgnggacccaagagatagcatctagggattcaggggtcccagggttagaagctgatacaacagggatccaggtgaaagaggttgggggttcagaggttccagagatagcgactgggacagcagaaactgagatattggggacccaagagatagcatctaggagttcaggggtcccagggctagaatctgaggtagctggggcccaggagacagaggtcgggggttcagggatctcanggcccgaggctggaatggcagaggcccgagtactgatgacccgtaagacagaaattatagttccagaggctgagaaggaagaggctcagacttcgggggtccaggaagcagagactagagttgggagtgctctcaaatatgaggctttaagggccccagtcactcagccaagagttttatgatcccaggaagcaaaagcagagatttcaggagtacaagggtcagagactcaagttn

SEQ ID NO: 31208 - DNA, 484 bp, Homo sapiens
  misc_feature (1)...(484): n = A,T,C or G
tgggtccnnaggaggccnaattgaaaccctatcgagaccctagcagtgcgtggaattcctccctgcgaaagcagcccagctgcagagaaagttcccgcatctggagttcaggagtattcggggaaacctcaacacccggcttcggaagctggacgagcagcaggagttcagtgccatcatcctggcaacagctggcctgcagcgcatgggctggcacaaccgggtggggcagatcctgcaccctgaggaatgcatgtatgctgtgggccagggggccttgggcgtggaagtgcgagccaaggaccaggacatcttggatctggtgggtgtgctgcacgatcccgagactctgcttcgctgcatcgctgaaagggccttcctgaggcacctggaaggaggctgcagtgtgccagtagccgtgcatacagctatgaaggatgggcaactgtacctgactggaggagtctggagtctagacggctca

SEQ ID NO: 31209 - DNA, 493 bp, Homo sapiens
  misc_feature (1)...(493): n = A,T,C or G
caggccccccactgtgcctcctagtnanctncgnaagngncgnggaantcanngngctgagcccccccgggacgaacccccggctgatggagctctgaagcgggcagaggagctcaagactcaggccaatgactacttcaaagccaaggactatgagaacgccatcaagttctacagccaggccatcgagctgaaccccagcaatgccatctactatggcaaccgcagcctggcctacctgcgcactgagtgctatggctacgcgctgggagacgccacgcgggccattgagctggacaagaagtacatcaagggttattaccgccgggctgccagcaacatggcactgggcaagttccgggccgcgctgcgagactacgagacgacggagtctcactctgtcgccaggctggagagcagtggcgcgatctcggctcactgcaatctctgcctcccaggttcaagcgattctcctgcctcagcctccaagtag

SEQ ID NO: 31210 - DNA, 488 bp, Homo sapiens
  misc_feature (1)...(488): n = A,T,C or G
gcgcgaggnccccctcagttactctagngcgtcngaannnncgcgggctntgaactgggagccaaggaggagtcgaggaaaggggacacagtctttaaaaaggatgccctggccgtttccaggctgaggtaggagcaaggacgacgggagctgagcggctctgtgttttgtcccttcatccaacaggaacctaaggagatgctgactctaaggtgaaagagggcacctagggtgggaaattggggggctcaaagttgcttctttgagaaccttgaaggcgtgggggcctttgggaggtgtccagggggacagggagccaaccccacggcgcccacctcccacctccagtgagtaccacgagcgcgtgcgctcccaggggcagcagctgcagcagctccaggccgagctggataaactccacaaggaggtgtccactgttcgggcagccaacagcgagagagtggccaagctcgtgttccagaggctga

SEQ ID NO: 31211 - DNA, 482 bp, Homo sapiens
  misc_feature (1)...(482): n = A,T,C or G
tggggccnnagggnnnnncctgagaccatattgagtgccgtgaattaagggtcctctgcacatcaaagcctctgagggtgcccaggtggccttagccgcatctgtgccagactggtggcctacagtctccaagtagtccgaagccttggctggcgcaggctgatggggaggctggggcctggggcctttggcctctgtccagggtcttcccgtcccatctgtctgctgcgcctactgggtgggagccctggtttccatctgggaaagtcccccttgtaggtgccctgcctggccccacccatgctcaggggccccaggcacgtgggttgttttctccctggacttcctgtggccccagaggagcccaccgtgtgagtgctgggctccagatggcgccgggtcccaatcgtggctccacacagggttgtctgggaggacgggacggtgtctctggccagcactggcagcttccgggccttgtn

SEQ ID NO: 31212 - DNA, 472 bp, Homo sapiens
aaaaaaatttgagatccctagtcctcgaggtgcatttccacagactcagagagaacccaccatggtgctgtctcctgccgacaagaccaacgtcaaggccgcctggggtaaggtcggcgcgcacgctggcgagtatggtgcggaggccctggagaggatgttcctgtccttccccaccaccaagacctacttcccgcacttcgacctgagccacggctctgcccaggttaatggccacggcaagaaggtggccgacgcgctgaccaacgccgtggcgcacgtggacgacatgcccaacgcgctgtccgccctgagcgacctgcacgcgcacaagcttcgggtggacccggtcaacttcaagctcctaagccactgcctgctggtgaccctggccgcccacctccccgccgagtcacccctgcggtgcacgcctccctggacaagttcctggcttctgtgagcaccgtgctga

SEQ ID NO: 31213 - DNA, 485 bp, Homo sapiens
  misc_feature (1)...(485): n = A,T,C or G
cactggagaccttggnagnggcgggaactgatatctttggcaganncnaaggacttctactcaaaagtggcagagtgtattcaatgattctcaggagcacttggaaagattttactgtaacccagaaaatgatagaatgagaatgaagtatggaggacaagaattttgggcagatttgaatgccatgaacgtgtatgaaacaactgaatttgaccaactacgaaggctgtccacaccaccctctagcaatgtcaactctatttaccacacagtctggaaattcttctgtagggaccactttggatggagagagtatcccgagtctgtcattcgattgattgaagaagccaactctcggggtctgaaagaggttcgatttatgatgtggaataaccactacatcctccacaattcattcttcaggagagagataaaaaggagacccctcttccgctcctggtttatactgcttccattattacagn

SEQ ID NO: 31214 - DNA, 489 bp, Homo sapiens
  misc_feature (1)...(489): n = A,T,C or G
gggcgagagccccccaggtgggcctagggacctnccganngcgnggaatctgtccgcgccttcngccccacgccggtcactgcttgatggcggcctccgccactggctgcgccagaacctcccgctcagctccggcaagagccaacctgctcccgccgagttccgcgctcagctcgaccccgccttcatcaagacctacgaggacatcaaggagaacctggaatcccggcgcttccaggtggtggactcccgagccactggcaggttccgcggcaccgagcccgagccccgagacggcattgaacctggccacatcccaggtaccgtgaacatccccttcacagacttcctgagccaggaggggctggagaagagccctgaggagatccgccatctgttccaggagaagaaagtggacctgtctaagccactggtggccacgtgtggctctggcgtcacagcctgccacgtggcactaggggcctacct

SEQ ID NO: 31215 - DNA, 488 bp, Homo sapiens
  misc_feature (1)...(488): n = A,T,C or G
agcgcgaggcccccctaatccgcctaaagcntcgngannntcngcngacattcgctaatgtaaaagtaattctgagagaatttcttttaaggaagtttaacagcttttattctaaggagggtttcaacttgggaatgtgctaattaagtggctctgctggcaaagaacaggattataagcatatggagtgtttaattttaaggcaaaactaatattttatcactctatctactgatctccactaacttattaactctctataaatcagaagacttcggaagagggagtatgcaggttgtccagagggagatggactgcttttattcatcttcacatggacctaaagcaagaaccactgaatggcatagaagcagtggattccctgtaggttcgctgcatcaagttgtactcaagggagcagagtcattaatgagtgctataggatttattataggaataagaccttacacaattgtggaagtttctgg

SEQ ID NO: 31216 - DNA, 465 bp, Homo sapiens
  misc_feature (1)...(465): n = A,T,C or G
ggggccatctgatacctctntagcgcgtacaaaaaacanggnanaaaggctataaacctcgcattctccctgtgactcaggccccaattttcatctcctttttcattgctttgagagagatggccaaccttcctgtgcccagcctgcagacagggggcctctggtggttccaggatctcacggtatccgatcccatctacatattaccactggcagtcactgctacaatgtgggctgttcttgagctaggtgctgagacaggtgtgcaaagttctgaccttcagtggatgagaaatgtcatcagaatgatgcccctgataaccttgcccataaccatgcatttccccacggcagtgtttatgtactggctctcctccaatttgttttccctggtccaagtatcctgtctccggattccagcagtacgcactgtacttaaaatcccccagcgtgttgtacatgacc

SEQ ID NO: 31217 - DNA, 488 bp, Homo sapiens
  misc_feature (1)...(488): n = A,T,C or G
aggaggtgcaggggaagggagggtttggagaccctagtcctcgaggtgcatttcacgggatcgnggaggttgatccaatgctcaccccagaagagcgtcacctgaacaagatgcagaaccatggctatgagaaccccacctacaaatacctggagcagatgcagatttaggtggcagggagcgcggcagccctggcggagggatgcaggtgggccggaagatcccacgattccgatcgactgccaagcagcagccgctgccaggggctgcgtctgacatcctgacctcctggactgtaggactatataaagtactactgtagaactgcaatttccattcttttaaatgggtgaaaaatggtaatataacaatatatgatatataaaccttaaatgaaaaaaatgatctattgcagatatttgatgtagttttcttttttaaattaatcagaaaccccacttccattgtattgtctgacacatgctctc

SEQ ID NO: 31218 - DNA, 473 bp, Homo sapiens
  misc_feature (1)...(473): n = A,T,C or G
ctctgagttcgataaacactagcccagngcggnggaattcctcaggaggcgggggcggctttgctccctgctgtgtctgcagctcccatggggagccctatccacagtgagctccctgggaacactcgctggatgaatgaatgaagaggagcccaggggacggaggtggttcatttattcgtcatcctcctgaggcctggggagagctctaacaaccagacggccaaacagaggatgaggagcaggaaggggacccgggaggaggcccacgaggtcccaggacagcagaagagagtgaggtcacagcaggcgggaggcagcatgctggacaaggaggggtccaccgtgacgatgctgagagccgggggaaggaggacagagaagtcctgcaggattagatctggcaccaggaggcctttggtgcctgggacggggcgggatctcacctgactgtccagctccacccttgcctn

SEQ ID NO: 31219 - DNA, 490 bp, Homo sapiens
  misc_feature (1)...(490): n = A,T,C or G
tgaggnccaggggggaggaaganttcgaaaccctannatcgagatccctagtcagtgtggtggaattcgtatcaacaatgtgcaatagccactaataatcatttgttaatgcatgcttccaagttctgtatttgaaaatctcagacttcatatatggtaagtgatggagtaatttataacttttatgttgaattcttgctactttaaaaaattgtgcttctccttttttaaagcatatgacttacttaacagctgatagtcagttacctggatttttagtatttttttacatcacaaaaagatttctctgaagtttgcgcaggggtctatttgtaggcagtttccaacttactaataagtaaggttctgaaagttataagttagctgtctggaatagatagtctcatagaaaccaggttgtagatggtgatttggttccttgggcaacctactgaaacccatttactatataatgtggctgaataatatt

SEQ ID NO: 31220 - DNA, 484 bp, Homo sapiens
  misc_feature (1)...(484): n = A,T,C or G
tacggaaaccctgcgaangtgttgagaaccctaggcagagcggnggaantccaccccgagcccagcccgtgggggccgctggacgacgtgcgcttcctcatcgcctgcacttcctggtactgacggcgtcctccgcaggatgtcgcccgtctgtccgccgtcccctgtggttcttgcctgccttgtctcctctccccacgtccctgcgtctcttacaccccctcccacccgaggctccccagagatagcagagaattcgaagaggtcgccggggactggaaagaagtcccggcagggccgccttcgcagtctacaccccagcctgcttcccagcctacacccagacccagctcagaccttcgtgaccaccccatccctttctccggctggctgggtcgggggcatccctctctgtcgctggcttccagaggcaggacaggcctcctggtaagcccgcaaagttgctgacctcctgacttcgtcn

SEQ ID NO: 31221 - DNA, 496 bp, Homo sapiens
  misc_feature (1)...(496): n = A,T,C or G
ccctaggtggcatacgcagngncggaactgagttccnatggaagcgccgcggaagttggagacgatcgagaagaacacggtgctgtcgcggactaactcactggtcgccttctctctgagcgagatggcggcgctcaccttcggctgcttcatcaccaccgccttcaaagacaggagcgtcccggtgcggctgcacgtctcgcggatcatgctaaaaaatgtagaagatttcactggacctagagaaagaagtgatctgggatttatcacatttgatataactgctgatctagagaatatatttgattggaatgttaagcagttgtttctttatttatcagcagaatattcaacaaaaaataatgctctgaaccaagttgtcctatgggacaagattgttttgagaggtgataatccgaagctgctgctgaaagatatgaaaacaaaatattttttctttgacgatggaaatggtctcaagggaaacaggaatgtc

SEQ ID NO: 31222 - DNA, 512 bp, Homo sapiens
  misc_feature (1)...(512): n = A,T,C or G
agaggcccgnncnnccnnnncnaactggataccaatcgccangnccngatagaattccctgcgtaccccctccccgggagccaggagggaaaagtgggtgtgatttttagattttgtattgtggactgattttgcctcacattaaaaactcatcccatggccagggcgggccactgtgctcctggaagattctctgtttaagcacccagtgtcttgccctgggttttctaggtctcacctgcccacccaaaatcttttctgcaagccccttaagggtgcccaccccagtgcctggccagccctgcacccgtaaaacaccttttagccagtagagggggcccacgagccctctctcaccagctagcacttttctcaccaccttcctcgaaatacttgggggcagcaagggtgttggcagatgagagtctcccactcaccatggtgagagtggtggggagtacccagggctgacctgactcacaagggaaagcagtactgtagaacctgccacn

SEQ ID NO: 31223 - DNA, 478 bp, Homo sapiens
  misc_feature (1)...(478): n = A,T,C or G
ngggatttgaaaccctcgcagngcgtgagatcatagaagcagacgncatagtgacgcgaggaggtgccaagaaatgcaggcagcttccataagctgaaacagacaaggaaacagattctctctgaagctcccagaaggaacacagacctcctgacacttttagacctctgatccgcagacctttaagaaaatacatttgtattgttttaagtcactatgtttggggtgatttgttatagcagccgtgggaagctaatacacacccttcgggctatattcacgcttctgcatctttcctgaagctgtgccactggctggaatgtccttctgatctatgttgtgcagttcaacaatcaagagccatctgtggctattcaaattcgaatcaattggccaggcctgggggctcctgcctgtggtctcagcactttgggaggccgaggcgggaggattgcatgagcccgggagtttgagacca

SEQ ID NO: 31224 - DNA, 477 bp, Homo sapiens
  misc_feature (1)...(477): n = A,T,C or G
ngtgagagcctcgccagngngtgataacataggccaggccaggagctgcngagcgccaatgcctgtgttgatgacagtcatctatatgagctcaaagccactctgtccagcccagacaagctccctggattcaagatgtaccccattgactttgagaaggatgatgacagcaactttcatatggatttcatcgtggctgcatccaacctccgggcagaaaactatgacattccttctgcagaccggcacaagagcaagctgattgcagggaagatcatcccagccattgccacgaccacagcagccgtggttggccttgtgtgtctggagctgtacaaggttgtgcaggggcaccgacagcttgactcctacaagaatggtttcctcaacttggccctgcctttctttggtttttctgaaccccttgccgcaccacgtcaccagtactataaccaagagtggacattgtgggatccn

SEQ ID NO: 31225 - DNA, 492 bp, Homo sapiens
  misc_feature (1)...(492): n = A,T,C or G
ggggcggtganccttagcgttcgagagacngtaananggncaaaaaaaggaaacagcagttgagacctgaactcaggactcttccatctcatcccatgctctgagccattgctgtcttgtttctatacacctatacgcagccaaacttctctgccatttcagccacttaaagcactaacataggtttctggaaaacagtttcctctggcactgattgtttctgccaatgtacaacacagtatacccctgcacttgatacccctgcactcaccagacactctctcctttccccaccatagcagccttcgatcaaatcgtttccagcaccatctatgggtacagcagtatcctagggaccctgagagatgatgcaagaacaattttgttagctaaaggggtcttagagacacttagttatgtcatccattttgcagaggaaaagactgacctagaagggacaagccttgtgaaaggcacatagctgcgacagtg

SEQ ID NO: 31226 - DNA, 468 bp, Homo sapiens
  misc_feature (1)...(468): n = A,T,C or G
naggggnnnnnaactgaccgtagacgtccgccgngcgnggaantcctagttctctgatgttcagttgatgcagccagcacccagtggggacctattatgaaaagaaactggcatgtgcatgtgcccagcaggaagcttcatctccacgtcagctgctgccatccagggaaggccctggagcctcacgcagtcgaggctgctctcaggtgctacgtgttgccagaggtggcacccgttgtcctgccgagcccagggcgttctgttccgggcgagccttgtgctgcaggggcatcagcatgcatgctgccccgggagggtccaggtgctgcacgcagagttcaacgtggggcttgtccgccctcccttagctctggctcagtgcatcctactgtggggacatctcatgaggggacacgaagtcactgatctcactcccagtatttggagctgggaacccaaatagtgtgg

SEQ ID NO: 31227 - DNA, 496 bp, Homo sapiens
  misc_feature (1)...(496): n = A,T,C or G
gggcgggnnannnnnaattcgagatcctatccagtgtggcggaattcagcaaacggaagagaaagagaagtgtccaggagggagagaatcctgacgacggcgttcgcgggagtccgccggaagactacaggcttggacaggtcgccagtagcttatttcgcggcgaacaccattccagaggtggcaccggtcggctggcgtccctcttcagttctctggagccccagattcaacccgtgtacgtgcctgtgcctaaagtaagtcactgggctttcttcccgaatagctcgttagaaccacttacatacaaagcaatcttcttacctaccgcgtgaagcgtgatttctaaagggggcagacaggattcattttaagtaacctttcatgactcttacataccagtgagagagaagagattctcatttagaaagactgaattatggcttagggtcagaattctagaagtatggggtctcanatataacttcanactttt

SEQ ID NO: 31228 - DNA, 479 bp, Homo sapiens
aattgaactctggaccactatccgtgtggtggaattcctgcccgggctgacgcccaggaatgtggtcgacgagaagccccaacagcacggcgtggcctctcagcctcgagcctgatccggggatggcctctgcctccaccacaatgcatactaccaccattgcagagcctgatccagggatgtctggatggccggatggcagaatggagacctccacccccaccataatggacattgtcgtcattgcaggtgtgattgctgctgtggccatcgtcctagtctccctcctcttcgtcatgctgcgctacatgtaccggcacaagggcacgtaccacaccaatgaggccaagggcacggagtttgctgagagtgcagatgcagccctgcagggagaccctgccctccaagatgctggtgatagcagcagaaaggagtactttatttgagggaaacagacttcactttcctgaatgcctccc

SEQ ID NO: 31229 - DNA, 263 bp, Homo sapiens
  misc_feature (1)...(263): n = A,T,C or G
cangagntctgggtggacaacagcacctcagtgtctgttcccatgctctctggcatgggcaccttccagcactggagtgacatccaggacaacttctcggtgactcaagtgcccttcactgagagcgcctgcctgctgctgatccagcctcactatgcctctgacctggacaagggtagaggtctcactttccagcaaaactccctcaactggatgaagaaactgtctccccggaccatccacctgaccatgccccaacttgg

SEQ ID NO: 31230 - DNA, 490 bp, Homo sapiens
  misc_feature (1)...(490): n = A,T,C or G
caactggagaccactcgccangngcncgactgattccgtcagaaccaccgacatcatacctcttggccaggtctgtttctgcggtggcgtcgacctttgccaggggaattggaggagaacgcttgctgagctccttggcggccttctcatactcgggggcaagtttcttgcagtgtccacaccatggggcataaaactccaccagaatgatatctgcatcattcacaacttcatcaaagttctctttggtcaacacaagcgtgacttctggtggaggcgtccagtcgggctgggagacttctctgaccttggcaacaatttcttcctgggttctggagccctcgtagtctacagcctgccccttcttaaggatcttgatggtggggtagccactcacatcaaacctgctggccagcacagacgctgaggttgcatcgatcttggcaacaggaatgggaggatctttatcctttaaatatgtgggcattnt

SEQ ID NO: 31231 - DNA, 518 bp, Homo sapiens
  misc_feature (1)...(518): n = A,T,C or G
gagcccnnnnnnnnattgacatcgaaccactgntcagagtggtgcaattcgaatttcccagataggaatgggatttccagggtcgggtatccaaccctgctcaactcactggagctggagggttcctatagtgatgactgtctgctcagaagggctgtggactgggcaggccccccaaacattcacagtcaccatgtgtttctgacacttggtgtacagggcggacatgtgggtgggcaggtgtggcaggggttggagatgatttgaccctcttttggctgatgggtgagacagaccatttatattgcctcagatgtgtcctggattgagcaaacaggaaaggggataccaggaaggtggatctggcaggccttgggctgtgaagcgttaagggtcagttgggaggattcaggcgcagcttctgcctgttcatgggtattcccagaggagtcagggagacacgcattactctcaactcaagagagacacagcaatggctgagacacagcaatggctga

SEQ ID NO: 31232 - DNA, 259 bp, Homo sapiens
  misc_feature (1)...(259): n = A,T,C or G
gcgcccccctttgatnctcttttatnggcctccgnaccnccngngnnaacggngctttctggcagtctgttctgagatacgtctccacaacggtttcttgaaggtttatgcatacgggaccagctgccataatatagtcttccctccatacctgccccttcattaagggtttggggagtggatttggaaggctgtgacagaactggttggttaatgggggtcccacaggtacctgcttccttccatcaagcagcaggtg

SEQ ID NO: 31233 - DNA, 491 bp, Homo sapiens
  misc_feature (1)...(491): n = A,T,C or G
ggcatgggcccaggaccactcagngatcgtagaaaancacccaaggaagagggaggcttgggccccctgaacatccccctgcttgctgacgtgaccagacgcttgtctgaggattacggcgtgctgaaaacagatgagggcattgcctacaggggcctctttatcatcgatggcaagggtgtccttcgccagatcactgttaatgatttgcctgtgggacgctccgtggatgaggctctgcggctggtccaggccttccagtacacagacgagcatggggaagtttgtcccgctggctggaagcctggcagtgacacgattaagcccaacgtggatgacagcaaggaatatttctccaaacacaattaggctggctaacggatagtgagcttgtgcccctgcctaggtgcctgtgctgggtgtccacctgtgcccccacctgggtgccctatgctgacccangaaaggccagacctgccccttcaaactcn

SEQ ID NO: 31234 - DNA, 501 bp, Homo sapiens
  misc_feature (1)...(501): n = A,T,C or G
ngggagagtgannttgggccangtcagngagctgaagaanagcggggaantccccgggaaccctggatgacagtgccaccatttgccgtgtctgccagaagccaggcgatctggttatgtgcaaccagtgtgagtgttgtttgcacctggactgtcacctgccggccctgcaggatgtaccaggggaggagtggagctgctcactctgccatgtgctccctgacctgaaggaggaggatggcagcctcagcctggatggtgcagacagcactggcgtggtggccaagctctcaccagccaaccagcggaaatgtgagcgtgtactgctggccctattctgtcacgaaccctgccgccccctgcatcagctggctaccgactccaccttcttcctggaccagcccggtggcaccctggatctgaccctgatccgtgcccgcctccaggagaagttgtcacctccctacagctccccacaggagtttgcccaggatgtgggcc

SEQ ID NO: 31235 - DNA, 480 bp, Homo sapiens
  misc_feature (1)...(480): n = A,T,C or G
attgaatttcggaccctagtccgtgtggtggaattccgacccctcggtggtcttcccctaccctctcaacgacagcagctcgcccaagtcctgcgcctcgcaagactccagcgccttctctccgtcctcggattctctgctctcctcgacggagtcctccccgcagggcagccccgagcccctggtgctccatgaggagacaccgcccaccaccagcagcgactctgaggaggaacaagaagatgaggaagaaatcgatgttgtttctgtggaaaagaggcaggctcctggcaaaaggtcagagtctggatcaccttctgctggaggccacagcaaacctcctcacagcccactggtcctcaagaggtgccacgtctccacacatcagcacaactacgcagcgcctccctccactcggaaggactatcctgctgccaagagggtcaagttggacagtgtcagagtcctgagacagatcan

SEQ ID NO: 31236 - DNA, 246 bp, Homo sapiens
  misc_feature (1)...(246): n = A,T,C or G
aaangggncntatgacattggcatggcctgtggggtggagtccatgtccctggctgacagagggaaccctggaaatattacttcgcgcttgatggagaaggacaaggccagagattgcctgattcctatggggaaaacctctgagaatgtggctgagcggtttggcatttcacgggagaagcaggatacctttgccctggcttccagcaaaaggcagcaagagcccagaggcagggctgttttcat

SEQ ID NO: 31237 - DNA, 479 bp, Homo sapiens
gctcgagatccctagtccgtgtggtttagatttctgatttccagctgttgaaactagatggcaagttttccgtggtatacgcaaaatgtgattccagtccagactcagccgaggacgtgcgcaaggtgtgccaagactgccccctgctggccccgctgaacgacaccagggtggtgcacgccgcgaaagctgccctggccgccttcaacgctcagaacaacggctccaattttcagctggaggaaatttcccgggctcagcttgtgcccctcccaccttctacctatgtggagtttacagtgtctggcactgactgtgttgctaaagaggccacagaggcagccaagtgtaacctgctggcagaaaagcaatatggcttttgtaaggcaacactcagtgagaagcttggtggggcagaggttgcagtgacctgcacggtgttccaaacacagcccgtgacctcacagccccaaccagat

SEQ ID NO: 31238 - DNA, 531 bp, Homo sapiens
  misc_feature (1)...(531): n = A,T,C or G
cgatnacgnncgnncnccgggcgncccnnnnaattggagacccatcgaacgatgtccagngggngcgaatcgaaagaggaaggtgggaggcatgggagtgagctgatgagtacctgaggagtgggcactcacagtgttgtcttcagaaatgcttctggaagtccttgagctattggagctgactcaggatgaagccaggagctcctcagataaggacatcgccgtcactcttcatatatttgggtttttcttcccccttactgttgagaggcaggcatgcccctctttcctgaactctgcttcaggtttgcttttgggtaagtttccgtcctccccatggtcatgggttttattgggcatcgagacctttagaggatttctttttcccctcacttgatgtggctcattgccctctatttccatttcttttatttcctcctttgccttccacagntaaatcccctagacttgactcacagtcttggccctggggtctcctatatctttgagtgactttacacaccttatact

SEQ ID NO: 31239 - DNA, 479 bp, Homo sapiens
  misc_feature (1)...(479): n = A,T,C or G
agcgctgnnnnnaactgacctagagcgtgggcaatncggattaaccgngagcacctattgtcagcacctgtggcaggccagttcttggctatgtgggcagcctaactggatgtggctaatggtgtgacctcaaggagcctgtagcttagtaggaagcgagagagaaaagtaactcaaaggttagagcttggtactgaggagacacatcattggcgaaactccaaaacacaggaggagttttgatcagttaatatttggatatcttaatttaggtgcccagcagagtgtgacactgatgatgtaagagcagaatgacagatcccaagatctcacaccacagatgctggcacgggtgggacaattgcagagcagttgaaagccaccactggcgtgtggctgtgtttttcgtcagccctgggaaagtggagcagaaatgcagagccagacacctggacccagaggaggggtctctctcatcc

SEQ ID NO: 31240 - DNA, 499 bp, Homo sapiens
  misc_feature (1)...(499): n = A,T,C or G
gggggaaaannnnnnnnaaatcgaagactcgtagtccagtgtggcggaattcctttaactcggaactctgctggggtggcccttgaccctatcctaagaacctttaactcggaactctgttggggtggagggcccctcttttcagccggtgtcttgccttccattctcccttcatcctgctcaacaccccgaagctggtgaaaacagcagagctgcccccggatcggaactacgtgctgggcgcccaccctcatgggatcatgtgtacaggcttcctctgtaatttctccaccgagagcaatggcttctcccagctcttcccggggctccggccctggttagccgtgctggctggcctcttctacctcccggtctatcgcgactacatcatgtcctttggactctgtccggngagccgccagagcctggacttcatcctgtcccagccccagctcgggcaggcccgtgtcatcatgggggggggtgcgcacgacgccct

SEQ ID NO: 31241 - DNA, 529 bp, Homo sapiens
  misc_feature (1)...(529): n = A,T,C or G
nggggagggggnnnnnngnngnnnnnnnnaatcggaccatcgactcgaagtggcgtaattcggcggagggattgnggatcgggatggagtcatgccaaaaatggacatcatttctggaacacttggcaaagcctttggttgtgttggagggtacatcgccagcacgagttctctgattgacaccgtacggtcctatgctgctggcttcatcttcaccacctctctgccacccatgctgctggctggagccctggagtctgtgcggatcctgaagagcgctgagggacgggtgcttcgccgccagcaccagcgcaacgtcaaactcatgagacagatgctaatggatgccggcctccctgttgtccactgccccagccacatcatccctgtgcgggttgcagatgctgctaaaaacacagaagtctgtgatgaactaatgagcagacataacatctacgtgcaagcaatcaattaccctacggtgccccggggagaagagctcctacggattgcccccaccctcaccaca

SEQ ID NO: 31242 - DNA, 468 bp, Homo sapiens
gaaaaaattcgagaccctatgctttggagggcatttccgcagagcgcctacctgccgcacctcggaaccgcagagcgcctacctgccgcacctcggaaccgcatagcgcctacctgccgcacctcggaaccgcagcgcgcctacctgccgcacctcggaaccgcagcgcgcctacctgccgcacctgggaaccgcagcgcgcctacctgccgcacctaggaaccgcagcgcgcctacctgccgcacctcggaaccgcagcgcgcctacctgccgcacctcggaaccgcagcgcgcctacctgccgcacctagtaaccgcagcgcgcctacctgccgcacctagtaaccgcagcgcgcctacctgccgcacctagtaaccgcagagcgcctacctgccgcacctagtaaccgcagagcgcctacctgccgcacctagtaaccgcagagcgcctacctgccgcacctagg

SEQ ID NO: 31243 - DNA, 277 bp, Homo sapiens
  misc_feature (1)...(277): n = A,T,C or G
ngcttgananccnntnnnnnnnnnntttcgagatccctagtccagtgtggtggtaaccgatgtctggtacgcagtcgacaatctcttcgccatcgagttgcaaaacgatacggaaagccccgtgcgccgacgggtggttcggaccgaggttgaggaacatgaagtcctcgttttcggtgccgcgcttcatcccccactcttccggtttgaaggtcagggcttccatctccagatcctgtttggctttggtcagctcaaacggcgagaattcgatatc

SEQ ID NO: 31244 - DNA, 530 bp, Homo sapiens
  misc_feature (1)...(530): n = A,T,C or G
gggggaganngnnnnagggggnnnnnnnnaattgagcnccaatcgaagcactgtccgcgtggtggaattccctctcacagccttctctctccttcttgcaggaaaccagccatgtcctttgggctctgtggagagctttagccttgcacggcggcgctgggaggcattgcctgccatgcccactgcccgctgctcctgctctagtctgcaggctgggccccggctgtttgttattgggggtgtggcccagggccccagtcaagccgtggaggcactgtgtctgcgtgatggggtctgaaggcttggtgggagctgtccactggagcagctcattgccagaggcagctatttctatggctccttttgctgctgaggacactcactgtggctctgtgggatgagagaggcatgggggtgagcacttgaaacactgccttggggccttgggttaggggagcctttgtctttagtgcaggacacacatatgcttacacctacctttatcaccattcgttcatgaatcatgcctt

SEQ ID NO: 31245 - DNA, 499 bp, Homo sapiens
  misc_feature (1)...(499): n = A,T,C or G
natcgagcccaattggagcgctggaattcggcgcgtatatctgccccgttgtgggcctggagatgaacggccgacacaggttctgcttccttcggtgctgcggctgtgtgttttctgagcgagccttgaaagagataaaagcggaagtttgccacacgtgtggggctgccttccaggaggatgatgtcatcgtgctcaatggcaccaaggaggatgtggacgtgctgaaaacaaggatggaggagagaaggctgagagcgaagctggaaaagaaaacaaagaaacccaaggcagcagagtctgtttcaaaaccagatgtcagtgaagaagccccagggccatcaaaagttaagacagggaagcctgaagaagccagccttgattctagagagaagaaaaccaacttggctcccanaagcacagcaatgaatgagagctcttctggaaaagctgggaagcctncgtgtggagccacaaagaggtccatcgctgacagtga

SEQ ID NO: 31246 - DNA, 474 bp, Homo sapiens
gctgagtacatgtccatgtgggtagattagcttatggagcccccaatggccctaaatcctccccaacacacactcccacagctgcaagccttgtgctcctttcccctaaatacttcagtgcgtatttcctaagaataagacaatctcttgcatacccacagtatgattaccaagatcaggatcttttacattatgtggatttaatactcgtcacgtccacagtccacatttaactgttgtcagttatcccagtaatgccttttatagctatttactgtacttctgggttgtgtccattgagaaggcctagaggcaatggcataccagcaggagtaagcaccaagatattggcttgtaagtactcttctttactaaaaggaaccagaactccttggaaaaatagctgacttcagggctggggcaggaaaaatagatgctgagcctataacaacacactgaagtgctcaaacagtg

SEQ ID NO: 31247 - DNA, 484 bp, Homo sapiens
  misc_feature (1)...(484): n = A,T,C or G
gctcgagacccctnnnannnngnattgtagaccactatccgtgtggtggaattccataaccgtgcttttcctgctcctcatctttactctccatccacacagatgccttcagtaccttgctactaaggagtcacctcccttgtttttactgtcataaaatgagactgtgatcgaaatctcccctctttggaatcctgcccttcagataagaagcaatgtgaattaagtgcttcctgggggccgggccccagcacttcacattcactcgattcacagcctccccgtataccgtctccccattttacaggggacaagcaagcagactcccagagaagcctgtgttcctaaccgctgcacctcctgctccttcagcaggatggggtcaccaggttacactccgaggcgtcagttccatccacgtgctcagcagggacgggaagcagctcacacccacttcttgttttccttcccaacatggtcttct

SEQ ID NO: 31248 - DNA, 487 bp, Homo sapiens
  misc_feature (1)...(487): n = A,T,C or G
agggantnnnnnnaggcgnnccnngnnnnnnnnacctcgagaccctatagagngcggttgaattctgaggctgcagngaaccgtaatcattaacagtgcacttcagcctgggtggcagagcaaaaaaagcacattctaaggtatgttagttagaatgttctagagaaaagcaagcagggtagaaggaaagggaacaccaggtaggtaggggaaggagggcagcatttgcaggggagggtggagtttgggaaggggccgtgcagcaaggacccgaaggagccgaccgagcaggaagtacctgggcagggaccctgtgtggccagaacacaggaagcaaggggcaaagggtattgaatgaggtcagaggcatggtgtggggttggccggggagggccctgtggggcgcagccataggaggtttggaggggaaaacgcaatctgatttacccttggccgaggtcatttggacactgtgtggatggagatn

SEQ ID NO: 31249 - DNA, 225 bp, Homo sapiens
  misc_feature (1)...(225): n = A,T,C or G
ntgcnnngacctgcacggngttccaaacacagcccgtgacctcacagccccaaccagaaggtgccaatgaagcagtccccacccccgtggtggacccagatgcacctccgtcccctccacttggcgcacctggactccctccagctggctcacccccagactcccatgtgttacttgcagctcctccaggacaccagttgcaccgggcgcactacgacctgcgcc

SEQ ID NO: 31250 - DNA, 475 bp, Homo sapiens
  misc_feature (1)...(475): n = A,T,C or G
ngtcgagtccatgtccatgtggctgattagcctcctggcccaggactcctcagatttctcctgcccttttcccctcgggcagcggaggcgagcaccgcgaacgccgtgtcccgagcgccgccgcctgcggacgcctcacgggccgggaagggatgcgggatacagtacgggatcctttctggaatggaggtcttatgagctgctattgaacacggcagagcctgttggtgacctgcacacagtagccctccagtcagtactgattgaattactcaaggctgcctctctgcaaagttgaggtccctggcagattggatggtgcccgcccacattagtccactcatactctcatgctgatcacctccggaaacaccttcacaaacacaccccacaataatgctttatgaggtttctaggtattccttaactcagtcaagttgacatctaaaattaactgtcacactattaaatatcn

SEQ ID NO: 31251 - DNA, 482 bp, Homo sapiens
tgtctagatccctagtccagtgtggttatattcgccataggaaatgtcactgccaaagctggagtcgttcaacggctccaaaaccaacgccctcaatgtctcccagaagatgattgagatgttcgtgcggacaaaacacaagatcgacaaaagccacgagtttgcactggtggtggtgaacgatgacacggcctggctgtctggcctgacctccgacccccgcgagctctgtagctgcctctatgatctggagacggcctcctgttccaccttcaatctggaaggacttttcagcctcatccagcagaaaactgagcttccggtcacagagaacgtgcagacgattcccccgccatatgtggtccgcaccatccttgtctacagccgtccaccttgccagccccagttctccttgacggagcccatgaagaaaatgttccagtgcccatatttcttctttgacgttgtttacatccacaatg

SEQ ID NO: 31252 - DNA, 470 bp, Homo sapiens
tctgatgtcctatcaggtgtttattcccgaggagtgcgtagcgcaaggtgagggccttcctcatggcctgctgggccggctcgctgaagctgtacggctcctggggcagactgagcaggctgttgtggttccgcatgaaggggtagaaggcccccagctgggtccagcgcacacacagctcctctgaggtgttgcccaggaagccgcatacgtcggccccgaccagaggcacccccagcaggttaaactgcaggatttctggcacggaggaggcgagctgctcccaggagctccacacgtcccccgtccagtggccggcgtatcggccgtggccagcaaaggtcgagcgggagatcacaaatgggcgtgtcccccgagccttcaccagcgccctgtgggaggcgatggcttcggtcaggccgtataggttgtgcaggttgtagtgtgtggagagaaactggtggctggag

SEQ ID NO: 31253 - DNA, 443 bp, Homo sapiens
  misc_feature (1)...(443): n = A,T,C or G
nctcgatagcatacccagggcgggaatcttccgacagggaggcgtccctccctaggagccacacattatactccaagtccctgccgggctccgcctttcccccaccctggctctcagggtgacgccacccacagagatttaatgagcgtgggcctggaccttccccagatgctgccaggcagcccctccccaagcctcaaagaagcatttgctgaggatggagaggcaggggagggaggcgggaggccgtcactggagtggcgtctgcagcagctgctgccccagcacccgctcagcctgtcctggctgctcacctccccgcagggcaccgggcctttcctgccctctgtggtcatctgccacctgctggatcaagtgctttctcttttacactcccctgtccccaccccagtgcactcttctggcccaggcagcaagcaagc

SEQ ID NO: 31254 - DNA, 475 bp, Homo sapiens
  misc_feature (1)...(475): n = A,T,C or G
ggagatccnggggngggccnaactgagaccncattgagnactctcgnacangcggnggaattccaggaggtcaaggatgcagtgagccgtgatcacaccactgcgctccagccttggtgacagagcaagaccctgggtcaaaaacaacaaaacacgagaaagcacacacggcagctcttggaagtagatgccttacactgacgggccacagctgggcagagggtcccatagaaggagcgtctctctcatgggctcagcactttctgcagctgccctaagacctcatggtcttcgggttctttataggaaagacgcctcttttcaacatctggtcccagagaagcgttccctcagtccctgggaagtgtccctgggcagtgggcgggccgctagcctgaagctgcctccgggggccctccaggggatgactgtctctagaactgcggtcctggttcctatagtggcggagagcctn

SEQ ID NO: 31255 - DNA, 471 bp, Homo sapiens
  misc_feature (1)...(471): n = A,T,C or G
ggagttcgcggggtgnnnnnaatcgagacccttcngagtgccgtggaattcgcctcggactctgcagcagcttctgatgccgcggaggtggctgttctgttgcagacgggaaactgaggcttagcggcttgccccaggccaccgagcagctggttggcagagcaggcacacgccaggagagctgcctccctgagcctcatttccccctgtgctgagggctgggcatgctgttgtatggccagcccacagcaggcaggaagtgttggcctcaatgcgtttccacagtggcctgcccaggtagggttaagagcacagctctgaggccggctgactcctggcccctccacctcatcagctgtaggaccttgggcaactcacctggccccgtgtgtgaaatgggcctcatgatgggaagaccaagccgacggggtgacgcacccagtcacagtacgggtctccccccagcgtggg

SEQ ID NO: 31256 - DNA, 503 bp, Homo sapiens
  misc_feature (1)...(503): n = A,T,C or G
aattgactcgcaccactatccangnggtggaattcggagcccgcagcctttctgatcctcttaaagtacatgtacagtgatgagatcgatctggaagccgacacggtgctggccactctgtatgctgctaagaagtacatcgtcccagcattggcaaaagcctgtgtcaactttctggagacaagtttggaagccaagaacgcctgcgtcctgctgtcccagagccggctgtttgaggagcccgagctgacgcagcgctgctgggaggtcattgacgcacaggccgagatggccctacggtccgaaggcttctgtgagatagaccggcagacgctggagatcattgtcactcgggaggccctcaacaccaaagaggcggtggtcttcgaggccgtcctgaactgggccgaggcggagtgcaagaggcaggggctgccaatcaccccacgaaacaagaggcatgttctggngcgagccctctatctggtccgaattccaaccat

SEQ ID NO: 31257 - DNA, 462 bp, Homo sapiens
  misc_feature (1)...(462): n = A,T,C or G
ntttgattggccttcctccangcggnggaattcgaaccactgggtgggaaacttttggaagaatacacccagcttgccagggaatgtggactctggctgtccttgggtggtttccatgagcgtggccaagactgggagcagactcagaaaatctacaattgtcacgtgctgctgaacagcaaaggggcagtagtggccacttacaggaagacacatctgtgtgacgtagagattccagggcaggggcctatgtgtgaaagcaactctaccatgcctgggcccagtcttgagtcacctgtcagcacaccagcaggcaagattggtctagctgtctgctatgacatgcggttccctgaactctctctggcattggctcaagctggagcagagatacttacctatccttcagcttttggatccattacaggcccagcccactgggaggtgttgctgcgggcccgt

SEQ ID NO: 31258 - DNA, 503 bp, Homo sapiens
  misc_feature (1)...(503): n = A,T,C or G
aattggcttgcataccatccgngnggnggaattcagaggaatttatcctggcaatgcacctcattgatgtagctatgtctggccaaccactgccacctgtcctgcctccagaatacattccaccttcttttagaagagttcgatctggcagtggtatatctgtcataagctcaacatctgtagatcagaggctaccagaggaaccagttttagaagatgaacaacaacaattagaaaagaaattacctgtaacgtttgaagataagaagcgggagaactttgaacgtggcaacctggaactggagaaacgaaggcaagctctcctggaacagcagcgcaaggagcaggagcgcctggcccagctggagcgggcggagcaggagaggaaggagcgtgagcgccaggagcaagagcgcataagacaactggaactggagatgcaactgggaaagcagcgggagctagaacggcagagagaggaggagaggaggaaagatattgaa

SEQ ID NO: 31259 - DNA, 464 bp, Homo sapiens
  misc_feature (1)...(464): n = A,T,C or G
natgagaatcgtggncgtgnggcggaantcgagaaggaggtgcgtcctgctgcctgccccggtcactctggctccccagctcaaggtcccccacggcccttcaggatgaaagctgcggtgctgaccttggccgtgctcttcctgacggggagccaggctcggcatttctggcagcaagatgaacccccccagagcccctgggatcgagtgaaggacctggccactgtgtacgtggatgtgctcaaagacagcggcagagactatgtgtcccagtttgaaggctccgccttgggaaaacagctaaacctaaagctccttgacaactgggacagcgtgacctccaccttcagcaagctgcgcgaacagctcggccctgtgacccaggagttctgggataacctggaaaaggagacagagggcctgaggcaggagatgagcaaggatctggaggaggtgaaggccaa

SEQ ID NO: 31260 - DNA, 505 bp, Homo sapiens
  misc_feature (1)...(505): n = A,T,C or G
aatcgactcgcaccactatccgngnggtggaattcgatgagctctgggctgaccactatgggtggcacccaaagccaagagtcagctgagctttgccttgcagatttttggggacatcaggacagaacgtgagtgacattttccgatacagcagcatggaggatcacttggagatcctggagtggaccctgcgggtccgtcacatcagccccacagcccctgacactctaggtaacaggctcagccatacagggtgggagcagagggccaggaggcctggcaggaccctgaagtgcacagggtccccctgtgggtttgcacttgccagcattgctgagaactgcctgaggagaagttcagaggcttggcacctgctctggaagctactctggaatcttaattctaaggccaatggctgcccaccccaacgggcagcaacagcagggccaaggtcttgtgacaatgtctggaggtgcccctattgtcacactggngggtctctact

SEQ ID NO: 31261 - DNA, 497 bp, Homo sapiens
  misc_feature (1)...(497): n = A,T,C or G
agtntcannacgnaganccnnttcgaganccntaatcggagatcctaggccangncgnggaattcggtgagtatctcctctcttggagagggaggtttaaacggcgagtcctggagttggcatacgttttgaaaaattgccactcactcggtttagggaaactgaggccagagagggacaagtgacttgcccatggttgcatcaaatgaatggcagagtcagtttccatgtgatgtgcatttaatccttaaatgcgcctggcccctgccctcccgcagtggccgagggtctggctaagtagacatgggtccgactaaatacaagtctttctgttccatgttgtatagggagctgtcttcggcagccccctcccagctagtgtcaatttcaagtaggaggggtagcgcaagctccgcctgtggtcttttgcgccaactgggtgggggcagcgtggggcgccgagttatcagcttgaggtacagaccaagttttctccn

SEQ ID NO: 31262 - DNA, 464 bp, Homo sapiens
  misc_feature (1)...(464): n = A,T,C or G
ntttgatttacccctcgtccagngcggnggaattcggcacatggcaagaaggtgctgacttccttgggagatgccataaagcacctggatgatctcaagggcacctttgcccagctgagtgaactgcactgtgacaagctgcatgtggatcctgagaacttcaagctcctgggaaatgtgctggtgaccgttttggcaatccatttcggcaaagaattcacccctgaggtgcaggcttcctggcagaagatggagactggagtggccagtgccctgtcctccagataccactgagctcactgcccatgatgcagagctttcaaggataggctttattctgcaagcaatcaaataataaatctattctgctaagagatcacacaaaaaaaaaaaaaaagggggcctttcaatattaagggaccgtttaaacccccttgataaccctgaaggggtcttttaagtgg

SEQ ID NO: 31263 - DNA, 475 bp, Homo sapiens
  misc_feature (1)...(475): n = A,T,C or G
agaaaaaattcganaccctnnnncntgagtccctagtccgtgtggtggaattcagacgctgggccggcgggcggtggccgtgcagagctccgcagacgtctgtgccaccctgagccggcgggccgctaggtccccggagaccctgctatggtgcgtgcgggcgccgtgggggctcatctccccgcgtccggcttggatatcttcggggacctgatgaatatgtacatgcgccagctctattaccaggttttaaacttcgccatgatcgtgtcttctgcactcatgatatggaaaggcttgatcgtgctcacaggcagagagagccccatcgtggtggtgctgagtggcagtatggagccggcctttcacagaggagacctcctgttcctcacaaatttccgggaagacccaatcagagctggtgaaatagttgtttctaaagttgaaggacgagacattccaatagttcacagag

SEQ ID NO: 31264 - DNA, 462 bp, Homo sapiens
  misc_feature (1)...(462): n = A,T,C or G
cttgattgacgacccctagtccagngcggtggaattcgatatatacggacatagattatatagataaatacagttattgatggagatatacttagacagacatacggtcactttcagctatgggtcactttcatttcttgggcaaatgcctaggtggtcttttgaaaggccctgggggaccaggcgcagtggttcacgcctgtaatcccagcactttggaggccgaggcgggcagatcacctgaggttgggagttcgagaccagcctggccaacatggagaaaccccatctctactaaaaataaaaaattagcggagcctggtggcgcatgcctgtaatcccagctacacaggaggctgaggcaggagaattgtttgaacccgggaggcggaggttgcagtgagccgagatcacgccattgcaatccagcctgggcaacaagagcgaaactccaactcaaaa

SEQ ID NO: 31265 - DNA, 425 bp, Homo sapiens
ggtggtggtggtgatgaaatcctgccttatgtgtgttttcaggggaaggtgaaaagggatccccatgacccaattctagttgtgtgggaacttacccagcccatgggtgatgttggccgttcctgccccagctggccaggggatccaggaggaagttgggacaagaggagccaagtgcagacagaaggggaggaaggggtctttcaggggtaggacggctgtacctgtagctggtcataggggcagtgtacttgctggtggtcatcaatatcaaaaggctccaggaacttgaggtgcagggtgaggccccgctccacccggatgctgtagttgcagcgcaggtcaggggggtaggaccgagggtactccaggctggagatgtagcctgatgcctccgtgtacagctcgctgctgcactcagcctg

SEQ ID NO: 31266 - DNA, 478 bp, Homo sapiens
  misc_feature (1)...(478): n = A,T,C or G
attgaactcganaacatatccangtggtggaattccagggtagaaagctagaaagaatcctaaaaatcactatccaagtccccattgtgtggggactgaggcctggcctgaagcctaggctggagggttcagtcggaagcagaagccgggagactgcatgagagggttccttccagcttcaccaagcccgtgctgcgcgggatgaagaaagtcaagcctgtcttccagtggggccctgaggtgggggagctggaggatagggtggcagcttttttatcagctgtccccaaaagaggcccttctcccagtcgccacggaccaaagctcctcctgggagctccagcctgtctgttcaatgtttgccttgcgccttttcctggtgaggccacccccggcaccatctcaggcctcagaaggacgacctcactgaaacagcccttaggttgggaaagaagcaagcctccgcgccccgtccaan

SEQ ID NO: 31267 - DNA, 494 bp, Homo sapiens
  misc_feature (1)...(494): n = A,T,C or G
ngggggannnnnnnnaatcgagatcgtttccagtgggggaattctacagggcagccgcgtgctctaccacttcctcagcagccagcaactggagaacatctggtggcagcgggacggccgcctgctcgtcagctgtcactctgacggcagctactgccagtggcccgtgtccagcgaagcccagcaaccagagcccctccgcagcctcgtgccttacggtcagtgtttcacccgccgggcagggcccacccccagtgcctcctggattcaggtgcaggttgctcaattctgaagcaaactccagggccagagagggtaaaggctttgtccaaagccacacagcagggttcgcctcacccagtttcttggggaacttctcggagcaagattcccaagcacaggtctaccatgtggatgtggcatgagctagagggatctgtgcctgtggggactgacacttgtctgagagtttgaggatccgttcaagccgattc

SEQ ID NO: 31268 - DNA, 494 bp, Homo sapiens
  misc_feature (1)...(494): n = A,T,C or G
agggcgnagancccacccagggnngccatttgatgngccccgaannancnaannnnntgaagagaactgagataagagaacagtccgttcaggtatctggatcacacagagaaacagagaacccactatgaacaggcaaggagaaagaaggatacagacagaaacaaagagacatttctcagcaaaaatgcccaaatgccttccagtcacttggtctgagcaagcctgccttcctcaactgctcggggatcagaagctgcctggccttttcttctgagctgtgactcgggctcattctcttcctttctccacagatgctgctgacacgccgaccgcctgctgcttcagctacacctcccggcagattccacagaatttcatagctgactactttgagacgagcagccagtgctccaagcctggtgtcatgtaagagccagtcttcctgctcacctctatggagggagagaaggtcagggtttgggcacagacag

SEQ ID NO: 31269 - DNA, 478 bp, Homo sapiens
  misc_feature (1)...(478): n = A,T,C or G
attgaactcgatagcatacccangngcnggaattctgacttttattatacttttaccttaacactaagctccagaaaccctatgctattctctgtacactcagtttgctccatgctttggaatctttcctctctctggggttccatctctccttgtgtgccttttaattcctacttcagatttcactttaagtatcatcttccctgggaagttttcccagactctccccactgcctttgctgagctgatcctgtgtgttttgctgctgaattttggtgtatgatcaccctcctttagccatctctctgatggctgtgagctccatgtggtcagtaccattatctggcccatcctgggacccagagaaagcacaaaggagggcgtaacccggtctcaccaaatgcctgttgattgattggacaaaggtgaccgcgagtggttctgtgacttggctacgggaaccatgaaggagcgttcn

SEQ ID NO: 31270 - DNA, 492 bp, Homo sapiens
  misc_feature (1)...(492): n = A,T,C or G
cggggggannnnnnnacctcgatatcgtttccaggtgcggaattccacaatacattctcagggtggggagaattacaaattacaaagaaccttctcaaaggtgagggagattacaaagaactttcttaagggtgggggagattacaaagtacatcagttagtgtgaagcagaaacaaaacacaatggtggaatgtcatcagttaaggctattttcacttcttttgtggatctgggacgtgaggagtgcctctgcctggacgcccattgtctgggatgtgaggagcgcctctgcccggccgccccatctgggaagtgaggagctcctctgcctggccaccccgtctgggaagtgaggagcgcctctgcccggccgccccatatgggaagtgaggagcgcctctgcctagccaccctgtctgggaggtctaccacagaggccaaacgcagtgtgggggctggacgtggtggctcacgcctgtaatcccagcacn

SEQ ID NO: 31271 - DNA, 477 bp, Homo sapiens
  misc_feature (1)...(477): n = A,T,C or G
attgaacttganaacatatccangtgctggaattctggggggagtcgaggtcattggtggaggtggagcttggctatataccaagtgaggagtacctgcagcctggggaggatgtggcattggatggcttattggtggtggaggaggtgggggtggtgcataatgttgctgtggaggcataatatgatgagggtgcgataccactggttgaccctgatattcaggatgatggtgagcaggtgctggggcaggaggtggtggttctctagcacctgaatttgagtcatcctgaatagggacggttattaaattgctgtgttttcttgttgaaatacgaaaggtttcctgactgaccgatcgaagtggaggtggagccatggacaattctgctggaggagcacgaatatcctcatgtggctgattatagtgctcatgtggcacatgttgcaaaggaggtggtggcatcatgatgtgctt

SEQ ID NO: 31272 - DNA, 495 bp, Homo sapiens
  misc_feature (1)...(495): n = A,T,C or G
aggcgagnnnnnnnnnatcgatatcgtttggcgtgtgcnggaattcagacaacggagaccggtgtcgcgccgcctccacgctcgacatcctgcacaccctcagcctgtcgctgctgagcctcaacagctgcctggacccactcatctgctgcttcttcgtgcgcctcttccaccaggactgctgctgggcactgagctgccgcctggtgaagggggcgcccagggcgcatggggcctccttggcctcctcttggagagtctcctggcctcccctcctgtctcacccccctgtcaccctcccagtggcatccagggtggagaaagctctttggaaagacctagattctaatcctgacgcaaccacatactacccctgtagctgtgaacctccgggctcatctgtaccaaggacatagaacattctttgtaacccgaatgttccctggatgttgccagcttttggatacaaataatataccactgtgttttttttaa

SEQ ID NO: 31273 - DNA, 453 bp, Homo sapiens
  misc_feature (1)...(453): n = A,T,C or G
ccatgtggtctgtgacaagcctgtggctcacctgcctgtccggggtgtagtacgctgtcctagcggctgcccagttctcctgaccctcttagagactgttcttaggcctgaaaaggggctgggcacccccccccaccaaggatggacgaagaccccctccagagcaaggaggccccctcagccctgtggttacagccgctgatgtatctaagaagcatgtcactttcatgttcctccctaactccctgacctgagaaccctggggcctgggggcagtttgagcctcctctcccttctgtgggtcgctcccagagccatggcccatgggaaggacagagtgtgtgtgtccttggggcctggggggatgttgctcctcagctccctccctcagccctgcccctctgagacaataaaactgccctctctaaggccaaaaaaaaaaaaaaaaaaaan

SEQ ID NO: 31274 - DNA, 456 bp, Homo sapiens
  misc_feature (1)...(456): n = A,T,C or G
catcgagacctatcnataganggctgtagncggagaggctggngtggaatgcaccatggtacctccacattgaggactctggcagtagggtgcggggcatggtatgcgggtcacagcacatgcgtcatccttccccatggcccttcctgtttttctgttttgtccctgctactctgagatcatttccctctggcctggtttggcctgggtgctggtgggagccaagggccagccccagcagccttgccccaggaatgaaaagtcagctctgggcagcagcctggaggcctgggaccagcctccagggcatggcagggatattgaggcaggcagcagaggcaggccctgcaggggtagccttgatactaattaaaggaactggtaatgaggagcccctgggacccctgccaagcaggtgtctgtgccctccccctgaggaacccaaatttcattggg

SEQ ID NO: 31275 - DNA, 481 bp, Homo sapiens
  misc_feature (1)...(481): n = A,T,C or G
aattgaaatcgatagcatatccangtgcnggaattcgtgcccctcccaccttctacctatgtggagtttacagtgtctggcactgactgtgttgctatagaggccacagaggcagccaagtgtaacctgctggcagaaaagcaatatggcttttgtaaggcaacactcagtgagaagcttggtggggcagaggttgcagtgacctgcacggtgttccaaacacagcccgtgacctcacagccccaaccagaaggtgccaatgaagcagtccccacccccgtggtggacccagatgcacctccgtcccctccacttggcgcacctggactccctccagctggctcacccccagactcccatgtgttactggcagctcctccaggacaccagttgcaccgggcgcactacgacctgcgccacaccttcatgggtgtggtctcattggggtcaccctcangagaagtgtcgcacccccgggaat

SEQ ID NO: 31276 - DNA, 518 bp, Homo sapiens
  misc_feature (1)...(518): n = A,T,C or G
nattgacatcgatcgcggtggcaattccttttcttaaggttttgttgctagcccttcaagtgcactgagctatgtgactcggatggtctttcacacggcacatttggacatttccagaactaccatgagatggtttagacgggaattcatgcaaatgagggggcaaaaatggtatagtgaccccgtccacgtcctccaagctcacgaccttggagccccgtggagctggactgaggaggaggctgcacagcgggagagcagctggtccagaccagccctgcagcccccactcagccggcagccagatggccccgcaaggcctccagggatggcccctagccacaggccctggctgaggtctctgggtcggtcagtgacatgtaggtaggaagcactgaaaatagtgttcccagagcactttgcaactccctgggtaagagggacgacacctctggtttttcaataccaattacatggaacttttctgtaatgggtacaatgaagaagtttctaanaan

SEQ ID NO: 31277 - DNA, 271 bp, Homo sapiens
  misc_feature (1)...(271): n = A,T,C or G
gatggttcccccttttgtgncactattgattcacttccgcanngnccnggaannngggaagcatctagccaagcccccaaaggactggcaccctctggcccagttcacagggattttgactgcctacattgaggtaatgactgttcctaacttagagaatgtaaaaacatgtcccacaggcttaagtcttgcttttcataagaatgtaagttgctattcttttttgttaagtttcggcctaagagttcttgttttatctctgccctggaag

SEQ ID NO: 31278 - DNA, 477 bp, Homo sapiens
  misc_feature (1)...(477): n = A,T,C or G
nttgagtccctatccanggttgatatcctccgtttctgtctcanaacctaaggagtttgtactgttgttaagggataagatagaacgagtgagaaaaccagcatgtctgagggtcgcaggaccgtggaccgtccactggggacagcttattgcctcctggtttaacttcagctgctctgcgggcccttatgaccggcatggctggctttgtctggggctgtgagcttctgactctcctcagtagagtggcagcacgtggcactgtgcaacccgagggcagctcatggtccctgtagcctgcatttgctgaagtgggagcttctgacacgtggtgaagatgttggcaggcttgagcggcacgtgacccccttccttccccaccacacactctggtgtgcagggcagacgccgtgcaagttcatctcgactcccgtgagtgtcctggtggcagaaggactgtcccaccctcacccaaag

SEQ ID NO: 31279 - DNA, 476 bp, Homo sapiens
  misc_feature (1)...(476): n = A,T,C or G
nttgagtacctatccatggttgatatccctgtggctgcaggtggaaatgtgggggtcgtaagcgtgtataagaagtgggtttaaggtcatgatactgggagcactcttctaaagagcaagtgtagacagaggacaagccccaggcagagtgggaggaagaaggcaaaccatgcgctggggaagaaatgcactggggaggaagcctgacgagggtggcgtcctggaggccccatagcacagcccatcagagaggatgccctgctggcctggctgggttcagctgatcgcagccgcctggctcttgcatctgcacttggccatagggcggccaggcggctctgctggccctgactgggctcacacacgcgtgtgcctggggtccgcagccggagactgattgagaatggtcttggaggcagctgcggcacctcagctttgctttctgtgtctgagcccagcacgccagcctgtgcatg

SEQ ID NO: 31280 - DNA, 264 bp, Homo sapiens
  misc_feature (1)...(264): n = A,T,C or G
agccccnctttgatncactttgaatcaaccagcacnggcnggaannncangcagaggctcacgagtccaggccccttgcctccggggaggccagctttcttggggtttcttatggacaagcccagaaacatctagaagggtgttcaagtcctgaccctggcattcggagggctgctctgaatggaagcctcatgtgggtctcacaggagccactgatgggctgtcctcagagccccgctcccagcaagctcatgaaggtttgca

SEQ ID NO: 31281 - DNA, 483 bp, Homo sapiens
  misc_feature (1)...(483): n = A,T,C or G
ntttgttgcatatccagggtctgtgaccctactccgtgtggtggaattcttaatgtggactttgctcaacaacggactaaagagggcgaagcccatgaactctgtgaggagtgcatgacaggtgcttgtaggatgacatggctcggcgccctccagctgctgctgccgccgcctgtcctactgggtggccaccccgtcccagggaagaagagcactcacagctgctgctgatcaccttccagggcttccgctggaactaggatgaggatgtggacacccccaacctggaccatctggccgaggagggcgtcaaggccaagtacctcatgccaccccttgtcacaatgacctccccgtcccacttcactgccatcacaggtaagcgccactctgcccatttcacccgatgcccatcaaagccccagcgtccgtcattccctgtgataagaagcaaaagctcggtcagctctagggaggctgagg

SEQ ID NO: 31282 - DNA, 480 bp, Homo sapiens
  misc_feature (1)...(480): n = A,T,C or G
ntcgtgatgcctagtccagngtttcggaatccacactcccgaccgcatggtgctggccggcgtgggcgtggagcacgagcatctggtggactgtgcccggaagtacctcctgggggtccagccggcctgggggagcgcagaggccgtggatattgacagatctgtggcccagtacactggggggattgccaagctagaaagagacatgtccaatgtcagcctgggcccgacccccatccccgagctcacgcacatcatggttggactggagagctgctccttcctggaggaggacttcatcccctttgcagtgttgaacatgatgatgggcggaggtggctccttctcggctggtgggcccggcaagggcatgttctccaggctctacctcaacgtgctcaacaggcaccactggatgtataacgcgacctcctaccaccacagctacgaggacactggcctcctttgcatccatgccag

SEQ ID NO: 31283 - DNA, 549 bp, Homo sapiens
  misc_feature (1)...(549): n = A,T,C or G
aggttactcagccaggcgcnnnnnnnaatttgacaatcgatccccagntcagagtggngcaattcctcacaagcccggctatcagcccggatgacagtgacgaggagaactgagggcacgtggggtgcggcagcgggctagggcccagggcagcttgcccgtgctgccgtgcagttcttgcctccctcacggggcgtcacccccagcccagctccgttgtacataaatgccttgtggcagagctcccggtgaacttctggatcccgtttctgatgcagactcttgtcttgttctccacttgtgctgttagaactcactggcccagtggtgttctcactcctaccccacccaccccctgcctgtccccaaattgaagatccttccttgcctgtggcttgatgcggggcgggtaaagggtattttaacttaagggtagttcctgctgtgagtggttacagctgatcctcgggaagaacaaagctaaagctgccttttgtctgttattttatttttttgaagtttaaataaagtttactaattntgaaaaaa

SEQ ID NO: 31284 - DNA, 265 bp, Homo sapiens
  misc_feature (1)...(265): n = A,T,C or G
gagctccccctttgtatncccttngtatngccctcgananncncgcncgagcggncccttgcgtncccaggtttgcagctctcccctgggccactaactattctggcccttgctgcctgtctgacctccgtgcctagtcgtgggtctccatcttggctcctccccgtggccccaaagtcttcagtggggggccccctcttgggtcccctcctctgccatcacctgaagacccccacgccaaacactgaatgtcacctgtgcctgc

SEQ ID NO: 31285 - DNA, 429 bp, Homo sapiens
gtgagagtggagctgcccccgcagcaccctcaggagccatgcagttcacagcagtagctggatctccctgaggacatttgtccttgcatatcttaatgatttgtccacagaaacaccgggttgtcttcctctgcccctctgccccgcagtgggggcactctctgtaactcagcatcacggtggggggcagctgggaggcctggttccaggtgaccttctccacctagatgttcaccccactcagttccagctttaccaacagggccccccgcagggacttggggtcgcagagtcccggcctgtctcagggccttgttcatggaagggagatgagtcaggttgaaagctcatcgtgtagggttctgtgcagggcccttacaggactggaccgcagccaagatgcctgcctgttaaccatgcccagccccc

SEQ ID NO: 31286 - DNA, 476 bp, Homo sapiens
  misc_feature (1)...(476): n = A,T,C or G
catgagaccctggaagngcggatgattccatcggagnnccccnctccagttcctcaggcaacccctgacccccttcattcctcacagccagtcctaactctcctccatcccaaccccaatccctcttccacagctgtcggaacatcccctaagctaaaaatcagattgctccttgtcaccttggctcgagtcctctctcccactcccctcactgtccttagaatccccatggcccacacggcctgtcctggcccagccactgcctggggctctggccctgtgactcaccgcgccctgtttccctctgcaccctgcatcctgtagtcctttccaggggctgtgctcttggcctggggtggtcttttctctccttacctggctgacagttacttctccctccgcagaggatcatgttcggacctccaggccagcccactgctgctccttggcactttcacggccctgggcgtgccccc

SEQ ID NO: 31287 - DNA, 472 bp, Homo sapiens
  misc_feature (1)...(472): n = A,T,C or G
cggccgtccaattgagacctatntaatgagagcattggcagngncgnggaanncgagccttccgatgtgggccagggatggtcaggtccttttggctctgccttggaatgcaagaaggacccacggttcctgagcagctcaaaacctgctgctggttatggttggtctttcaagtaaaagggtttacctcttcccgaggttaaaaatcatgttgctgatctcagtggactgctggctttcccagtacctgccaggagggaggcacaagggtgaatcatggactattgaggcgccctgcaaagcgttgcactgctggctgcaggcagcctcactttgggcaagtccccccccatgagctggggagactcagtcatggggagggaggagagggcaagcccccaagggcctctgaacctggcaggtgctgcacggggctggcagctgcttgtggagctgacgtgagggcccgttc

SEQ ID NO: 31288 - DNA, 475 bp, Homo sapiens
  misc_feature (1)...(475): n = A,T,C or G
tttgagaccatattccgngtggtggaattcccgcagctttcagtcatggcctccggtaacgcgcgcatcggaaagccagcccctgacttcaaggccacagcggtggttgatggcgccttcaaagaggtgaagctgtcggactacaaagggaagtacgtggtcctctttttctaccctctggacttcacttttgtgtgccccaccgagatcatcgcgttcagcaaccgtgcagaggacttccgcaagctgggctgtgaagtgctgggcgtctcggtggactctcagttcacccacctggcttggatcaacaccccccggaaagagggaggcttgggccccctgaacatccccctgcttgctgacgtgaccagacgcttgtctgaggattacggcgtgctgaaaacagatgagggcattgcctacaggggcctctttatcatcgatggcaagggtgtccttcgccagatcactgtta

SEQ ID NO: 31289 - DNA, 481 bp, Homo sapiens
  misc_feature (1)...(481): n = A,T,C or G
ggggtttgaaccatatccangttttggagtccctagtcagtgtggtggaattccatacactcgaagtccagtgtagaagagcactctggaaaaccctagacccatctgacgagagacccaatcactctgactttctttccagaaagtcctgagtacacctaggagcgatgagaggaggcccttcccctctttctaatcttcctctcgggcaagcccacccgagcacccttcctcacaagcacactgtgggccactggtactatcacatgcatgcccggaggttactaacaagtggtctacggggtcttcatcctctcccaattcctcttgggtgtcttcacctcttcagcccgagggtctcagcggctcctcccggatgaaaggtggaagtgccaccaagattctgctggaaaccctgttattagcagcccatatgactgcggaccagggcattgcatcatctcaaagatgcctcctggan

SEQ ID NO: 31290 - DNA, 515 bp, Homo sapiens
  misc_feature (1)...(515): n = A,T,C or G
nattgacatcgatcgcggtggcaatcgctagtttacaggactctagatgccctgggagcttcaaaatgtttcaccaattatcagaggaagttactgggagggggcttgctgtggccccatctgggagagttgagccctggtccagccccgcgcaggaagggaggctgtaaccgtgccagcctgctgcagctgcagtgatgttttcctgtatgagacaaacaaagtcgcccggatccaaagcatcaattatggcaccattaagttcttccacgtgatcgtcttttcctatgttagatttggggtctcactatgttgcccaggttggtctcaaactccaggactcatgcaatcctcccacctcagcctcctgaagtattaggattacaggcgtgagccaccatacctggctgacacttcattcctttntatggctgagtaatattccattgcatggatggaacacttttatgtatccattcatccattgatggacanttttggtggttctctttttn

SEQ ID NO: 31291 - DNA, 498 bp, Homo sapiens
  misc_feature (1)...(498): n = A,T,C or G
tgtagcgagggcaaggggnnnaattgaaattcatccaccatngcgcgaggnggaattcctcggttccccgcaccccggggctcacacttacccgcgcggaggagcagcggccgggtgtccacccccatcctgcgcccagtctcctcgattcccctcgctctgagccgggagagccgaacagctgaagagagttcactgactccccagccccaggtgggcctcgtgcacatcatgaccaggtctgaagatgctgacacagaagagacagtaacttgtctccagatgacgggttaccatcctggccagttgcagtgtggaatatttcagtcaataagttttaacagagagaaactcccttccagcgaagtggtgaaatttggccgaaattccaacatctgtcattatacttttcaggacaaacaggtttcccgagttcagttttctctgcagctgtttagaaaattcaacagctcagttctctcctttgaaataaaaaat

SEQ ID NO: 31292 - DNA, 470 bp, Homo sapiens
  misc_feature (1)...(470): n = A,T,C or G
agcggntnnnaactgacttagatcatcggccgnngcgnggaanncggcactgactgtgttgctaaagaggccacagaggcagccaagtgtaacctgctggcagaaaagcaatatggcttttgtaaggcaacactcagtgagaagcttggtggggcagaggttgcagtgacctgcacggtgttccaaacacagcccgtgacctcacagccccaaccagaaggtgccaatgaagcagtccccacccccgtggtggacccagatgcacctccgtcccctccacttggcgcacctggactccctccagctggctcacccccagactaccatgtgttactggcagctcctccaggacaccagttgcaccgggcgcactacgacctgcgccacaccttcatgggtgtggtctcattggggtcaccctcaagagaagtgtcgcacccccggaaaacacgcacagtggtgcaggctat

SEQ ID NO: 31293 - DNA, 467 bp, Homo sapiens
  misc_feature (1)...(467): n = A,T,C or G
tggggtnnnaatggacttagacctaccgacgnngcgnggaantccgggtcttacacataaatagttgtttcacttttcacaagtttctggaatggtgtagggcaagaataagtcaaggactgggtcagtatgagatggaaggttttattagactaggagatttgtgggaggtatgagcgctgggccaaggtggcacgggccatgctcaaggcaccctctcgggtgcggtgaccgccaatgaagccgcttgcatggacgaagatgcagccagggatcccactgacctggtccagggcctcgtcccgaagaccccgccatggctctggcaggggcagcctgggcagaaagagggagtacagcaggggtcagagttggcagccttctcttaacaaggctgagacaagcctgaaggtctgcagagtggttccctatggcctcaccggctttggaatgagtggggctccttg

SEQ ID NO: 31294 - DNA, 471 bp, Homo sapiens
  misc_feature (1)...(471): n = A,T,C or G
ctgggggcnnnaatgtacttganagctaacggaagnngcgnggaantcggcatgtagggtgagggtccttcccccaacagcaaagctatgccgcgtcatggggtacaacctgtgcacacagcgcccagcgcccagaagggccctgagcctggttcaacgctctgctgtcattgtcgtgaaattctttttttggaacaaagagccctgcattttcactggcactgcgctatgcaaattagtagctgggtctgattgcaggtctcctctgtcctctccagggcatcctgtacctgaaccaggaggtgcccaaggagttactggaattcctgagacttcggcacttccccacagaccccaaggctagcaactggggcaccctgagggagttcctgcctggcgacagcagctcccagcagcaccagcggcctgtcctgagcttccatgtggatccctatgtttgcaacccctccc

SEQ ID NO: 31295 - DNA, 469 bp, Homo sapiens
  misc_feature (1)...(469): n = A,T,C or G
tgcgggntnnnaaccggatcgaggatcatctcgcgnggcattcagntcgtgcgcttcgacagcgacgtgggggagtaccgggcggtgacggagctagggcggcctgtcgccgagtcctggaacagccagaaggacatcctggaggacaggcggggccaggtggacaccgtgtgcagacacaactacggggttggtgagagcttcacagtgcagcggcgagtccatcctgaggtgactgtgtatcctgccaagactcagcccctgcagcaccacaacctcctggtctgctctgtgagtggtttctatccaggcagcattgaagtcaggtggttccggaacggccaggaagagaaggctggggtggtgtccacaggcctgatccagaatggagactggaccttccagaccctggtgatgctggaaacagttcctcggagtggagaagtttacacctgccaagtggagcacc

SEQ ID NO: 31296 - DNA, 496 bp, Homo sapiens
  misc_feature (1)...(496): n = A,T,C or G
ggggccccggcnnncccctcaaggacttcaatgagngcgntcgaannnaccgnacacaaacaaagaacagccaccatgcagctcttcctcctcttgagcctggtgtttctcagccttcagggggcctcccttcaccgccaccacccccgggagatgaagaagagagtcgaggacctccatgtaggtgccacggtggcccccagcagcagaagggactttaccttcgacctctacagggtcttggcttccgctgcccccagccagaatatcttcttctcccctgtgagcatctccatgagcctggccatgctctccctgggggctgggtccagcacaaagatgcagatcctggagggcctgggcctcaacctccagaaaagctcagaggaggagctgcacagaggctttcagcagctccttcaggaactcaaccagcccagagatggcttccagctgagcctcggcaatgcccttttcaccgacctggtggtagacc

SEQ ID NO: 31297 - DNA, 492 bp, Homo sapiens
  misc_feature (1)...(492): n = A,T,C or G
agcgagtncaggggnnaaattgaaattgatccactatccgcgnggtcgaattcccgagtccaggtcagcgagtcgggtgtccatcggccccacgtggctggcatacacggccggagcaacgacggagcgtactccctaatcctggcggggggctatgaggatgacgtggaccatgggaattttttcacatacacgggtagtggtggtcgagatctttccggcaacaagaagaccgcggaacagtcttgtgatcagaaactcaccaacaccaacagggcgctggctctcaactgctttgctcccatcaatgaccaagaaggggccgaggccaaggactggcggtcggggaagccggtcagggtggtgcgcaatgtcaagggtggcaagaatagcacgtacgcccccgctgagggcaaccgctatgatggcatctacaaggttgtgaaatactggcccgagaaggggaagtccgggtttctcgtgtggcgctac

SEQ ID NO: 31298 - DNA, 467 bp, Homo sapiens
  misc_feature (1)...(467): n = A,T,C or G
aggtgnntnnnttatcgcactgaccacatgtgtcgtggcatttgcctgagcagccaccttgggccatcaggaggaagcctgtgctgcaatggtaactcagtgacttggcgagactcacagagcctgcattcccgacacctggtgccctataccagccccgggcatattcttagtgtgggagaaaaatcagctttggtctagcttaagactctgggtggggcacggaatgggatagaatggggagtccggttcccccagctgagccaggtgaccattcctcaggaaactttgttgacagcggtgtctggatggaccagcagagggcactctcacccacggggaaaatcgtgcgcccggcctcgtccaccgccagaagacgccgctacacaatggagtctcgctctgtcgaccaggctggagtgcaatggtgcgatctcggctcactgcaatctctgcctcccggtgag

SEQ ID NO: 31299 - DNA, 466 bp, Homo sapiens
  misc_feature (1)...(466): n = A,T,C or G
aggacggnnnnnnnncctgagaactgagaacctcggggaannccggcacccactgcctcttcccttctcgcttgggaactctagtctcgcctcgggttgcaatggaccccaactgctcctgtgccgctgcaggtgtctcctgcacctgcgccagctcctgcaagtgcaaagagtgcaaatgcacctcctgcaagaagagctgctgctcctgctgccctgtgggctgtgccaagtgtgcccagggctgcatctgcaaaggggcatcggagaagtgcagctgctgcgcctgatgtcgggacagccctgctcccaagtacaaatagagtgacccgtaaaatccaggattttttgttttttgctacaatcttgacccctttgctacattcctttttttctgtgaaatatgtgaataataattaaacacttagaattccnaacaaaaaaaacatgattaacccaaaaacag

SEQ ID NO: 31300 - DNA, 473 bp, Homo sapiens
  misc_feature (1)...(473): n = A,T,C or G
gggagcgggccngnnnaatcgaganaactganantgctagcaagngncgnggaannngncggcagttccatcggtggaacgcacaagattgggagaatcacagggctggatgccgcgggacctttgtttgagggaagtgcccccagcagtcgtctttctccagatgatgccagttttgtggatgccattcatacctttacccgggagcacatgggcctgagcgtgggcatcaaacagcccataggacactatgacttctatcccaacgggggctccttccagcctggctgccacttcctagagctctacagacatattgcccagcacggcttcaatgccatcacccagaccataaaatgctcccacgagcgatcggtgcaccttttcatcgactccttgctgcacgccggcacgcagagcatggcctacccgtgtggtgacatgaacagcttcagccagggcctgtgcctgag

SEQ ID NO: 31301 - DNA, 484 bp, Homo sapiens
  misc_feature (1)...(484): n = A,T,C or G
ntttgatagcctcnganannncttgattacactagtacagngcggnggaattcggacgagcagcaggagttcagtgccatcatcctggcaacagctggcctgcagcgcatgggctggcacaaccgggtggggcagatcctgcaccctgaggaatgcatgtatgctgtgggccagggggccttgggcgtggaagtgcgagccaaggaccaggacatcttggatctggtgggtgtgctgcacgatcccgagactctgcttcgctgcatcgctgaaagggccttcctgaggcacctggaaggaggctgcagtgtgccagtagccgtgcatacagctatgaaggatgggcaactgtacctgactggaggagtctggagtctagacggctcagatagcatacaagagaccatgcaggctaccatccatgtccctgcccagcatgaagatggccctgaggatgacccacagttggtaggcatcactgctc

SEQ ID NO: 31302 - DNA, 467 bp, Homo sapiens
  misc_feature (1)...(467): n = A,T,C or G
nagaggggggnnnnnncctgaganactgagaacgtcggaaancnaggagngagnccggngccagggtggccctcgcagacagcggacactctcgctgcttccctcctatccaggctgggcccaccacttccatgatgtggctgccctcaccattaattgcttaaacctgggagacggaggttgcagtgagccgagatcacgccattgcactccagcctgggcagcaagagtgaaactccatcccccacccccccaaaaaagaacagctctactaggctctacctgacatgcaccaagctgtgtgttcgaggttcacaggttggaggctcctgaaacaagtgggcacctgggaaagcatcaaagtcaagacccccagcacgggggacctgcagccgccaggccactggttgcacaattcctgagccggcgggtttctttcgccttctgtaggttcgaccttgaaacta

SEQ ID NO: 31303 - DNA, 463 bp, Homo sapiens
  misc_feature (1)...(463): n = A,T,C or G
ggaggtnnnnnnnttcactagacccattctntcgnannnncncnnnnngangnncgngcgtctagcctttgcccacgcagctttcagtcatggcctcttgtaacgtgcgcatcggaaagccagcccctgacttcaagggcacagcggtggttgatggcgccttcaaagaggtgaagctgtcggactacaaagggaagtacgtggtcctctttttctaccctctggacttcacttttgtgtgccccaccgagatcatcgcgttcagcaaccgtgcagaggacttccgcaagctgggctgtgaagtgctgggcgtctcggtggactctcagttcacccacctggcttggatcaacaccccccggaaagagggaggcttgggccccctgaacatccccctgcttgctgacgtgaccagacgcttgtctgaggattacggcgtgctgaaaacagatgagggcattgc

SEQ ID NO: 31304 - DNA, 228 bp, Homo sapiens
cgtggccttcctgtgtgcgcctggcaaggtacctaacttctctgagccttagctgcttctctgtgagctgagcatcacaatgccaggctcaagcctctgctgtgaggataaaacgagataacacacagcaggaccaagctgggtgcccagcatgcagtaggtcctcaatcaatgttttttaaagacagaaccagtgagtaatgaacactggccttgtcctaaaaactg

SEQ ID NO: 31305 - DNA, 466 bp, Homo sapiens
  misc_feature (1)...(466): n = A,T,C or G
aggacggntnnnnnnaattgagaactgagaacngtcgggannnccatctttctctccctccatccttctttctctcattctttccttccttctctctttccttcccactgcccccagcctgcccccatcccaactctctggctctttcgcctcctgcccgctgactggcacccctttctcctttataccatgatcttcttgctttccagttacttcctctgattttcccaaaaaggtttgactcttttcgtcctgagagtccgccctgttctcttctggcacctgcagctccctcttcctctcttctccctgttctggacctccctgaccctgagccttcctctccatatcctcctgctcccactcaccgtcattcagaccctctggctccccagtgagccccattctttctccttgtctcccaagcatcacatcttgtacctgttcctgtttttgcttctgttct

SEQ ID NO: 31306 - DNA, 471 bp, Homo sapiens
  misc_feature (1)...(471): n = A,T,C or G
ntttgatagcagtcgctagggcagngcgnggaattcgtcgccaccctcaccgctttcatcttcagcctctttctctacatgaaggcgcaggtagccccagtttcggccctggcacctggggggaactcaggcaatccgatttacgacttttttctgggacgagagctcaaccctcgtatctgtttcttcgacttcaaatatttctgtgaactgcgacccggcctcatcggctgggtcctcatcaacctggccctgttgatgaaggaggcagagcttcgaggcagtccctcactggccatgtggctggtcaatggcttccagttgctctacgtgggtgatgccctctggcacgaggaggccgtcctcaccaccatggatatcacacatgacgggtttggcttcatgctggcgtttggggacatggcctgggtgcccttcacctacagcctgcaggcccagttcctgctgcac

SEQ ID NO: 31307 - DNA, 520 bp, Homo sapiens
  misc_feature (1)...(520): n = A,T,C or G
cattgacatcgatccgcagtccgagnggngcaattcgggcgcgtcaggccgcgacgagggcgctgagacaaatttacatgtattggagaccagaccataagcccttctgaattaagatctcacattcttgaaggtggcattgaagagcactaagatcggaagatgagtgagcttgaccagttacggcaggaggccgagcaacttaagaaccagattcgagacgccaggaaagcatgtgcagatgcaactctctctcagatcacaaacaacatcgacccagtgggaagaatccaaatgcgcacgaggaggacactgcgggggcacctggccaagatctacgccatgcactggggcacagactccaggcttctcgtcagtgcctcgcaggatggtaaacttatcatctgggacagctacaccaccaacaaggttcacgccatccctctgcgcttctnctgggtcatgacctgtgcatatgccccttctgggaactatgtggcctgcggtggcctggaaacat

SEQ ID NO: 31308 - DNA, 546 bp, Homo sapiens
  misc_feature (1)...(546): n = A,T,C or G
aggaccnagagggcgaccnnnnnnnnattgtacactcgaccgctgntcagagnggngcaattcgccggtgtccgctccgggctcggatgggaagtggtgggaggagcgacccgggatgttcagtctgatggccagttgctgcggctggttcaagcggtggcgggagcctgtcagaaaggtgactcttttgatggtgggacttgataatgctggtaaaaccgcaacagcaaagggaatccaaggagaataccctgaagatgtagctcctactgttggattttcaaaaattaaccttagacaaggaaagtttgaagtcaccatctttgacttgggaggtggaataagaattcggggaatctggaagaattactatgctgaatcctatggggtaatatttgttgtggattccagtgatgaagagagaatggaagagacaaaagaggctatgtcagaaatgctaagacatcctaggatatcgggaaagcctatattggtgttggcaaataaacaagataaagaaagagctntaggagaagctgatgtcat

SEQ ID NO: 31309 - DNA, 518 bp, Homo sapiens
  misc_feature (1)...(518): n = A,T,C or G
nattgatcatcagtncgcgtggnggaattctctaaggcctcattcttcagtcaggttttccctgttcccgcgtgttcggccaattttttgttgttgttgttttgtttttgtttttgtttttgagtcaattttccagacatctttaattagcaatatgtttaagtagttacaagcctttccttcttttcttgtgacagtttgggttgaatttctatcgtttgcagcctgtcactgtaaggcacaaacatgatcacgcaagatgcgatagtagatttaagccagttgtttttaagtttgtgtttaaggagaaactaacaatgaaaacggcctcgttgacggaggaaaagttggaatgcagcctctggtgctgtttgagcgatccctctccccggggcctggccgcgcgctgctgtgttctggaagggctcattgtacagtcaaggcggcagggccttcttctgtcacccatgctggagtgcagtggcatgatcacagctcacggtagcctccaccttctg

SEQ ID NO: 31310 - DNA, 464 bp, Homo sapiens
  misc_feature (1)...(464): n = A,T,C or G
ggcgatccaaatgagacccttatcgaggccgtaagacgaggcgacggcggngtcagaatactggtcagtgatcctcagtgaagtccagcggaacctcaatagctgggatcgggcccgggttcagcgacaccttgagctcctactgcgggatctggaagatagccggggtgccacccttaatccttggcgcaaggcccagctgctgcgagtggagggcgaggtcacggccctcctggagcagctgggaagctctggaagctgagacactggcggcaggcacctagctatgtgaccactggccctaaaccttttccctctgtggcctcctggcttgcactgctccctctagaaagattccttcaggtctggaggcagaggaatgggcatagctgagccagttgccctcctaaggcatgtttgaccaggactgagtctggaatctccaagttaaagatggtgaatca

SEQ ID NO: 31311 - DNA, 466 bp, Homo sapiens
  misc_feature (1)...(466): n = A,T,C or G
gcacgctccnattgagaccattatcagaggcgtaattccctctgagtccccactgccagctttaagcccctcgctgggttgctgctcttggagctggtgaccgtggagcctcagccataggaggaagaacagcagcagcttggaggagctggggctggagagagcaaagctcccccggcagcagctcagatcccagcaggtcaggggccgggacatgacgccctggccacccttgcccctccaggctccccgctgtttgtgaagctgctgtgggcctggggatttcatctggctggtggggaagaaaggcaatctttactctatggcagaacaaagggactgggcaaagcttggcgtggcacttacaccagctgccgccccctcttcccgtgcagacaaagagcatgggacagttctgcccagagacgaaacctggcacctgttggccaggacgcgtttttgccag

SEQ ID NO: 31312 - DNA, 490 bp, Homo sapiens
  misc_feature (1)...(490): n = A,T,C or G
agcgggnnnnncctgaacctagcatcgtccgcaggggcaattcagagagggggtgggaaatgcaatcgaatgaaggccccggtgccacccaaaggcctcaataaattatatttacagataaactgaatgcaatgggggccacaggtggagggctattcccttagggagaccaggactccaatctctcccctttcccagcccctagctagctctctcctcagaaacaatctggcttgtggggaagaggttttgaccagcaaaacagaggcagatctagccaggatctgccacccctgctctccccagtgagaaattaagagggtggcaatttctgataccaaagtggcctggcacacccctatgcccaagcctgatagggaagcaaggcctgggcctgcagctntcccacccgcangaagcaagtggggcctgggcctgcgctcagctagggccccccgagaatgtggtagtgcacttttgttgttgtagn

SEQ ID NO: 31313 - DNA, 490 bp, Homo sapiens
  misc_feature (1)...(490): n = A,T,C or G
agcgcggttnnnttactgaccgagtgacngtgggcaattcctattacatactaaatactttcctcagtatcttgccttttttcacttcatgtcacagaaacatctcttcaggtttatagatacaggtccagctcttcttttcatagccatataacattctgtagaatagagaggacacattttactcagtgtccgattgatggatatcaatattgttttcatttctacaaatagtcaaggaataacataactctgtaaaagttttattacttataggcgcatttatgcctaaaggatagtctcaaaagagtgaaactgatcaaatgtgcatttttttattttaataggtatggacagatttgttctcanaatgtttgtggcagttcanaacaccagtaaaacaggggagatatgtattttggaaaagcaccccaggcgagtctgaagtgtagcccaggataagaaccattgcccagagctgttcagaggg

SEQ ID NO: 31314 - DNA, 494 bp, Homo sapiens
  misc_feature (1)...(494): n = A,T,C or G
gggtggntnnnaaccggacctcgccaccgctccgcgtggtgcaattcgctgatgtgaacatccggcattcaggccgcgatgacacctcccgctacgatgagaggcccgggccctccccgcttacgcacagggaccgggaccgggaccgtgagcgggagcgcagagagcggagccgggagcgagacaaggagcgagaacggcgacgctcccgctcccgggaccggcggaggcgctcacggagtctcgacaaggaggagcggaggcgctccagggagcggagcaaggacaaggaccgggaccggaagcggcgaancatccggagtcgggagcgggcccggcgggagcgggagcgcaaggaggagctgcgtggcggcggtggcgacatggcggagccctccgaggcgggtgacgcgccccctgatgatgggcatncaggggagctcgggcctgactggcctgacnngtcagaagaaaagggccgggatcgtgaccgg

SEQ ID NO: 31315 - DNA, 520 bp, Homo sapiens
  misc_feature (1)...(520): n = A,T,C or G
nattggaccttcgtccagcgtggngcaattccgaatccggcgggtatcagagccatcagaaccgccaccatgacggtgggcaagagcagcaagatgctgcagcatattgattacaggatgaggtgcatcctgcaggacggccggatcttcattggcaccttcaaggcttttgacaagcacatgaatttgatcctctgtgactgtgatgagttcagaaagatcaagccaaagaactccaaacaagcagaaagggaagagaagcgagtcctcggtctggtgctgctgcgaggggagaatctggtctcaatgacagtagagggacctcctcccaaagatactggtattgctcgagttccacttgctggagctgccgggggcccagggatcggcagggctgctggcagaggaatcccagctggggttcccatgccccaggctcctgcaggacttgctgggccagtccgtggggttggcgggccatcccaacaggtgatgaccccacaaggaagaggtactgttg

SEQ ID NO: 31316 - DNA, 478 bp, Homo sapiens
  misc_feature (1)...(478): n = A,T,C or G
gancagctcgcaaatggagacccatntatttgaaagctattacgaagngccgnggaannccggaggtcgctgcggcggtgggaaatgctggcgcgcgcggcgcggggcactggggcccttttgctgaggggctctctactggcttctggccgcgctccgcgccgcgcctcctctggattgccccgaaacaccgtggtactgttcgtgccgcaacaggaggcctgggtggtggagcgaatgggccgattccaccggatcctggagcctggtttgaacatcctcatccctgtgttagaccggatccgatatgtgcagagtctcaaggaaattgtcatcaacgtgcctgagcagtcggctgtgactctcgacaatgtaactctgcaaatcgatggagtcctttacctgcgcatcatggacccttacaaggcaagctacggtgtggaggaccctgagtatgccgtcacccagctagctcaaa

SEQ ID NO: 31317 - DNA, 519 bp, Homo sapiens
  misc_feature (1)...(519): n = A,T,C or G
nattgacatcgtccgcgtgtggcaattcgcccctcactgacccacacacgccctacgaggaggagcaccggcagtcagtgcagtctgaccagggctacatctccaggagctccccgcagccccccgagggactcacggaaatggaggaagaggaggaagaggagcacgacccagggaagccggccctgccactctctcccgaggacctggagagcctgaggagcctccagcggcagctgcttttccgccagctgcagaagaactcgggctgggacacgatggggtcagagtcagaggggcccagtgcatgagggcggctccccagggaccgcccagatcccacctttgagagaggagtgtgtgtgcacgtattcatctgcgtgtacatgtccgcatgagtatatgctcgagtgtgaaatgtaggctttaaaatgtacatgtctggattntaatcccaggcatccctcctaacttttctttgcgcagcggtcgggttatcgtctatacccacgggaatcn

SEQ ID NO: 31318 - DNA, 464 bp, Homo sapiens
  misc_feature (1)...(464): n = A,T,C or G
aggacggggnnnnnaactgagncctgntatgctggannnncggngagnnaggcggtccctgggctccggctgttgcggggtgtaagtggtagtctcggacggttcggtgcccgaggtgtccgcgaaggtggcgcagccatggcggcatgggagagcatggctcatcggatggtctggttggacctggagatgacaggattggacattgagaaggaccagattattgagatggcctgtctgataactgactctgatctcaacattttggctgaaggtcctaacctgattataaaacaaccagatgagttgctggacagcatgtcagattggtgtaaggagcatcacgggaagtctggccttaccaaggcagtgaaggagagtacaattacattgcagcaggcagagtatgaatttctgtcctttgtacgacagcagactcctccaaggctctgtccacttgcagg

SEQ ID NO: 31319 - DNA, 503 bp, Homo sapiens
  misc_feature (1)...(503): n = A,T,C or G
nctggactcannnnnaacctcgatnactgagtgccgtttgcaggaanccggntactgggcatggntactgaatcagacttttgtgtgtgtggatcctctaagattgtatgtgtcagggtattagccaatgttaaatggcgcagaggaatttgagggtttcttttctcatcagcttttgattttaatcaatgttctattagaaaaagtatcaacatttttaattctgttcaggccacagcttggggaacaagacactaatcttttaataatgttccacctgttcaatggaaatagtgatctttctccattaatttacagaagtatttagttacttgacaaaaatattttgagaacaaaatataaacctttctcagcttcttggaagaaaaactgtatttaaacttaaacgaatgtgtccaatatatgttattcaggaagtacttaagtacctgcttacacttgacttgattgatttgacagtcatttggccacagttctactan

SEQ ID NO: 31320 - DNA, 484 bp, Homo sapiens
  misc_feature (1)...(484): n = A,T,C or G
ccatagaaaccntcgcannggcnggnatgatagcctctgcacatgcgccactcgtcagcttcctagacttcattacttacagttacatgatcgacaacgtgatcctgctcatcacaggcacgctgcaccagcgctccatcgctgagctcgtgcccaagtgccacccactaggcagcttcgagcagatggaggccgtgaacattgctcagacacctgctgagctctacaatgccattctggtggacacgcctcttgcggcttttttccaggactgcatttcagagcaggaccttgacgagatgaacatcgagatcatccgcaacaccctctacaaggcctacctggagtccttctacaagttctgcaccctactgggcgggactacggctgatgccatgtgccccatcctggagagctgtccaaagaggaccgtgccaagctctttccacactgtgggcggctctaccctganggcctggcgcan

SEQ ID NO: 31321 - DNA, 490 bp, Homo sapiens
  misc_feature (1)...(490): n = A,T,C or G
gcgtngntnnnaactgaacatcgcngcngtgggcaattccgctggngaagaaggacaaggtggtggtcttcctcaaggggacgccggagcagccccagtgcggcttcagcaacgccgtggtgcagatcctgcggctgcacggcgtccgcgattacgcggcctacaacgtgctggacgacccggagctccgacaaggcattaaagactattccaactggcccaccatcccgcaagtgtacctcaatggcgagtttgtagggggctgtgacattcttctgcagatgcaccacaatggggacttggtggaagaactgaaaaagctggggatccactccgcccttttagatgaaaagaaagaccaagactccaagtgagggcggccaagtcctcgctgagcagagagggagccgctcatgtcagagactcactgccagaaaagccttacccattgtggttntcactatagagaaccgcactgcttgcactgatc

SEQ ID NO: 31322 - DNA, 259 bp, Homo sapiens
  misc_feature (1)...(259): n = A,T,C or G
tagccccccttggatcccagtagatggcctgcgnaccnccgctcgagccccagcctccctccttcctcttctatcctccgtgcctacccctggcagtctggtcctctcggagccctggaggtggggtggggggttgtccctttggggtcatcttccatatgcagccatttcttatcctccctcctcttggcttttctgactctccatcagggaaccccaacattccaaaacctcggcgaatcttgcgctcggcctgggg

SEQ ID NO: 31323 - DNA, 434 bp, Homo sapiens
  misc_feature (1)...(434): n = A,T,C or G
cacaactacctctggacagntgtgttgttttttgttcaatgttccattcttcgacatccgtcattgctgctgctaccagcgccaaatgttcatcctcattgcctcctgttctgcccacgatcccctcccccaagatactctttgtggggaagaggggctggggcatggcaggctgggtgaccgactaccccagtcccagggaaggtggggccctgcccctaggatgctgcagcagagtgagcaagggggcccgaatcgaccataaagggtgtaggggccacctcctccccctgttctgttggggaggggtagccatgatttgtcccagcctggggctccctctctggtttcctatttgcagttacttgaataaaaaaaatatccttttctggaaaaaaaaannnaaaaacaaacaaaaacattaaaacaaaaaa

SEQ ID NO: 31324 - DNA, 497 bp, Homo sapiens
  misc_feature (1)...(497): n = A,T,C or G
cactggagacccttcgcaannncncnnactgatgaccctaggaagngccgnggaatttcggggcgaggcgctgggaagcctgcaaccggccccacaaattctagcagtgccaagaagaaggataaaagagttcaaggtggaagagtgattgagtcccggtatctgcagtatgaaaagaagacaacccaaaaggctcctgcaggagatgggtcacagacccgagggaagatgtctgaaggtggaaggaaatccagcctgctccagaaaagcaaagcagatagcagtggggtcagaaagggtgacctgcagtccacgttgctggaagggcatggcacagctccacctgacctggatctctctgctattaatgacaaaagcatcgtcaaaaagacgccacagttagcaaaaacaatatcaaagaaacctgagtcaacatcattttctgcccctcggaaaaagagcccggtgccaggggaaggaaggttgtggaccttcct

SEQ ID NO: 31325 - DNA, 472 bp, Homo sapiens
  misc_feature (1)...(472): n = A,T,C or G
nggagcggccnnnnnncctgatannctaaaangtccgnagaannccnnnganngngngnttgaggntagagggctgcactgatctcccttagcagcctcgaatggaccttgtaccgatcactcatatactgtggggcccttgcccgtgccttccttggccctcgaatgctgcactcccgctatgctttactcatagaccaacgaaactgcaatgtgactgctgagccggccaaactcatatctgtgacctttctctggtgcctgatacctctcagcatttgagggccttttctcttcctgcttcatctctaaaggtccttctaggagagaggtgaaaggttttggatttgaatcaggatgtgtttaagaatttctttgagtctctttcccttgatgctctcttcttttgagtcctgttggggaaaaaagggaattactaaaccatctgaccctgaaagatcagatgaaatgg

SEQ ID NO: 31326 - DNA, 473 bp, Homo sapiens
  misc_feature (1)...(473): n = A,T,C or G
ggagggccngnnaactgatancctgcgangccaggaagngccgnggaannnggaagtgcggctgacgctggaaggctgcagcatagacgccgacatcgacagtttcatccaggccaagagcacgggcacagagccccccggttctctggactgctgcacggaagtcccaagaccacttcgttggcagcttctgctgcgtccacagagaccctgacccccacccccgagcggaatgagggtgtctacacagccatcgcagtgcaggagatacagggaaacccggcctcaccagcccaggagtaccgggcgctctacgattatacagcgcagaacccagatgagctggacctgtccgcgggagacatcctggaggtgatcctggaaggggaggatggctggtggactgtggagaggaacgggcagcgtggcttcgtccctggttcctacctggagaagctttgaggaagggccag

SEQ ID NO: 31327 - DNA, 487 bp, Homo sapiens
  misc_feature (1)...(487): n = A,T,C or G
agcgtgtntnnccatcgacgtacngcagtgggcaattccaacgacctgacctccgtccacctgggcgtgaaattcagctgccgcttcacccttcgggaggtccaggagcgttggtacgccctgctctacgatcctgtcatctccaagttggcctgtcaggccatgaggcagctgcacccagaggctattgcagccatccagagcaaggccctgtttagcaaggctgaggagcagctgctgagcaaagtgggatcgaccagccagcccaccttggagaccttccaggacctgctgcacagacaccctgatgccttctacctggcccgtaccgcgaaggccctgcaggcccactggcagctcatgaagcagtattacctgctggaggaccagacagtgcagccgctgcccaaaggggaccaagtgctgaacttctctgatgcagaggacctgattgatgacagtaagctcaaggacatgcgagatgagg

SEQ ID NO: 31328 - DNA, 482 bp, Homo sapiens
  misc_feature (1)...(482): n = A,T,C or G
catagagaccntcgcangncgggaatgagaccgtgggccnaacncatttttgagaacacgctgagcacctacccaaagcgcacagatgtctggtcggtctatatcgacatgaccatcaagcacggcagccagaaggacgtccgggacatctttgagcgggtcattcatctgagcttggcccccaagagaatgaagttcttcttcaagcgctacctggactacgagaagcagcatggcactgagaaggatgtgcaggcagtcaaggccaaggccctggagtatgtggaggccaagagctcagtgctagaggactagtggcaggctggctctgtgggacactgtcaacaatgggccagcccggccccgcctcgagtgcctgggcactcggaaaactgttacctcaggactctatttaaatgctgctttttctgcagcacgctaggggaaatcctgtcaggatgaaaaggaagttgagaattttt

SEQ ID NO: 31329 - DNA, 497 bp, Homo sapiens
  misc_feature (1)...(497): n = A,T,C or G
cattggaaagcgttccgaannnccnnnnaactgagacctctaggcaagngccgnggaattcgccttcacccgcatcaactgtcaggggaagacctacctcttcaagggtagtcagtactggcgctttgaggatggtgtcctggaccctgattacccccgaaatatctctgacggcttcgatggcatcccggacaacgtggatgcagccttggccctccctgcccatagctacagtggccgggagcgggtctacttcttcaaggggaaacagtactgggagtaccagttccagcaccagcccagtcaggaggagtgtgaaggcagctccctgtcggctgtgtttgaacactttgccatgatgcagcgggacagctgggaggacatcttcgagcttctcttctggggcagaacctctgctggtaccagacagccccagttcattagccgggactggcacggtgtgccagggcaagtggacgcagccatggctggccgca

SEQ ID NO: 31330 - DNA, 499 bp, Homo sapiens
  misc_feature (1)...(499): n = A,T,C or G
attcgaatcgcagtnccgtgtggnggaattccggaagcaggacgccacctctaccatcatcagcattaccaacaacgtcattgggcaaggtctggtctgggactttgtccagagcaactggaagaagctttttaacgattatggtggtggctcgttctccttctccaacctcatccaggcagtgacacgacgattctccaccgagtatgagctgcagcagctggagcagttcaagaaggacaacgaggaaacaggcttcggctcaggcacccgggccctggagcaagccctggagaagacgaaagccaacatcaagtgggtgaaggagaacaaggaggtggtgctccagtggttcacagaaaacagcatatagtccccagcccttgaagtcacccggcccccatgcaaggtgcccacatgtgtccatcccagcggctggtgcagggcctncattcctggagcccgaggcaccagtgtcctcccctcagggacaaagctn

SEQ ID NO: 31331 - DNA, 486 bp, Homo sapiens
  misc_feature (1)...(486): n = A,T,C or G
gggcggcngnnnnnncccttagagcgtccataggaacnngcgnggaattccgctgaaggtagaagatcgctgcaggagatttccgcgtcgggcagatgaaagcgctctgcaagcccgggtgttatctgcgggccgggtccgcggcttctctggtggcactaggaccgcggcggcgcggccctcgcagccaccgcctcgggcgtgaggcggagcgtagctgttcctggatcctgggcctggctcctcgacccgcccctggaggcggaccccacttgacttaaactctggggcccgggaggccgccggttttctccccgcttgccggggtggtcctcttccctttgtcggaccaaagaagtaaacactgtgtggagagggactgacgtgtttggagggaaatgggaatgtacacgataattaaagagtaaaggtgtgctcaacgctgtttacttctaattatttcctgattcacaaattaatttttgc

SEQ ID NO: 31332 - DNA, 518 bp, Homo sapiens
  misc_feature (1)...(518): n = A,T,C or G
cgggcggccnnnnnaattgannncccatcgaatcactgtccgngnnggggaattctcagatccatgaaggcttccaggaactcctccgtaccctcaaccagccagacagccagctccagctgaccaccggcaatggcctgttcctcagcgagggcctgaagctagtggataagtttttggaggatgttaaaaagttgtaccactcagaagccttcactgtcaacttcggggacaccgaagaggccaagaaacagatcaacgattacgtggagaagggtactcaagggaaaattgtggatttggtcaaggagcttgacagagacacagtttttgctctggtgaattacatcttctttaaaggcaaatgggagagaccctttgaagtcaaggacaccgaggaagaggacttccacgtggaccaggtgaccaccgtgaaggtgcctatgatgaagcgtttaggcatgtttaacatccagcactgtaagaagctgtccagctgggtgctgctgatgaaataa

SEQ ID NO: 31333 - DNA, 519 bp, Homo sapiens
  misc_feature (1)...(519): n = A,T,C or G
aggagtggaaaaaaaaaanncttgccttgcccactatccgngnggtggaattctgaacacggagcaggccttggaccagctcatccagagctgctctctgagcttcaagcacctgactgaggacaaggccaacaagaggctggcctatgtgacttaccaggatatccgtgctgttggcaactttaaggagcagacagtgattgccgtcaaggcccctccgcagacgagactggaagtgcccgacaggactgaggacaacctgcagatatatctcaagagcacccaagggcccatcgaagtctacctgtgcccagaggaggtgcaggagccggacagtccttccgaggagcctctcccctctacctccaccctctgccccagccctgactctgcccagcccagcagcagcaccgaccctagcatcatggagcccacagcatcctcagtgccagcaccagcgccaaccccccagcaggccccaccgcctccatccctggtccccttggaggctactgacag

SEQ ID NO: 31334 - DNA, 482 bp, Homo sapiens
  misc_feature (1)...(482): n = A,T,C or G
aatggtaccttggcagngccnactgagancctaggccangacgtggaattcgttgcagtatcccaggcataagatgaccatgaggtagatttggtaagggggatggagggtggccccggggatggagagaatggatagttttgaaggaagtgggttagacaggctttgaagtagatgagcaggacagaaacaggaggtaggggtggtttagtttcaatctcataggagacagaggaggaaagcagcattataactctcctgtcctcgctgttttgcttatcgcaggggtgcaggtttaaggaccccgaaatttcactgaaattcactggccgtttttaaaaccagaagatgccttgagattgtaggggaaggaggtggaaaagtagaaggccagagtggctattctgtgagggattgatctcacggggtcttgcaggggttggtgaagggtgaaagatagcaaagaactggattctaagacc

SEQ ID NO: 31335 - DNA, 451 bp, Homo sapiens
  misc_feature (1)...(451): n = A,T,C or G
attgatcgcagtccctagtccgtgtggtggaattcgaggaatcccgggtggcttggggcgcaggcttccaacttcgtactctggcctctggcgtctcggctcgtcggttgggtacccgaacccagctactgctgcttgaatagaatatggatggggactcctcgccgtcgttgcgccgcctgccttccctgggcggacgtacacctttgcgaaacgtcagggaggacccagggcccctccttggaatagctcttatttctcaagcgctgcagcgtgaagctcgctctgcgggtccgagaggcctgcgatctgaagactgaaaactgggaagagacgctctaccctgtgctcctcgccggcttcgataggagccgcaggtgcctgggattttctcaaactttgtcccaaacttcagctgtgggagtggaggaacaaacaggcctctcccaan

SEQ ID NO: 31336 - DNA, 473 bp, Homo sapiens
  misc_feature (1)...(473): n = A,T,C or G
aatgaaacctttgaggncggctgatgacctataacatgacatgncaatattatggaaactaacgagttcacaacaggtcaccgaggtgacaggtgtccctgtgccccagccatggccctggccatacggctggcccccgtgatgctgatggggaggtgggcgtgcagggctggtggctctgtgacatgggaatgaggggctcctccctcaccaggagcccaggaccactagcagggtccctgcagtctccatctcttgatctacgcacttgttctggaaggcggatgtgaccgtctgcgtttaacacacgggctcttgaggctcacagcgtccatctctggcccagagtcatccagcttgcaagaggcagagccaggactcgaaccctggctctcgggatctgctactcccctatgtgtcttggcctccccagggatcaggcgtgggtcttcacgagcccatgggccttgcgn

SEQ ID NO: 31337 - DNA, 496 bp, Homo sapiens
  misc_feature (1)...(496): n = A,T,C or G
nctcgaacactattttgagggccgctttcacaggagtccagggctggagagaaaacctctgcgaggaaagggaaggagcaagccgtgaatttaagggacgctgtgaagcaatcatggatgcaatgaagagagggctctgctgtgtgctgctgctgtgtggagcagtcttcgtttcgcccagccaggaaatccatgcccgattcagaagaggagccagatcttaccaagtgatctgcagagatgaaaaaacgcagatgatataccagcaacatcagtcatggctgcgccctgtgctcagaagcaaccgggtggaatattgctggtgcaacagtggcagggcacagtgccactcagtgcctgtcaaaagttgcagcgagccaaggtgtttcaacgggggcacctgccagcaggccctgtacttctcagaattcgtgtgccagtgccccgaaggatttgctgggaagtgctgtgaaatagataccagggccacgtgctg

SEQ ID NO: 31338 - DNA, 449 bp, Homo sapiens
  misc_feature (1)...(449): n = A,T,C or G
gcggctnnnnnnaactgacatcggacatctgacgggacntccctgacggtgggcctggcacacgcctgtattcccacaccaggtcttccgatcagtggtgtctgtgaagggtgccgcgagccaggctgaccaggcgcccgggatccagctcatccccttggctgggaacatcctccactgacttcctcccactgtctgccctgaatccactgctgcccccagaaaaaggccgggtgacaccggggggctcccagcccgtgcaccctggaagggcaggtctggcggctccatccgtggctgcaggggtctcatgtggtcctcctcgctatgttggaaatgtgcaaccactgcttcttgggaggagtggtgggtgcagtccccccgctgtctttgagttgtggtggacgctggcctgggatgagagggcccanaagaccttcgtatcccct

SEQ ID NO: 31339 - DNA, 472 bp, Homo sapiens
  misc_feature (1)...(472): n = A,T,C or G
aattgagaccactggctagtgcgcggcattcgntcttttttagcacgttgtgtaagagcacattatttgctcaaatgaaaacccctgttgcaatagcttaaaaacaaaaccttcaaataattgtgcaataccattgttataagtacgcactcatagacccaaaatgttttgggtaaaacaatgacactatgggaaagagtaaataggggcaaatgagttcaattatcagtgttttgtaggagaaaggttttagaatgttatttataaggcaaacctttttgtgccctgtttatcttttcatcacaaattaaataaattttacttactgtgatagagatgaatggctggctttaaaatatcttaaatatccttaaatatcttatttgtaaatatttatcatatatttagatatttacaaatgtttaaatatcttcaaaatattttttaaaagatattgcctataggatttggc

SEQ ID NO: 31340 - DNA, 476 bp, Homo sapiens
  misc_feature (1)...(476): n = A,T,C or G
atatggacctttgaattttgagaccctaggccagngcggnggaattccagctggctgtccaaaagtatgaggagctgttcccagctttctctgattcccgggaatgcaagttgatgaaaaaattgctagaggcccacgaggagcagaatgtggacagctacaccgagtcggtgaaggaatacgactccatctcccggctggaccagtggctcaccaccatgctgctgcgcatcaagaagaccatccagggcgatgaggaggacctgcgctaagccccacccagccccccagtgcccgtcttcctgtcccatctgctcagagagaggtggggccgagacttgctggagagcttccctcctttcccatctggggagtcccgcgggccacagtgggcaggtggcaccgggggtcagcatgcaggggcgccagaggcccaggctgctggccggacagtcaccctctgttctcgctacatc

SEQ ID NO: 31341 - DNA, 546 bp, Homo sapiens
  misc_feature (1)...(546): n = A,T,C or G
aggaggggagggccgnnntnnnnnnncaattgatcatcgtccgcgtggngcaattccatggcccagggctgatttatagacaaccgaactgcgatgatccagaaactgaggaagcagctctggtggctatagactacatcaatcaaaaccttccttggggatacaaacacaccttgaaccagattgatgaagtaaaggtgtggcctcagcagccctccggagagctgtttgagattgaaatagacaccctggaaaccacctgccatgtgctggaccccacccctgtggcaagatgcagcgtgaggcagctgaaggagcatgctgtcgaaggagactgtgatttccagctgttgaaactagatggcaagttttccgtggtatacgcaaaatgtgattccagtccagactcagccgaggacgtgcgcaaggtgtgccaagactgccccctgctggccccgctgaacgacaccagggtggtgcacgccgcgaaagctgccctggccgccttcaacgctcagaacaacggctccaattntcagctggagg

SEQ ID NO: 31342 - DNA, 450 bp, Homo sapiens
  misc_feature (1)...(450): n = A,T,C or G
tatgagaaccttactctcgcaagngcggnggaattcgctcggccccactcctactgcaaggggaaaccaacatcctgacttttctgattgtcctttccttgctcttctctgtggttttatatcctaagtatgcattcttcaacaaggtaggttagtgttgcctgtcatttgaagttataggaatggaatcattaagcatgtccgtgttgtcccttgcttctttccctcgatgttatctttgtaagattcgcgcctattattccatggaggagtactttgtacttttccgttgctgaaatagtattccattgtattaacataccacaatgtattcattccgtcccatggaagttgtgattttcattgtttcccatatttgggactggatgattacaaaaatactactcataaacccttgtcggcaccagtaaaggagtcctgagagggacg

SEQ ID NO: 31343 - DNA, 520 bp, Homo sapiens
  misc_feature (1)...(520): n = A,T,C or G
agaggccccccnnncatttgaaatacgaacccctgntcagagaggagcaattcagcagctcctccgtgggggacctttgagagcccaggagcaggatttcgagggacacctggtggggagcaaaaggtgctgagtctgtctttgaccttgagcccagcttgtttctcctgcatcctcccccaaaaggggctttgcctgtcattctgcagttctagtgtggggtctgggcgcagatcttttccctctccagcctcggagtcttcctctgtggactgcgcagataggactggtggcacggaccagctctgcagccctggagtcaggagcagagccccccggctcccagcccgccgtagccgctcctggcaccgagcgagccgcgatgacaatggctgcattgtgcttcatgtcccttcccatcaacatttctgtgctggactccttccactcgcgggtcgtctccagagctcanaaaatgaggtgatcagtgggacaagtaaggaaggggggttgngagagn

SEQ ID NO: 31344 - DNA, 468 bp, Homo sapiens
  misc_feature (1)...(468): n = A,T,C or G
nttcgagatttcgtagaccataggcagagtggtggaattcctgaggtcaccctggaggtagcaggtctttcagggccctcccttgaggacagcgtaggccttttcctgtctgcctttcttctgcttgggctcttcaaggcactgggctgggctgctgtctacctgtccacctgcaaggattcaaagaagaaagcagagtgagggcactcactgccatcctgtggaagccaccatcatctctggcccaagcttctgtagtagctccctaaaataataccctatcatctgctcctaatccctccaatctctctccactgagtggctggaatgcttttttttttttctttcactaatataagggataatttttctttttttttttttttggaaagggattttatttttccccccaaggtggaagggaagggcattaattttgtttaatggaaccccccccctcggggaaaa

SEQ ID NO: 31345 - DNA, 524 bp, Homo sapiens
  misc_feature (1)...(524): n = A,T,C or G
agagaggggnnnnaanaccctcgatcatcgtccaagngttggaattcctgccttgcttaccttatgaggactaatcgagtcaagctggacgaggcctttgagtttgtgaagcagaggcgaagcatcatctctcccaacttcagcttcatgggccagctgctgcagtttgagtcccaggtgctggctccgcactgttcggcagaggctgggagccccgccatggctgtgctcgaccgaggcacctccaccaccaccgtgttcaacttccccgtctccatccctgtccactccacgaacagtgcgctgagctaccttcagagccccattacgacctctcccagctgctgaaaggccacgggaggtgaggctcttcacatcccattgggactccatgctccttgagaggagaaatgcaataactctgggaggggctcgagagggctggtccttatttatttaacttcacccgagttcctctgggtttctaagcagttatggtgatgacttagcgtcaagacatttgc

SEQ ID NO: 31346 - DNA, 528 bp, Homo sapiens
  misc_feature (1)...(528): n = A,T,C or G
gagggtnaanaggagnctcgatcaccgttcangngttcgattcacaatcagagtggngcaattccttagggacaaagttcagccagcattttgcttgatgtattaacctcaggtggtacttaacctcagcatcaccgtgtataaaatgggggctcctctaaacagtgctcaggttttatggttgtgagaattaaatgagatggtggatataaaggatttatcaccatgcttgcatgggatgctctcaatatctcgagcaccacatatacgaggtaccattcatagcatccttctatttgtcccctcctccctgctcccctgctgtaggcattgaacctggccacattccaggtaccgtgaacatgcccttcacagacttcctgagccaggaggggctggagaagagccctgaggagatccgccatctgttccaggagaagaaagtggacctgtctaatccactgctggccacgtgtggctctggcgtcacagcctgcctcgtggcactaagggcctacctctgcggca

SEQ ID NO: 31347 - DNA, 520 bp, Homo sapiens
  misc_feature (1)...(520): n = A,T,C or G
tgtgagtnnnanagaagtttgatcccgtccgnnggttgattacaatcaagaatggcctggnctacatgaagtacgacacgcctttcatttttgctgaggtgaatagtgacaaggtgtactggcagcggcaggatgatggcagcttcaagattgtttatgtggaggagaaggccatcggcacactcattgtcacaaaggccatcagctccaacatgcgggaggacatcacctacctctataagcacccagaaggctcagacgcagagcggaaggcagtagagacagcagcagcccacggcagcaaacccaatgtgtatgccaaccggggctcagcggaggatgtggccatgcaggtggaggcacaggacgcggtgatggggcaggatctgatggtctctgtgatgctgatcaatcacagcagcagccgccgcacagtgaaactgcacctctacctctcagtcactttctatactggtgtcagtggtaccatcttcaaggagaccaagaaggaagtggagct

SEQ ID NO: 31348 - DNA, 470 bp, Homo sapiens
  misc_feature (1)...(470): n = A,T,C or G
tggtagcagggtggagactactgatagtcttgggaannccnaggaaggtggntggctccctgacaggtccacagcaatactatccctccatcccctttgcggctttattctggcctcgctggacactttgaagaagaggtgggtgtccaaaaaggagtatgaagaggatggctcccgtgctattcatcgcaaaactttctagtgcccaaggagggcggggcatgttgggagagggggagggaggggagacagagcctttaaccctttttgggcttggctcgtatactaagcttaggggcccctgcatgccctgaacccctgggtgggtgggacagcagtgcccccctgcagccttcccctctaccctagacatgcacacacaaggtacattgagcgtggtggacaggagccttgagctggcgtgtgggaattgagcgccctgtcttgctgttgggggtatccccctggcg

SEQ ID NO: 31349 - DNA, 530 bp, Homo sapiens
  misc_feature (1)...(530): n = A,T,C or G
tgagaggggnnnnagaagttttgaccccgtccangngctggattcactatcagtgnggnggaattcgcggtggaggaggatgcctacagccgcatgaagctggtgctgcggtggtacctgtctggcttctacaagaagcccaagggaatcaagaagccgtacaaccccatcctgggggagaccttccgctgctgctggttccacccgcagactgacagccgcacattctacatagcagagcaggtgtcccaccacccgcccgtgtctgccttccacgtcagcaaccggaaggacggcttctgcatcagtggcagcatcacagtcaagtccaggctttatgggaactcgctgtcggcgctgctggacggcaaagccacgctcaccttcctgaaccgagccgaggattacacccttaccatgccctacgcccactgcaaagagtcttgctgtgttgcccaggctagagtgcaatggtgcaatctcagctcactgcaacctccgcctcctgagttcaaacgattctcctgcct

SEQ ID NO: 31350 - DNA, 501 bp, Homo sapiens
  misc_feature (1)...(501): n = A,T,C or G
tggagtncccnaggagnccccccattgatnccaactganttcctagtccatgtggtggaattcccagttagcgtcaggggagctgggtcaggcggtcgccgggacaccccgtgtgtggcatgcggcgaatcgctctggagaatcccggacagccctgctccctgcagccaggtgtagtttcgggagccactggggccaaagtgagagtccagcggtcttccagcgcttgggccacggcggcggccctgggagcagaggtggagcgaccccattacgctaaagatgaaaggctggggttggctggccctgcttctgggggccctgctgggaaccgcctgggctcggaggagccaggatctccactgtggagcatgcagggctctggtggatgaactagaatgggaaattgcccaggtggaccccaagaagaccattcnagatggatctttccggatcaatccagatggcagccagtcagtggtggaggtgccttatgcccgn

SEQ ID NO: 31351 - DNA, 469 bp, Homo sapiens
  misc_feature (1)...(469): n = A,T,C or G
agggggggattggacctttgagagcntcnggaanncctctcttgctgtgttatgaaaggagagcatctgggaatactcaaaggctggcttctgtttgtgtgtttcaccccatctcaaggtggctagtgctgctgagggactccggcctgaggaaggaagcgcccgtggcctggggcagggccgtgcagttgcatggctttcctgccgctcaagtcactgagggctgttcttggtactgtctagaaaagttgcttgcatccctggagtcacaggaatctcataacccagcctatgcccccaggcccctgccgtgtcagtagagcctgctgaacttcctgggctagcgagaccagctgacagccacagtgctcaaaagtcagggtctaaccccgccagactggcgtctctgtaggattccctgtctttgaaaggatactggaagggcagttggttttctaaacttactccg

SEQ ID NO: 31352 - DNA, 477 bp, Homo sapiens
  misc_feature (1)...(477): n = A,T,C or G
gggatgtccaggnaggnnccnaactgaaaccncattgatgagcactcggacagngcggaggaattccaggaagcttgtattttagagccagggggagctgggcctggtctcaccctggaggcacctggtggccatgctcctcttccccagacgcctggctgctgatcgccttccccacccaccaaccctcagggcaaagccaggtccctctcatttagcctgtcctgtcatcatcatggccagctggaggcaggggcttcctggtgctggaggttggatcttgatgtaaggatgggcatggtgttctcctgctgctccctcagactggggcaatgttaatttagtggaaaaggcacccccgtcaagagtgaattccctcactcgtctcccccaacagctggaccctgaccagctccccctccctccccttgcctgtgccaggtgaggtcagcacatctcaacaggcctcagggctcg

SEQ ID NO: 31353 - DNA, 469 bp, Homo sapiens
  misc_feature (1)...(469): n = A,T,C or G
natcgagaccactatcgagngtcgtggaattccttactgttgcgggctccggggccgtcgaccatgccgctcgacctccacctccgctgggaagctgaggcgccgaacggctcccagagggtcccgggaagcgcatggtgttcaggcgcttcgtggaggttggccgggtggcctatgtctcctttggacctcatgccggaaaattggtcgcgattgtagatgttattgatcagaacagggctttggtcgatggaccttgcactcaagtgaggagacaggccatgcctttcaagtgcatgcagctcactgatttcatcctcaagtttccgcacagtgcccaccagaagtatgtccgacaagcctggcagaaggcagacatcaatacaaaatgggcagccacacgatgggccaagaagattgaagccagagaaaggaaagccaagatgacagattttgatcgttntaaagn

SEQ ID NO: 31354 - DNA, 506 bp, Homo sapiens
  misc_feature (1)...(506): n = A,T,C or G
aggggccaggggnnnaattgagattcgatgtgcagngngcnggaattccagacgtccccaccgagtccagcacggcaagggtgcaggggctgccctagaaatggactcagaggagcctggcccaccctcttgaaactggtcctggaccttggctcagctctgccgcctcaggtagcacgacccccaggccagcctggacacatcagggagcatggtgaggggcaacggcaggacccgtgggccatatcgggacaggcatttccagcgaggggtggggcagaggacatgtggctggcaggctacacccaccctgccatgcagcggtgtccaggctctggggaggccctggggaatttggaggcatcatgagccaaggcctggtggccctcgttcccctgcccctcgtcaccatcctgtccttggctggccgtgaggactcccctcctcaccactgggtcccacagggctgaggtgggcagtagagggcataggtgggtacatgtccc

SEQ ID NO: 31355 - DNA, 478 bp, Homo sapiens
  misc_feature (1)...(478): n = A,T,C or G
gaaaaaattcgaaaccctagncatcgagatccatagtccgcgaggcggaattctctgaataacagcagtgatggtttcagattctgcagaaggagtgccatcacttttccattttgtcacagtgaacatctagtgatgtcctaaaacatgcccagagaacaatgccagaagtgacagacagcacaaagatgaagaaggcatgagtctagccatcatagagcttatgtaacccaattctaaggatgagcaaatattaaaaggttaaaagggctgagaggcttgagagtagaacttaagttgtctttgatttctgtcaacttatctatcaaaaggaaagactgtggagagtgagacagcacaggactcctgacaggaggctgcttgtttctgaggtggccgtgcacgcaggtgtggctcccatccatggccattctgagaggaaagcagacctggcccacccagagcctcagaggcaggg

SEQ ID NO: 31356 - DNA, 470 bp, Homo sapiens
gggccagcccctgataccctagcttgagagcctatccaggatttgcagtaatttgtccattttccatgaaaattttaaaaataaaaagggcaaaatgcagcaaaacatcctcgtagctgcccagactttgctagacaaagccagtgagtggttttggtcagcaggcgggcccaggccgcagttgagcacctgtcagccggtgtcgggcaggtcaggtttggagggaaggcctgcgcggctgtccacaggtggtttggtcaagggcagcctcagaaggtggcacaggaaagggtgtgcggggtgcaggcctgaccagcgatgtttgcagatggactgcctctgggggtcaacttggggaagaacaagacctcagtggacgccgcggaggactacgcagaaggggtgcgcgtactgggccccctggccgactacctggtggtgaatgtgtccagccccaacactgccgggct

SEQ ID NO: 31357 - DNA, 503 bp, Homo sapiens
  misc_feature (1)...(503): n = A,T,C or G
tggggtnncccncaattgaaaatcgantgcntctgcagngngcnggaattccccatgtcagtctctgaagatcttttcggagaagctctgctgttcctccagcgaggaatcctatgttctttggcctggaaagtggtaggaagagtgtagagccggttgcctggctgcaagagaagaagcctgggaaagcctcaccctttttgaacagggtctctctcctcccctccagcacttctgctgtcatgtcacctggagcatctctgggcaatcttaatagaaagtaaatcttccatattctgaaagggtacgagaagcagcattcacctggctgcacagggtttagatgaggatctgactgttagcccatttgcctctaccttcacttccaagctagcagtgcctccaatccagaatcccctagggtgctacactgtgacttctctcgcttctcatggagctcctctctactgctgctttgccaattcccctacttctcttctctc

SEQ ID NO: 31358 - DNA, 260 bp, Homo sapiens
  misc_feature (1)...(260): n = A,T,C or G
gagggtgcccaacggatnccctcggagtggcctcgcnacancggagacagcaggcaccgcaggaccggccacgggtcttcggggacgaggaagcctcagccccattatgaactccagacccttgtcccttgagcacccctgggccggccctcagctccggacctccgtgcagccctcccacctcttcatccaagaccccaccatgccaccccacccagctcccaaccccctaacccagctggaggaggcgcgccgacgtc

SEQ ID NO: 31359 - DNA, 490 bp, Homo sapiens
  misc_feature (1)...(490): n = A,T,C or G
gctgttncnaggggnnnnnnatcgagnccctattgtagacactagtccatgtggtggaattcgctacagctacagtaatttcttctccaagcacagaggaactttcccaggatcagggggatcgcgcgtcacttgatgctgctgacagtggccgtgggagctggacgtcatgctcaagtggctcccatgataatatacagacgatccagcaccagagaagctgggagactcttccattcgggcatactcactttgattattcaggggatcctgcaggtttatgggcatcaagcagccatatggaccaaattatgttttctgatcatagcacaaagtataacaggcaaaatcaaagtagagagagccttgaacaagcccagtcccgagcaagctgggcgtcttccacaggttactggggagaagactcagaaggtgacacaggcacaataaagcggaggggtggaaaggatgtttccattgaagccgaaag

SEQ ID NO: 31360 - DNA, 460 bp, Homo sapiens
  misc_feature (1)...(460): n = A,T,C or G
ntcgagactatagtccgtgtggtggaattccgtctccttcctggtttgggcggaagccatcacctggatgcctacgtgggaagggacctcgaatgtgggaccccagcccctctccagctcgaaatccctccacagccacggggacaccctgcacctattcccacgggacaggctggacccagagactctggacccggggcctccccttgagtagagacccgccctctgactgatggacgccgctgacctggggtcagacccgtgggctggacccctgcccaccccgcaggaaccctgaggcctaggggagctgttgagccttcagtgtctgcatgtgggaagtgggctccttcacctacctcacagggctgttgtgaggggcgctgtgatgcggttccaaagcacagggcttggcgcaccccactgtgctctcaataaatgtgtttcctgtcttataaaa

SEQ ID NO: 31361 - DNA, 487 bp, Homo sapiens
  misc_feature (1)...(487): n = A,T,C or G
nttgctggcnnnnnnnaaattgagactcgatagtctaggccanngcgnggaattcgctgttagagggtgatcttcagttttacaggaagtgggtcacgggttaattttaaatgtgattccgaatctcctttcagtcctcgagaagggccaatgagcatttttcagcagtcacagccagtgtgagtgctgctctttccacctgccttgcaaattctgtttcccaggggaatgtgtctactgcctggtggctcaaaggttggaaggcagggcagaggtgggggctgattctgctgggacaggtcttccagaggcagcctccccccactgcctgtccccgtccccaccaggctgcccttgggatggaccttttcattcttttctttatattctagacagtctctgttgtctcattgtgttgctgtcccatttttcacgtgagggtaccggggtaggggagtggcctgcccagggtcacactatgagaggn

SEQ ID NO: 31362 - DNA, 237 bp, Homo sapiens
  misc_feature (1)...(237): n = A,T,C or G
tacccgcatgatgatgcgagcagagaacttctttatccttcgaaggaagcctgtggaggtttcccggtcctctggcgaggatcctccaaggcgtctcacatgaaccggctcagaaacgccaaaatctacgtggagagagctgtcaagcagaagaagatctttacaatccaaggctgctaccccagatccggtgtctcttgcgccggaggggctgggtggagaaaaaaacggtccatn

SEQ ID NO: 31363 - DNA, 449 bp, Homo sapiens
  misc_feature (1)...(449): n = A,T,C or G
tacagatagcttccgcagattgaggccntccaacanccacgacttanaggtcaacgtggagcacatgacggagaagatgaagacagacattcagaggggcctggtgctgcggaacgagaagtgccatgactactacaccacggagttcctgtacaacctgtactcatcagagggcaagggcgtcttcgactgcaggaccaatgtcctgggccacctgcagcagggtggcgctccaaccccctttgaccggaactatgggaccaagctgggggtgaaggccatgctgtggttgtcggagaagctgcgcgaggtttaccgcaagggacgggtgttcgccaatgccccagactcggcctgcgtgatcggcctgaagaagaaggcggtggccttcagccccgtcactgagctcaagaaagacactgatttcgagcaccgcatgccacgggagc

SEQ ID NO: 31364 - DNA, 451 bp, Homo sapiens
  misc_feature (1)...(451): n = A,T,C or G
tcccgggtngctagcgcagnatgccggccaatcccannagcanccggaggccggggtggccaggcccccgggtttagaatcctgctgaggtcacggagaggctcatgccgtttttgcgtttcccatctcacctgtgctgggtcccgtctccagggatggtcctgcctcctgtccttgggccctcccagctgcttcctttgctcctgcgctgaggaaggcttttgccccccagtggggcagcatgggccctccctgttgccggcatcgttattttctcccagctcctgatgggtcccttgggttgtgcttcggggcggggcaggcgggtgtgactgcactgcgcccgtccagcctcccacccacacctcctgcccttcccgagccccctcctctgtcatttctccccctggagttcctcacgcacagggctttgtcctaagtggtcgccacn

SEQ ID NO: 31365 - DNA, 479 bp, Homo sapiens
  misc_feature (1)...(479): n = A,T,C or G
tgtgccannnnnaattgaactgatagctatggcagnngcgnggaattcgacgactgtagcaggagcaggagtcactgacattctaggccaggccagggctaagccatagaacctattaatagtaatccacaaatagatatggggcacctcctaggaactctccttgttccaagcgtcgtacctcgtgtgatccttagcggctctctgaagcagacagaagagggccagccatctttcttccacctttgaggcttgggaagggtgagacttgctggtgacttacaactccatcaaaggggcatggtgaaataagggcctgggctcctgacttctgggctagggctcttccaaaggcagagtctggagaggcctggctgtggccacaccatggggcaagtggctagaggggcgagtagacagcagaggcagctgtggcccccgggattagcactgngggaccggatgggggagggaggcct

SEQ ID NO: 31366 - DNA, 529 bp, Homo sapiens
  misc_feature (1)...(529): n = A,T,C or G
ccgatatgnagnncncgnnngnnccnnnnaatgggagcntccattgagtggctgtacncgagagagagagagagagagcccaagactttgttggaactggagatgttttcctgcttccttgttacagtggtcatgcgatgatttggctccattactaacggcccaattatttgaccttggcctcagagacaggtgtgtggtggactggaaagaacatggtggattttggcagggcccccactttagttgttcctgaacttgggcaaattactgcacctcccgcactcttccttctgttactagtaaagggcaggcgcccatgcccaccctactggacggatgggaagatgaagtgaaaaatgcccccagctgttggaagctgggagccctgggaaagcacaccccacctttacagatcacagggaccttatcctgagagcctcacctcaccaaggggggcctcaggcctgcccctgcccatgaggcccanagagtgggggttggggagggatcgcagggtgaggcggct

SEQ ID NO: 31367 - DNA, 491 bp, Homo sapiens
  misc_feature (1)...(491): n = A,T,C or G
cgggccaggggnnnnnnnaatcgagacccatatcgagagccctagaccagagcggcggaatctcgcaggtgaagaaggcgctgcgactcgcccgcgagccgcgcctgggcctggacttatgatggaacccttccggagaaggctgtacgcagggcctcaaagacgtcccacccgagccgacccgagacatcctcgctttaaagagccttccccggggcttggcccttggcccctcactcgccaaggaacagcgcttgggggtctggtgtgtcggggaccccctgcagcccggcctgctgtgggggccgctggaagaggagtctgcctccaaggagaagggcgagggagtaaagccacggcaggaggaggtattgaaggatagagcgacttccctccgcccttgaaaatgtaggggaggtttggacattgctagacagcttttcaatttgaagaaagagagtatttcaagagataggagatagtctttgccc

SEQ ID NO: 31368 - DNA, 472 bp, Homo sapiens
  misc_feature (1)...(472): n = A,T,C or G
agagggcgggncccnnnaactgatagacctactacnctcgnanaancaaggaggncccccacgggccttcaggatgaaagctgcggtgctgaccttggccgtgctcttcctgtcggggagccaggctcggcatttctggcggcaagatgaacccccccagagcccctgggatcgagtgaaggacctggccactgtgtacgtggatgtgctcaaagacagcggcagagactatgtgtcccagtttgaaggctccgccttgggaaaacagctaaacctaaagctccttgacaactgggacagcgtgacctccaccttcagcaagctgcgcgaacagctcggccctgtgacccaggagttctgggataacctggaaaaggagacagagggcctgaggcangagatgagcaaggatctggaggaggtgaaggccaaagtgcagccctacctggacgacttgcagaagaagtggcag

SEQ ID NO: 31369 - DNA, 473 bp, Homo sapiens
  misc_feature (1)...(473): n = A,T,C or G
natcgagctcgagagcactagtccagggtggtggaattcacctcatctctactgaacatagaaaaattagctggtcgtggtggcgggcgcctgtaatcctggctactcggaagggtgaggcagcagaatcacttgaacccaagagacggaggctgcagtgagccaagattgcgccactgctctccagcctgggcgacagagctagactccatctcaaaaaaaaaagaattcagatatttgtgtaaaaacatttttgtacggtaaagatgacacacgatagagaaaagtgttggccatgggtgcgagagggtggtccctaacgtgacagagcttttacagagtcatgccagaaagatgaatacccaagttgaaaatcagtcccttgggagagggcaggtcacatggaaatcagcacagcagcccctgcctgtccacgccgcgctgggggacactcctgcacccggcacagctct

SEQ ID NO: 31370 - DNA, 482 bp, Homo sapiens
  misc_feature (1)...(482): n = A,T,C or G
gagcggcnnnnnnnaaattgagatgcctatcaatngtcgnggaantcctgctttctaagtactattctaacattgcgctttataagggatgatatttctaccacctcactcatatttttagctgaaatgattttcctggtatgtctgttattttgtggaaaaagaaatattgtgtaaaatgggtgctgccaaaattccaggccattttgcagggactctgaagtgacctttagtagtaatagtcttatgtgcagtaactataatggtaaagaatgttaaataataaaatttaacattttccaaatgctattgggctgcccctccccctttttgttaaattgctgggttttccaactgaatcagtaaaaactatttctgtttagagctacaaggttaaagtgcctgctttccagtaatggagattgagtcactattaatttgataaaaggtaagctcagtaggcatcagattcctagatacaa

SEQ ID NO: 31371 - DNA, 496 bp, Homo sapiens
  misc_feature (1)...(496): n = A,T,C or G
nctcgattacagtccangtggnggaattccanaagggaaaagaaagcagcagcttcccacctgttcccatttgagaagctgtgagctgagcgcccactagaggggcacccaccagttgctgctgccccactacaggccccacacctgccctgggcatgcccagcccctggtggtgggggcttctctgctgagaaggcaaactgaggcagcatgcacggaggcggggtcaggggagacgaggccaagctgaggaggtgctgcaggtcccgtctggctccagcccttgtcagattcacccagggtgaagccttcaaagctttttgctaccaaagcccactcaccctttgagctacagaacactttgctaggagatactcttctgcctcctagacctgttctttccatctttagaaacatcagtttttgtatggaagccaccgggagatttctggatggtggtgcatccgtgaatgcgctgatcgtttcttccagttaa

SEQ ID NO: 31372 - DNA, 478 bp, Homo sapiens
  misc_feature (1)...(478): n = A,T,C or G
nggggggagggcgcccnnnctaccgagaactcagtnngacccgcacnngncncggaanntnnnggaactgaaggagggtgggaaggttttaattattttaaaaatagagatttggactttctatgttgcccaggctggtctcaggctactgggctcaagtgaacctgcttcctcggctcccaaagtgctgggattacaagcgtgagccactgtcccagcagggaggtgttttttttaaagctgattcactggaggcagggtgggcaagtggcactgctggtggccacccctcacagtccctgctgcccccagtaccgcctggcacccatcccccgggcccgccacgactttgcctgcgccagcctgatcttcgcctgcatcctgctcgtccatgtcctgctcatgcccagagtcagtgcagggaggggtgtgggggtccggcctgctgggatccaggctggaaggtgactatgaacct

SEQ ID NO: 31373 - DNA, 467 bp, Homo sapiens
  misc_feature (1)...(467): n = A,T,C or G
natcggatcgatancaatngncgnggacttcggcatctactccagacttcctgccataaaactccagataaagtaaaccatgcagtactggctgttgggtatggagaaaaaaatgggatcccttactggatcgtgaaaaactcttggggtccccagtggggaatgaacgggtacttcctcatcgagcgcggaaagaacatgtgtggcctggctgcctgcgcctcctaccccatccctctggtgtgagccgtggcagccgcagcgcagactggcggagaaggagaggaacgggcagcctgggcctgggtggaaatcctgccctggaggaagttgtggggagatccactgggacccccaacattctgccctcacctctgtgcccagcctggaaacctacagacaaggaggagttccaccatgagctcacccgtgtctatgacgcanagatcaccagccatgtgccttag

SEQ ID NO: 31374 - DNA, 428 bp, Homo sapiens
ccgaggagaggcctgggtgtggtgaggatgcaccggtggtgtcagagctgctgccactggggacggcagcaggagcatgtgtttgagctgccctcacctccccgccccctgatggcagagctgccctcacctctccccctccgcgccctggccccatggcaggccgtggaacaccggatccgtgaggagcagcgggcgatggaccagaagatcatcctggagctggaccggaaggtggctgaccagcagagcacactggagaaggcgggggtggctggcttctacgtgaccaccaacccacaggagctgatgctgcagatgaacctgctggaactcatccgaaagctgcagcagaggggctgccgggcagggaatgcagccctgggactgggaggtccctggcagtcgcctgctgcccagtgtgacca

SEQ ID NO: 31375 - DNA, 499 bp, Homo sapiens
  misc_feature (1)...(499): n = A,T,C or G
aggccgnaggagcccacccttgtangcctagntangctacggaanngcgtggaantcantggctggggcccagctgcctaacagaagcaagcctgaatactctatggaagaaggtatcttatgctttaaattgctgctgcagttttaaattagtgtctggcacagaataaccaagtgtgaaaggaacaggaaacatgagtgaaaatcagacccgttattagagtgaggcatggtgatgtacacctgtggtcccagctactagggaggctgaggtgggaggatcatttgagcccgggaggtcgaagctgcagtgagccatgattgtatcactgcacccccagcctgggcaatagaccaagacccccatctctaaaattaaaaaacaaaaacaaaaactgttgatagacccacaggagccccagacgctggagttggcaccggcaggtggtgcctcaggtctgcagggagcagatgggaagggccctgtggcagcagagtg

SEQ ID NO: 31376 - DNA, 497 bp, Homo sapiens
  misc_feature (1)...(497): n = A,T,C or G
aggccccaggggccccaatgaaantcattgagancttcggaagngcggcggaattcggtgatttagcctatctgtcccaggccagcgtggctgagtgtgctggctggaggcctctctctctgcttcgagggtagctgagatccaccccggaaaccggcaggatgaagggggcaagtgaggagaagctggcatctgtgtccaacctggtcactgtgtttgagaatagcaggaccccagaagcagcacccagaggccacaggctagaggacgtgcatcaccgccctgagtgcaggcctcccgagtccccaggaccacgggagaagacgaatgtcggggaggccgtggggtctgagcccaggacagtcagcaggaggtacctgaactccctgaagaacaagctgtccagcgaagcctggaggaaatcttgccagcctgtgaccctctcaagatcggngacgcacgtgcctgaaggctgaggtagaggtgtggggtgctgg

SEQ ID NO: 31377 - DNA, 496 bp, Homo sapiens
  misc_feature (1)...(496): n = A,T,C or G
agggccccaggggcccccctagtanaccctaagangctncggaannncaagcnctntacgacattagcttcagaaccctaaagctgaccacgcccacctatggtgacctgaaccacctggtgtctgctaccatgagtggggtcaccacctgcctgcgcttcccaagccagctcaatgctgacctgcggaagctggctgtgaacatggtcccgtttccccggctgcacttcttcatgcccggctttgccccactgaccagccggggcagccagcagtaccgggcgctgaccgtgcccgagctcacccagcagatgtttgatgccaagaacatgatggctgcctgcgacccccgccatggccgctacctgacggttgccgccgtgttcaggggccgcatgtccatgaaggaggtggatgagcaaatgcttaatgtccaaaacaaaaacagcagctattttgttgagtggatccccaacaatgtgaaaacggctgtctg

SEQ ID NO: 31378 - DNA, 517 bp, Homo sapiens
  misc_feature (1)...(517): n = A,T,C or G
agcggcnncnnnnnaatagatcttctgtccgcgtggngcaattccagcaaaagaagagagaccagaacaagtcggcggccctgaggtaccgccagcggaagcgggcagagggtgaggccctggagggcgagtgccaggggctggaggcacggaatcgcgagctgaaggaacgggcagagtccgtggagcgcgagatccagtacgtcaaggacctgctcatcgaggtttacaaggcccggagccagaggacccgtagctgctagaagggcaggggtgtggcttctgggggctggtcttcagctctggcgccttcatccccctgcctctaccttcattccaaacccctctcggccgggtgcagtggcttatgcttgtaatcccagcactttgggaggccaaggcaggaggatcgtttgaggccaggaggtcaataccagcctgggcaacatagtaagaccctgtctctattaaaaaaaaaaaantaacctttctttcccaccaaaccacccaactcctt

SEQ ID NO: 31379 - DNA, 517 bp, Homo sapiens
  misc_feature (1)...(517): n = A,T,C or G
gggagtacncggngtnnnnnnaattgagaccaatcgatggcgctagnccagccacaccggngagccccgccatgtcctacctgagtgagtacatgctggcagctgccactcctcccactgcttagagcctgcccctgccacatgtccctccaccgtggctactcactcagctctccgggatgggcagatggacaatgtgccctgaggagattgcggggtgggagggcaatggcattatcgagcgggaaggggaggggaggggcataagctgaactcctatgggggtcgtcgggcgcctcccagggccacttgcttagctcagccctctctccctttgtatctgcagccagctaccagcctcctcaaaacccctactactatgtggacggggatccccacttcatcatccaaattccggagaaagacgatgccctctgcttcaacatcgatgaagccccaggcacagtgctgcgccttattcaggatgcagtcacaggcctcacagttaatgggcagn

SEQ ID NO: 31380 - DNA, 476 bp, Homo sapiens
  misc_feature (1)...(476): n = A,T,C or G
ngggacgggggnnnnnnnccttgagnaactgacnancatacggaagngccgnggaantctgacctcaatagatgccatctccctggagtgtgagcgcgtgctgggagagatgggggaagccccagccccggagcagtacctcgtgctggaagagctcattgacatgaaccagcaccatctgaatgccctcggcgtgggccacgcctctctggaccagctctgccaggtgaccagggcccgcggacttcacagcaagctgactggcgcaggcggtggtggctgtggcatcacactcctcaagccagggctggagcagccagaagtggaggccacgaagcaggccctgaccagctgtggctttgactgcttggaaaccagcatcggtgcccccggcgtctccatccactcagccacctccctggacagccgagtccagcaagccctggatggcctctgagaggagcccacgacactgc

SEQ ID NO: 31381 - DNA, 496 bp, Homo sapiens
  misc_feature (1)...(496): n = A,T,C or G
atgggtggcaggcncaggggnnnaattgaactacaatcacagtggngcaattctcagtttcctcttctgagcatgggcctgaatgagacgtgtgtaaagtaccaagcacagtggtgagccaatggaagacacgcagctagccaccagcagtcatcaccaaagatgcctctgatttgtgactctgaaaattcttgcaaagctgagaaggtgaaattcctctggctatattgttgaccaaaggcccttctctgtaagagtgaattgcacgctcacttgaaactatcttgagggactaaggtgtacaatcctggtgcttatgcagtttggggctctaggtagacacgagctggctttgaaattgtagattcctacactccccctttctggagttctgggtctaagtgaattgactcctatttctgttgtgaatgttgtagattcccttcccattctcttggtggccctggaagcttctaggcacagtgtgccaccctga

SEQ ID NO: 31382 - DNA, 476 bp, Homo sapiens
  misc_feature (1)...(476): n = A,T,C or G
gcccagccatcgaganccntanntttagtagtccactatcagtgtggtggaattcgctgggtgcctgtgttcgaactgcagtggctcagggtggctggcgctcactgtggctgggctggggccccactgcccttcgagatgtgcccttctcagccctgtactggttcaactatgagctggtgaagagctggctcaatgggctcaggccgaaggaccagacttctgtgggcatgagctttgtggctggtggcatctcagggacggtggctgcagtgctgactctaccctttgacgtggtaaagacccaacgccaggtcgctctgggagcgatggaggctgtgagagtgaaccccctgcatgtggactccacctggctgctgctgcggaggatccgggccgagtcgggcaccaagggactctttgcaggcttccttcctcggatcatcaaggctgccccctcctgtgccatcatgatc

SEQ ID NO: 31383 - DNA, 480 bp, Homo sapiens
  misc_feature (1)...(480): n = A,T,C or G
ctaaagatacngctacgcagtaattgggantcatgggnaangncgcgcaaggcagaccaaggaccacctgttctttgtgatggagttactcaacggtggggacctgatgtaccacatccaggacaaaggccggtttgaactctaccgtgccacgttttatgccgctgagataatgtgtggactgcagtttctacacagcaagggcatcatttacagggacctcaaactggacaatgtgctgttggaccgggatggccacatcaagattgccgactttgggatgtgcaaagagaacatattcggggagagccgggccagcaccttctgcggcacccctgactatatcgcccctgagatcctacagggcctgaagtacacattctctgtggactggtggtctttcggggtccttctgtacgagatgctcattggccagtcccccttccatggtgatgaagaggatgaactctttgagtccat

SEQ ID NO: 31384 - DNA, 228 bp, Homo sapiens
agagctgaagaggcaaagctaaaggccaaatacccaagcctaggacaaaagccaggaggctccgacttcctcatgaagagactccagaaagggcacaagtactttgactcaggagactacaacatggccaaagccaagatgaagaataagcaactgccaagtgcaggaccacacaagaacctggcgactggtgaacacatccccaccccacaggatctgccccagaga

SEQ ID NO: 31385 - DNA, 497 bp, Homo sapiens
  misc_feature (1)...(497): n = A,T,C or G
tgtgtccnaggacgcccnaactgagaccccatcgagagcgtaggaagngccgnggaanncggaggaggtgcaggtcctggggcttgatggttgaggccatctcctgtttcgcctggtttgcattgcggctaaacagggactgctgggccggaaggtggtggtcgcacgctgtgaaggcatcaacatttctggcaatttctacagaaacaagttgaagtacctggctttcctccgcaagcggatgaacaccaacccttcccgaggcccctaccacttgcgggcccccagccgcatcttctggcggaccgagcgaggtatgctgccccacaaaaccaagcgaggccaggccgctctggaccgtctcaaggtgtttgacggcatcccaccgccctacgacaagaaaaagcggatggtggttcctgctgccctcaaggtcgtgcgtctgaagcctacaagatagtttgcctatctggngcgcctggctcacgaggttggcn

SEQ ID NO: 31386 - DNA, 499 bp, Homo sapiens
  misc_feature (1)...(499): n = A,T,C or G
cgcccccccgcnngnnnnnntttgaaaccccatcgatgaccctaggcagnngcgnggaattcggctgccaaggtgattccctcgcctttcaagcacgcggacatcgtcaccaccactactcacaagactcttcgaggggccaggtcagggctcatcttctaccggaaaggggtgaaggctgtggaccccaagactggccgggagatcccttacacatttgaggaccgaatcaactttgccgtgttcccatcccttcaggggggcccccacaatcatgccattgctgcagtagctgtggccctaaagcaggcctgcacccccatgttccgggagtactccctgcaggttctgaagaatgctcgggccatggcagatgccctgctagagcgaggctactcactggtatcaggtggtactgacaaccacctggtgctggtggacctgcggcccaagggcctggatggagctcgggctgagcgggtgctagagcttgtatccn

SEQ ID NO: 31387 - DNA, 510 bp, Homo sapiens
  misc_feature (1)...(510): n = A,T,C or G
tggacgtnnnnnnatttgaaaaccctcctcgaaccactatccgtgtggtggaattcaaatgaaggcgcacatcctccttcctctctacaacacccttttccaacccaaagtaggcatgtatgggaaattccacattggagatggagctggggaagggttatgatgtcctacctctatcccttggctttgctcaggtgccatctgtcccctcgaggagttgtgtgatgtgtcccaccagtatggggccctgaccttcgtggatgaggtccatgctgtaggactgtatgggtcccggggcgctgggattggggagcgtgatggaattatgcataagattgacatcatctctggaactcttggtaagtgaatgctttgggccttcttatataccctccagagaggaggcccttacaaaattcttttctgcctcctccccaaagctataaggggttgtttgacagaattcacaagcccaggctggttgcattctggacttcctctttcactcga

SEQ ID NO: 31388 - DNA, 432 bp, Homo sapiens
ctgaaaagccctgtcctgggaagtccccccagaggccagaatccagcctgagaggtcctctgcagagggctcttgtgagcacagagggcgagggctggcccggtgcaaagggctcccagtgagcacagggagggcgagggccggcccggtggggcccagctcactggttgtgcctgcctaggacttctggaactatcacctgggcgtaatgtgctggatcatccccgtcttcttgggcctgtcctgcttccgctccggcaatgggtccctgttcacatcctccaggctcttcttcgtggggttccgggaaggccacctgccctgcatcctctccatgatccacccacagctcctcacccccgtgccgtacctcgtgttcacgtgtgtgatgacgctgttttacgccttctccaaggacatcttctgcgtcag

SEQ ID NO: 31389 - DNA, 462 bp, Homo sapiens
  misc_feature (1)...(462): n = A,T,C or G
gaggtcagggatgagactctgacaccgtcggaannncnagccccactaaccagacctcacccatcagccctacacatccccattccaaagcctttcaaatcctaagggaagatggccccagtcccaagttggccctgtggctgccctcaccagctcccacagcagccccaacagccctgggggaggctggtcttgccgagcacagccagagggatgaccggtggctgctggtggcactcctggtgccaacgtgtgtctttttggtggtcctgcttgcactgggcatcgtgtactgcacccgctgtggcccccatgcacccaacaagcgcatcactgactgctatcgctgggtcatccatgctgggagcaagagcccaacagaacccatgccccccaggggcagcctcacaggggtgcagacctgcagaaccagcgtgtgatggggtgcagaccccactcatg

SEQ ID NO: 31390 - DNA, 491 bp, Homo sapiens
  misc_feature (1)...(491): n = A,T,C or G
tgtggcnaggagnccnnaatggagacccactgagagcgctggaaagacacacgagactttcggggtctgacgcgagccttgcctcaggcctctcgaggtccagactgccgcccagtccgctctgcgacgcaccagtgaatagtgtggtacctccttgtctcggttcaggtccagacctccccgtcttccggctgccctgaaagtcaagcgacctcatgaccttgtgattggcgcctgcgccggcggaccgtgaccgaggaaacccctggagggacttgggcattccttgggctccgtgcctgttcttcgcgctcctttcgggcaaggatctcacattatcagcctttgaccgacacagaatgcctggcatttgataaatgtttgttgaacttgaagagacatatggacaatgaatctgcaaggtgagttgaaaccagattgtgaattttgttgaatggtaagccaaggaattctgactttttccaataggg

SEQ ID NO: 31391 - DNA, 467 bp, Homo sapiens
  misc_feature (1)...(467): n = A,T,C or G
natcgagnatcgtagagccctatgccgngaggnggaattccctgttatgacattgaagaggaacaggacaagggactgtgccttcctggggctgactttgttcccgtctcctctgtagccaagccctcaatgtcaggctgcacctccccctgcctcgaggggtggtcaggtgagtgtgtgcacccaccacggggagattcctggggagagagtgagctcagcatgacgggtctgcctcaagaaggtgccaagcccagcaccttccctttccaaactccagcctgtctcaggagctgagcagcccagagcagaaggctgagctggcagagggagcccttcgctgggacctgcctcgggtgcaaggaggctctcaactctcaggccttttccagatggacgtcccagggcccccaggacctcccagccatgggctctccacctcggcctctcctctggggctgggccct

SEQ ID NO: 31392 - DNA, 509 bp, Homo sapiens
  misc_feature (1)...(509): n = A,T,C or G
ggggagtgcnnnnattgannnccctcctcgaatcactattcagtgtggtggaattctgatggcgtgatgtctcacagaaagttctccgctcccagacatgggtccctcggcttcctgcctcggaagcgcagcagcaggcatcgtgggaaggtgaagagcttccctaaggatgacccgtccaagccggtccacctcacagccttcctgggatacaaggctggcatgactcacatcgtgcgggaagtcgacaggccgggatccaaggtgaacaagaaggaggtggtggaggctgtgaccattgtagagacaccacccatggtggttgtgggcattgtgggctacgtggaaacccctcgaggcctccggaccttcaagactgtctttgctgagcacatcagtgatgaatgcaagaggcgtttctataagaattgcataaatctaagaagaaagcctttaccangtactgcaagaaatgcaggatgaggatggcaagagcagcttgagaatga

SEQ ID NO: 31393 - DNA, 500 bp, Homo sapiens
  misc_feature (1)...(500): n = A,T,C or G
tgtgtccaggaanccccnaattgagaccnattgatnacactaggccangnggtggaattccatcctggctaacacggtgaaaccccatctctactaaaaacacaaaaaattagtcgggcgtggtggcgggcgcctgtagtcccacctactcggggggctgaggcagcagaatggtgtgaacccgggaggcggagcttgcagtgagaggagatcgcgccactgcactccagcctgggcgacagagcgagactccgcctcaaaaaaaaaaaaatgggaaaaaaggggggttttctgggcccaagcttgcttttcggcccccccgggggggccttttttttgattttccacccgggggcggccccacctggacaacgagaaatttttcccttctggaacctttcccggcctttggctctttccggngggggaacgtgggcaatcgtggcgttttttttatgcaatggaactggaattgatggatttaataaacccgctgcccc

SEQ ID NO: 31394 - DNA, 514 bp, Homo sapiens
  misc_feature (1)...(514): n = A,T,C or G
cggaaggtnnnnnatttgaaaaccctcctcgaaccactactcagagtggtggaattccggtgntctgggtactacagcagaagggtatgcggaagcgagcaccccagattgagatgggtcctgccggtgtgagcctgagggccaccatgctctgcctcctggcctgggctggcctggctgcaggcgaccgggagtacatacaccccttccacctaggcatccacaatgagagtacctgtgagcagctggcaaaggccaatgccgggaagcccaaagaccccaccttcatacctgctccaattcaggccaagacatcccctgtggatgaaaaggccctacaggaccagctggtgctagtcgctgcaaaacttgacaccgaagacaagttgagggccgcaatggtcgggatgctggccaacttcttgggcttccgtatatatggcatgcacagtgagctatggggcgtggtccatggagccaccgtcctctccccaacggctgtcttttgcaccct

SEQ ID NO: 31395 - DNA, 492 bp, Homo sapiens
  misc_feature (1)...(492): n = A,T,C or G
nggggggnnnnnnnnaatcgaactcgtatccatgtggcggaattcgcagctcagcatggctagggtactgggagcacccgatgcactggggttgtggagcctatgctggtctctggccattgccacccctcttcctccgactagtgcccatgggaatgttgctgaaggcgagaccaagccagacccagacgtgactgaacgctgctcagatggctggagctttgatgctaccaccctggatgacaatggaaccatgctgttttttaaaggggagtttgtgtggaagagtcacaaatgggaccgggagttaatctcacagagatggaagaatttccccagccctgtggatgctgcattccgtcaaggtcacaacagtgtctttctgatcaagggggacacagtctgagtataccctcctgannagaaggagacaggatacccaaaagtgctccaagatgaattcactggatcccatacccactggatgcagcn

SEQ ID NO: 31396 - DNA, 533 bp, Homo sapiens
  misc_feature (1)...(533): n = A,T,C or G
gggtcatctttctagantgnaannnaggggnnnnnnnaatcgaacaccattttgtgtggccgaattcgagaaaggatacccaaagttgctccaagatgaatttcctggaatcccatccccactggatgcagctgtggaatgtcaccgtggagaatgtcaagctgaaggcgtcctcttcttccaaggtcagtccaggctggaatccaagaacctggagtagtggtgggttggtagtgatgccagtagtgatggtgatagtggtagtgatggtggtggtggagccactatgtggctttttaaggaagggaaatagagaagccacgtatggtctaaaggtcacgtgagggaaggagaggaagtcattctggtgaaggcaactgtgtgtaattctgtgtgaatagtccctcattgttccccatgacccttangacaaatctaccctctttagtcttacatacaagtctctccatggccaaatccctattggcccttcaagcttgacttttattatacttttaccttaacactaagcg

SEQ ID NO: 31397 - DNA, 479 bp, Homo sapiens
  misc_feature (1)...(479): n = A,T,C or G
gggtgggcagaggccgngcccactgaganngattttacctaacggaagngcggnggaattctgcccctctgggagagatccccaggggtgacagccatggaccctggaagggcctgggctagggacagggaccagagccagtccagggagaggacagagccaatggactggggtgtactgtaacagccctgctggcgagagggaccagggcaccgtcctccagggagcccatgctgcaagtcgggccagaggtgcccctgaacctgaaggccaatgagacccaagacaggccaagtgggttgtgagacccctgaggagctgggccctggtcccaggcagcgctggcccctgctgctgctgggtctggccatggtcgcccatggcctgctgcgcccaatggttgcaccgcaaagcggggacccagaccctggagcctcagttggaagcagccgatccagcctgcggagcctgtggggcan

SEQ ID NO: 31398 - DNA, 479 bp, Homo sapiens
  misc_feature (1)...(479): n = A,T,C or G
aattgaactcgataagcctagtccagngtgctggaattctaacttctagcttcaaacttttcttctgtggcttccttactttgctcagccttcatagaatggaagacagctaggatgttgatctggattgggctttggccgaagggaatgttgtggctggtttgatcttctgttccgactactaaaactgtctctatatcagcaataagactgtttaactttcttaccctttgtgtgttcactggagtagcgtttttaatttctttcaagaatttttcttttgcattcacaacttggctgtttggcacaagaggcctagctattgattggcctgtcttggctttcaactaagcttaatcatttcttttcttttttttttttttggctttttgaaaaaagggcccccttttggcccccagggtggaagaaaagggggaaatctggtttgttgaaacctcccctccccgggtcaaaggatt

SEQ ID NO: 31399 - DNA, 514 bp, Homo sapiens
  misc_feature (1)...(514): n = A,T,C or G
agggccgnnnnnnccnnnatttgagaccatcgcagngnccgaactgagaccctaggccagngcggnggaattccaacgccggggcgcacgtggacgacatgcccaacgcgctgtccgccctgagcgacctgcacgcgcacaagcttcgggtggacccggtcaacttcaagctcctaagccactgcctgctggtgaccctggccgcccacctccccgccgagttcacccctgcggtgcacgcctccctggacaagttcctggcttctgtgagcaccgtgctgacctccaaataccgttaagctggagcctcggtagccgttcctcctgcccgctgggcctcccaacgggccctcctcccctccttgcaccggcccttcctggtctttgaataaagtctgagtgggcggcnnanaatataagagcttactggagcagaaacaacaacttagactaaaaaaaaatagccagccccttccacagaagaaagggcgcctttaaaaccccctggaccctc

SEQ ID NO: 31400 - DNA, 461 bp, Homo sapiens
  misc_feature (1)...(461): n = A,T,C or G
nttcgtanatctctagtccatgtggtggaattccagaggtgtgtgtccctgggccaagacagctcagtcccagacctcaggtgcctgatggggtctggggttgataaggctgttggcaacttggggctttttcatttaactgatgcctgctgtcctcttgtgagtcagtataaccaagagggctggggaagcctggaaactgagccaggagcatttggttccaaaggacaattggcaataaatattaaatgcatgcagctttcataatagtaacgataacactagtatattagagaaagtatagcatcgcggttaatagcacagatgccaaagacactgcctggtgtgaattctggctatgctgtttctaactgtgtgaacttggataagttacttaatctctctggacctcaggttcactgtttataaaatggagtcaatggtgagttaatgactcatct

SEQ ID NO: 31401 - DNA, 496 bp, Homo sapiens
  misc_feature (1)...(496): n = A,T,C or G
ngtgggganannanaaatttgaaatcgtgtgccatatccgngtggtggaattccgcactttgcctcccatggccgtggagaccgcgagctcgtggttctgaggagcgaaaacggctccgtgtggaaggagcacaggagccgctatggagagagctacctggatcagatcctcaacgggatggacgaagagctggggagcctggaggagctagagaagaagagggtgtgccgaatcatcaccaccgacttcccgctgtacttcgtgatcatgtcacggctctgccaggactacgacaccatcggtcccgaagggggctccctgaagagcaagctggtgcccctggtacaggcaacgttcccggagaatgccgtcaccaagagagtgaagctggctctgcaggcccagcctgtcccggatgagcttgtcactaagctcctgggcaccaggccacattcagccccattgtcaccgtggagcccccggcgccggaagtcn

SEQ ID NO: 31402 - DNA, 507 bp, Homo sapiens
  misc_feature (1)...(507): n = A,T,C or G
agggaatgtccccgcgctttccccccaattgatatccntatgtagagngcnggaantcagatctcagaaaatgaaaggaacacgcagcttctgaaagtgagtaacatcacgttggaaagcaagggtagtaaacaattctggattctgaaggtagaataacttctgagagctacagacatagctatatatgggtaccatattttgttttgtgttgttggaacagtggaagctgtttgagctgtataggctagaaagctacccttagtccactagtagaagagaggaagatggaggaagagttccaagttaattttattatcgctcacaacaatcaaatttcttctgtaaagaaaaagggcactcactagtaatgttttagggcactcactagtaatgttttaaaaagtattagcatagggataatcactggcacaaatacaccttcctgcatagctgaggaactaccaaaacaaaacagatcatatagtgtaagattntaaataaatg

SEQ ID NO: 31403 - DNA, 469 bp, Homo sapiens
  misc_feature (1)...(469): n = A,T,C or G
natcgtagaccctgtcgagngtcgtggaattccagtcatgagtcatcaggatgatgagggaagatgctacagcgattctttagcagaaattcctgctgtggatcccaactttcctaacaaaccaccccttacatttgacataattaggaagaatgttgaaaataatcgctaccgtcggcttgatttatttcaagagcatatgtttgaagtattggaacgagcaagaaggatgaatcggacagattcagaaatatatgaagatgcagtagaacttcagcagttttttattaaaattcgtgatgaactctgcaaaaatggagagattcttctttcaccggcactcagctataccacaaaacatttgcataatgatgtggagaaagagagaaaggaaaaattgccaaaagaaatagaggaagataaactataacgagaagaagaaaaaagagaagctgaaaagagtgaagaa

SEQ ID NO: 31404 - DNA, 472 bp, Homo sapiens
  misc_feature (1)...(472): n = A,T,C or G
agagggccgnnnccnnnaactgagaactgaggacngtcgnggaancccaggccagggccacaccagggctccatagggctgcggaagcctgtgagtgtcaagggggcttcacactctggtggtgagcccctggggaccattccagcccctgctctgcctgaagctcctgatgcagcctccaccgtgagccaggccaccctgtaagggaagagactcctcagctgagggccctccaggaccgcccttccccagctggagttcccttggatgctggacacgggagccacctgggcgaggggagcccatccaagtggctgtgcgtcgggaagagtctgcccaggactgggctagaccagagcttataattaaggagtggtggccaggcttggtggctcacacctgcaatcccagcactttgggaggccgaggcgggtggatagcttgagcctaggagtttgagaacagccaacan

SEQ ID NO: 31405 - DNA, 480 bp, Homo sapiens
  misc_feature (1)...(480): n = A,T,C or G
nctcgagactcgtagagccgtgtgccggaattctgacttttattatacttttaccttaacactaagctccagaaaccctatgctattctctgtacactcagtttgctccatgctttggaatctttcctctctctggggttccatctctccttgtgtgccttttaattcctacttcagatttcactttaagtatcatcttccctgggaagttttcccagactctccccactgcctttgctgagctgatcctgtgtgttttgctgctgaattttggtgtatgatcaccctcctttagccatctctctgatggctgtgagctccatgtggtcagtaccattatctggcccatcctgggacccagagaaagcacaaaggagggcgtaacccggtctcaccaaatgcctgttgattgattggaccaaggtgaccgcgagtggttctgggacttggctacgggaaccatgaaagagcgttccttgg

SEQ ID NO: 31406 - DNA, 495 bp, Homo sapiens
  misc_feature (1)...(495): n = A,T,C or G
agtactttnnaggnnnnnnnnnnaatcgaagaccctattcgagnaccactaggccangncgnggaattccaggacgccctgagggatggacgcagccatgcaccccccatctggggcctctccctgctccctctcccacctggcagctgggagttctggcttctaggcctgccctgtcaccaggcctatgagtggccaggcccttccacctccccatctgtaaaacgaggcagctgcccggacagccttggggtccttagtggccctgcaggtcctctggcagctctgctgaccccaccctctcccggactgcccttctgtcccagaggggccaccctgacccggcccaccttgccactgggctttggactccagccctgacagggcccagccacactggctctgcccctcgaaggggctatgagcaaggtaagagggagctggtctcctttcttcgggccccacccaggccctgagcaccccccacccctgtga

SEQ ID NO: 31407 - DNA, 494 bp, Homo sapiens
  misc_feature (1)...(494): n = A,T,C or G
gcgggggannnnnnaaattgatttcgagagccatatccagtgtggtggaattctgacttttattatacttttaccttaacactaagctccagaaaccctatgctattctctgtacactcagtttgctccatgctttggaatctttcctctctctggggttccatctctccttgtgtgccttttaattcctacttcagatttcactttaagtatcatcttccctgggaagttttcccagactctccccactgcctttgctgagctgatcctgtgtgttttgctgctgaattttggtgtatgatcaccctcctttagccatctctctgatggctgtgagctccatgtggtcagtaccattatctggcccatcctgggacccagagaaagcacaaaggagggcgtaacccggtctcaccaaatgcctgttgattgattggacaaaggtgaccgcgagtggttctgggacttggctacgggaaccatgaaggagcgtt

SEQ ID NO: 31408 - DNA, 497 bp, Homo sapiens
  misc_feature (1)...(497): n = A,T,C or G
naaggaggccnggggnnnnccttgaaatcgatncactgtggagcaattcgcaaagctgaagcttagatcagtaaagtacttaccataggctacccagccatctagtatctgtttagacagcattttcatgtctaatcttatgtacagtttaataatttaacagatggtagactaataggtcagtggaaatgtttatagggtacttcatagctgttaatttttaccacttggatttttttaatagctaggaatagtaattagggtgaaaaatgaaacctacgaatgactttgtgatttttctgcctcaaatgagaaggattaggaaagcaaaagtttcctcaaatcaatttttcccccaaaatatttttttgtattatttactttgttaatgtgtgtatgtgtcccccctcctcccagttctctttaaacactttttgtatgaaaattgtcacacggttgctccaaaatatttaaatagataagacaatgggtgtaaa

SEQ ID NO: 31409 - DNA, 484 bp, Homo sapiens
  misc_feature (1)...(484): n = A,T,C or G
ccatagagaccntcgcangcccgatgatcccctcgtacctacactgtactatgatattaaatatcacagctggaaggttatatagtaaccataaaagtaattaattccgattcatcagtaaaaccctgaggatttccatagataaatgggcaaagaatgtggacacactgttcaagtaagaggaaacacaaataataaatgaatttgaggaaacagtaatcaaattaaagcagtctatcactagtatctgctacatggaagaaaacagacatagtgataatgccatttgtttgggaggcggtgatgaaaccgttgtggatgtagcttgatgaagctttgtgtattggaatagcccttgttacaaagcagtacatctgccattagaagcccgtaaggcgtttatataccctcaagaattactctcttgagaatatatctgaaagaaataattcaacagaaaaaacaaagntgtatacatgaanaa

SEQ ID NO: 31410 - DNA, 471 bp, Homo sapiens
  misc_feature (1)...(471): n = A,T,C or G
nattcgtagaccactattcgagngtcgtggaattcaacacagcagtggcatcgtggccgacctcagtgaacagagcctgaaggatggggaggagcggggggaggaggacccagaagaagaacatgagctgcctgtggacatggaaaccatcaacctggacagagatgcagaggatgttgatttgaatcactatcgcatagggaagattgaaggatttgaggtactgaagaaagtgaagactctctgcctccgccaaaatttaattaaatgcattgagaatctggaggagctacagagtcttcgagagctggatctttacgacaaccagatcaagaagattgagaatctggaggcgctaacagagctggagattctagatatttcttttaatctgctgagaaacatcgaaggggttgacaagttgacacgactgaaaaaactcttcttggtcaacaataaaatcagtaaaat

SEQ ID NO: 31411 - DNA, 496 bp, Homo sapiens
  misc_feature (1)...(496): n = A,T,C or G
cctagatacctntcgnannggccnatagatgaccctaggtaagagccgtggaattccgcaggtctgggacctgattgcgggccacgaggcgcaattcggggcggagctgctgctcaggctcttcacggtgtaccccagcaccaaggtctacttcccgcacctgagcgcctgccaggacgcgacgcanctgctgagccacgggcagcgcatgctggcggctgtgggcgcggcggtgcagcacgtggacaacctgcgcgccgcgctgagcccgctggcggacctgcacgcgctcgtgctgcgcgtggacccagccaactttccgctgctaatccagtgtttccacgtcgtgctggcctcccacctgcaggacgagttcaccgtgcaaatgcaagcggcgtgggacaagttcctgactggtgtggccgtggtgctgaccgaaaaataccgctgagccctgtgctgcgcaagccttggtctgtgcctgtcaataaacagg

SEQ ID NO: 31412 - DNA, 481 bp, Homo sapiens
atcgaactcgagaacatagtcagtgtggtggaattcgtgcccctcccaccttctacctatgtggagtttacagtgtctggcactgactgtgttgctaaagaggccacagaggcagccaagtgtaacctgctggcagaaaagcaatatggcttttgtaaggcaacactcagtgagaagcttggtggggcagaggttgcagtgacctgcacggtgttccaaacacagcccgtgacctcacagccccaaccagaaggtgccaatgaagcagtccccacccccgtggtggacccagatgcacctccgtcccctccacttggcgcacctggactccctccagctggctcacccccagactcccatgtgttactggcagctcctccaggacaccagttgcaccgggcgcactacgacctgcgccacaccttcatgggtgtggtctcattggggtcaccctcaggagaagtgtcgcacccccggaaaa

SEQ ID NO: 31413 - DNA, 480 bp, Homo sapiens
  misc_feature (1)...(480): n = A,T,C or G
nctcgaactcgtagtccatgtggcggaattcaagacctccccgcagagttcagatctgacagttgccctagggttaaagtctcctatgggagcaagttgattctaggtggatggtcatccttggctgtgctccactacagaggcccctgcaccaaaccctgtgggctccagatcaactggcttgctgcccctacaacttctttaagcagctttccctgccaactcaagtgtccctgctggctgaagggtttcctcctgctgagattccagaggcctgtgcccagagcaggttgctctctgccagttcacctaacttgtgccctcagcatattgggggtcaagaacaagtcccagtgtgtggtagccccatgcagcgttcccagattccttctccttaagccaagcttctctctgtcttccctcctctactcttggtgctttccctctgaagatctcttaggagtgcaccagtactctcag

SEQ ID NO: 31414 - DNA, 487 bp, Homo sapiens
  misc_feature (1)...(487): n = A,T,C or G
cgttgcccggncgccnnnattgagnccctattgtagatcctaagccangncgcggaattcgagaagaagatgggcatcaaggcttcaaacacagcagaggtgttctttgatggagtacgggtgccatcggagaacgtgctgggtgaggttgggagtggcttcaaggttgccatgcacatcctcaacaatggaaggtttggcatggctgcggccctggcaggtaccatgagaggcatcattgctaaggcggtgagtaccctgcccgagtccctaggtaacccaaacagaagtctcactgtcccccttgccatgtgtccctgatcacttgcaggcactccctacactagaaactcctcccctaccagcagcccgacttgctagcttaagtctacatccagcgtagactgaactctggttgtatgcaaaacccatccctctgacgcaagcccagcctctctcctagggagactgcagaaccacactgaac

SEQ ID NO: 31415 - DNA, 482 bp, Homo sapiens
  misc_feature (1)...(482): n = A,T,C or G
ggcacgtccttttgagaccattggtagaagaccngtaanacgggacatgaagcgtcgcggggtctccttcccctgaccttcagaatccaggcttccgggaggaccacagcaggggcattgatcacaatgacccacctgttctagacattaatgaagtagggggagaaaagacaggtgcccccatcctggagggctcttctctcctgaaacactagctgctttgcactatggtgggcttcaggcattacactttccaccaagaccatggagagctttccacattccgtccctaagagacatccctgggctctgtcctgtctgtccccgcagtgtctgtgtctgatgaggcccgcgcagaagtgaatggcctgaaggcctctcgcttcttcagtctcgctgagcggctgaatgtgggtgccgcacctttcatctggctcttcatccgccctccgtggtcggggagcggaagctgctgcaaggcn

SEQ ID NO: 31416 - DNA, 486 bp, Homo sapiens
  misc_feature (1)...(486): n = A,T,C or G
gggagttcccattgaaaaccctnaactgagaccctaggccanngcgnggaantcccagcggagggtggaacggcgtcggcgcgagcttgtgggccgcgctgctcctaggggccgtggcgctgaggccggcggaggcggtgtccgagcccacgacggtggcgtttgacgtgcggcccggcggcgtcgtgcattccttctcccataacgtgggcccgggggacaaatatacgtgtatgttcacttacgcctctcaaggagggaccaatgagcaatggcagatgagtctggggaccagcgaagaccaccagcacttcacctgcaccatctggaggccccaggggaagtcctatctgtacttcacacagttcaaggcagaggtgcggggcgctgagattgagtacgccatggcctactctaaagccgcatttgaaagggaaagtgatgtccctctgaaaactgaggaatttgaagtgaccaaaacagcag

SEQ ID NO: 31417 - DNA, 474 bp, Homo sapiens
  misc_feature (1)...(474): n = A,T,C or G
gggccagcnnttagaganccntannnatcgtagacccntatcagtgtggtggaattctggatggggacagccgagatggcggcggcggcaaggacgccaccgggtcggaggactactagaacctgccgactagcgcctccgtgtccacccacatgacagcaggagcgatggccgggatcctggagcactcggtcatgtacccggtggactcggtgaagacacgaatgcagagtttgagtccagatcccaaagcccagtacacaagtatctacggagccctcaagaaaatcatgcggaccgaaggcttctggaggcccttgcgaggcgtcaacgtcatgatcatgggtgcagggccggcccatgccatgtattttgcctgctatgaaaacatgaaaaggactttaaatgacgttttccaccaccaaggaaacagccacctagccaacgggatagctgggagtatggccaccctgc

SEQ ID NO: 31418 - DNA, 467 bp, Homo sapiens
atcgagaccctaattgatgacggtaaaaccaacgctgagcctgggactcaagacttgcccaaaactgccagccgaaagaacccactgtgtggtgaacggaggacccacatgcctcgggagccaaacactgcctagggagtcttggacgtgactactcccctgtggagcgctaatcgaacgtcgacccagccctcaccacgggagcagaagagcaacactatggagcggggttcccggagaggccagcgtggggacagccgctcccccagccacaagcgcaggagggagacacctagccctcggcccatgagacaccgctcctccaggtctccataaattgtctttgggggattccaccacacccaatgctctggagccacaaggagtgtcccttcttccccagcagagccgtgggagggtccttgtctgctctcctttgaaccttggcaagccttggatggagggct

SEQ ID NO: 31419 - DNA, 467 bp, Homo sapiens
  misc_feature (1)...(467): n = A,T,C or G
ggccaggctttgagaccatagtcttggtggtgcatttcaccgaactgcgatgatccagaaactgaggaagcagctctggtggctatagactacatcaatcaaaaccttccttggggatacaaacacaccttgaaccagattgatgaagtaaaggtgtggcctcagcagccctccggagagctgtttgagattgaaatagacaccctggaaaccacctgccatgtgctggaccccacccctgtggcaagatgcagcgtgaggcagctgaaggagcatgctgtcgaaggagactgtgatttccagctgttgaaactagatggcaagttttccgtggtatacgcaaaatgtgattccagtccagactcagccgaggacgtgcgcaaggtgtgccaagactgccccctgctggccccgctgaacgacaccagggtggtgcacgccgcgaaagctgccctggccgccttcan

SEQ ID NO: 31420 - DNA, 476 bp, Homo sapiens
  misc_feature (1)...(476): n = A,T,C or G
gtncgccctttgagaccctattgaaggcggtaattcgctggcggaagaggcacgtgcgctgctgaatggagctggtcgctggttgctacgagcaggtcctctttgggttcgctgtacacccggagcccgaggcttgcggcgaccacgagcaatggactcttgtggctgacttcactcaccatgctcacactgcctccttgtcagcagtagctgtaaatagtcgttttgtggtcactgggagcaaagatgaaacaattcacatttatgacatgaaaaagaagattgagcatggggctctagtgcatcacagtggtacaataacttgcctgaaattctatggcaacaggcatttaatcagtggagcggaagatggactcatctgtatctgggatgcaaagaaatgggaatgcctgaagtcaattaaagctcacaaaggacaggtgaccttcctttctattcacccatctggcaaggtg

SEQ ID NO: 31421 - DNA, 485 bp, Homo sapiens
  misc_feature (1)...(485): n = A,T,C or G
ggacgttccaattgagncccctnattgagnacactaggccangcggnggaattcgacaaggacaccatcgagaaactgaaggagaagaagctggctcccatcacctacccgcagggcctggcactggccaaggagattgactcggtgaaatacctggagtgctcagccctcacccagagaggcctgaaaaccgtgttcgacgaggccatccgggccgtgctgtgccctcagcccacgcggcagcagaagcgcgcctgcagcctcctctaggggttgcaccccagcgctcccacctagatgggtctgatcctccaggatccccacccaaagcctgatggcaccccggctggccatgctgtcccctccctgtggcgtttcttagcagatggctgcagagctttgttgatggtcttttctgtactggaggcctcctgaggccaggaacgtgcaaatttgcaggtgctgcatcccaagcccctcatgct

SEQ ID NO: 31422 - DNA, 541 bp, Homo sapiens
  misc_feature (1)...(541): n = A,T,C or G
agtgnnaggccgnccnnnnnnnaattgattttgatccacgtccgcgnggngcaattccccaaacctgaggactccttggaggaacgaggctcagtgtgggaggcctgaagagagatgtggttagaggagggttgggggccgtgcaggatgggggcaagagctaagccaaggtttggaggcaggaatggcttgggggactcaggacagcgaggagcctgctgtgccgggacgggaagccaaactcccagcgcctccaccatcaaagcacatgccagaaggtaggaggtaaactgaggcagggaggggccctcccagagctggtaggtgaagattgtggcagggtggtgagtgggacccaatggtggaaggctgagtgcaggctggaggcagtgagcggtctgggtccccttcctgattcgagtttcattttggtaacgatgaaaggatgcctgtggtcctggccacctcccctgctctgcccctgggcccctgtgttctgggtgggccagccccctcccttgcaggggcagcagctttgata

SEQ ID NO: 31423 - DNA, 466 bp, Homo sapiens
aggcagactttgataccctagctttgaggaccatttcctttgaacaagcccagcaagatgtcagacctgctctcagtcttcctccacctcctccttctcttcaagttggttgccccggagacctttcgccaccaccgctatgatgatcttgtgcggacgctgtacaaggtgcaaaacgaatgccccggcatcacgcgggtctacagcattgggcgcagcgtggaggggagacacctctacgtgctggagttcagcgaccaccctggaatccacgagcccttggaaccagaggtcaagtatgtggggaacatgcacggcaacgaagcgttgggccgcgagctgatgctgcagctgtcggagtttctgtgcgaggagttccggaacaggaaccagcgcatcgtccagctcatccaggacacgcgcattcacatcctgccatccatgaaccccgacggctacgaggtgg

SEQ ID NO: 31424 - DNA, 465 bp, Homo sapiens
  misc_feature (1)...(465): n = A,T,C or G
cctcgatcnccntnnnnatcgagaccactatccatgtggtggaattccctaggacctgagactttcagccacttagctgttttttgcttagtgtgcggaagtgttgagggactcgaggccctggaaggtactaggcagacctcagaggaaaagctgcttccatttcagtggaaactggaggcgaccagtgcccagaatatcgagttcctacaggtgattgccaagagggaggaggcaatccaccagtcccagctgcggctggaggagaaaacacgggaatgtgggaccctggcaaggcagttggagagtgccattgaagatgcgaggaggcaggtggaacaaaccaaggagcacgcactctccaaggagcgagcagcccagaacaaaatcctggaccttgagacccagctgagcagaaccaaaacggaattgagccagctgcggcggagccgtgatgatgcggan

SEQ ID NO: 31425 - DNA, 425 bp, Homo sapiens
gccaggctcacctgctctggaaccggcctcggtttggagagatcaatgaccaggacagaactgatcgatacgtccaggctctgaggaccgtgctgaagccagacagcgtgtgcctgtgtgtcagcgatggcagcctgctctccgtgctggcccatcacctgggggtggagcaggtgtttacagtcgagagttcagcagcttctcacaaactgttgagaaaaatcttcaaggctaaccacttggaagataaaattaacatcatagagaaacggccggaattattaacaaatgaggacctacagggcagaaaggtctctctcctcctgggcgagccgttcttcactaccagcctgctgccgtggcacaacctctacttctggtacgtgcggaccgctgtggaccagcacctggggccaggtgccatg

SEQ ID NO: 31426 - DNA, 460 bp, Homo sapiens
ttttgagaccatggcatagaggagcatttccacctgaggtcaagagttcgagaccagcctggccaagatggtgaaaccccgtctctactaaaaatacagaaattagccgggcgcggtggtgggcgcctgtaatcccatttacttgggaggctgaggcaggagaatcgcttgaacccaggaggcggaggttgcagtgagctgacatcgtgccactgcactctagtctgggtgacagagcaagactccatctcaaaaaaaaaaaaaaaaaaatttttgtaaccctagggttttataaacaaaaaaaaccattttaattttgggggggggaaacccaaaaataaagcccccagaaaagcccccttttttggggggggggagggcccattgaggaggttggccccttcccttgggaccgaataacctccaaaggcccccacttaatacctccccttggaaggag

SEQ ID NO: 31427 - DNA, 463 bp, Homo sapiens
  misc_feature (1)...(463): n = A,T,C or G
ntttgattgacaattcgtccagngcggnggaattcagggagaggtgcagaggtgtctgctggagaaggagctggagtctgtgggcatccgcctcaacaagcacaagcctaacatttacttcaagcccaagaaaggtggtggcatctcctttaactctacagtcacgctgacccaatgctcggaaaagctggtgcagttcattctgcacgaatacaagatcttcaatgcagaagtgctttttcgagaagactgctgcccggacgagttcatcgatgtgatagtgggcaaccgggtgtacatgccctgcctgtatgtttataacaaaatcgaccagatcttcatggaagaggtggaccgcctggcccgaaaacccaacagtgtggtcatcagctgcggcatgaagctgaacctggactatctgctggagatgctgtgggagtacttggccctgacctgcatctag

SEQ ID NO: 31428 - DNA, 468 bp, Homo sapiens
  misc_feature (1)...(468): n = A,T,C or G
ggcagagttgatacccctngttttgagactctagtcagtgtggtggaattcctctaagccagaggggatagactcatggcctgagacccttcatccagggagacctcatcccccagcataggaggagctgtgcagtgggaagccgttcgacgccttcaccgaccttaagaacggatccctctttgccttccgagggctgtactgctatgaactggacgaaaaggcagtgaggcctgggtaccccatgctcattcgagatgtctggggcatcgagggccccatcgatgccgccttcacccgcatcaactgtcaggggaagacctacctcttcaagggtagtcagtactggcgctttgaggatggtgtcctggaccctgattacccccgaaatatctctgacggcttcgatggcatcccggacaacgtggatgcagccttggccctccctgcccatagctacagtggccg

SEQ ID NO: 31429 - DNA, 457 bp, Homo sapiens
  misc_feature (1)...(457): n = A,T,C or G
ntcgagaccactgtcatagaggagcaattcgtgggatcttgtgtgtgataatgcctggaaggtccatatcgctaagttctccttactggttggattaatctttggctacctaataactggatgcattgctgactgggtcggccggcggcctgtgctgctgttttccatcatcttcattctgatctttggactgactgtggcactgtcagtgaatgtgacaatgttcagcacactcaggttctttgaaggattttgcctggctggaatcattctcaccttgtatgctttacgaatagagctgtgcccccctggaaaacggttcatgattacgatggtggcgagcttcgtggccatggcgggccagttcctcatgcctgggctagccgccctgtgccgggattggcaggtgctgcaggccctcatcatctgccccttcctgctcatgctgctctactgg

SEQ ID NO: 31430 - DNA, 244 bp, Homo sapiens
  misc_feature (1)...(244): n = A,T,C or G
canaancccctgcctgatgcctggtgagaaggccatggccaaggagggctcggccctgaggctgtgtgtggcctgtctccctcctctgcagggtttcagcagcctgaggctccggcccattcgcacgctgagctctgccgtggagcagctgaggggctgcagggtggtcggagtcatcgagaaggtgagtgagtggacactcgccttgcaggagggagacagtgtatgcaatttggggtggcgg

SEQ ID NO: 31431 - DNA, 228 bp, Homo sapiens
atcatggatatattttttatgttgcctatccttttttgggtaaggattaacagaatgtataatcacctacattataggtacactactaatcacttgctacttgaaaaaacctaaagctttgaaatctttttattattgcacacaaacttatgccaaaaatggagataaagagaaaaatgtcatcactaaaccccaacaaataatgttgacaatgtggtctactcgtag

SEQ ID NO: 31432 - DNA, 484 bp, Homo sapiens
  misc_feature (1)...(484): n = A,T,C or G
cgggccnnaggggnnnnttcgagaccatattgagtgccgtggaattccaggcacgtctggtctcaccacgcgctccccatcacggacctgcactgcggctttgggggccccctggcccgggtggccacctcctcactggaccagacggtgaagctatgggaggtctcctcgggggagctgctgctctccgtcctctttgacgtgtccatcatggcagtgaccatggacctggctgagcaccatatgttctgcgggggcagtgagggctccatcttccaggtcgacctcttcacctggcccggacagagggagaggagcttccacccagagcaggacgccgggaaggtcttcaaagggcacaggaaccaggtgacttgcctgtcagtgtccactgacggcagcgtgctgctctcaggctcccacgacgagaccgtgcgcctctgggacgtgcagagcaagcagtgcatccggacggtggccctca

SEQ ID NO: 31433 - DNA, 490 bp, Homo sapiens
  misc_feature (1)...(490): n = A,T,C or G
gggaagggagggtaggggnnnccttgatttccaatgacagtggngcaattcaccttctctcggcagtcatgaccgcggttctcaaggacgtgaatctgaggccggaacagctgggggacatctgtgtcggaaatgtgctgcagcctggggccggggcaatcatggcccgaatcgcccagtttctgagtgacatcccggagactgtgcctttgtccactgtcaatagacagtgttcgtcggggctacaggcagtggccagcatagcaggtggcatcagaaatgggtcttatgacattggcatggcctgtggggtggagtccatgtccctggctgacagagggaaccctggaaatattacttcgcgcttgatggagaaggacaaggccagagattgcctgattcctatggggataacctctgagaatgtggctgagcggtttggcatttcacgggagaagcaggatacctttgccctggcttcccagcagaa

SEQ ID NO: 31434 - DNA, 496 bp, Homo sapiens
  misc_feature (1)...(496): n = A,T,C or G
ttgggggggnaaggacggccaggggnnaattgaaactgattactctcgcgaggccgaattcctgagactacctgcgcctggagacgctggtccagaaggtggtgtcgccatacctgggcacctactgcctccactccagcgaggggcccttcacccattcctgcatcctggaaaagcgcctcctccgccgctcccgctcgggggacgtgctggccaagaaccctgtggtgcgctccaagagctacaacacgcctctgctgaaccccgtgcaggagcacgaggcggagggcgcggcggccggcggtaccagcatccgcaggcactctgtgtcggagatgacgtcctgccccgagcctcagggcttctccgacccgcccggccagggccccaccgggaccttcaggtcctccccggcgccccactcagggccctgccccagcagactgtaccccacgacccagccccctgagcagggcttggatcccacccgcagctc

SEQ ID NO: 31435 - DNA, 494 bp, Homo sapiens
  misc_feature (1)...(494): n = A,T,C or G
ttggggggaagggggccagggtnnnnaggancctgcgtaccactcggagnggccgaattcccagcaggaagcagcacctgccccccgcgccagcccagccccagcctgagtgcaggagctgcaggacccgcgggggcttttccagctactctgttccttcacgtcctcccttctcagcctcgtccaagcaccgggaagacctccaggctgaccccttgagcagcagtcagcacaggtgcgtgggggcgtgagggaggcagggtcttcaccacaggcgccttcctctgtccttcctgctctttcttctctgcccaggccgctgcagctgcacagcctctgctacacctgggctgcctgggaggcttcctggtgtggtgtctggaccccacggccttgggtcatcctgcggctggtctggggtggggtctgttgtggtccttccacggtgtcagtggcctgaagtccctcgcttttggggggggggtctctcaccc

SEQ ID NO: 31436 - DNA, 462 bp, Homo sapiens
  misc_feature (1)...(462): n = A,T,C or G
ntcgagacctattgaagngcgctggaattccacccaacctacccaacgccttcgagcacggcggcgagttcacctacaagcagatccccatctctgaccactggagccagaacctctcccagttcttccctgaggccatcagcttcattgacgaagcccgctccaagaagtgtggtgtcctggtgcactgcctggcaggcatcagccgctcagtgacggtcactgtggcctatctgatgcagaagatgaacctgtcactcaacgacgcctacgactttgtcaagaggaaaaagtccaacatctcgcccaacttcaacttcatggggcagctgctggactttgagcggacgctggggctaagcagcccgtgcgacaaccacgcgtcgagtgagcagctctacttttccacgcccaccaaccacaacctgttcccactcaatacgctggagtccacgtgaggcc

SEQ ID NO: 31437 - DNA, 465 bp, Homo sapiens
  misc_feature (1)...(465): n = A,T,C or G
ntcgagaatcgtagaccatagtccgtgtggtggaattccagaactgatccagagctggagaaagaagccgaaggctcttagggagcagccagagggccaagtgaccaagaggatggggcctgagctggggaaggggtggcatcgaggaccttcttgcattctcctgtgggaagcccagtgcctttgctcctctgtcctgcctctactcccacccccactacctctgggaaccacagctccacaagggggagaggcagctgggccagaccgaggtcacagccactccaagtcctgccctgccaccctcggcctctgtcctggaagccccacccctttcctcctgtacataatgtcactggcttgttgggatttttaatttatcttcactcagcaccaagggcccccgacactccactcctgctgcccctgagctgagcagagtcattattggagagttttgtattn

SEQ ID NO: 31438 - DNA, 426 bp, Homo sapiens
accatgtgtacgggaaaatgtgcccgctgtgtggggctctccctcattaccctctgcctcgtctgcattgtggccaacgccctcctgctggtacctaatggggagacctcctggaccaacaccaaccatctcagcttgcaagtctggctcatgggcggcttcattggcgggggcctaatggtactgtgtccggggattgcagccgttcgggcagggggcaagggctgctgtggtgctgggtgctgtggaaaccgctgcaggatgctgcgctcggtcttctcctcggcgttcggggtgcttggtgccatctactgcctctcggtgtctggagctgggctccgaaatggacccagatgcttaatgaacggcgagtggggctaccacttcgaagacaccgcgtaaggtttagcctgtattcgtgtcctc

SEQ ID NO: 31439 - DNA, 468 bp, Homo sapiens
  misc_feature (1)...(468): n = A,T,C or G
agggctgaccggntttnnnnnncctcgagaactgaggacactgcgnggaactcccgcattgtaccctctgaggtggagcctttcttatcctggcccaagatccaggccctgtgctttggagtcctgggagtcctcttcatggccgtcagtctaggctttatgtttgccaactgggccacaggccagagccgcatgtctggacactgatcaggccctgctggcccaggtccctgtgcgcatgcacatggaggggtcagggccgctccctagggtccctcctgcccaacatgtggaggtggctggttcccatgaacgtggttgtcagaggcgggggacagcagaggctgcagactggcccacttccctcctccccagggatgccaagcttggatcatggccctaatcccaaccccaaccccatgggaggaggaggaggaggaagaaaaggaggaggaggagngagnagag

SEQ ID NO: 31440 - DNA, 468 bp, Homo sapiens
  misc_feature (1)...(468): n = A,T,C or G
nttcgaagaactcgaggcccgtgnggnggaattcggaataaagtagcatccagtccaatttcccacttttaagagatgaaatctggaaaaataagtctgtgagagcacaatactcactgaaatcaatatggccaaacccagtaataaaaaggtacattattattgaaggattcatatagcatgcagataaaaaactcctgccttcttcccaccacatacactgcaaagcaacaacagcataataattgtatttaatatactactctttaaggtagaaaatggacctattctatattttaaatatactttttaatgttcccccacatttgctttaagaagttcttaagacactcagtttcagatttcccaagtacacaggcatgacagaaaaacgcagaccaataaaaaatgtaacttaccttacacaaatacatacacacaaattcagggtttccaaccgagcggngg

SEQ ID NO: 31441 - DNA, 492 bp, Homo sapiens
  misc_feature (1)...(492): n = A,T,C or G
tggggggggagggtaggggnnnaattgaaattcgatgacagtggngcaattcccggcggcgttcaggcaccctttggggccgtcaggaacatctacaccccgcggactggccaccgaatccggaagctagaccagatccagagcgggggcaattacgtggctggaggccaggaagccttcaagaaactcaattacttggacataggagaaatcaagaaaagaccaatggaagttgttaatacagaggtaaaaccagtaatccatagcaggatcaacgtgtcagctcgctttagaaaaccgcttcaggagccgtgcactatcttcttgattgcaaatggagacctcataaacccagcttctcgcctccttatccccagaaaaaccttgaatcagtgggatcatgtactacaaatggtcacagaaaaaatcactctgaggagcggggctgttcacaggctctatactttagaaggaagacttgttgagagtgga

SEQ ID NO: 31442 - DNA, 502 bp, Homo sapiens
  misc_feature (1)...(502): n = A,T,C or G
tctcctcagagggcccccccccactgaaacctagagcgtgngcaggnaacccccagcccccccagaccacagaaggggagaagagcccagagcccttggggcttccccaaagccagagtgcccaggccctcacgcctcctccgatacccaatggctctgccccggaagggcctgcatccccaggctcccaatagctgcctggtgcggcagcggcggccaaatcttccgtcctcccgtggatctcccggggtgggggcagggcgggtcccacgatggcccccattgccctcatcaccctgacacccccacattctctcctctggacccccaggaggctggtgccagggagacaggcccaacccacccccatttgcactgagaagagaagttttggagcgttgcctcctagaataaagatacagagagtcaaatagaaaaaaaaaaaaaaaaaaaaaaccgcccgctcaagtttaaagggcccgttaaaacccgtggataaact

SEQ ID NO: 31443 - DNA, 496 bp, Homo sapiens
  misc_feature (1)...(496): n = A,T,C or G
tggggagggagcncaggggnnnnattgaaatagatctcactagtcagagnggncgaattcggggcttcgagtctggtggtccaagtggtcacttgcgggcaggctgcccaggtggggacacagggcaccccctcttcagtgcctgcctccacccgcacccccagccctcactcccctttagttgctgcctccctgatggggcacggcgtggtgcctggcacacaggaggcgctctgtttgtgcctctcggacacataaccgatgcagcacatttgagggcccaaaagctctctgggagcaggaagcagggtgacagcagctcccctaagcacagcccagaaaggcgcttcctgcctgcagccaccccgcccatcctttccaaacaagcagcctcaggtgggcaggctggggtgggtgggctctggctccatgtcttatcctctttctgttcagcatcccctctgacaatgctccctaggggtcaccccagggtggg

SEQ ID NO: 31444 - DNA, 449 bp, Homo sapiens
  misc_feature (1)...(449): n = A,T,C or G
tccgaaaccacatttgaggcgtggaanaccgccagcccngcgccaacgttaaaatcacatcccattgccaccagccccataaagggtttccctggacgtgcccgatttccaaagcctaatgtttgtagtcacatctccacctctatctgccagtgttggggcccctctggggcccagcagcgctaagacaggaggaaggcacggggctgggggagaaggaacccctagaccctgctcaccactgcccttcggcttttcagccacaccggtgagccccgccatgtcctatctgagtgagtacatgctggcagctgccactcctcccactgcttagagcctgcccctgccacatgtccctccaccgtggctactcactcagctctccgggatgggcagatggacaatgtgccctgaggagattgcggggtgggagggcaatggcattaact

SEQ ID NO: 31445 - DNA, 477 bp, Homo sapiens
ggttttgttccgtattcagtgtggtggaattccgttcctggaacgaggatctacagttggagttgccccactgtcatgtcacctggagaaaaactggacccaattcctgacagcttcattctgcaaccaccagtcttacacccggtggttccttatgtcacgacgatttttggaggcctgcatgcaggcaagatggtcatgctgcaaggagtggtccctctagatgcacacagtaggtttcaggtggacttccagtgtggctgcagcctgtgtccccggccagatatcgccttccacttcaaccctcgcttccataccaccaagccccatgtcatctgcaacaccctgcatggtggacgctggcaaagggaggcccggtggccccacctggccctgcgaagaggctccagcttcctcatactctttctcttcgggaatgaggaagtgaaggtgagtgtgaatggacagcactttctt

SEQ ID NO: 31446 - DNA, 468 bp, Homo sapiens
  misc_feature (1)...(468): n = A,T,C or G
catcgacccctntcgtantgaagagcaataggccagngccgnggaantcggcttcacccctctgcacatggctgtggacaaggacaccacaaacgttggccgctatcttgtgggcagattcccctccctgcacgtggacaaagtgctgctcgactgcggggccgacccggacagcacggattttgactacaacaccccgctacacatagcagcccagaacaactgcccggccattatgaatgccctgatcgaagcaggggcccacatggacgccaccaatgccttcaagaagacggcctacgagctgctggacgagaagctgctggccaggggtaccatgcagcccttcaactacgtgaccctgcagtgccttgcggcccgggccctggataagaacaagatcccttaacagggcttcatcccggaagatctggaggcgttcatcgaactgcacttgcctgcccaaaa

SEQ ID NO: 31447 - DNA, 502 bp, Homo sapiens
  misc_feature (1)...(502): n = A,T,C or G
ttttggtggggagggcgcncaggggnnnnattgaaatagcaatcacagtcgagagtggtcgaattccgctcactcttggcgccttcgcggaaggtgcgtccgagccatggccgctgccaacccgtgggacccggcgtccgcgcctaacggcgctgggctagtgctaggccacttcatagcttcggggatggtcaatcaggagatgttaaacatgtctaagaaaacagtttcttgttttgtgaacttcaccagactacagcagatcacaaatattcaagctgaaatctaccagaaaaacctggaaattgaactcctgaaactagaaaaagatacagcagatgttgttcatcctttctttttggctcagaagtgtcatactctgcaaagcatgaataatcatttggaagcagtgctgaaagagaagagatcccttaggcaaagactgttgaaacccatgtgccaggaaaacttacctattgaagctgtttatcacagatatatg

SEQ ID NO: 31448 - DNA, 503 bp, Homo sapiens
  misc_feature (1)...(503): n = A,T,C or G
gttttttttnntttggggggggggaggcggggggggnnaactgaatgcatcagcgtgggcaanctgcccacagctcctccctgggccctgcaggaagctccacactggcccctcaggcctcgggctgtgagtgctgggagctccgtgtcttcccatacgagtccttgcgggatctgcgtgatcggcctcagagccatgggctgagacagacccttctctggagaaggcttggcgtttgccattcatttgctcctccaacctccagtttcctcactatgaagtgcggccgttacgccatgtgagcctgtgcctcccgctgacttggtgtgacccacgctcgggacagccgccagagtccctcacaaggaacaggtggctaccatctttgagggccggccctgccctgcctgggtgcaacattgcactgggcagcctgcaggtacctcggagccaccaagcaggcactcagctgctccctttatagaggtgcagaggccaggacc

SEQ ID NO: 31449 - DNA, 465 bp, Homo sapiens
  misc_feature (1)...(465): n = A,T,C or G
nttctgagactctagaccctgtggnggaattcgttgggcttgtgggatggaggtggacgtgcagcacagtgcggggagcacagggctgggggacagtgatcttcatagtgaggagcaggagacttgtcaagcaagttcatctgagacaaacccggagcatcagggcagccaccaagccgaaacagcagctgggaaggcttggagtccccaaaggaagctcttccaagcactgaggctgtgggatgtggatggccaactttcctgtcccctgatctctaagcctgaccacagggaccaagctcgcaaagcctggaggacagctccaccgagcccagggtggagatgaggggatgtctctgatgacgcatgcgtccaagggtggtggcctagccccacctgtgtcccgcccacattttttgaatgccaccttcacaaggacactgcccccaacccactgcggctctc

SEQ ID NO: 31450 - DNA, 465 bp, Homo sapiens
  misc_feature (1)...(465): n = A,T,C or G
ntttcgagacctcgagaccactaggccgagtggcggaattcctctggactcactccccagcatgaaggcgctgagcccggtgcgcggctgctacgaggcggtgtgctgcctgtcggaacgcagtctggccatcgcccggggccgagggaagggcccggcagctgaggagccgctgagcttgctggacgacatgaaccactgctactcccgcctgcgggaactggtacccggagtcccgagaggcactcagcttagccaggtggaaatcctacagcgcgtcatcgactacattctcgacctgcaggtagtcctggccgagccagcccctggaccccctgatggcccccaccttcccatccagacagccgagctcgctccggaacttgtcatctccaacgacaaaaggagcttttgccactgactcggccgtgtcctgacacctccagaacgcaggtgctggcgccc

SEQ ID NO: 31451 - DNA, 459 bp, Homo sapiens
  misc_feature (1)...(459): n = A,T,C or G
natcgagaccactgncttggtgggcgaattcgcggcgggaagatggcggagctgcgcgtgctcgtagctgtcaagagggtcatcgactacgccgtgaagatccgagtgaagcctgacaggaccggtgtggtcacggatggtgtgaagcactccatgaaccccttctgtgagatcgcggtggaggaggctgtgcggctcaaggagaagaagctggtgaaggaggtcatcgccgtcagctgtgggcctgcacagtgccaggagacgattcgtaccgccctggccatgggtgcagaccgaggtatccacgtggaggtgcccccagcagaagcagaacgcttgggtcccctgcaggtggctcgggtcctggccaagctggcagagaaggagaaggtggacctggtgctgctgggcaaacaggccatcgatgatgactgtaaccagacagggcagatgacagct

SEQ ID NO: 31452 - DNA, 520 bp, Homo sapiens
  misc_feature (1)...(520): n = A,T,C or G
cattgatcatcgatccgcggtngcaanncggcacatactgggcttgaatccaggggggactgaatcctcagcttacggacctgggcccatctgtttctggagggctccagtcttccttgtcctgtcttggagtccccaagaaggaatcacaggggaggaaccagataccagccatgaccccaggctccaccaagcatcttcatgtccccctgctcatcccccactcccccccacccagagttgctcatcctgccagggctggctgtgcccaccccaaggctgccctcctgggggccccagaactgcctgatcgtgccgtggcccagttttgtggcatctgcagcaacacaagagagaggacaatgtcctcctcttgacccgctgtcacctaaccagactcgggccctgcacctctcaggcacttctggaaaatgactgaggcagattcttcctgaagcccattctccatggggcaacaaggacacctattctgtccttgtccttccatcgctgccccaan

SEQ ID NO: 31453 - DNA, 456 bp, Homo sapiens
  misc_feature (1)...(456): n = A,T,C or G
nttgagaccatancttggggacgtttccagttcttgtcccacatccagaagaataaggttatgcagacaaccagagagtgagcagggcagaaaaaaacttctattgcatgatggaacagctcccagcgttgaggggacctgagagtgggcaaccactacctgaagctggatgctgacaaatatgagaatgatccagaattagaaaagatccgaagagagaggaactactcctggatggacatcataaccatatgcaaagataaactaccaaattatgaagaaaagattaagatgttctacgaggagcatttgcacttggacgatgagatccgctacatcctggatggcagtgggtacttcgatgtgagggacaaggaggaccagtggatccggatcttcatggagaagggagacatggtgacgctccccgcggngatctatcaccgcttcacggtg

SEQ ID NO: 31454 - DNA, 519 bp, Homo sapiens
  misc_feature (1)...(519): n = A,T,C or G
natcgacatcgtccgcgtggtggaattcctgataagtcgtcttctgaccggtcaaggcgctcctcatcctcccgttcttcctccaaccatagccgagttgaatcttctaagcgcaagtctgcaaaggagaaaaagtcctcttctaaggatagccggccatctcaggctgccggggataaccagggagatgaggtcaaggagcagacattctctggaggcacctctcaagatacaaaagcatctgagagctcgaagccatggccagatgccacctacggcactggttctgcatcacgggcctcagcagtttctgagctgagtcctcgggagcgaagcccagctctcaaaagccccctccagtctgtggtggtgaggcggcggtcaccccgtcctagccccgtgccaaaacctagtcctccactttccagcacatcccagatgggctcaactctgccgagtggtgccgggtatcagtctgggacacaccaaggtcagttcgaccatggttctgggtccctg

SEQ ID NO: 31455 - DNA, 466 bp, Homo sapiens
  misc_feature (1)...(466): n = A,T,C or G
catcgagcnccntngatcgtagaccctaggcagngncgnggaattcggagtctcttcactctcgtctcaaagccattttgtgccgctgccgctgcctctacggccataaatgcccggagattagcggagaagctccgagcccagaaacgggaacaagacacaaagaaggagccggtgtccacaaacgctgttcagcggagagtgcaagaaatagtgcggttcacacggcagctgcagcgagtccaccccaacgtgcttgctaaggcactgacccgaggaattctccaccaggacaagaaccttgtggtcatcaataagccctacggtctccctgtgcatggtggccctggggtccagctctgcatcactgatgtactacctatcctggcaaagatgcttcatggccacaaggcagagcccttgcatctgtgccaccggcttgacaaggaaaccacaggtgtaatgg

SEQ ID NO: 31456 - DNA, 549 bp, Homo sapiens
  misc_feature (1)...(549): n = A,T,C or G
aggtnnnanaggagncccnnnnnnnnnatttgaccctcgaaccactgntccgtgtggtgcaattcccaggacgccatctcggccgggaagaactggatgttcagcaatgccaagtccccgccgcactgtgagctgatggccggccacctccggaaccgcatcacggctgatggggcacacttcgagctgcggctgcacctcatctacctgatcaatgacgtgctgcaccactgccagcgcaagcaggcccgggagctgctggccgccctgcagaaggtcgtggtgcccatctactgcaccagcttcttggccgtggaggaagacaagcagcagaagatcgcccggctcctgcagctctgggagaaaaacggctacttcgatgactccatcattcagcagctacagagcccagccctggggcttggtcagtaccaggccaccctcatcaacgagtactcctcagtggtccagccggtgcagctggccttccagcagcagatccagaccctcaagacgcagcacgaggagtttgtcaccagcctggcccag

SEQ ID NO: 31457 - DNA, 495 bp, Homo sapiens
  misc_feature (1)...(495): n = A,T,C or G
attttgactcgatacacagtcgcgngnggngcaattccagaggaggggacggcagcaccatggacccccgcttgtccactgtccgccagacctgctgctgcttcaatgtccgcatcgcaaccaccgccctggccatctaccatgtgatcatgagcgtcttgttgttcatcgagcactcggtagaggtggcccatggcaaggcgtcctgcaagctctcccagatgggctacctcaggatcgctgacctgatctccagcttcctgctcatcaccatgctcttcatcatcagcctgagcctactgatcggcgtagtcaagaaccgggagaagtacctgctgcccttcctgtccctgcaaatcatggactatctcctgtgcctgctcaccctgctgggctcctacattgagctgcccgcctacctcaagttggcctcccggagccgtgctagctcctccaagttccccctgatgacgctgcagctgctggacttctgcn

SEQ ID NO: 31458 - DNA, 458 bp, Homo sapiens
  misc_feature (1)...(458): n = A,T,C or G
cttgagaccctagttttgaggacgatttcgnacaggacgaaaaaggagcattcaactttgaccaggaaacagtgatcaacccagagacgggcgagcagattcagagctggtatcggagcggggagacctgggatagcaagttcagcaccatcgcctccagctacgaagagtgccgggctgagagcgtgggtctctacctctgtctccacccgcaagtgctggagatctttggctttgagggggctgatgcggaggacgtgatctacgtgaactggctcaacatggttcgggccgggctgctcgctctggagttctacacacctgaggccttcaactggcgacaggcccatatgcaggcccggtttgtgatcctgagagtcttgctggaggctggcgagggactcgttaccatcactcccaccacaggctccgatgggcgcccagatgcccgggtccgc

SEQ ID NO: 31459 - DNA, 339 bp, Homo sapiens
gagcggcagctccactgacctttgctattattaggactacacttgctgagacatgctcggagtactggttattctatgatgggggctacatcaacgcctcagctgagggtgtgtccatccgcactggtctggagctctcccgggatcccgctggacggatgaaagtgtccaatgtctcctgccaggcctctgtctacagaatgcacgcggccttcgggggaaccttcaagaaggtgtatgattttctctccacgttcatcacctcagggatgcgcttcctcctcaaccagcagatctgccctgtcctctaccacgcagggacggtcctgctcaactccc

SEQ ID NO: 31460 - DNA, 466 bp, Homo sapiens
gagctgcctttgataccctagcttgagggcatttccacctgaggtcaggagttcgagaccagcctggccaagatggtgaaaccccgtctctactaaaaatacagaaattagccgggcgcggtggtgggcgcctgtaatcccatttacttgggaggctgaggcaggagaatcgcttgaacccaggaggcggaggttgcagtgagctgacatcgtgccactgcactctagtctgggtgacagagcaagactccatctcaaaaaaaaaaaaaaaaaaattttggaaaccttaggggtttataaacaacaaaaataattttcagtttggggggcggaacccccaaaataaagcccccagtaaacccacccttttttgggagggggagggcccaataataaggcttgccccttgccttggaacggaataacctccaaaaggcccaacttaataccatcccttggcaggtgg

SEQ ID NO: 31461 - DNA, 478 bp, Homo sapiens
  misc_feature (1)...(478): n = A,T,C or G
agaggccgnnnnnnccacaactgagacctgacgacngtcgnggaantcctntggctggccctgctccctattggtttgatgtgactgagggctatcagccatcatagcacctccttcaggaagcctcccttgatcactcaccccacgctgcctgggttgtggacctccaatgcaccactccctgtgttcataacctcctggttcttatccctctacatcactgatgtgagccccatgagggctggtgtgtcttagtccctgacgtgtccctagggccttcctggcatagggcatggcaggtagtaggcactcaatagatgtttgttgattgaagggatgaatatatgagtgagtggaaaggtgggtaatggatagatggacagtggatggatggacggatggatggataatgaagcgacggattgatgaatggtatanaaatgaatgaatggacagacacattgattaatgaacatgg

SEQ ID NO: 31462 - DNA, 445 bp, Homo sapiens
  misc_feature (1)...(445): n = A,T,C or G
nctcgatagcatacccaggggggaatcggctattacagatagggcggtatttctgccccttaaccgaaagtgggatacagaggacgacggtgttaggcgcctgtgtaggagtaaaatgtgtttattttgcattcaacgagagctcctgcattgcagctattttgcatatgatttgcatcttacgaagaatttgtggcaaaaaaaagctgggcgtgcgccgtaggaacctcctgctgagacgcttccggtagcggcgcgtgacccgacaggtctttcacctacctacctcagctcccacaaacacgagaagttccagcaagttcgccacttccggttctcctggctatccaatagcatcgagtggagcatccccggaagtgaggcagcggaggacgacctttttccggttccggcctggcgagagtttgtgcggcgacatgaaacn

SEQ ID NO: 31463 - DNA, 494 bp, Homo sapiens
  misc_feature (1)...(494): n = A,T,C or G
natcgagccctatcggagggcgcaattcgcatcggcacaggtgacctggctattttatcagccggggaacagtaaataacagcagccagtgtctacgtaaccctgacagctgatcaggcatcttcacaggtcttttcctcttttcttaactttccttagggtcatgtgaggtaggaaggagagagctgagttctctttctatagaatatcctcatggtcgagcggctctgaccaggaagcagcgcctggttgtgaaatggctgcatctggaatataggtgccgcctcctctcctagaaagaccgcaaaggagctttccatcatgtccatttgatgatgaaaagaaaccaggggagaggaaccagtgtggctaaataaatgccacagaactctccttgggcatcccacgcagcatggcacatttattccctatgggccctgggcagtgaagggttagggtccagttttatctacaaggagattgaggctaagccc

SEQ ID NO: 31464 - DNA, 450 bp, Homo sapiens
  misc_feature (1)...(450): n = A,T,C or G
attgactcgcagtccctaggccangnggtggaattcgaactcttgacctcaggtgatccacacgcctcggcctcccaaagtgttgggatgacaggcgggagccaccgcgcctggctgccttcggacctctcggtgggaggaacgtgtgggtcctatccaagcatcagctctgtctcctacctgctctcacctccgtgggcacgcctggttctcggcacccgtggcagccgggctgttgagcctcggctggggtttgcagaggttttctgggaagagctactccaattcaggcggactggcagatctggagaattccatgaccccggggacccagggcagctgtcgtgactgtggggtgcaaggacctggtggccaggtggatcccaggcattgcgatgggctccacggtgagctgtggaaaagagcctgggtcctggattttatgtctgg

SEQ ID NO: 31465 - DNA, 499 bp, Homo sapiens
  misc_feature (1)...(499): n = A,T,C or G
nattgagncccatcgagcactgtccagngggnggaattcgccgccgcttgtgctgcagccatgtctctagtgatccctgaaaagttccagcatattttgcgagtactcaacaccaacatcgatgggcggcggaaaatagcctttgccatcactgccattaagggtgtgggccgaagatatgctcatgtggtgttgaggaaagcagacattgacctcaccaagagggcgggagaactcactgaggatgaggtggaacgtgtgatcaccattatgcagaatccacgccagtacaagatcccagactggttcttgaacagacagaaggatgtaaaggatggaaaatacagctaggtcctagccaatggtctggacaacaagctccgtgaagacctggagcgactgaagaagattcgggcccatagagggctgcgtcacttctggggccttcgtgtccgaggccagcacaccaagaccactggccgccgtggccgcaccgtgg

SEQ ID NO: 31466 - DNA, 494 bp, Homo sapiens
  misc_feature (1)...(494): n = A,T,C or G
natggagactatcagaggcgctacncgcnggncttggccactgcaactcacccacacttgcaagagcgaggaggggcttggtctttgctgagcctcccctctctccttgcatggaaggatctgtacccagtaatcaatgggggtgtccctgagaccacggagctgctcaaggagaggttcgaccatatcctgtacacgggcagcacgggggtggggaagatcatcatgacggctgctgccaagcacctgacccctgtcacgctggagctgggagggaagagtccctgctacgtggacaagaactgtgacctggacgtggcctgccggtgagaggcacgggcctgctggctgcagcagtccttactctgctttccaagcacacatgactgcacctcatgctgtgggtccactctgagtaacacagacaccccctgcctcatggagcagnggtccttgcagaaacttacatggnggtaggggtggcgaccacatgg

SEQ ID NO: 31467 - DNA, 487 bp, Homo sapiens
  misc_feature (1)...(487): n = A,T,C or G
tgggncngaggggggnnatcgaaaccctatcgagaccctaggcagtngcgnggaattccccactcgtgtggcaagggaggggagggcaggagggctcggcctgagcagggtgctggggggagagcgcaatacctcacgcgggctgccgtcctaatcaacgtgcctatggcgggaccacgctcggagcctgcctcttctgcgactgttactttttctttgcgggatgggggtgggggttccctctccaggtggttgtccaggcccaggtcccggccctgggtgctcagccagctcggctaggccctgcgcctccctgcgcttcccccttcaggaagggtgtgtgccacctcgttgcactggatcccantggctgcttgggggagaggcgtttgccatcactggtgttgtcacctccctgtttctccaccaagggcttgggcctctcggggctggggcctcccaggggatggggacccagaggtgcagt

SEQ ID NO: 31468 - DNA, 483 bp, Homo sapiens
  misc_feature (1)...(483): n = A,T,C or G
nctcgaactcgtattgcctgtggnggaattctcacctccacgtattatcgggggacccacggtgtcattgtggtttacgacgtcaccagtgtcgagtcctttgtcaacgtcaagcggtggcttcacgaaatcaaccagaactgtgatgatgtgtgccgaatattagatgttcaactgcatcacggagctggtcctccgagcaaagaaagacaacctggcaaaacagcagcagcaacaacagaacgatgtggtgaagctcacgaagaacagtaaacgaaagaaacgctgctgctaatggcacccagtccactgcagagactgcactgcggtccctcccccagcccgaggcccacggaggttcctcgggggacagtctcagtttcgtgccgttatttaaagaattctctccatgtttttgtatcgggaggtgccatcggcactttctcccccgccctcctcgagtgccaagaaggtgttggacca

SEQ ID NO: 31469 - DNA, 466 bp, Homo sapiens
  misc_feature (1)...(466): n = A,T,C or G
agggccggnnnnnntttggactgcattaccctacgccgngccgnggaattccactgcctgaggacattccggtttttactgctgcagcagctgctaccccagttccatctgtagtcctaaccaggagcccccccatggaactgcagccccctgtctcccctcagcagtctgagtgcaaccccgttggtgctctgcaggagctggtggtgcagaaaggctggcggttgccggagtacacagtgacccaggagtctgggccagcccaccgcaaagaattcaccatgacctgtcgagtggagcgtttcattgagattgggagtggcacttccaaaaaattggcaaagcggaatgcggcggccaaaatgctgcttcgagtgcacacggtgcctctggatgcccgggatggcaatgaggtggagcctgatgatgaccacttctccattggtgtgggctcccgcctggatgg

SEQ ID NO: 31470 - DNA, 266 bp, Homo sapiens
  misc_feature (1)...(266): n = A,T,C or G
cacgccccccctatgaatgcctgcgcancgngcnggaannntgnccagcgaggctggcttcgccgagtatgtgggccgcctgggcatcagcaaccacatttacgtggtggtgtatgatggtgaacacctgggcagcttctatgctccccgggtctggtggatgttccgtgtgtttggccaccgcaccgtatcagtgctcaatggtggcttccggaactggctgaaggagggccacccggtgacatccgagccctcacgcccagaat

SEQ ID NO: 31471 - DNA, 272 bp, Homo sapiens
  misc_feature (1)...(272): n = A,T,C or G
agcccccccctttgannnctatggaataatcctcggcagnngncgnggaannccgggcgcctagccccgcgcctgggcctcgccgagcccgacatgctgaggaaagcagagttgtacttgcgcctgtcccgggtgaagtgtgtcggcctctccgcacgcaccacggagaccagcagtgcagtcatgtgcctggaccttgcagcttcctggatgaagtgccccttggacagggcttatttaattaaactttctggtttgaacaaggagacatn

SEQ ID NO: 31472 - DNA, 458 bp, Homo sapiens
  misc_feature (1)...(458): n = A,T,C or G
gggcctnnnnnnaattgactgcgtgcatctggcnggcattcctgagctttccgccgcttgggcgccttgtccggagctgcggccttaggcttcgcttcctacggggcgcacggcgcccaattcccagatgcctacgggaaggagctgtttgacaaggccaacaaacactacttcttacacagcctggccctgttaggggtgccccattgcagaaagccactctgggctgggttattgctagcttccggaacgaccttattctgcaccagcttttactaccaggctctgagtggagaccccagcatccagactttggcccctgcgggagggaccctgctactcttgggctggcttgccttggctctttgagctcccttttgcttaattactgggttttctgggcagttttttttttaaagagttggagtaagaagaggattaaaaaggaaaggcaaaaa

SEQ ID NO: 31473 - DNA, 463 bp, Homo sapiens
  misc_feature (1)...(463): n = A,T,C or G
gcggctgnnnnnaacggatagcgancntangacgngncgnggaattcagctgctgtggccacattcctgcagtctgtgcaggtccccgaattcacccccaagtctggcgtcaagatccatgtttctgaccaggagctgcagagcgccaatgcctctgttgatgacagtcgtctagaggagctcaaagccactctgcccagcccagacaagctccctggattcaagatgtaccccattgactttgagaaggatgatgacagcaactttcatatggatttcatcgtggctgcatccaacctccgggcagaaaactatgacattccttctgcagaccggcacaagagcaagctgattgcagggaagatcatcccagccattgccacgaccacagcagccgtggttggccttgtgtgtctggagctgtacaaggttgtgcaggggcaccgacagcttgactcctacn

SEQ ID NO: 31474 - DNA, 483 bp, Homo sapiens
  misc_feature (1)...(483): n = A,T,C or G
nnncctgagtccatagtcagtgtggtgaattccgtctcccgaatagcgggcttactcattttgtacgtgtgtgttgagcgcaccatttgagatgaacagagtatctgtcatgcaagagctgctgggatggtttatgatgatgccaataataagtgggtgccagctggtggctcaactggattcagcagagttcatatctatcaccatacaggcaccaacccattcatagtggtgggcaggaacattcatgaccatcacgtcgtgataaactgtgccattcctaaagggttgaagtaccatcaagctacactgaccttccaccagtggcgagatgctagacaggtgtatggtctcaactttggcagcatagaggatgccaatgtcttctcaggtgccatgatgcatgccttagaagtgttaaattcacaggaaacagggccgacattgcctagacgaaactcacaactacctgctgaagttgat

SEQ ID NO: 31475 - DNA, 497 bp, Homo sapiens
  misc_feature (1)...(497): n = A,T,C or G
agcgctnnnnnnnaatcgaaacctaggagtctgtgcgaattacactgtccactccatggatggtgccatctgtcccctcgaggagttgtgtgatgtgtcccaccagtatggggccctgaccttcgtggatgaggtccatgctgtaggactgtatgggtcccggggcgctgggattggggagcgtgatggaattatgcataagattgacatcatctctggaactcttggcaaggcctttggctgtgtgggcggctacattgccagcacccgtgacttggtggacatggtgcgctcctatgctgcaggcttcatctttaccacttctctgccccccatggtgctctctggagctctagaatctgtgcggctgctcaagggagaggagggccaagccctgaggcgagcccaccagcgcaatgtcaagcacatgcgccagctactcatggacaggggccttcctgtcatcccctgccccagccacatcatccccatccggn

SEQ ID NO: 31476 - DNA, 487 bp, Homo sapiens
  misc_feature (1)...(487): n = A,T,C or G
aggccccnaggccggcaggaccattcagntngcnagcanngcnngaannnanaactctgaaagctggccaaagtcacttgcccaagatctgccatacctgcatggtcaagcctcttatgggggcggggctatctctttgtttctctttctgtttgctggcctcagagcttcctggggaccaagatttaccaattcacccactcccttgaagttgtggaggaggtgaaagaaagggacccacctgctagtcgcccctcagagcatgatgggaggtgtgccagaaagtcccccctcgccccaaagttgctcaccgactcacctgcgcaagtgcctgggattctaccgtaattgctttgtgcctttgggcacggccctccttcttttcctaacatgcaccttgctcccaatggtgcttggagggggaagagatcccacgaggtgcagtggagggggcaagctttgctccttcagttctgtttgctccaag

SEQ ID NO: 31477 - DNA, 456 bp, Homo sapiens
  misc_feature (1)...(456): n = A,T,C or G
nttcgatagcactactccagngnggnggaattcgatgcacagccttcaattggtgctttggtggtttttaagcggccttgagcaaccacaggctcggaccccgggccaaagcggggcatgaattaccttgtcagttgcagcatgagatccccagagtccggataaggagagccggcgactgcgcgggactacacaccaatggggcgcccccctcctcctgtcccctcagtctctccagggccgctgccagggagcttggcgatcgcgccacactctccggagccccacccttgggagcagcaaccacccagaggtcaagcacgttccccgccgggcggctggctgggaagcgctccgctggccgccgaccacacagccaccctctgcccaccctctcctgtggacaccgccggagccccgccttccccgggcccgggtgtctgtgacagactctcc

SEQ ID NO: 31478 - DNA, 460 bp, Homo sapiens
  misc_feature (1)...(460): n = A,T,C or G
aggggctgnntnnnaatcgacatagcacntatgccgggcattcggggcagggggccttgggcgtggaagtgcgagccaaggaccaggacatcttggatctggtgggtgtgctgcacgatcccgagactctgcttcgctgcatcgctgaaagggccttcctgaggcacctggaaggaggctgcagtgtgccagtagccgtgcatacagctatgaaggatgggcaactgtacctgactggaggagtctggagtctagacggctcagatagcatacaagagaccatgcaggctaccatccatgtccctgcccagcatgaagatggccctgaggatgacccacagttggtaggcatcactgctcgtaacattccacgagggccccagttggctgcccagaacttgggcatcagcctggccaacttgttgctgagcaaaggagccaaaaacatcctggatgttgg

SEQ ID NO: 31479 - DNA, 493 bp, Homo sapiens
  misc_feature (1)...(493): n = A,T,C or G
agcgggnntnnnaaattgactgagtagcgctngagcnggngcaattctgggatacaaggctggcatgactcacatcgtgcgggaagtcgacaggccgggatccaaggtgaacaagaaggaggtggtggaggctgtgaccattgtagagacaccacccatggtggttgtgggcattgtgggctacgtggaaacccctcgaggcctccggaccttcaagactgtctttgctgagcacatcagtgatgaatgcaagaggcgtttctataagaattggcataaatctaagaagaaggcctttaccaagtactgcaagaaatggcaggatgaggatggcaagaagcagctggagaaggacttcagcagcatgaagaagtactgccaagtcatccgtgtcattgcccacacccagatgcgcctgcttcctctgcgccagaagaaggcccacctgatggagatccaggtgaacggaggcactgtggccgagaagctggac

SEQ ID NO: 31480 - DNA, 468 bp, Homo sapiens
  misc_feature (1)...(468): n = A,T,C or G
aggccgctnnnnnnnntatctgatctgtactgcntatgagcnggcattcctgcagctttccgccgcttgggcgccttgtccggagctgcggccttaggcttcgcttcctacggggcgcacggcgcccaattcccagatgcctacgggaaggagctgtttgacaaggccaacaaacactacttcttacacagcctggccctgttaggggtgccccattgcagaaagccactctgggctgggttattgctagcttccggaacgaccttattctgcaccagcttttactaccaggctctgagtggagaccccagcatccagactttggcccctgcgggagggaccctgctactcttgggctggcttgccttggctctttgagctcccttttgcttaattactgggttttctgggcagttttttttttaaagagttggagtaagaagaggattaaaaaggaaaggcaaaaaa

SEQ ID NO: 31481 - DNA, 462 bp, Homo sapiens
  misc_feature (1)...(462): n = A,T,C or G
gggtgtcccncactgagaccccatcgagancatagaacangcgaggaattcgccgtctctcgctaatgactccagctgcctggaaggcagcatggggctgcggacactctggggcagtcttctggcctcactgactcctccaccattgcctcccccagacccccctgcccctcccactcttcttcataactgccacctttgccagaagctccagagagactccccaacctgccatgcctgcctccaccccaaccgtacagtccccactgcgctgtccagcccctggtaccatacctatggcctggctcccccctggccttggagcccggtgcccctttcacttcctcagcctcagcaatgttcccttttcagtgtcatggagctggctcgcctcaagtctttcgttttcccaggctaagtagggctgtgaggaatgcattaagagggtttgggagtttctga

SEQ ID NO: 31482 - DNA, 465 bp, Homo sapiens
  misc_feature (1)...(465): n = A,T,C or G
gaggggcggggtttgagaacccgagagcctcggaagngcgnggaattccccgctaagtgggaggcggcccgtgtggcggagcagctgagagcctttctggaggttgagtgcgtggagtggctccgcagagacctggagaacgggaaggagacgctgcagcgcgcggaccccccaaagacacacgtgacccaccaccccatctgtgaccatgaggccaccctgaggtgctgggccctgggcttctaccctgcggagatcacactgacctggcagcgggatggcgaggaccaaactcaggacactgagcttgtggagaccagaccatcaggagatagaaccttccagaagtgggcagctgcggtggtgccttctggagaagagcagagatacacatgccatgtacagcatgaggggctgccgaagcccctcaccctgggatgggagccattttctcagtccaacggg

SEQ ID NO: 31483 - DNA, 475 bp, Homo sapiens
  misc_feature (1)...(475): n = A,T,C or G
nggacggnccnnnnnnaactgagancctgcnangacangcaagnngcgnggaantngggggacaagcgtgagaaagagcatgaactcctggtgctggacgggggttccctgtctatggggctggagacagcacgtggggtgatgaccaggctgatccagaggaacgccactatcctgaccagggacacccagactgtcaccacctactaggacgaccagcctggggtcttcatccaggtgtatgagggtgagatggccatgaccaaggacaacaacctgctggggcgttttgaactcagtggcatccctcctgccccacgtggagtcccccagatagaggtgacctttgacattgatgctaatggcatcctgagcgtgacagccactgacaggagcacaggtaaggctaacaagatcaccatcaccaatgacaagggccggctgagcaaggaggaggtggagaggatggttcatg

SEQ ID NO: 31484 - DNA, 503 bp, Homo sapiens
  misc_feature (1)...(503): n = A,T,C or G
tggcgnnnnnagagccacgctaggtgngaccttacngnnctncagnannngcggnggaantngactgattgaccggacagacagcccagggatgaccccataaaccagtcctggagctcttggaggcatctggttactagcttgcagcataaagggccagagtgcccccacagggagacacggggtcagggtggggagtccttggccagggccctgcctgcctgccaaaggctgagagcagttctagtgccacacacccaggtcagtgctggttgtatttcctgtttcactaaacttctttccaccttcacctacagccaccagccttcgagttccttgtttcccttgctctggtctccacgtgtatgatggggttctcaggcccaggcttcgaccagaggaccctctgccaccaccgtttcttcctgtccttgagctaccttggtgaactcatgaccccaggcccctgctccaccaggatgtcccccaggtcctgccagctg

SEQ ID NO: 31485 - DNA, 478 bp, Homo sapiens
  misc_feature (1)...(478): n = A,T,C or G
tgggaccacnnnaatcgagaccctatttagtgcgctggaattcggntctgccagccccagcacagacccaaactggggctgggcctctatccctcctctgcctctgttcgcatagtaagaaggagtgaccgggatcctccccttcccctaccctaagctgtagcctgggtgactgactggcctgggcctggggtggggacgtccccaagccaaattactccagggtctctgctcctcgtggctgccaggggcctgcagggtctgggtgggtctcccaggagaggaatactgagtgggagatcggctgtctggagtgttctgatgcaagtctctctctcctgagcctcctcttgatgcaagctctaaagggagaagtcaggccctgcctctccagggtatagacggccctgctaggccccagatcttcctccttccccctttcccaggaaaggccagcccagtccatggccttcttggg

SEQ ID NO: 31486 - DNA, 490 bp, Homo sapiens
  misc_feature (1)...(490): n = A,T,C or G
aggggtgntnnnnccttgactgcgttgcatcgcgcggngcaattcgcagactgctacacggagctggagaaggcagtcattgtcctggtggaaaacttctacaaatatgtgtctaagtacagcctggtcaagaacaagatcagcaagagcagcttccgcgagatgctccagaaagagctgaaccacatgctgtcggacacagggaaccggaaggctgcggataagctcatccagaacctggatgccaatcatgatgggcgcatcagcttcgatgagtactggaccttgataggcggcatcaccggccccatcgccaaactcatccatgagcaggagcagcagagcagcagctagagacccctttggccacaccttccaggcactggcctgatgccccgccctggtgctctccccaggctccctcctcagcctcctgcccacccagggccctttactctcttctccctccagaccttcctctgacccttgg

SEQ ID NO: 31487 - DNA, 466 bp, Homo sapiens
  misc_feature (1)...(466): n = A,T,C or G
cggccccgccaatcgagacccttaatcgagaccctaggccangncgnggaattccttgcaacttgatcaaatttcttaaagcaaacaacaaaaatgtacatttctgtttttccttttaataaacaggtgtactctttatcatggttggtatgatggaccattctttggggcggaggattgattatgttactctctttaaaatctgttcccatattgaacaggcagattggaaaagctatggttcgatttctcagaagaaatgtttaggtcttagtcaatagttttaactatgccatttgtttaaatgagtgcatttgcttcgagggtagtgtcttactaaaagttaagaacagagacctagtggtgtgtccaaggccgtgtcactttccccttcagcacaccccagcttctgacctcagagcccaggagctgcgtggacagtgtggggtgccaagaggaggggcgg

SEQ ID NO: 31488 - DNA, 484 bp, Homo sapiens
  misc_feature (1)...(484): n = A,T,C or G
agggccnnaggggnnnnaatcgagaccctattgagngcgtggaattcctactgataccttttcatttaaaaaaaattttaatagtaataagaatgttcagtcaatatcaatagaattaggaagaatttctatttccttccttcattaattcaacaaatatttattgagcaaacatctgtgtgtcgtctggcgctgttgcacaggtcaaactggcttcttaagaatgaaatcctaagtgtgaggaagaaattgcattgtatgtgtggtctgactgcagaaaacctaaaataagtaaactgctgccatgatgaaaagtcaaggagtaagttggcttttccatgttagtaagacaagtgaaaaggcatgtttcagtcacgatgtaatatttcctaaaattttgaagctatggggagaaaggtttgggaggaatttcatagggaaaagaaaatgtggggagggggaatgtaagcaaacaatacttatg

SEQ ID NO: 31489 - DNA, 263 bp, Homo sapiens
  misc_feature (1)...(263): n = A,T,C or G
gaggnntccctacagtacagcgtacganggacntcgaancnacgaagnnnnggnggnaggctctgcaggacgcctcgtcgcccggggagccgacctctttgggcagatttactctgccacgcaagaggagctgctcttgaaggactcgctggcagtgggcgcaggactgcctgagcaggggccccaggatgtcccgctgctgtacctgaagggcatggtctacatggtgcaggccttgcgccagtccttccaggggcagggcg

SEQ ID NO: 31490 - DNA, 469 bp, Homo sapiens
  misc_feature (1)...(469): n = A,T,C or G
cgcncgcgccaatcgagaccctattattgagacctctaggcagngncgnggaattcctggnccagcacggcatcaccaacctgtgcgtcatcggcggggatggcagccttacaggtgccaacatcttccgcaacgaggggggcaacctgctggaggagctggtggcggaaggtaagatcttagagactacagcccggacctactcgcacctgaacatggcgggcctagtgggctccatcgataacgacttctgcggcaccgacatgaccatcggcacggactcggccctccaccgcatcatggaggacatcgatgccatcatcaccactgcccacagccaccagaggaccttcgtgctggaagtgatgggccggcactgcgggtacctggcgctggtatctgcactggcctcaagggccgactggctgttcattcccgaggctccacccgaggacggctgggagaactn

SEQ ID NO: 31491 - DNA, 451 bp, Homo sapiens
  misc_feature (1)...(451): n = A,T,C or G
natcgagacctntggtagagggcggaattccacgccaggggctaggcagggcttcgcggggcctggcccaagggctccagcagagcaataacatcttcccaggttgggatggcacagacaccgtgccctggagcccccaacccatcccatctggtgctaccctggctgcctggcaggctagcctcacccctcctgtccggtcacctgggggtccttggtaaggatgcagccacatggggccgggttatgcacctgggcgagaacctgactggggcaggggatgctcacgggcctgcaggtctcccacagagctgcttttctgcccgcctcaccctgtgggtttgtatttcatgccgggtcaaaataggcagagactcgtgccttccctcctcagggccggcggcagggagtggacccagatggccgctggacacgccccttactcattctc

SEQ ID NO: 31492 - DNA, 489 bp, Homo sapiens
  misc_feature (1)...(489): n = A,T,C or G
gtttgcccaggncgcnnnnaatcgagnccctcttcgtagacactagaccangncgnggaattccagcaaagctgtgaatgctacgaggagacagacatcctggcccaaagcctgcaccgtgtcttccagaagagttgatgagggctacagctgttggggctctgccaggtcccctgggaccaactacagctccaatcagaaaccctgcgcttacttgagtgtggcttcccacttttcctgcattgtggagctgactgagtacaccggtgaggctggggtctctgcaggggaggtcactggaacagcgagcaagggactggtgcctcgctggtgctgggtctctggtttgctgcagagccgtacgacactcctggctcctcagtaggacagacagacgcaggcgggtttattttggaggggtacttgtggcattttactgtattgacttggacatgggatgtggggaggtggaaatgatgagcagtatcn

SEQ ID NO: 31493 - DNA, 265 bp, Homo sapiens
  misc_feature (1)...(265): n = A,T,C or G
cgctcccgtttttaagactatagtatcacccgagcanngnccnggaannnctttaagcttttttgctcacagggacgtggtatgggccctgggtgcatgtgcccacattttgctaaagagagctttgtctgatcagtcctgggtccatcagtttgtccatgtgtccggctgccagcccgtcccttgggatccttcccctggggtgtagccttgttcattagtatatactcattccttcatgctttcctcagcagaacacttccac

SEQ ID NO: 31494 - DNA, 456 bp, Homo sapiens
  misc_feature (1)...(456): n = A,T,C or G
catgagaccctaggatgaaaggctgtagncccttaccctggggagcaaaagaactagacattatgtacaacactgcacctccccgcccgtctaagccaagccatctgtctgaacggggccaagaggagtggagtacacacatgggtatcaagaggccagaatgcactctggttccaaaaagaaactacctctctggtttagacaacatgagaacctggaaagctgatgtagaaggccaatccttaagacaccgagacaagcggcttagtttgaatttgccatgcaggttctccccgatgtaccccacagcttcagccagtatcgaagacagctatgtgcccatgagcccccaggctggtgcctctggtcttggaccccactgcagccctgatgactacattccaatgaactcaggaagcatctcaagcccgttgcctgagctgcctgcaaacctgg

SEQ ID NO: 31495 - DNA, 471 bp, Homo sapiens
  misc_feature (1)...(471): n = A,T,C or G
ggaagagccattgagnnccnnnttacctgaganctataggcaagngncgnggaattccacgctgctttttctctttcctaaatgcagcgcttgcttggggacttcaagggaaggcttttggttggtgggctgagtgaccccaggctccgagaggggcaggcattgcttgggaggaggtgggagatgcacgcatgcccttagctaggcgtggggtggctcagttaagaagggcactgcctccgcagcctctatgcgctcagccagctgcagccccaaaggtctagggctttagggaaccgatccaggtttgggggcggggagaaagttctgaggcagctcctccctggacagagcagggcgaccccgcgccgggcctgcaggctcctacagctactgcccgccagcgggcaaggcgaagggccctaccagccagctgagcgggggattgtgctgtaggccctccagcagctg

SEQ ID NO: 31496 - DNA, 484 bp, Homo sapiens
  misc_feature (1)...(484): n = A,T,C or G
gacggggccnnnnnnttcgagacccaattgagacccgtaggccgngcggtggaattcgcgaggacgagtggtactgccctgagtgccggaatgatgccagcgaggtggtactggcgggagagcggctgagagagagcaagaagaaggcgaagatggcctcggccacatcgtcctcacagcgggactggggcaagggcatggcctgtgtgggccgcaccaaggaatgtaccatcgtcccgtccaaccactacggacccatcccggggatccccgtgggcaccatgtggcggttccgagtccaggtcagcgagtcgggtgtccatcggccccacgtggctggcatacacggccggagcaacgacggagcgtactccctagtcctggcggggggctatgaggatgacgtggaccatgggaattttttcacatacacgggtagtggtggtcgagatctttccggcaacaagaggaccgcggaacagtt

SEQ ID NO: 31497 - DNA, 268 bp, Homo sapiens
  misc_feature (1)...(268): n = A,T,C or G
gggcnccncgnttgatanccctacttaganacntacgcagagngcaggaanncgggagccagacctgtgcctcgaccaggggtacaatgtgggataagaaacttaacctttttgtgcctctggttgtgcatctgtcagtgaggacacagcatctgtctgccttttgggatttgggggaggacacaggagctaataggtggtaagtttcagtaatactaatagttaacttttcctgttaagacaataccagctgtgtgttttctttcca

SEQ ID NO: 31498 - DNA, 512 bp, Homo sapiens
  misc_feature (1)...(512): n = A,T,C or G
gtgccgggganannnnnnnnncctcgattcgcagtnccgtgtggnggaattctaagcagcctgattccatgggggctcgaggaggtccctaccctgctcaccatcagggtccacaccacacccaagagacctcggcccgttgccactgaatctcaaccccaccgcttaccagctctgtggccttgtgggaattacctgagctttttgcctcaatttcccaatctgtaagtagatatttggtgggatacgtggtatctgccttttgggactccaagaaggcgcatgtgcacacggggccagtaatgttctggcctccgggagactcccagctgctgctcagcccttgcttggagctccgcgcctccgaggacgaagcccccgtgctcctctccccacaagccccgctctggacctggggtgccacttgaacaagagagaagttgctggacgcttccaggagtgcacacctttctgtccccgctacaggctgtgatctcctgggtctggcctcn

SEQ ID NO: 31499 - DNA, 261 bp, Homo sapiens
  misc_feature (1)...(261): n = A,T,C or G
gcgcccccctttgaatcacngtgatagacctcaaaacgacggacncnggggcagcaggcccagtgaagggagggatggacagaggggtgccattttctggcatccttgccttgtggaccgaggggcagctgcgtgcacttacgcatggtgtcctggggtccaccatggccaagccaggcctgggcaggggcaggacaccatccctgcagctgagagatctcaggccaggggcagggcagccaaagacagtggagtgtgggg

SEQ ID NO: 31500 - DNA, 492 bp, Homo sapiens
  misc_feature (1)...(492): n = A,T,C or G
ggtnccngggggnccccaatgagaccaatagatgatcgtggaanncgcgctgcatggagatccgagagaagggctccgagttcctgaaggaggagctgcacagagcgcagaatgagctgaagctaaaggacgaggaatgtgagcggctgtccaaggtgcgggagcagctacaacaggagctggaagagctgacggccagcctgtttgaggaagctcacaagatggttcgagaagccaacatgaagcaggcggcatcagaaaagcagctgaaggaggctcggggcaagatcgacatgctgcatgcagaggggacagccttgaagacgctggtcattacgttcacaccagcctctcccaaccgcgagcttgacccccagctgctgagccccaccaaggccgggccccgaaagggccactctcgccacaagagcaccagcagcaccctctgccccgccgtgtgtcccgctgcgggacacaccctcacgccagaca

SEQ ID NO: 31501 - DNA, 468 bp, Homo sapiens
  misc_feature (1)...(468): n = A,T,C or G
natgagaccctagcagtggcnggcattcccaccttagtcttcttaaaagagaacctcacaattagcattattgtctttagtctaggactctaccttggggggactctctgggtatatggtacagtaccaaggtcagctgctagttgctatggattattagcactttcatttgtgttcacttttttccaagtgattgcctccttagaccacctaagttgtcctctatggttctgtcctgatatctgttcaggcgggacactgataaaggtctttatgtcttagctacacacttgaatgcaactacaacactggacgctcagtaaacagcatccctgctgcctgccatgacaatgggcgtgccagcccccctcccccgccggctttcccctccagatacactgtggaactatttgagcaggtggtacgagctatggccattgcagccctggacatggcggaatgtaatcc

SEQ ID NO: 31502 - DNA, 481 bp, Homo sapiens
  misc_feature (1)...(481): n = A,T,C or G
gaacgatnaccattgngnagatcgagnagcactagaccagngcggnggaattccttgactggcgtggggtggggttggtgtggagagaagctgtcgttccgtcagactcttgaaggctcaggggccagtctggagatagctgcgtttgattccagggttgggaggacagctcgcgctgggaaaactggacaggccttcacactgctcctgaaagtgcaggtgaggctgcgagggtcttgggagtttctgctgttggtgggtgttaaggggctggcccaagaacccccttccaccatgagcttctctccaggagaggagattcctccgaatgctaactgaagctggggcacctgagttgcagcgggacgagctctccagcaagctgctgcagccgttggttcctcggtacgaggaggccctgtcccagctggaggagtctgtcaaggtaagggcaccacagtccggcatgaaaccctctggg

SEQ ID NO: 31503 - DNA, 495 bp, Homo sapiens
  misc_feature (1)...(495): n = A,T,C or G
ngagcggncnnccnccataggaactganagcactcgcanggcnggaantaacagggacacctcaggcaccaacctgtacccgagctcagccacggacacatctgggcctccagaagggtcctcagctctccagagccagagcaggagagacagagaggagaaggccgtgtggagatggaggcacaaattgaggaagcctggagcccccaggagctggaagaagcaggaaggatcccccctagagactcggccctgcgcacacctggatctcagacttctggcttccagagctgtgagggaagagattgctgctgtttgaagcctcagggtccatagtcatttcttatggcaaccatgggacactcatttggtgagaaaaagccccttgaaacacacaagtggtgggtgccgtggatcaagggccgccaaccacagtcaagccccaaggccgctggctgggcagactggaccccacagaaccaagccacatggaac

SEQ ID NO: 31504 - DNA, 486 bp, Homo sapiens
  misc_feature (1)...(486): n = A,T,C or G
ggagggccnncncccaactgaactagtgcatgngcagancccctctttttgttagatttcttagtctcttgatcaagaaatatttactgagtatgattgcatgcataagtagtgtgcgttagagatacgatacctgtaagacaccacagtgctgggtagatccgggtgccattgtctgttgccagggccgaagttggcattttgtaagtgttcgaataagcaccatgccgtgggataagaaataaaagtgtgtgcctcatctgtcatctgtagttgtgtatatatgccctgtcttcgggcgggcttaggtctcttctcataatttgtgcctttttgctcataacagtctggtttcaaagacacaaaaacagttgttgttattgtacttagatgaagaatacagagctcctagaaggttgatgagttcatgaagaagaaggctctggaaccaggatccctcaccttggtggacttcccaccactgga

SEQ ID NO: 31505 - DNA, 506 bp, Homo sapiens
  misc_feature (1)...(506): n = A,T,C or G
aggggccnngncnccatagaaaactaggagcactcgcagngngcnggaattcatttgtttttggttacacaggtgcnttccgcccatgtggncctcggagtagggaactctgcgtgttcatcaatnctgtacattggcctgagagcagnccgtgtatgtctctggaagggacaagaccaggtacctgtcgggggatgcggccgtggtaccaggcatggctgcgcaggtcctcgctgctcaggagcagctcctcctccagctccttcttcagtttctcgggggtcctgtccatgatgtgcctctccttggagaactgcaacacagagtcaaccatgagctcaccctgcccaggccacaccaggccatgccagctggaggtgaccgcctgcttcactaatccaaccagttatgctacagcctgcattcagggagatgtggccacaggactcagttctgaccaaggagctgagatgtgatggctggagactcaacaccattctggacgg

SEQ ID NO: 31506 - DNA, 476 bp, Homo sapiens
  misc_feature (1)...(476): n = A,T,C or G
ggggnaactgagacccctggccagttgcgggcattcgagccctgtgcgggcagtgtgtgcgcacctgctggggctgcggctccgtggcctgtaccctgtgtggcctcgtggatctttttaggacgctggtcgtgttgccttagggcccccatgtcagtgccgtcatctagactgatgatgcccgcagtgatcctgtctccagataaggtcatgtcctgaggtgttctgggttaggactttgacgtttgaatggtggggggtggtggacacaattcagcccctgacagcagcttttctctcccctccctgacgctgtcgcagctgcagtgacatgtacgagaaagtgctgtgcaccagctgtgccatgttcgagacctgaggctggctcaagccggctgccttcaccgggagccacgccgtgcatggcagccttccctggacgagcgctcggtgttcacactgaactgtggggtcga

SEQ ID NO: 31507 - DNA, 426 bp, Homo sapiens
  misc_feature (1)...(426): n = A,T,C or G
gagtctgtgggtgatcagaggagaattcattcaaccagccacctaggggtggacattaggttgtttctgctttcctttttcagctgtgctgcagtggacatctgtgacaggtgccattgggctggggggtcacgtccccggggatgccgggccgggcattctacatcctcttcagctgctgtcgttggggtgcttccagccagcctggtcttcccttcctgtggctttgggaggggaaatgagcatgggtcacctgcctgccactgtctgcctcctgcctcctctgaggcctccctttgtcctcagcccaggtgaccttcagaaagacattggagaaggaagcaaagggagaggagcccgacatcgcagtccccaagttcaaacagaggaagggggagtccgacggngcctatatccaccgcatgc

SEQ ID NO: 31508 - DNA, 491 bp, Homo sapiens
  misc_feature (1)...(491): n = A,T,C or G
ggagggccnncncccatagaaatcgttgcagtggcgggaacncgtcagtcacctgtgtggacttgggcaggctacttgggcctggggagatcacacctgcagagcggggttaactgagtgtgagacacagaggccatttccagtcctgtgtgtggcagcccttctataaatatcactgtctttcctcatcgttgacagtctcaatagaagaaaagatgggtttcagaaatcattctaacctactcagtataaatttgcaatatttggaaagaaaaacacctttgagaatggtcggttttagaaaaagcattttttggttttttgttttgtttgtttgttttttgtgtttttttgtagcttagtaaacttcaggaccagcctcagggaggacttacttttttctctttgtgccaatatcttatcactttctaagagcaaggatagagtctggcaggagactctggtggtggagactgtcggtgcttttctgg

SEQ ID NO: 31509 - DNA, 492 bp, Homo sapiens
  misc_feature (1)...(492): n = A,T,C or G
agcgcccncccccattgattcgtgagcactcgcaggngcnggaanncccagagcccagcttgccaggcactgagctagaagccctgccatggcacccctgataccttttctcatactggccctgctggcatggggtgctctggctgaccaagagtcatgcttgggccgctgcactgagggcttcaacgtggacaagaagtgccagagtgacgagctctgctcttactaccagagctgctgcacagactatacggctgagtgcaagccccaagtgactcgcggggatgtgttcactatgccggaggatgagtacacggtctatgacgatggcgaggagaaaaacaatgccactgtccatgaacaggtggggggcccctccctgacctctgacctccatgcccagtccaaagggaattctgagcacacacctgttctgaaacctgaggaagaggcccctgcgcctgaggtgggcacctctaagcctgatgtgaa

SEQ ID NO: 31510 - DNA, 475 bp, Homo sapiens
  misc_feature (1)...(475): n = A,T,C or G
ggggnaatcgagaccntatgcatttgatggcattccccaagtgctgggattacaggcgtgagccaccatgccctgcataatttttgtatttttagtagagacagggtttcactgtgttggccaggctggtctcgaactcctgacctcgtgatccatctgcctcggtctcccaaagtgctgggattacaagtgtgagccaccgcgaccagccagtgatcgaagtttttaatatgacctgtgaggttgcctctggctcattcatttatgcaatctaagtccaatttcaagtttctcgatttctgtacttttctcaacatgaactgataacagatgctttataaactggctcaggtcccagaaccatgcttaggattacattgccctggagcacatgaggaggccagggccctctaatgcagttcagcgagtggagaggatgggcatggcaaataaaagcaggtcattcactcttttn

SEQ ID NO: 31511 - DNA, 485 bp, Homo sapiens
  misc_feature (1)...(485): n = A,T,C or G
agggcccgcccccactgaacctanagcatcgccagggcggaattccaagagacccaccacccctctctgacatgaggccaccctgaggagctggtccctgtgcttctaccctgcggagatcacactgacctgggagcggtatggggaggaccaaacccaggacacggagctcgtggagaccaggcctggaggggatggaaccttccaaaagtgggcggctgtggtggcgccttctggagaggagcagagatacacctgccatgtgcagcatgagggtctgcccaagcccctcaccctgagatgggagctgtcttaccagcccaccatccccatcgtgggcatcattgctggcctggctctccttggagctgtgatcactggagctgtggtcgctgccgtgatgtggaggaggaagagctcacatagaaaaggagggagctacactcaggctgcaagcagtgacagtgcccagggctctgatgtgt

SEQ ID NO: 31512 - DNA, 491 bp, Homo sapiens
  misc_feature (1)...(491): n = A,T,C or G
tgtgtcnnaggggggccngattgagnnccntatcgtagtccctagtcagtgtggtggaattcaaagaacctaaatgtctctctgtcctgtgagctggtgaaaaacccagcatgagaacgcagtgtcaggtgtgggactccttctgcccctgcagtgggtgttacgggcggtgtgccctggcgagcaagctttgattcttggttctttgagctcgtttcagaggctgagtccccacatcagctttagttcttggacttccctgtattaagcaagaattaggagaatggctgtccctgcaggcgcctcccgtaaatcctgagctctctggcgcaatctgaaacttctcttctgttttctttggctgtatcagccgaaccaggagaggcctgggctgcgactaaggagaaagaaatcgggggtttctgagagcagatggtgcctttgtgggtgcagggcttttgtggaaattgtcagcctctacgggcagagtn

SEQ ID NO: 31513 - DNA, 461 bp, Homo sapiens
  misc_feature (1)...(461): n = A,T,C or G
agcggcggnnnnaactgactgagtgcatacgccangncgnggaattcgctgcggcaaggacgagccggggcgctgaagactatgctccaggaagcccaggtgtttcgaggacttgcttctacggtttctttgtctgcggaatcagggaagagtgaaaagggtcagccacagaattccaagaagcaaagtccaccaaaaaatgtagtggaaccaaaggagaggggcaagctcctagccacccagacagcagctgaattgtctaaaaacttatcttcacccagttcttacccgccagctgtgaataagggcaggaaggtagctagtcccagtcccagtggcagcgtgctattcacagatgaaggggttccgaaatttttgtcaagaaagactttggtagagtttccacagaaagttctgtctccattcagaaaacagggctctgattcagaagctcgtcaggt

SEQ ID NO: 31514 - DNA, 492 bp, Homo sapiens
  misc_feature (1)...(492): n = A,T,C or G
ggcgccgcncnttttggaaatagagcatcgccagggcggaattcggcaccaagcgcggacataaaaacaacctgaaagaggcgactgaaaccattgtgttttgccatgagcaacctggtgccccccgtggagctggccaaccccgagaaccagttcagagtggactacattctgagtgtgatgaacgtgcctgactttgacttccctcccgaattctatgagcatgccaaggctctgtgggaggatgaaggagtgcgtgcctgctacgaacgctccaacgagtaccatctgattgactgtgcccagtacttcctggacaagatcgacgtgatcaagcaggctgactatgtgccgagcgatcaggacctgcttcgctgccgtgtcctgacttctggaatctttgagaccaagttccaggtggacaaagtcaacttccacatgtttgacgtgggtggccagcgcgatgaacgccgtaagtggatccagtgcttt

SEQ ID NO: 31515 - DNA, 498 bp, Homo sapiens
  misc_feature (1)...(498): n = A,T,C or G
gcgggannanaaaaacttgaactcgtaagcactagtccangtggtggaattcgcttctagagggcgagagttagtaagccccatgatgtcacataggccaaggaagttatgtcactccgccatggagtctctaaatatggggaaaccaactatcctattaacaattcaccaactgtccataaaaccccgttagacccaggctgcatgccttgcagtgggggcctcacctggcatcctgcagacagggagacagtgcaatcatgatggagcagtccttggcagtcatggcgacgcggtactgctgcacctgcaggggcgggaaagatcagctccaggtcacacaggaagcctctgcccccccacacaaccttccttcccagtagccaagtgtgggaactgcttcctgcctcagaacctgagggtgggattaggagcgagggccacggtgagcacgggcgtcaagaggtcgccctgtgagagcacctgggccagccctca

SEQ ID NO: 31516 - DNA, 454 bp, Homo sapiens
  misc_feature (1)...(454): n = A,T,C or G
agcggctnnnnnnaaaagaatagcgcatcatgtgtcgnggacttccatccctgcagggaaatcatatccgacatgcctgtgcccacagcagacttaagactgcctctaaaatgtccatgaagccattgtccagtagagctgttagttttaacaccagtgagtattacctttggttaaaaggatgcatgtgtataggtgtatgtgtgtgcgtgtgtgtttgtgtttttggacttgtgtggagaatgaagaaagggttccatttaggcatttgcaaatattcgatggcatcatgaaaagacaaaaaaaacctataaaatatatcatattttgctatgattttgtgtgtacatgtaataaaattattaagtattnnnnaaaaaaaaaaaaaaaaaaaaaaaagcggccgttcaattttaaagggccctttaaaacccgttgataaccctggattggg

SEQ ID NO: 31517 - DNA, 505 bp, Homo sapiens
  misc_feature (1)...(505): n = A,T,C or G
gagggccnccccccatagaaactcantgcnatgtccagngncgnggaattcgtggagggcctgcgtgtctttgacaaggagagcaatggcacggtcatgggtgctgagcttcggcacgtccttgccaccctgggagagaagatgactgaggctgaagtggagcagctgttagctgggcaagaggatgccaatggctgcatcaattatgaagcctttgtcaagcacatcatgtcagggtgaagcagagtcttccaggtgcctggcccttggctttagccataccagggtgagttaaagagaggccccggctgggtgagctgagatggagtcctcgacttatcaccacaccactgccccaaggaccttacaggccctccctgttaataaacagctctaacacggccaggctgggctctgggattctgaannnnnnnnnnnnnnnnnnncnnnnnnnnnnnnnnnnnnnnnnnnnnnnnnnnnnnnnnnnnnnngccnngcccggccg

SEQ ID NO: 31518 - DNA, 450 bp, Homo sapiens
  misc_feature (1)...(450): n = A,T,C or G
aggcgcttttnnnccccgatagcccacatgtgncgtggactactaccttaagaacccgctggtatgggttcacgcatgcgctgaacacgtgggggtgactcggaaccgaagaagctctgcgtacaagtggaaggagacgctattctcagtgatgcccggcctgaagatgaccatggacaagacgggtctcctgctgctcagtgacccagacaaagtgaccatcggcctgttgttctgggatggccgtggggaggggctccggctccttctgcgtgacactgaccgcttctccagccacgttggagggacccttggccagttttaccaggaggtgctctggggatctccagcagcatcagatgacggcagacgcacgctgagggttcagggcaatgaccactctgccaccagagagcgcaggctggattaccaggaggggcccccgggagt

SEQ ID NO: 31519 - DNA, 519 bp, Homo sapiens
  misc_feature (1)...(519): n = A,T,C or G
gagaggggnnnagaagcctcgaccccgtccatgngttggatttcctatacatgaggctgagctggttacgggtcctgacagtactgtccatctgcctgagcgccgcggccacggccacgggggccgagggcaaaaggaagctgcagatcggggtcaagaagcgggtggaccactgtcccatcaaatcgcgcaaaggggatgtcctgcacatgcactacacggggaagctggaagatgggacagagtttgacagcagcctgccccagaaccagccctttgtcttctcccttggcacaggccaggtcatcaagggctgggaccaggggctgctggggatgtgtgagggggaaaagcgcaagctggtgatcccatccgagctaggtaagaggcccctcctgagggtgcagagcgagtttgggggtgtgactgggaagggtgaaagctgcttcagcttttcattggtcttcaccgtatccattcattacaatacatgcctcctccaagtttggctgtgtctag

SEQ ID NO: 31520 - DNA, 525 bp, Homo sapiens
  misc_feature (1)...(525): n = A,T,C or G
tgtgaggaananagagattgatcccatccgagngtcgatcaccttccgagaggagcaattcctctcctccagtacaaaaattagctaggtgtggtggagcatgccagtagtcccagctacttgggagtctgaaggaggagaaccacttgagcctgggaggcggaggttgcagtgagccaagatcatgccactgcactccagcttgggcgacagagtaagactccgtctaaaaaccaaaacaacccacaacataccagaattgatggacacagcaaaagcagtgaccagaaagacatgcacagcgtaaatggctacactgaagaagatctccaatcagttacctcaactcacgcctaaggaactggagaaagaagagccaagattagagggagacaatagactgaagaaacaggcacacgctgcgtaactccacttacacgaagattagagggagacaatagactgaagaaacaggcacacgctgcgtaactccacttacacgaagattagagggagacaacagac

SEQ ID NO: 31521 - DNA, 499 bp, Homo sapiens
  misc_feature (1)...(499): n = A,T,C or G
gaggccnnnnnnttactgatcacctagcactatccgcatgnncgcangncctggtgcttgatggtcgaggccatctcctgggccgcctggcggccatcgtggctaaacaggtactgctgggccggaaggtggtggtcgtacgctgtgaaggcatcaacatttctggcaatttctacagaaacaagttgaagtacctggctttcctccgcaagcggatgaacaccaacccttcccgaggcccctaccacttccgggcccccagccgcatcttctggcggaccgtgcgaggtatgctgccccacaaaaccaagcgaggccaggccgctctggaccgtctcaaggtgtttgacggcatcccaccgccctacgacaagaaaaagcggatggtggttcctgctgccctcaaggtcgtgcgtctgaagcctacaagaaagtttgcctatctggggcgcctggctcacgaggttggctggaagtaccangcagtgacagccaccct

SEQ ID NO: 31522 - DNA, 500 bp, Homo sapiens
  misc_feature (1)...(500): n = A,T,C or G
gaggccnnnnnnttacgaatactagctgtntcncgcanggngcaattcctggagtgcaggagtgtgatcacaacaactcaaacaactcaccgcagcctcgaactcctgggctcaagtgatcctcctgcttcagcctcctgagtggctggaacttcaggcgtacaccacctgcagtggtgagatggggtctcactatgttttccacgctgatcccaaattactgggctcaagcaattctcctgccttggcctcccaaagtgctgagattacaggagtgagccaccctgcccagcccactcacccttttctagccaacctgttccttggaccctcacgtcacccctgtctaatcccttatcccaggagtgctatgttactcagcctgggacctcacacacatctggggtcccacattccacagaggggaagcagaaggcttctccctgctctgtccatgcccacaaccctgaacccctgcctctcctctgacagggcctctc

SEQ ID NO: 31523 - DNA, 528 bp, Homo sapiens
  misc_feature (1)...(528): n = A,T,C or G
tgtgcggggnnnnnagnagccttggaacntcgtccagagngttggatttcctctcctaacagtacaaaaattagctaggtgtggtggagcatgccagtagtcccagctacttgggagtctgaaggaggagaaccacttgagcctgggaggcggaggttgcagtgagccaagatcatgccactgcactccagcttgggcgacagagtaagactccgtctaaaaaccaaaaaaacccacaacataccaaaattgatggacacagcaaaagcagtgaccagaaagacatgcacagtgtaaatggctacactgaagaagatctccaatcagttacctcaactcacgcctaaggaactggagaaagaagagccaagattagagggagacaatagactgaagaaacaggcacacgctgcgtaactccacttacacgaagattagagggagacaatagactgaagaaacaggcacacgctgcgtaactccacttacacgaagattagagggagacaacagactgaagaaacaggg

SEQ ID NO: 31524 - DNA, 456 bp, Homo sapiens
  misc_feature (1)...(456): n = A,T,C or G
agcccgctnnnnnnnaaccgactagcacatcatgtgncgtggaattcgagatggcagacgatcaagtatagagggcccgaagaaacccgatgatcagacttgagtgtgcattttaccagccagccgtcggttgattgaccctcgaccgtgacttgcttgagcctggaaggagccacacccactgtccttgtttaataaaagaaggaaattagcctcgcattgactgagtacgtgtcaatctatgatgaaaacagagatgggttcatcgacaaggaagatttgcatgatatgcttgcttcattggggaagaatccaactgatgagtatctagatgccatgatgaatgaggctccaggccccatcaatttcaccatgttcctcaccatgtttggtgagaagttaaatggcacagatcctgaagatgtcatcagaaatgcctttgcttgctttgatgaa

SEQ ID NO: 31525 - DNA, 458 bp, Homo sapiens
  misc_feature (1)...(458): n = A,T,C or G
gcgggccgnnnnnnnaaaggactagacantgcatcgacagngccgnggaattcaaggatattaacatgcgagcttgtggaggggcatgctaccgggctgtacctcgtgacgtccagctgaaggactataagaatcagcagaagcaagttgaacaggtcgttgccaaggacttacttccctctagagataggcatcacttaccactgataaaaatgaaaccagttccagacttggttcccggaaattttaagagccagcttcagaaggtacccccagagtggaaggcattaacagacatgccgcagatgagaatggagttagagagacctggtggaaatgagattactcgaggaggctccacctcttatggaaccggatcagagacggaaagccccaggaaccctagcagtgctggaagctggaactctgggagctctggacctggaagtactggaaac

SEQ ID NO: 31526 - DNA, 493 bp, Homo sapiens
  misc_feature (1)...(493): n = A,T,C or G
agtttnnnnnaggggnnnnnnatggannnccntatcgtagaccactagnccatgtggtggaattcatcatagacgagctcttccaggacaggttcttcacccgggagccccaggatacctaccactacctgcccttcagcctgccccaccggaggcctcacttcttctttcccaagtcccgcatcgtccgcagcttgatgcccttctctccgtacgagcccctgaacttccacgccatgttccagcccttccttgagatgatacacgaggctcagcaggccatggacatccacttccacagcccggccttccagcacccgccaacagaattcatacgagaaggcgacgatgaccggactgtgtgccgggagatccgccacaactccacgggctgcctgcggatgaaggaccagtgtgacaagtgccgggagatcttgtctgtggactgttccaccaacaacccctcccaggctaagctgcggcgggagctcga

SEQ ID NO: 31527 - DNA, 489 bp, Homo sapiens
  misc_feature (1)...(489): n = A,T,C or G
ggctattnaaggaannnnnnnaatcgaagaccctattcgangtgcgggaattccgacagtcacctcggagaaccccacaaatttaagagagaatgggccagtgtcatgcgctgcatagcagtttttgttggcattaaccacgccagtgctaaattggattttgccaataatgtccagctgtccttgactttagcagccctatctttgggcctttggtggacatttgatcgttccagaagtggccttgggctggggatcaccatagcttttctagctacgctgatcacgcagtttctcgtgtataatggtgtctatcagtatacatccccagatttcctctatattcgttcttggctcccttgtatatttttctcaggaggcgtcacggtggggaacataggacgacagttagctatgggtgttcctgaaaagccccatagtgattgagtcttcaaaaccaccgattctgagagcaaggaagattntgan

SEQ ID NO: 31528 - DNA, 477 bp, Homo sapiens
  misc_feature (1)...(477): n = A,T,C or G
agggcagcccctgataccctangtttgaggaccctagtccangtggtggaattcgatggagtcagatttttggggacatcaggacagaacgtgagtgacattttccgatacagcagcatggaggatcacttggagatcctggagtggaccctgcgggtccgtcacatcagccccacagcccctgacactctaggtaacaggctcagccatacagggtgggagcagagggccaggaggcctggcaggaccctgaagtgcacagggtccccctgtgggtttgcacttgccagcattgctgagaactgtctgaggagaagttcagaggcttggcacctgctctggaagctactctggaatcttaattctaaggccaatggctgcccaccccaacgggcagcaacagcagggccaaggtcttgtgacaatgtctggaggtgcccctattgtcacactgggggtctcctactggcctgcaat

SEQ ID NO: 31529 - DNA, 451 bp, Homo sapiens
  misc_feature (1)...(451): n = A,T,C or G
aggcgctgnnnnaaaagatagagancctagccgnngcnggaattcggcgaccttggccttggggagagcagagcagagggagaggcagcagtcccagcggtcctaggctgtcgggaaactgcagcccagcctcagggccatgggaggtggtatccaggcctgggtggggccaggcctctgctcacagggatgtggggtcagtgcttgggagcctgtggccagcagcccccactgcacccctgcccccaggtgacacgcttctgagcaggggcccctggggacttcaactgcccagcaacatggaggatggtgtcctgaggcctccaaggacggtccccacccctctacgtttccccaataaagccttttannaaccannnaaaaaaaaaaaaaaaaaaaaaaaaaaaaaaaaaaaataaaaaaaaaaaaaanggggcggggttggtttgcg

SEQ ID NO: 31530 - DNA, 469 bp, Homo sapiens
  misc_feature (1)...(469): n = A,T,C or G
natcgagaccactanttttgatggccgatantccacgagcgggctctcagggaagccaaggagaccctgcagaagctgcccgaggagatccatagagacatcctactggagaagaagaaggtggcccaggaccagctgcgtgacaaggcgccgttcagaggcctgcccccggtggacttcgtgcccccaatcggggtggagagccgggagcccgccgacgccgccatccgcgagaaaagggcaaagatcaaagagatgatgaaacatgcttggaataattataaaggttatgcctggggattaaatgaactcaaacctatatcaaaaggaggccattcaagcagtttgtttggtaacatcaaaggagcaactatagtagatgccctggatacactttttattatggaaatgaaacatgaatttgaagaagcaaaatcatgggttgaagaaaatttagattttaatgtgn

SEQ ID NO: 31531 - DNA, 456 bp, Homo sapiens
  misc_feature (1)...(456): n = A,T,C or G
tgcggcttttnnnaaaagactagcacatcntgtgncgnggacantcgggcgaccttggccttggggagagcagagcagagggagaggcagcagtcccagcggtcctaggctgtcgggaaactgcagcccagcctcagggccatgggaggtggtatccaggcctgggtggggccaggcctctgctcacagggatgtggggtcagtgcttgggagcctgtggccagcagcccccactgcacccctgcccccaggtgacacgcttctgagcaggggcccctggggacttcaactgcccagcaacatggaggatggtgtcctgaggcctccaaggacggtccccacccctctacgtttccccaataaagccttttaaaaaccannnnaaaaaaaaaataaaaaaaaaaaaaaaaaaaaaaaaaaaaaaaaaannannnnggcggccgggggggggggggg

SEQ ID NO: 31532 - DNA, 501 bp, Homo sapiens
  misc_feature (1)...(501): n = A,T,C or G
agggctnncnncaattgaaacctagtgcagtgngcaggaactcccacagactcagagagaacccaccatggtgctgtctcctgccgacaagaccaacgtcaatgccgcctggggtaaggtcggcgcgcacgctggcgagtatggtgcggaggccctggagaggatgttcctgtccttccccaccaccaagacctacttcccgcacttcgacctgagccacggctctgcccaggttaagggccacggcaagaaggtggccgacgcgctgaccaacgccgtggcgcacgtggacgacatgcccaacgcgctgtccgccctgagcgacctgcacgcgcacaagcttcgggtggacccggtcaacttcaagctcctaaaccactgcctgctggtgaccctggccgcccacctccccgccgagttcacccctgcggtgcacgcctccctggacaagttcctggcttctgtgagcaccgtgctgacctccaaataccggtaagctgg

SEQ ID NO: 31533 - DNA, 462 bp, Homo sapiens
  misc_feature (1)...(462): n = A,T,C or G
atcgagaccctttgaggccgtgganccagcgcgaatggccgctggctatcttgggggagccagctgttggactatgccccactgccaggaaacatgcgccggaaggttctctgacaagatctcgctttcctagggcggtgaaggcgttcaaaggtcgggaaggggcgctgggagaagcggggcagcgctgagccatgctcgcgaactgtgggtctgtctgtgaagagacccagtttcgtgggaccacggtggcgcctgcgctgggagagttcttcactaccacaaccaaggagggatatgataggcggccagtggatataactcctttacaacaaaggaaattaacttttgatacccatgcattggttcaggacttggaaactcatggatttgacaaaacacaagcagaaacaattgtatcagcggtaactggcttatcagatgtcaggctggatactatct

SEQ ID NO: 31534 - DNA, 476 bp, Homo sapiens
  misc_feature (1)...(476): n = A,T,C or G
ccttcgtcaccccntnnnnnttgatgttcgctattccacggggcgggcattccggagctccaccctctctaccactacaagagctatgtcggaggcatcctgctgctctcctagcagcactaccgggtgtgcaatgggatgtccaaccgcttctggggctggggccgcgaggacgacgagttctaccggcgcattaagggagctgggctccagcttttccgcccctcgggaatcacaactgggtacaagacatttcgccaactgcacgacccatcctggcggaagagggaccagaagcgcatcgcagctcaaaaacaggagcagttcaaggtggacagggagggaggcctgaacactgtgaagtaccatgtggcttcccgcactgccctgtctgtgggcggggccccctgcactgtcctcaacatcatgttggactgtgacaagaccgccacaccctggtgcacattcagctgagn

SEQ ID NO: 31535 - DNA, 473 bp, Homo sapiens
  misc_feature (1)...(473): n = A,T,C or G
atcgagnccctattgtagaccactagtccangncgtggaattcgcaccactgtactccagcctgggcgacagagagagattccgtctcgacaacaacaacatcaacaacaacaaactggaaaataaaagttaattaaaactgaaggaaaattctcaacctgaaatgaaaaagaaatcttggctgacgtaatctaagtgtatgccaaaatttgttcattatgatcttttagtacaaagcaattttgggccaggtgcggtggctcatgcctgtaatcccagcactttgggaggctgaggcggacggatcatctgagtcaggagttaagagaccagcctggccaacatggtgaaaccctgtctctactaaaaatacaaaattagctgggcatgtgctgcatatctgtaatcccagctacttgagaggctgaggcaggagaatcacttgaacccgggaggtggaggttgcaatgaat

SEQ ID NO: 31536 - DNA, 499 bp, Homo sapiens
  misc_feature (1)...(499): n = A,T,C or G
ggatgtccnnnaggccccccatgataccctagctagaggccgtaannccangacagaccgctccgaggtctatggccccatgaagaactacctgaagaagcaggncacacccctcttcattcacttcagaaataataccaacaactggagggagatcccacataacctgatggaccagtacagcgaggttaatgccatcagcaccgcctgctccaacggagttccagagtgtgaggagatggtctctggccttttcaagcagtggatggagaaccccaataataacccgatccaccccaacctgcggtccaccgtctactgcaacgctatctcccaaggcggggaggaggagtgggacttcgcctgggagcagttccgaaatgccacactggtcaatgaggctgacaagctccgggcagccctggcctgcaacaaagagttgtggatcctgaacaggtacctgagctacaccctgaacccggacttaatccggaagcaa

SEQ ID NO: 31537 - DNA, 491 bp, Homo sapiens
  misc_feature (1)...(491): n = A,T,C or G
gcccgcccaatagaaaccntcactgatatcctacgcagngncgnggaattccatgtttgaccgctccgaggtctatggccccatgaagaactacctgtataagcaggtcacacccctcttcattcacttcagaaataataccaacaactggagggagatcccagaaaacctgatggaccagtacagcgaggttaatgccatcagcaccgcctgctccaacggagttccagagtgtgaggagatggtctctggccttttcaagcagtggatggagaaccccaataataacccgatccaccccaacctgcggtccaccgtctactgcaacgctatcgcccagggcggggaggaggagtgggacttcgcctgggagcagttccgaaatgccacactggtcaatgaggctgacaagctccgggcagccctggcctgcagcaaagagttgtggatcctgaacaggtacctgagctacaccctgaacccggacttan

SEQ ID NO: 31538 - DNA, 493 bp, Homo sapiens
  misc_feature (1)...(493): n = A,T,C or G
agggtaccnagggaacgnnnatcgagncccctattgtagatcactatccatgtggtggaattctgatgatatgacacaatgtatgtattccctgtgcatttttactgtagctgccacttcattgtactggtgtagacctcaatgtgttactgaaacgaaagacctaaaattctttaattttgaatcagatataatggagatacaacaaagtatacagatcttgtgttcagttcagtgagttttgacaatcgtatatacccatgtaaccaccaattaaaacaagatgtagggctgggcgtggtggctcatgcctgtggtcctagcactttgggaggccgaggcaggcagaacacttgaggtcaggagttcgattccggcctggccggcatggtgcaagccccgtccctactaaaaatgcaaagattagctgggcatggtgccacatgcctgtggtcccagctgcttgggagtctgaggctggagaatcacttgg

SEQ ID NO: 31539 - DNA, 491 bp, Homo sapiens
  misc_feature (1)...(491): n = A,T,C or G
ccactggagagcactcgaangncncnnactgagaccataggaagngcggggaantctggccgaccgagtgccggtcataagccccccccggtggggggcagctggtgtgcggatcgcggcgggagagaggcgcggtaggaacgggtccccggagccgtgaaccgcgggtacaggtgtcctgtctgcgctctctgccaagccggcttgcttcctgatctgttgctagggccgctggaccccgttgctaaggacccttgagatcgtgagcgcttggagtgtacccctcctttcctggggtagagggtcagtcgagagtagccttcgctaaccttaattgaaactggagtgaaagggaagcaatgcagaaatcagagggctctggaggtacacagttgaaaaacagagcaacaggtaactatgatcaaaggacatcatcaagcacacagttaaaacacaggaatgcagttcagggaagcaaatcctcattgtcn

SEQ ID NO: 31540 - DNA, 479 bp, Homo sapiens
  misc_feature (1)...(479): n = A,T,C or G
cattgacccatcgcagngccncnactgagagcatagaacccccacgnatttttgagagaaagacgcgtgggaaggtgcagagttggcaggagggacagagggctttacctaacgctcacgcacggaggactcctgtgtgcagaaagggatgcgcaccaacagacagggccaagaatctccatgctgtctccactcaaaacctcagggctgtgactcccgctttctcagaagggatgcgcaggctcaccccttccccctaggaatcaccagggcacccccacccccagctcatctcctttagccatttgacagggaggggccagcagtgagctgcaggcttagaggggtgaccagggcccttcctaactcgaccgcatgtggtttggtggctgccttgggagggaggctgtccgatgctgacattccccttagcatggccctgaccgtggctgtcaggggccacctttgctcaccaggcn

SEQ ID NO: 31541 - DNA, 492 bp, Homo sapiens
  misc_feature (1)...(492): n = A,T,C or G
ccatagagagctctcgaagngncnnnnaactgagaccataggaagngcggggaatttcgccttggtgactgtgccgacgtgaggacgcccaagatggcctatcttgccggcctccacgccaacatcgccgtggccaacatcgtcaactctgtgaagcagcggcctctccaggcctacaagccgggtgcactgacgttcctcctgtccatggggagaaatgacggtgtgggccaaatcagtggcttctatgtgggccggctcatggttcggctgaccaagagccgggacctgttcgtctctacgagctggaaaaccatgaggcagtctccaccttgatggagaggccaggcgggagaactaccgcagcagttctaaaacaacaggaggaaaacacatggaaagaaacccctcgcggagacctgcttccttacagatggaggctcttttggaggagagtgtgaagggcagagggctccctgcgccggcaggacn

SEQ ID NO: 31542 - DNA, 492 bp, Homo sapiens
  misc_feature (1)...(492): n = A,T,C or G
agggcgtgcccctagaataccntcnactagagagccgtaagncaagncctaggagctgntctctgcagaggtccaagtacagaatatggcttttaccatgatttcttcctgggaaaggagaggacaatccggggctcagagctgcctgttttggagcggatttgccaggaacttacagctgctgctcgacccttccggaggctagaggcttcacgggatcagcttcgccagttgttcaaggtgtggcacattggttgacctttgccagggcccccaccttcggcatactggacagattggaggactgaagctgctatcggctgagtatgcccatcgtggtttctccgaggtgaaaactcccacactgttttctacgaagctctgggaacagtcagggcactgggagcattatcaggaagacatgtttgccgtgcagcccccaggctctgacaggcctcccagctcccagagtgacgattctaccaggcatat

SEQ ID NO: 31543 - DNA, 485 bp, Homo sapiens
  misc_feature (1)...(485): n = A,T,C or G
catagagaccatttgannnncnnccactgagaccatagtaacgccnggaatttactgatagcttacgggatttaggatactacattatcaataaactgcaccatgcggactagtcgggggggagcaagacgagaagggcctgcctgtacctcgccgcctttcctttcatggacgcaatggcatggacccatgctggcattctcttaaaacacaaatacagtttcctggtgggatgtgcctcaatctcagatgtcatagctcaggttgtttttgtagccattttgcttcacagtcacctggaatgccgggagcccctgctcatcccgatcctctccttgtacatgggcgcacttgtgcgctgcaccaccctgtgcctgggctactacaagaacattcacgacatcatccctgacagaagtggcccggagctggggggagatgcaacaataagaaagatgctgagcttctggtggcttttgctctaa

SEQ ID NO: 31544 - DNA, 478 bp, Homo sapiens
  misc_feature (1)...(478): n = A,T,C or G
tggagtccaggggtccctnnnnaactgaganaactgcngatcnctcgnagaancnccccagntcgagccgccgcccgaaaggccgggccgtcgtcttaggaggagtcgccgccgccgccacctccgccatggagctgatcaccattgtcgagaagaccgtgtctcccgatcggctggagctggaagcggcgcagaagttcctggagcgtgcggccgtggagaacctgcccactttccttgtggaactgtccagagtgctggcaaatccaggaaacagtcaggttgccagagttgcagctggtctacaaatcaagaactctttgacatctaaagatccagatatcaaggcacaatatcagcagaggtggcttgctattgatgctaatgctcgacgagaagtcaagaactatgttttgcagacattgggtacagaaacttaccggcctagttctgcctcacagtgtgtggctggtattgt

SEQ ID NO: 31545 - DNA, 488 bp, Homo sapiens
  misc_feature (1)...(488): n = A,T,C or G
agggttnnnaggggcnnnnnatcgagaccctatcgaggtgcttgaattcgngggtgatcttgggctctctctcatccgcttcaagctcaaaaaaaatgctgttcagcacctcccccaccctgatgcggtcattgctcaatttttgcaggttcagctcggtgtgcagaatggcgggcagctcagcctgggcgagcaggtcctgcaggtcataagatccttgcagcaccagttggggcatggtcaggtggatggtccggggagacagtttcttcatccagttgagggagttttgctggaaagtgagaccctccaccttgtccaggtcagaggcatagtgaggctggatcagcagcaggcaggcgctctcagtgaagggcacttgagtcaccgagaagttgtcctggatgtcactccagtgctggaaggtgcccatgccagagagcatgggaacagacactgaggtgctgttgtccacccagaactcctgg

SEQ ID NO: 31546 - DNA, 496 bp, Homo sapiens
  misc_feature (1)...(496): n = A,T,C or G
nctcgatcgcagtccgtgtggnggaattcggcagacaagcccagcttcttcactgaccggcgcaagcctttcagaaaactcgatgagaagggctcacttcagtgggaccggatcacccgcttggaaaagggcaagatctatcggcagggaaacctgtttgacttcttacgcttgacggaatggcgtggcccccgcgtgctctacttcggggaccacctctatagtgatctggcggatctcatgctgcggcacggctggcgcacaggcgccatcatccccgagctggagcgtgagatccgcatcatcaacacggagcagtacatgcactcgctgacgtggcagcaggcgctcacggggctgctggagcgcatgcagacctatcaggacgcggagtcgaggcaggtgctggctgcctggatgaaagagcggcaggagctgaggtgcatcaccaaggccctgttcaatgcgcagttcggcagcatcttccgcaccttcc

SEQ ID NO: 31547 - DNA, 464 bp, Homo sapiens
  misc_feature (1)...(464): n = A,T,C or G
gagggttaggacgcccggagcactatcctcccccggcacggactggcccggcctggccagctctcgctgtctctggccagcctgacgccgatgaatgcgggcgactagaatccccaacagtgcggcgtggcctatcagccttgagcctgaaacggagatgggctctggcttcaccacgatgcatactaccaccattgctgaggctgatccacggatgtctggatggccggatggcagaatggagacctccacccccaccataatggacattgtcgtcattgcaagtgtgattgctgctgtggccatcgacctagactccctcctcttcgtcatgctgagctacatgtaccggcacaagggcacgtaccacaccaatgaggccaagggcacggagtttgctgagagtgcagatgcagccctgcagggagaccctgccctccaagatgctggtgatagcagcagan

SEQ ID NO: 31548 - DNA, 531 bp, Homo sapiens
  misc_feature (1)...(531): n = A,T,C or G
cgcttttaaagnnnnnggnnnnnaggnngnnnncggaattgannccctaattgatcnacactcgcgagnnggcgaattcggngggagtggttttctgagttgcagagaccaggtggccagatctacctgttagctcccagtggctgcagcttcagatgacaaagagggtggcactgctgggcaagggtgagccataggtggggtgcttttactcattggacatatgtgtgtaagtccaccatcacaaagacaatcctagtgaggccggggccaacataggccagtcacccctccttgtaaccttgatgacaatcccttgtacttaggtaggtcctttcttgctagactctttgcaaataaaaatgtataatgtgaggaaattgggtgccagtgccacctgggcctgtgggttgtcttgcctgggaggaggaagcaaactaactgaaggaaatggtcctttttccagcccgtgacctcacagccccaaccagaaggtgccaatgaagcagtccccacccccgtggtggaccc

SEQ ID NO: 31549 - DNA, 524 bp, Homo sapiens
  misc_feature (1)...(524): n = A,T,C or G
agtttctnnagggggnnccccggggnnnnnnnnaatcgagcacatatagaagggccgtattccagctgctggggaggctgaagtaggaggatcatttatgcttgggaggtcgaggctgcagtgagtcatgattgtatgactgcactccagcctgggtgacagagcaagaccctgtttcaaaaagaaaaaccctgggaaaagtgaagtatggctgtaagtctcatggttcagtcctagcaagaagcgagaattctgagatcctccagaaagtcgagcagcacccacctccaacctcgggccagtgtcttcaggctttactggggacctgcgagctggcctaatgtggtggcctgcaagccaggccatccctgggcgccacagacgagctccgagccaggtcaggcttcggaggccacaagctcagcctcaggcccatgcactgattgtggcagaggggccactacccaaggtctagctaggcccaagacctagttacccagacagtgagaagcccctggaaggcn

SEQ ID NO: 31550 - DNA, 551 bp, Homo sapiens
  misc_feature (1)...(551): n = A,T,C or G
aaggggnaagcngncccnnnnnnnnaaattgatcatcgatncgcgntgcgcaatncccctgcagatgacttcctgctgtacctggaccctcactactgccagcccactgtggatgtcagccaggccgacttccccctggagtccttccactgcacctcgccccgcaagatggcctttgccaagatggacccaagctgtaccgtgggcttctatgctggagacaggaaggagtttgagacactctgctcagagctgaccagggtcctcagctcctcctcagccacagagcggtaccccatgttcaccctggccgagggccatgctcaggaccacagcctggacgacctctgctcccagctcgcccagcccacactccggctccctcgcacagggcggctcctcagggccaaacgccccagctctgaggactgtgtgtttttataaagggaggggatgaggggaaagatacaacactatttattcttttatttatgtcatgtcgggtgtgggatcttgagctctggcagagatgatggtacttccttgtgtcn

SEQ ID NO: 31551 - DNA, 470 bp, Homo sapiens
  misc_feature (1)...(470): n = A,T,C or G
ntttgatcgacgtcactaggccangccgtggaattctttttctttgtgtttcctccatgtgtagtcctctgttgctaaattctgtttctttttctgttggcactgatatttgaggaaaaaaacagtggaaaaattggtatctaatcctagcaagtagttagatcattatggccaaattacttaacctctctgtatctttaaaatatgggaaaggaggtcgggcgcggtggctcatgcctgtaattctagcactttgggaagccgaggcgggtggattgcctgagctcaggagttcgagaccagactggttagcatggtgaaatcccgtctctactgaaatacgaaaaggtagccgggcgtggcggcatgcgcctgtggtcccagctactcgggaggctgagacaggagaatcgcttgaacccgggaggcggaggttccagtgagctgagatggtgccactgcacttcagn

SEQ ID NO: 31552 - DNA, 498 bp, Homo sapiens
  misc_feature (1)...(498): n = A,T,C or G
aattggcttgagcaccatccgngnggnggaattcagcaggagtgccagctggcaagcggtcctgcagacacagaggtgattgtggccttggctgtatgtggctccatcctcttcctcctcatagtgctgctcctcaccgtcctcttccggatgcaggcccagcctcctggctaccgccacgtcgcagatggggaggaccacgcctgacaaccactcagcccccttccctccacctcctaggggaggtgggctgggccctcgctcctgactgttgctgctccccagcccatggacaggagatcctgggttgggcctccctctgatgaccccagccagatgagcgagtggggctcagcgtggcccatggtgcctgtcactcagcattcccatgcctgatgtttaccaagtgctgtgttggacactggctttctccaaacaggatttgcctcctccacgctccctacacacctgagatgtaaactggcagtcagtgttcaa

SEQ ID NO: 31553 - DNA, 498 bp, Homo sapiens
  misc_feature (1)...(498): n = A,T,C or G
naattgatcagcagtncgtgnggngcaattcggagccccgcctgcttgtcccctccccagatccctcgggctctggagaccttgcgggccccctgtccgtgaccacctgaaacaggtcctggagctgctactgctggcttaggctggttggtggaaaggatccagggctgttgtgaaggccttggggagtccagaagccgcctggcaccttctgggtccagacgctgcccttcagccctgccatttcagccagcctcagcgtcgctgtagaggcaggccgccctttctgccactgtctggctgggctgggcgcggggagtgctggccaacgtgccaggcagggaggacctgaattcctgaacgtggtggtggcagctgttaaggtccacaggttaatgatctccaacgtcacacagaagagaatgtgctgaggtgtgacctccctcaccctgccttggctgcgtggngcaccgtctctccaggactcaccctgccccc

SEQ ID NO: 31554 - DNA, 500 bp, Homo sapiens
  misc_feature (1)...(500): n = A,T,C or G
aattgactcgcaccacagtccangnggnggaattcaccagctgaatggcagccttgcctaatccacctacaacaagaatttcttaagctttcttttatttgcatgagagagccactaccaaggcatgttttgttatgctgaaactgggctgctgcatactgctaaatggcacctctgggattggcctacctggggatttcttggtttgtgaaaacaggagaggagaaatatctcatacaagtgaaaggatactggagagagaaattacccatttctaaaaaaaaaccacactctgtcgtatctgtgttaatgttttctagcatgtactctggtttcaacaaaacacaaatttatatgttaacccagttttcttgccgttctgtaagtgttttattcttagtgtgatttttttccattgggatgtttttgattgaacttgttcattntgttttgcttgggaggaaaataaacaattttactttgtaaaaaaaaaaaaaaaa

SEQ ID NO: 31555 - DNA, 471 bp, Homo sapiens
  misc_feature (1)...(471): n = A,T,C or G
naagactagacgtcgctaggacangccgtggaattctatagattcagtaatttttgcttattggataacatttttacttactgacattatgctaagtcaaataactcagacacagagaatattaaaaacggcatgatctcacttaacgtgtcaaattaaaaatagttgaatatgtagaaacagaatagaatggtggataccagggatgaggagggggaggaaatagggcagtgttggtcagacagtacatacttgcagttacataggatgaataaatgtagctatctgatgtacagtaggagacctgtagttaataatataggacatttgctaagagagtagattgtaggtgctcttaacacacacacagggtaactggaaagtgatggatgcttgcagtaatcattgtgtgtattaaaacgttatcttgcatgttaaatatacgtaataaaaataaatactatttactat

SEQ ID NO: 31556 - DNA, 498 bp, Homo sapiens
  misc_feature (1)...(498): n = A,T,C or G
aggcgcnnnaggggcccgaactgataccccctagntgacctncgnaagagcggnggaattcaaactggacaatgtgctgccggaccgggatggccacatcaagattgccgactttgggatgtgcagagagaacatattcggggagagccgggccagtaccttctgcggcacccctgactatatcggccctgagatcctacagggcctgaagtacacattctctgtggactggtggtctttcagcgtccttctgtactagatgctcattgggcagtcccccttccatggtgatgatgaggatgaactcttcgagtccatccgtgtggacacgccacattatccccgctggatcaccaacgagtccaaggacatcctggagaagctctttgaaaggcaaccaaccaaaaggctgggagtgaccgtaaacatcaaaatccaccccttcttcgagaccatacactggactctgctggaaaagcggaggttggagccaccctt

SEQ ID NO: 31557 - DNA, 488 bp, Homo sapiens
  misc_feature (1)...(488): n = A,T,C or G
gggccnnagggcccccctaatanacttagggaccctcggancagcnaaagaggnnnccagccagcaggccgctatccaggcctatgaggacatggtgaggcaggtccagcgctcacggttcatcgtggtggtgggaggaggctcggctggagtggagatggcagcatacattaaaacagaatatcctgagaaagaggtcactctcattcactcccaagtggccctggctgacaaggagctcctgccctccgtccggcaggaagtgaaggagatcctcctccggaagggcgtgcagctgctgctgagtgagcgggtgagcaatctggaggagctgcctctcaatgagtatcgagagtacatcatagtgcagacggactaaggcacagaggtggccaccaacctggtgattctctgcaccggcatcaagatcaacagctcctgctaccgcaaagcatttgagagcagactagccagcagtggtgctctgg

SEQ ID NO: 31558 - DNA, 505 bp, Homo sapiens
  misc_feature (1)...(505): n = A,T,C or G
ggatgtccnnnnnagcncncccactgagaccctccactgagatcgtaagccangncgnggaattctcgcctgcacctggcgttcaagcggcaggtgcccacggagcaggcccatgcctacgccgatcgcctgggcgtgaccttctttgaggtcagccctctgtgcaatttcaacatcacagagtcgttcacggagctggccaggatcgtgctgctgcggcatgggatggaccggctctggcggccgagcaaggtgctgagcttgcaagacctctgctgccgggcggtcgtgtcctgcacgccggtgcacctggtggacaagctcccgctccccattgccttaagaagccacctcaagtccttctcgatggccaacggcctgaatgccaggatgatgcacggcggttcctactccctcaccaccagctccacccacaaaaggagcagcctccgcaaagtgaagctcgtccgccccccccagagcccccccaaaaactgcaccagaa

SEQ ID NO: 31559 - DNA, 491 bp, Homo sapiens
  misc_feature (1)...(491): n = A,T,C or G
agggctgcccnctaatgatccgtgagcatcgcagaancncccnncttgctcttgccctcctgacccggtcaccaccgagccaccaacccacatattcaatatgattgtaaatgccaagaaagatgttgtgaacacaaagatgtttgaggagctcaagagccgtctggacaccctggcccaggaggtggccctgctgaaggagcagcaggccctgcagacggtctgcctgaaggggaccaaggtgcacatgaaatgctttctggccttcacccagacgaagaccttccacgaggccagcgaggactgcatctcgcgcgggggcaccctgagcacccctcagactggctcggagaacgacgccctgtatgagtacctgcgccagagcgtgggcaacgaggccgagatctggctgggcctcaacgacatggcggccgagggcacctgggtggacatgaccggcgcccgcattgactacaagaactgggagactg

SEQ ID NO: 31560 - DNA, 471 bp, Homo sapiens
  misc_feature (1)...(471): n = A,T,C or G
natcgatagcgctcggtagngcgggcaattcctgaagggtgccatcctcacgaccatgcttgtctccaggaacttctcagctgccaaaagcctattgaacaagaagtcggatggcggtgtcaagccacagagcaacaacaaaaacagtctcgtaagcccagcccaagagcccgcgcccttgcagacggccatggagccacaaaccactgtggtacacaacgctacagatgggatcaagggctccacagagagctgcaacaccaccacagaagatgaggacctcaaagctgccccgctccgcactgggaatggcagctcggtgcctgaaggacggagctcccgggacagaacagccccctctgcaggcatgcagccccagccttctctctgctcctcagccatgcgaaaacaggagatcattaagattacagaacagctgattgaagccatcaacaatggggactntgaggg

SEQ ID NO: 31561 - DNA, 446 bp, Homo sapiens
  misc_feature (1)...(446): n = A,T,C or G
gctggaggaaccaggcctttcccgcttttgcctggctgcagggttcggctccgcccctgccccccagccctcgtgtgtccacaccgcagtgcctctgcccctcgggggactggacacacatcctgccagaggcgctacgaagctttgcccagatgaagccaggtgggctccgcgttcactcccactctcccgaggggtgctggcctccccagggtttgccttcttacggatttagacgaggttcgaggctcacctatcagggcagctctcaggattgtcattttcctctttgcctgtgggtttaacttttgtatttttttaatcacaagtttgatacaaaatgtttttatcgtactctttggagatgcccattctacttttgaatttagcttttactaattcgcatctggaagctcagcaagtgcacaagccttactttggttacn

SEQ ID NO: 31562 - DNA, 444 bp, Homo sapiens
  misc_feature (1)...(444): n = A,T,C or G
gacaccagccgtgtgcagcctatcaagctggccagggtcaccaaggtcctgggcaggaccggttctcagggacagtgcacgcaggtgcgcgtggaattcatggacgacacgagccgatccatcatccgcaatgtaaaaggccccgtgcgcgagggcgacgtgctcacccttttggagtcagagcgagaagcccggaggttgcgctgagcttggctgctcgctgggtcttggatgtcgggttcgaccacttggccgatgggaatggtctgtcacagtctgctccttttttttgtccgccacacgtaactgagatgctcctttaaataaagcgtttgtgtttcaagttnnnnnnnnnnnnnnnnnnnnnnnnnnnnnnnnnnnnnnnnnnnnnnnnnnnnnnnnnnnnnnnnnnnnnnnnnnnnnnnnnnnnnntnnatcntctta

SEQ ID NO: 31563 - DNA, 490 bp, Homo sapiens
  misc_feature (1)...(490): n = A,T,C or G
tggcccccagggcccccctgagaccnccagggaccttcggaagngcgnggaattccggatcaggtctctggaaggaaggagtctgttttctcccccgtcctcgctgctgctgatggtggggctggtctccctgggagaatgtagcaagtcacttaactttgttgaaagctttctgtctccttgttgggaaaataatgaggttggattaaattcctggttttcaaacttgctttgttgttgttgtttttaagcagcaaaatcccctttttaaatgacatttttatggggatactagtttacaaaataaattgggaactctcctgattggccctgggtgggagaggtgaagagactagaaccctctgcagccgtcctgcgctcctgcagcaatagcaggcaactctgagaaacagggttgagaaccaagaggttagatgacctttgtctctgggcactctgtgggttccgaatggaatgacaggcctcagaa

SEQ ID NO: 31564 - DNA, 492 bp, Homo sapiens
  misc_feature (1)...(492): n = A,T,C or G
agggccccgaggnccccaatgagaccacctagngatcgtcggaangncagccctcttaaccgctggaaatagaggcgcacctcgtgcagtgcccacaacacgcggcagtccacaccgctgcgtggtcttagggacgtatagctgtaagagctatgacagggtgcggagagtgataaatacaagctgtcacatgtctttgtggcctgggcctctgacccccaacgactcttgggaaatgtaggtttagttctatgtgccgagtgtgtgtattctgagccatttctcccttctatataaaagccagctgaagatgagtgtggtaaaaccccacacgccatgaaagctgccatggacctggagaatatgctgaaccacgcccttttggatcttcatgccctgggttctgcccgcacggacccccatgtacgaacccgctgcatccatggctacccaaccatacccctcaagcctatgctccctttgggcaaatan

SEQ ID NO: 31565 - DNA, 468 bp, Homo sapiens
  misc_feature (1)...(468): n = A,T,C or G
nttcgtagacctcgagnaccgcgtggcggaagtccagaataataagctgaatagaatctgaccattggctttcacctggccaggaccttctatgtagctctccttttgtggcccatgtgctgcatcctctgccctcagtgtgcaactggtccccaacgcaatgtgtgtttgtcaaaccatggaagtggggcagtatggcaagaatgcaagtcgggctggagaccggggagtcctcctggagcccttcatccaccaagtaggcggacacagcagcatgatgcgttacgacgatcacactgtgtgcaagcccctcatctcccgggaacagcgcttttacgagtccctccctcccgaaatgaaggagttcacccctgaatacaaaggcgtggtatctgtctgttttgagggggacagtgatggttacatcaacttagtggcctatccttatgtggaaagtgagactgtggn

SEQ ID NO: 31566 - DNA, 479 bp, Homo sapiens
  misc_feature (1)...(479): n = A,T,C or G
aattgaactcgtaagcatatccangtggtggaattcgtcccacggccgccgagccagattagagtggtctccaggccctagtgggaaggggctccgttcttctgggcgtacacaggagctgcatggtcctgcccgctgacgcccggacgggacgctccacaccctgtgtgggggcggaggggacgcggagggtgcggcctgggcgcgggtgggctatagcctggagaccgacgggagcccgactttctggcgctttgccctttggggagcggagccaaggaacagagccaacctctctccacaagccagggaccctacgacccaccgccgcaggccagaaccagcagctgatttagataccatcaagacacctactaccttatcatgagccagatgctgtggaagagattctgggagagtcctgaggaccccccagttgcagccatgtcaagactgatgctgaggaggacccctactgg

SEQ ID NO: 31567 - DNA, 470 bp, Homo sapiens
  misc_feature (1)...(470): n = A,T,C or G
natcgaagatcctgagacccgtggcagngcgcnggaattcgtctttgcttgtgttcacctgctagcaaactggagtgattccctccgcaatgtgggtgtttgtcattgtcgactgactctgtcatcacccttatgatggcctgaatggacggatccctttgcgaaattctcaggagggggacctgggccaagggcttggccagcattctgctggcaactccaaggccctgggtgggcttctggaatgagcatgctactgaatcaccaaaggcacgccccacctctctgaagatcttcctatccttttctgggggaatggggtcgatgagagcaacctcctagggtcgttgtgagaattaaatgagataaaagaggcctcatgcaggatctggcatagaggaggtgatcatcacatgtttgttgaaaaggtttgacagggcagtcccttcccacccctcttgcttgtctag

SEQ ID NO: 31568 - DNA, 473 bp, Homo sapiens
  misc_feature (1)...(473): n = A,T,C or G
nttcgaganatcgagnaccactaggcagagtggaggaattccctgtcttcgcagaggagtcctcgcgtgaaataagcgggttttgaaaacaaaaaaaagaaggagtggaagagggggccaggatccaggcctccatccccacagaagtgaagctacagctgggaggtctcctcccaccccaaccgtcaccctgggtcccgactgcccacctcctcctcctccccctccccccaacaacaacaacaacaacaactccaagcacaccggccataagagtgcgtgtgtccccaacatgaccgaacgaagaagggacgagctctctgaagagatcaacaacttaagagagaaggtcatgaagcagtcggaggagaacaacaacctgcagagccaggtgcagaagctcacagaggagaacaccacccttcgagagcaagtggaacccacccctgaggatgaggatgatgacatcgagn

SEQ ID NO: 31569 - DNA, 487 bp, Homo sapiens
  misc_feature (1)...(487): n = A,T,C or G
aggccnggagggcccccctggacctttgagagtcctggaancncnggaaaattacttcgcgcttgatggagaaggacaaggccagagattgcctgattcctatggggataacctctgagaatgtggctgagcggtttggcatttcacgggagaagcaggatacctttgccctggcttcccagcagaaggcagcaagagcccagagcaagggctgtttccaagctgagattgtgcctgtgaccaccacggtccatgatgacaagggcaccaagaggagcatcactgtgacccaggatgagggtatccgccccagcaccaccatggagggcctggccaaactgaagcctgccttcaagaaagatggttctaccacagctggaaactctagccaggtgagtgatggggcagctgccatcctgctggcccggaggtccaaggcagaagagttgggccttcccatccttgggggcctgaggtcttatgcagg

SEQ ID NO: 31570 - DNA, 471 bp, Homo sapiens
  misc_feature (1)...(471): n = A,T,C or G
ntttgattgacgtccctaggacanngcgnggaattcgccagggcctgcacgcccccaccagccctgagcatgcagaggcccggcagagcctgttcctggagctcctgcacatcctctccgtagactcggagggcttcccacggcgggcggtcatgcaagtcttcactgagtggctgcgggacggccacgccgacgcggcccaggacacggagcagttcgtggccactgtgctgcaggcggcgagccgggacctggactgggaggtccgcgcccagggcctggagctggccctcgtgttcctgggccagactttggggccgccgcgtacccactgcccctatgccgtggccctacccgaggtggccccagcccagccactcaccgaggcactgagggctctctgccacgtggggctctttgacttcgccttttgtgccttgtttgactgcgaccgccctgtggcgcanaagg

SEQ ID NO: 31571 - DNA, 485 bp, Homo sapiens
  misc_feature (1)...(485): n = A,T,C or G
gggccgnaggncccctctagtgntctaagtngnctggcaancncggcncactnntcaagggtactcagggggtggtgggagactgagcaggcaatgtagcagtcttggattcctttcacacttcactggggacaggcctcagcatgtgcccacccctgacccccacctcatgctgggagatcctaacttcaacagcctctgggatctccagtcttgccctggcccagccctcctaatgcccaccaccccgctcctcagggaaacagtactgggagtaccagttccagcaccagcccagtcaggaggagtgtgaaggcagctccctgtcggctgtgtttgaacactttgccatgatgcagcgggacagctgggaggacatcttcgagcttctcttctggggcagaacctctgctggtaccagacagccccagttcattagccgggactggcacggtgtgccagggcaagtggacgcaatcatggcn

SEQ ID NO: 31572 - DNA, 486 bp, Homo sapiens
  misc_feature (1)...(486): n = A,T,C or G
cacgggctccaactgataccgctcgnagngngcnggaattctgcgggacgtcttcgcggggcgggaggctcgcgccgcagccagcgccatgcaaaactacaagtacgacaaagcgatcgtcccggagagcaagaacggcggcagcccggcgctcaacaacaacccgaggaggagcggcagcaagcgggtgctgctcatctgcctcgacctcttctgcctcttcatggcgggcctccccttcctcatcatcgagacaagcaccatcaagccttaccaccgagggttttactgcaatgatgagagcatcaagtacccactgaaaactggtgagacaataaatgacgctgtgctctgtgccgtggggatcgtcattgccatcctcgcgatcatcacggnggaattctaccggatctattacctgaagaagtcgcggtcgacgattcagaacccctacgtggcagcactctataagcaagtgggctgctt

SEQ ID NO: 31573 - DNA, 479 bp, Homo sapiens
  misc_feature (1)...(479): n = A,T,C or G
gcggggggnnnnnnttcgagatctctagatccataggccgagtggcggaattcattccgcttcttcagcatggcccgtgacctcctctcctggatggagagcatcatccggcagatcgagacccaggagaggcccagggatgtctcctctgtggaactgctcatgaagtatcaccagggcatcaatgcagagattgaaacccggagcaagaacttcagtgcctgcctggagcttggcgagtccctgctgcagcggcagcaccaggcctcagaggagatccgcgagaaactgcagcaggtgatgtccaggaggaaagagatgaatgagaagtgggaagcccgctgggagcggctccgcatgttgctggaggtgtgccagttctcgagggatgcctctgtggctgaggcgtggctgattgcccaggagccctacctggccagcggggactttggacacacagtggacagtgtggagaagct

SEQ ID NO: 31574 - DNA, 489 bp, Homo sapiens
  misc_feature (1)...(489): n = A,T,C or G
tgtgtccaggagcccnaactgagacccattgatggcgtggaaancgcaccacgccgtggatctgatccagaaaggctacatgcggatccagcagtttcggaaggcggatggtttctatgcggcttggttgtcacggggcagcagcacctggctcacagcctttgtgttgaaggtcctgagtttggcccaggagcaggtaggaggctcgcctgagaaactgcaggagacatctaactggcttctgtcccagcagcaggctgacggctcgttccaggacctctctccagtgatacataggagcatgcaggggggtttggtgggcaatgatgagactgtggcactcacagcctttgtgaccatcgcccttcatcatgggctggccgtcttccaggatgagggtgcagagccattgaagcagagagtggaagcctccatctcanaggcaaactcatttttgggggagaaagcaagtgctgggctcctgggtgc

SEQ ID NO: 31575 - DNA, 487 bp, Homo sapiens
  misc_feature (1)...(487): n = A,T,C or G
ggctcgagtccatagnnagngnggtcgtagaccatagtcagtgtggtggaattcacggaacaattggctcccacagcaccacctgagctaacccctgtggtccaggactgctaccatggtgatggacagagctaccgaggcacatcctccaccaccaccacaggaaagaagtgtcagtcttggtcatctatgacaccacaccggcaccagaagaccccagaaaactacccaaatgctggcctgacaatgaactactgcaggaatccagatgccgataaaggcccctggtgttttaccacagaccccagcgtcaggtgggagtactgcaacctgaaaaaatgctcaggaacagaagcgagtgttgtagcacctccgcctgttgtcctgcttccagatgtatagactccttccgaagaagactgtatgtttgggaatgggaaaggataccgaggcaagagggcgaccactgttactgggacgccatgcc

SEQ ID NO: 31576 - DNA, 464 bp, Homo sapiens
  misc_feature (1)...(464): n = A,T,C or G
atcgagaatcgtagaccataggcagagcggnggaattcagcggggatcagcccctgtgctgggacccctagctcttgacactcggagcctgcatccccctaagccaagactgtgcgcacgcagcacgtgctgaagccagacgaggacagcatgagagttcccctactcttcccccaggcaactagatgggccacttctctctccctaggggtttcctcccatattggatcacgataaaaactgcacagaaagtccgcgctcactttcttgcatggttacagaacacaggccccagaccaggaaggcattctgctaaagaaggggacccgaaacctcagctaccagcgccgatggttcatcctccgaggaaacctgctcttctacctagaacactagaccgaccatgcacccctgggcctcatcctgttagagaactgccaggtggaaccacaccttaaggctgc

SEQ ID NO: 31577 - DNA, 479 bp, Homo sapiens
  misc_feature (1)...(479): n = A,T,C or G
ggtttgagtccctagtccatgtggtggaattcgctcgtagagcagccacgcgctgaagggcacagcagacagcgtgcatgggctgagaggggccgtgggcctggctctgctgcttccttaggtggagttttcagtgactgcagaactctgcacagctgcttttcattctcacgtccgcccccgcccaatctttgaaactaactttgattattccctcctgggtagctctgtcggtgctgtgtaagtttggttttcaattggttctcagcacccagggggtgaccacctcaaccccatctctactatgccaggggctcatcccgctcacccagcctcgccactgttctctcgtgtgagcctcacacggcaggcccggttccatgcccctgcttcccccttgctgggaacgctgtcctcaggctcccctgcctgctctttctttagctntcaccttctccagggccttctgttctgtccag

SEQ ID NO: 31578 - DNA, 488 bp, Homo sapiens
  misc_feature (1)...(488): n = A,T,C or G
ggtttgagtccctagtccangnggtcgagatccctagtccatgtggtggaattcgcctttcttcctggtcaacttctatattgtggccctcccactggcagttggcttaggggtcttgctggtggctgctgttggcaaccagacctcagactttaagaacactctggggtcagcatttctcacttcacctatcttctatggccgccccatagccatactgcccattagcgtggccgccagcattacagctcagaggcatcgccgctacaaagctttggtggcatcagagccgctcagtgtgcggctctatcgtctgggcttggcttaccttgctttcacaggcccactggcatacagtgccctctgcaacacagctgccaccctcagctatgtggcagaaacctttggctccttcttgaattggttcagcttcttcccccttcttggccgcctcatggagtttgtcctccttctgccttaccggatct

SEQ ID NO: 31579 - DNA, 458 bp, Homo sapiens
  misc_feature (1)...(458): n = A,T,C or G
atcgagattcgtagnccagtgggggaattcctgagctcttagcaacaggggtccgggaccctgttcaagaacgccgagcgaatgctacgggtgcgcagcctggacaagctggaccagggccgtctagtggacctggtcaacgccagcttcggcaagaagctcagggacgactacctggcctcgctgcgcccgcggctgcactccatctacgtctccgaggggtacaacgccgccgccattctgaccatggagcccgtcctggggggcaccccgtacctggacaaatttgtggtgagctccagccgccagggccaaggctccggccagatgctgtgggagtgcctgcggcgggaccttcagacacttttctggcgctcccgggtcaccaaccccatcaatccctggtacttcaaacacagtgatggcagcttctccaacaagcagtggatcttcttctg

SEQ ID NO: 31580 - DNA, 490 bp, Homo sapiens
  misc_feature (1)...(490): n = A,T,C or G
gggtcgagaccantgnnagngnggtcgtagaccctantcagtgtggtggaattcgaatcgtttactttggaaactaggctcctccctgctcccttttactgaggctcctttatgatttgtcaaggacacgaacactattttccaagcctgagaattttagcaaagagaatgggtcatatattattaacagacccaattcaggagccaggaaagttctgttttattcccagatctgacttaggtgatcttggaataaggtgtggagaaggtacctggaaagggggctacacttacatagggcaggacggaagcatgagaaaaccccgtgattctgcagtatccttgtaaagcctggctattgttcaagatcactggaagaaaaccagagcgcacaggaggcctcgttgccctcagatataaatagccaacgttaccaacataataaaggctctggtatcatagatcatagccagtaataggttcttagccn

SEQ ID NO: 31581 - DNA, 461 bp, Homo sapiens
  misc_feature (1)...(461): n = A,T,C or G
attgaaaactgatgaccctaggcagngtggtggaattccaggagaggttgtggtgctagtttatctaagccatccagtgccatcctcgtcgctgcagtgacacacgctctcgccgccgccatgactgagcagatgacccttcgtggcaccctcaagggccacaacggctgggtaacccagatcgctactaccccgcagttcccggacatgatcctctccgcctctcgagataagaccatcatcatgtggaaactgaccagggatgagaccaactatggaattccacagcgtgctctgcggggtcactcccactttgttagtgatgtggttatctcctcagatggccagtttgccctctcaggctcctgggatggaaccctgcgcctctgggatctcacaacgggcaccaccacgaggcgatttgtgggccataccaaggatgtgctgagtgtggccttctn

SEQ ID NO: 31582 - DNA, 481 bp, Homo sapiens
  misc_feature (1)...(481): n = A,T,C or G
tttgagtccctagtccgtgtggtggaagtccgtagcctcacgctggcaagggggcagggcatggagatgggcctcagccctgctgctcccttcctgccaaggggctgggctgaggctggatctcagctgacccagctccaagcccagcccatgcttgagggggtgagtagccttggcctctctggtgttgcttcctcatctctccagctgggacacgcccaggctgtcaggtcactggtgaggggctccctggggttgggtcagcctcacctgtccatccgggtgtcctgccaaaggtcccatcagctgcaggctctgcctgccctgtgtgtgtcctgacgcaagagggggctctctggaaggggtgtgggcagcacagccttcccaggaagcacatgggtgaggactgccccctgtgcccacacagcacctgaccactgatgtcatggngcccctctccagacctgggtatgtttggaag

SEQ ID NO: 31583 - DNA, 460 bp, Homo sapiens
  misc_feature (1)...(460): n = A,T,C or G
natctgagacctctannccctgtggnggaattcggtaacggctcggaagcctaggaggctgggccggagggaggcggaggaaccggtgttcgccgccgccgctgcttcagcttattccttgtggcctctgcgggtcctgcctcagccatgatgatccacggcttccagagcagccaccgggatttctgcttcgggccctggaagctgacggcgtccaagacccacatcatgaagtcggcggatgtggagaaattagccgatgaattacatatgccatctctccctgaaatgatgtttggagacaacgttttaagaatccagcatgggtctggctttggaattgagttcaatgctacagatgcgttaagatgtgtaaacaactaccaaggaatgcttaaagtggcctgtgctgaagagtggcaagaaagcaggacggagggtgaacactccaaagaggtta

SEQ ID NO: 31584 - DNA, 461 bp, Homo sapiens
  misc_feature (1)...(461): n = A,T,C or G
caatgtcggtatcggantancgataccctccggaagagccccgaacactgttcccagccccgcctgagatcccatcttgggcaggtcggattcccccagggattccttcaggagtgcccaggcgagcaccttcatcggctcccgcacgacctttcttttgagcttcgggggaggcccctcccacctgtctggctgccccctcgggggccgggctgtcctggctggtgtccctgagccccaatcagcaggctcttgtgattttctgaccataatttattgactccaatgcccaggccacaccaccctttgttataggaggcttctggctagactttggccgggccatccctcatgcctgtgtggggcccctgcaagagaggggccggggcaggtggtctttcaggcccccttcctggcattctggtaccagacctcaacctggcttggagggcccaggtttc

SEQ ID NO: 31585 - DNA, 535 bp, Homo sapiens
  misc_feature (1)...(535): n = A,T,C or G
gcgaaanatgnncgnnncccgcncgcccccnnnnaatcgagccccgatcggagngccntaatncggacgacgctcggtcccacgtgtccccggtactcgccggccggagcccccggcttcccggggccgggggaccttagcggcacccacacacagcctactttccaagcggagccatgtctggtaacggcaatgcggctgcaacggcggaagaaaacagcccaaagatgagagtgattcgcgtgggtacccgcaagagccagcttgctcgcatacagacggacagtgtggtggcaacattgaaagcctcgtaccctggcctgcagtttgaaatcattgctatgtccaccacaggggacaagattcttgatactgcactctctaagattggagagaaaagcctgtttaccaaggagcttgaacatgccctggagaagaatgaagtggacctggttgttcactccttgaaggacctgcccactgtgcttcctcctggcttcaccatcggagccatctgcaagcgggaaaaccctcn

SEQ ID NO: 31586 - DNA, 464 bp, Homo sapiens
  misc_feature (1)...(464): n = A,T,C or G
natcgagaatcgtatcncctgtggnggaattccgccacccctgggacggtcaccacccaagccccgggctcttacccagcctggcggtcacgctgcctcctctacccacagagccccgtcctgctggcctccctgggggtggggctggtcactctgctcggcctggctgtgggctcctacttggttcggaggtcccgccggcctcaggtcactctcctggaccccagtgaaaagtacctgctacgactgctagacaagacggtaagttggggaagaaagggccagggtgaaggaggggaccagagtgctcctggcatgtagggtacagcacccacggtggttgggatgtccaagggacgtggcagcgccaggcgcgcttggtgaaacacttgtgtcctccaccctccagactgtgagccacaacaccaagaggttccgctttgccctgcccaccgcccaccaca

SEQ ID NO: 31587 - DNA, 479 bp, Homo sapiens
  misc_feature (1)...(479): n = A,T,C or G
ggcgctacctttgagaccctatttgatgaccggtaaancgctgcggccaagggacaagagatcacatggagcacaaattcgggtaggatggagcctgtgtggccctcggaggactgaagaacgagggctgacagccagcctggaagaccgcttggcagcccttctggccacggctgtttcttctttgtgcttcccgtgtgcctccccagtagccctcacctgcataccaacccctcctttacccacgttggggctggcataagctgcttccctgagaggacatgaggggggggcggtcctcgtaccctctcccaccctggtgtttgggcacctgcgtgggatgcacacggatgacagaatcaaggcgccaggatgggcactctgccctggatacaggctctaccctcctcccccaggacctgcctagtgccagtttggtagtccccctttctggccccttggagcccacacacgtttca

SEQ ID NO: 31588 - DNA, 467 bp, Homo sapiens
gccctcgctttgagaccatagtcatagaggagcaattcgtcatccccgcagccaaggatgtcaaggccgctgctaatcagatgcgcaacttcctggttcgagcctcctgccgccttcgcttggaacctgggaaagaatatttgatcatgggtctggatggggccacctatgacctcgagggacagtgagtcatctggtcccctcagtctcttgtcctccccatgcctcgccacctaggccttgcccctcagaagccagatgcctgtgctctccgtttccacctgccatcctcccgagccctgctgactgcccctttgccccctgcagcccccagtacctgctggactcgaatagctggatcgaggagatgccctctgaacgcctgtgccggagcacccgccagcgggcagcctgtgcccagctcaacgacttcctccaggagtatggcactcaggggtgccaggtgg

SEQ ID NO: 31589 - DNA, 500 bp, Homo sapiens
  misc_feature (1)...(500): n = A,T,C or G
nattgagncccatcgatcactgtccgngnggngcaattcctaagcgttgtggatcaagaaaaagttgacaaatttatgattgagctagatgggaccgagaataagtccaagtttggggccaatgccatcctgggcgtgtccttggccgtgtgtaaggcgggagcagctgagaagggggtccccctgtaccgccacatcgcagatctcgctgggaaccctgacctcatactcccagtgccagccttcaatgtgatcaacgggggctcccatgctggaaacaagctggccatgcaggagttcatgattctgcctgtgggagccagctccttcaaggaagccatgcgcattggcgccgaggtctaccaccacctcaagggggtcatcaaggccaagtatgggaaggatgccaccaatgtgggtgatgaaggtggcttcgcacccaacatcctggagaacaatgaggccctggagctgctgaagacggccatccaggcggctgg

SEQ ID NO: 31590 - DNA, 488 bp, Homo sapiens
  misc_feature (1)...(488): n = A,T,C or G
ggccgttccatattgagaccctnaccgtagagcctaggccagngcgcggaantcggggaagtggggaaccgaggggcaaccaggggaagatggggtgctggaggagagcttgtgggagccaaggagcaccttggacatctggagtctggcaggagtgatgacgggtggaggggctagctcgaggcagggctggtggggcctgaggccagtgaggagtgtggagtaggtgcccaggcatcgtgcagacagggcgacatcagctggggacgatgggcctgagctagggctggaaagaagggggagccaggcattcatcccggtcacttttggttacaggacgttgagctggaaaaaaaaaaaaaaaaaaaaaaaaaaaaaaaaaaaaaaaaaaaataaaaaaaaaaaaaaaaaaaaaaaaaaaaaaaaaaaaaaaanggggcccttttattaagagggccccttaaaaccctcgtttacacccttgttgt

SEQ ID NO: 31591 - DNA, 472 bp, Homo sapiens
  misc_feature (1)...(472): n = A,T,C or G
cgccggcccattgaaacctttaagatgatctcngaaanccnccnnnnnnnannaangnatangtcgcacgcggtggtgagcgagcccgtgtctgtcctgaattccgtcactgcctacacgcccgagggctcggggattctcatgcccgcgtacactcgcaacctgcaccacgagctggagctgggcgtggtgatgggcaagcgctgccgcgcagtccccgaggctgcggccatggactacgtgggcggctatgccctgtgcctggatatgaccgcccgggacgtgcaggacgagtgcaagaagaaggggctgccctggactctggcgaagagcttcacggcgtcctgcccggtcagcgcgttcgtgcccaaggagaagatccctgaccctcacaagctgaagctctggctcaaggtcaacggcgaactcagacaggagggtgagacatcctccatgattttttcattccctn

SEQ ID NO: 31592 - DNA, 463 bp, Homo sapiens
  misc_feature (1)...(463): n = A,T,C or G
ctcgatcccctnnnttcgtagacactagtccatgtggtggaattcctgtcatattaccacctggtccccttcgagacagacatttgggactgaacctctctatcaggcctcccccgcctcagctgttcactgccagctctgatgctgtccactgtgctggcccccatggtcacagctgctgacccagctctggaactcccagacgtcccaggccccactgacgccaggaggcctgggtgtcctgcaagtggagcagcaggggctcctagtgggccaggctgaccgcagagtctccagcaagctgaggtcacagccggaggccacagggcctgtgttctgagggtcttcactccctgcttggtgcccacagggctgcgcactgccagggcagggacagttcctgtggggctcgctctcactgctactgcttcctgggaggtgcatccctcttggtgaagtggcn

SEQ ID NO: 31593 - DNA, 465 bp, Homo sapiens
  misc_feature (1)...(465): n = A,T,C or G
nactgagaccttgataccgtcggaaancccggaagatcacttgagggcaggagttcgaggccagcctgggcaaaatggtgaaaccccgtctctactaaaaatacaaaaattagctggtcatggtgacgcatgcctgtagtcgcagctactcaggaggctgaggcaggagaattgcttgagccagggaggcggaggttgcagtgagctgagatcgggcatcattgcactccagctgggcaacacagcaagactccattgatcgatcgatcaatcaatcaatcaggtggccagagaaggttggagaaggcctccctgagaaggtgatgtctgggcagggactggaagaggggaaggaaggagtgagcaggcatatctaggggaggagcaccgcaggctgggggcatggcaggcactaaggccctgaggtgggagcactcttggcttgtctggngagcagtanggagg

SEQ ID NO: 31594 - DNA, 470 bp, Homo sapiens
  misc_feature (1)...(470): n = A,T,C or G
attgagnccctcgagacactcggccagngcggnggaattctggcatccgatgcctctactttgcacctccggaattcctcttagaggtgcagtgcatgcatgagacgcagaaagagctgcggaagttggttcatgaaatcggcctggaactaaagaccactgctgtctgcacccaagtgcggcgcacgcgcgacggcttcttcacgctagacagtgccctcctgaggacccagtgggacctaaccaacatccaggatgctatccgggctgctacccctcaggtagctgcagagctggagaagagcttgagcccggggctggacaccaagcagctccccagtccgggatggtcctgggactcccagggcccgagctctaccttggggctggagaggggtgcggggcagtgaatgcccaggcagctcctggggcagtggatggataaatagaagaactgctatgagctggac

SEQ ID NO: 31595 - DNA, 468 bp, Homo sapiens
  misc_feature (1)...(468): n = A,T,C or G
gcccagactttgataccataggcnattgaggagcatttccaggcaagcagcaaagttgtcgaagccaaccctagaaaaccttaccccagtggtgctcataccagagattcgcaaaccagaggttctcagaccggaaacacccagaccagtggacattggttctggaggattcggtgatgtcggtgctcttgagagtttgaggggaaatgcagatttggcttacatcctgagcatggagccctgtggccactgcctcattatcaacaatgtgaacttctgccgtgagtccgggctccgcacccgcactggctccaacatcgactgtgagaagttgcggcgtcgcttctcctcgctgcatttcatggtggaggtgaagggcgacctgactgccaagaaaatggtgctggctttgctggagctggcgcggcaggaccacggtgctctggactgctgcgtggtggtcattct

SEQ ID NO: 31596 - DNA, 458 bp, Homo sapiens
  misc_feature (1)...(458): n = A,T,C or G
ntcgagaccatagncttagaggagcatttcgcgcgtgagtcgtgagctggcaggacacacaggttacctgtcctgctgccgattcctggatgacaatcagatcgtcaccagctctggagacaccacgtgtgccctgtgggacatcgagaccggccagcagacgaccacgtttaccggacacactggagatgtcatgagcctttctcttgctcctgacaccagactgttcgtctctggtgcttgtgatgcttcagccaaactctgggatgtgcgagaaggcatgtgccggcagaccttcactggccacgagtctgacatcaatgccatttgcttctttccaaatggcaatgcatttgccactggctcagacgacgccacctgcaggctgtttgaccttcgtgctgaccaggagctcatgacttactcccatgacaacatcatctgcgggatcacctctg

SEQ ID NO: 31597 - DNA, 464 bp, Homo sapiens
  misc_feature (1)...(464): n = A,T,C or G
cctcgcacnccntnnntttcgagaccactatccatgtggtggaattcctcagtttctccctggctcaccctggagaggcttcccgaacagggctcaatggaaggagtgagaggcaggtggggccagccctgctttacctcgtcctgtcctgggcagcccctgctgtgcatacagccaggtgacggctgctgggggttcatgcagcaccatttgctctgctctgctcacttctcaccctgtcttggaggctcgatgaggccgtgcccagctcagtgtagatgctcagcagccagtgagaggaggtggccggagaaggcgcctccggggcaggaggcacctcgtccccacgccaggccccacactggcccatctactgctgcacttggggaagggtgtggttctctctgaagctcacggagtcttctttctccacagacccccccggaacctggactcccggacct

SEQ ID NO: 31598 - DNA, 493 bp, Homo sapiens
  misc_feature (1)...(493): n = A,T,C or G
ggggccnnaggggnnnnnaatcgagacccatatcgagtgccgtggaattccccttctagcacccccaaaggaaaagccagaggaacaatcgcctcctggtggtggtacgaggtagcgcaccgtccggctcgggtccggacagccagtaacctcgcagagagtgacggtgtctccttgcatcccagcctcgtctatgcagcaagagaccagggacttcaccaaagtcaccctcgcgggctgggccttccacgcatcccccccaccccccatggaacagaaagccatgtttttaagcagaaccagcgaaacccaagcccctccttcctctggtgttttacaactataaaggaggtgaagggggaaaaaaaaaaaaaaaaaaaaaaaaaaaaaaaaaaaaaaaaaaaaaaaaaaaaaaaaaaaaaaaaaaaaaaaaaaaaaaaaannnnnnggggcccccttttattaagggggcccctataacccccgttttctc

SEQ ID NO: 31599 - DNA, 527 bp, Homo sapiens
  misc_feature (1)...(527): n = A,T,C or G
ccattgacnctcgatccgcantccagcgtggtgcaattccaccatgggcagagagttccaccaagttcagacaccacatgtacaccaacgtgagcggattgacaagctttggtgagaaagtagtagaggagttgaaccgcctgggcatgatgatagatttgtcctatgcatcggacaccttgataagaagggtcctggaagtgtctcaggctcctgtgatcttctcccactcagctgccagagctgtgtgtgacaatttgttgaatgttcccgatgatatcctgcagcttctgaagaagaacggtggcatcgtgatggtgacactgtccatgggggtgctgcagtgcaacctgcttgctaacgtgtccactgtggcagatcactttgaccacatcagggcagtcattggatctgagttcatcgggattggtggaaattatgacgggactggccggttccctcaggggctggaggatgtgtccacatacccagtcctgatagagggagtgctgagtcgtagctggagc

SEQ ID NO: 31600 - DNA, 463 bp, Homo sapiens
  misc_feature (1)...(463): n = A,T,C or G
aggcgntnnaatgacctagactctagtccatgtcgtggaattcacccaggccagcaggagacaggacccccgaagctgaggccttgggatggagcagaagccggagtggcggggcacgctgccgccttccccatcacggagggtccagactgtccactcgggggtggagtgagactgactgcaagccccaccctccttgagactggagctggcgtctgcatacgagagacttggttgaacttggttggtccttgtctgcaccctcgacaagaccacactttgggacttgggagctggggctgaagttgctctgtacccatgaactcccagtttgcgaattatagagacaatctattttgttacttgcacttgttattcgaaccactgagagcgagatgggaagcatagatatctatatttttatttctactatgagggccttgtaataaatttctaaagcctc

SEQ ID NO: 31601 - DNA, 501 bp, Homo sapiens
  misc_feature (1)...(501): n = A,T,C or G
nctcgaccntcgtcagtgtggtggaagacggacactgctccttctgcgtgacactgaccgcttctccagccacgttggagggacccttggccagttttaccaggaggtgctctggggatctccagcagcatcagatgacggcagacgcacgctgagggttcagggcaatgaccactctgccaccagagagcgcaggctggattaccaggaggggcccccgggagtggagatttcctgctggtctgtggagctgtagttctgatggaaggagctgtgcccaccctgtacacttggcttccccctgcaactgcagggccgcttctggggcctggaccaccatggggaggaagagtcccactcattacaaataaagaaaggtggtgtgagcctgggaaaaaaaaaaaattaaaaaaaaaaaaaaaaaaaaaaaaaaaaaaaaaaaaaatttttntnnttaaagggccctttaaattaaaggggcccttttaaaccgggttttcc

SEQ ID NO: 31602 - DNA, 530 bp, Homo sapiens
  misc_feature (1)...(530): n = A,T,C or G
aaaagaaaaaannnnnnagncttttgaacatccctncgagnggngttagaaccactatccacgtggtggaattcggctccggctccttctgcgtgacactgaccgcttctccagccacgttggagggacccttggccagttttaccaggaggtgctctggggatctccagcagcatcagatgacggcagacgcacgctgagggttcagggcaatgaccactctgccaccagagagcgcaggctggattaccaggaggggcccccgggagtggagatttcctgctggtctgtggagctgtagttctgatggaaggagctgtgcccaccctgtacacttggcttccccctgcaactgcagggccgcttctggggcctggaccaccatggggaggaagagtcccactcattacaaataaagaaaggtggtgtgagcctgggaaaaaaaaaaaaaaaaaaataaaaaaaaaaaaaaaaaaaaaataaaattnnnnnnnttttttntggggccgccttattataagggccccccc

SEQ ID NO: 31603 - DNA, 491 bp, Homo sapiens
  misc_feature (1)...(491): n = A,T,C or G
agggccanaggagannnaactgagaccccatcgagaccataggcagngncgnggaattccgcgttagatgatagatcgagcagcctcaggccgctggcgttgacgaaaacgccgcgatccagcgcatgtagttcgttgtggtctaagtgcagggcgcgcagctggaagaggggcgccaaccagccggggcgcatgcgctggagcgcgttgtggctcaggtcgaggtccgcagtaccggcaggtaactcggctggcacgtcctgcagccctaggccagtgcagcttagcaggtcggcagcgcagatacatttgtaggggcagttgtggagcgcacggggcgggaaaccctcggagtccggggtgcctaacccaacgcgcagcatgcagagcagtgtccccagcagcaccaaccaggtcatggcggcgaccaccagggacagtacagagcagctctgtgcaggttgcaggtccaggactcaccctcttctgtg

SEQ ID NO: 31604 - DNA, 471 bp, Homo sapiens
  misc_feature (1)...(471): n = A,T,C or G
aggagcggccngnnacctgagaaacttangangcanggaagngccgnggaantcctccaccgtgacttgcaccagggcattgaggcagccagtgacgaagaggatctgcgctggtggcgcagcacccacgggccaggcatggccatgaactggccacagttcgaggcatgtgttccaggcggggtggggatgggaggtgggatgggctcccactcagctcggccagggctagggatgaagtaagtgaaggtggttcagatggccccacctgactataagcactgtccccacaggagtggtccttggacacacagaggacaatcagccggaaagagaagggtggccggagccctgatgaggttaccctgaccagcattgtgcctacaagagatggcaccgcacccccaccccagtccccggggtccccaggcacggggcaggatgaggagtggtcagatgaagagagtcccn

SEQ ID NO: 31605 - DNA, 506 bp, Homo sapiens
  misc_feature (1)...(506): n = A,T,C or G
nctcgatcccactcagagnggngttcgatccactattccgtgtggtggaattaacatagaccccgggtactgcgggaggggagggctgctggggaggatggggggatgttatataaatatagatataattttattttcggagctaagatggtgttatttaagggtggtgatgggtgagcgctctggcccaggctgggccagactcccgcccaagcatgaacaggacttgaccatctttccaacccctggggaagacatttgcaactgacttggggaggacacagcttcagcacagcctctcctgcgggccagcccgctgcgaaccctccaccagctaccggagggaggagggaggatgcgctgtggggttgtttttgccataagcgaactttgtgcctgtcctagaagtgaaaattgttcagtccaagaaactgatgttatttgatttatttaaaggctaaaatttgtttttttattctttgcacaattgtttcattgtttgacac

SEQ ID NO: 31606 - DNA, 517 bp, Homo sapiens
  misc_feature (1)...(517): n = A,T,C or G
gagagancaanaanagactttgatcacgtccgtgtggngttagactgccattggagaggcacaggtcctgcctcatgcctccataggagtgacatttgctggtgtcagaagcttggcaagaggggaggatgatcagaccctgcatggacagttcgaattggagctctctgcagagtccaggaagagagctctggatgggagggaagccatggggtggaaaagatagcttccaatggaaggcagtgaaaactcgccataagtgaaggagaagaaggaggccaaggagagggggcaggaatggcagccggcagccaggcggtcagtggagcaggtgctcaggaggcccacaggagagcttcgtggaaggagtggacagtgtctgaggtaaggggcaaaaggcatctgctggagctggtgaccccagcttggtgccccccaaagccagagtacgaggctgagaggatgcaggtgtcctcctaggaggtttgagtcagaaggcacgaggcagaagcagtgg

SEQ ID NO: 31607 - DNA, 468 bp, Homo sapiens
  misc_feature (1)...(468): n = A,T,C or G
aggcggctnnaaacggngacttcancanacgacangcggnggaattcgaggttgggtaaggccatgaccctgtgcatctgctacgcggccagcatcgggggcaccgccaccctgaccgggacgggacccaacgtggtgctcctggaccagatgaacgagttgtttcctgacagcaaggacctcgtgaactttgcttcctggtttgcatttgcctttcccaacatgctggtgatgctgctgttcgcctggctgtggctccagtttgtttacatgagattcaattttaaaaagtcctggggctgcgggctatagagcaagaaaaacgagaaggctgccctcaaggtgctgcaggaggagtaccggaagctggggcccttgtccttcgcggagatcaacgtgctgatatgcttcttcctgctggacatcctgcggttctcccgagaccccggcttcatgcccggctggctg

SEQ ID NO: 31608 - DNA, 464 bp, Homo sapiens
  misc_feature (1)...(464): n = A,T,C or G
acggggctnnaaacggatcgacagcgtccggccanngcgtggaantccccccacattgtccctgactctaggggcacatccagtctccatcgtgctgcagcagctggactgagggcagagcctgtatgtgcagaggccctggctcccgaggtccagccactctccctggggcctctggggtgagagcagcttccgataggacctgcccagatttctgcatgtgcacttttgtttactgaaagagagaaaggggggggtcacagcaacatgccctggcctttctgctctgttccccaaccccactgaggcctgctgcacaggtcaatgccttcgttatcggtattggactgtcactttgttcttgaggtagtagtcaaggatcacgaggggcagatgtcttctctgggctgcgtggggccggagcagaggtgagcagcaatgcactggttcgggagcccccatca

SEQ ID NO: 31609 - DNA, 469 bp, Homo sapiens
  misc_feature (1)...(469): n = A,T,C or G
naggtgcntnaaatcgagggatccctcatatngcgtggaattccttctactcacagcggccgattccgaggccaactccagcaatggcttttgcaaatctgcggaaagtgctcatcagtgacagcctggacccttgctgccggaagatcttgcaagatggagggctgcaggtggtggaaaagcagaaccttagcaaagaggagctgatagcggagctgcaggactgtgaaggccttattgttcgctctgccaccaaggtgaccgctgatgtcatcaacgcagctgagaaactccaggtggtgggcagggctggcacaggtgtggacaatgtggatctggaggccgcaacaaggaagggcatcttggttatgaacacccccaatgggaacagcctcagtgccgcagaactcacttgtggaatgatcatgtgcctggccaggcagattccccaggcgacggcttcgatgaa

SEQ ID NO: 31610 - DNA, 493 bp, Homo sapiens
  misc_feature (1)...(493): n = A,T,C or G
agatttttnnnnnnagangnnncnccagnnngnnnccnaattgaaaaccctcctcgagncccctaggacangcggnggaantcccttggccgagaaggacgagtttgagcacaagaggaaggagctggagcaggtgtgtaaccccatcatcagcggactgtaccagggtgccggtggtcccgggcctggcggcttcggggctcagggtcccaagggagggtctgggtcaggccctaccattgaggaggtggattaggggcctttgttctttagtatgtttgtctttgaggtggactgttgggactcaaggactttgctgctgttttcctatgtcatttctgcttcagctctttgctgcttcacttctttgtaaagttaagttgtaacctgatggtaattagctggcttcattatttttgtagtacaaccgatatgttcattagaattctttgcatttaatgttgatactgtaagggtgtttcgttccctttaa

SEQ ID NO: 31611 - DNA, 468 bp, Homo sapiens
  misc_feature (1)...(468): n = A,T,C or G
acggggctnnttactgatcgagtctctactgccgtgcggtggaattcccggcacctttccactagtcccatgttactgcgggagtatttccattttattcacgtaataatcctttagagagaacgaaagaatgtgattgcaaacgcatgttactgcaaactgatgcactttatcatggagtattaatgattcctttcacgaattttcggcttctagctaaaactttgcacgaactatttggacaatgttactggggtgttctctgctaactacatgggtagttagcacagaaatgggtagaacagtgaaagggtggaggcatctgactgttctcttcccctgtgccgacctgtcctttgcctgcggtcatccacggagtacactcacgagtggagacattttctccatttgcctaccggagctaccaccttccaacattatcttccagaaagctacaacagtcatgta

SEQ ID NO: 31612 - DNA, 484 bp, Homo sapiens
  misc_feature (1)...(484): n = A,T,C or G
tgctggccnnnnnnnattgaaactgagancctaggccanngcgnggaattcggtggagagtgtggagaacctgtctagccaacgaacagccctgcctctcactagagagttgcttggaggaacccaacagctttggggcacgttctgagcctgaaaatccaactgtacaaatctgtctcagcagcagcttacatgaaaattgtaagtttggggtgagctggcagtctggcagtgccaccaaaaagtcaaatggggtctgagactgcattcacagaagcagagggtccaggacaaaggaggggactgcttgaccaggtgtctcctttgtgaaaacctctccagttctcagaggttaggaaaaacctgagtggctttccagatggcttggaccatgtgaggacagcatcagccagtcacagtctcaggggagctgaggtgctgtctccagatccctgnggcagtgtgggctggctgggggctagtt

SEQ ID NO: 31613 - DNA, 232 bp, Homo sapiens
  misc_feature (1)...(232): n = A,T,C or G
tatgngagnnnncccncctaccgncagcccatcctcatcgctgnggtgctgcagctgtcccagcagctgtctggcatcaacgctgtcttctattactccacgagcatcttcgagaaggcgggggtgcagcagcctgtgtatgccaccattggctccggtatcgtcaacacggccttcactgtgncctgactgtttgtggtggagcgagcaagccgggggaccctgcacctct

SEQ ID NO: 31614 - DNA, 477 bp, Homo sapiens
  misc_feature (1)...(477): n = A,T,C or G
aggccagcnnnnaactgtaactagatgtcatgagcaggacnnggnctttggatacagaaactgggtgttttcctgctggatcttcatggttcccccgtcatgcttttcgtaagaataagtgaggtccggggagggggtgaggtcggagccaggacacctggacccagcctgctggtttgtcctctccctccgtctcagaagcctcttcaccgctccacgcccatctgtggaaatctttcatcctgatttttttttttgagtctgggttgccgacatcaaaacccgttaggagttcatcacagcttccagttgccatgaaagcctcccgtgacctgtgagaatggggctggtgctgatggagaaattacttgggctgagcacacaggccgtgatttcatcacgccggggacatgctcaaaataacaagccagtgagcagcatcgcacttgatctttggcctcagtggagccttgggtc

SEQ ID NO: 31615 - DNA, 472 bp, Homo sapiens
  misc_feature (1)...(472): n = A,T,C or G
nattgaaatcgatnagcactaggccangnggtggaattcccctgcgagaacgattgcacatataggagcttgctacgctggcggttataataatggagagaaatacagcaggcctgagctgaggacagagaataaccttgtcgagtggatgcccatccctgaggcccctccgcctgcacttccctcgtgggaagagcagcttacatgcgtgtggcacctggtgggggactatttccgggagaccctgaagaagaagaaacgcaccttggtcatgttctacgccccttggtgcccacactgtaagaaggtcattccgcactttactgctactgctgatgccttcaaagatgaccgaaagattgcctgtgccgctgttgactgcgtcaaagacaagaaccaagacctgtgccagcaggagggcggcaagggctaccccactttccactactaccactatgggaagttcgcagaa

SEQ ID NO: 31616 - DNA, 457 bp, Homo sapiens
  misc_feature (1)...(457): n = A,T,C or G
cggcggcccnaactgagaccccttgcaggcgtggaaaccccaagcagagcctaacgtctgtgactacggaagaaaccaagcctgtccccatgcctgcccacatatctgtggcatcaagtactacaaaggggctcattgcacgaaaggagggcaggtatcgagagcccccgcccacccctcccggctacattggaattcccattactgactttccagaagggcactcccatccagccaggaaaccgccggactacaacgtggcccttcagagatcgcggatggtcgcacgatcctccgacacagctgggccttcatccgtacagcagccacatgggcatcccaccagcagcaggcctgtgaacaaacctcagtggcataaaccgaacgagtctgacccgcgcctcgccccctatcagtcccaagggttttccaccgaggaggatgaagatgaacaagt

SEQ ID NO: 31617 - DNA, 484 bp, Homo sapiens
  misc_feature (1)...(484): n = A,T,C or G
aggcccgnnnnnnnaacccgagtacgagcagcatagccaaggacnnccggaggncttacccaacagattgacgcggcgttagtattggccgtgtacccgaaaaattgattttctgggctggcgttaactgtgcggaggcaggatttccctggggaaagtcttcactcagagcttcgctgacagccaaggatggcaagcaaggggccctcggcctctgcatctcctgagaactccagtgcaggggggcccagtgggagcagcaatggcgctggcgagagcggagggcaggacagcactttcgagtgcaacatctgcttggacacagccaaggatgccgtcatcagcctgtgtggccacctcttctgttggccgtgtttacatcagtggttggagaccagacctaacagacaggtgtgtcctgtttgcaaagctggcatcagccgagacaaggtcatccccctctatggaaggggcagcactgggc

SEQ ID NO: 31618 - DNA, 466 bp, Homo sapiens
  misc_feature (1)...(466): n = A,T,C or G
nactgaaactctggccaggcgggaattccaccatggtgctgtctcctgccgacaagaccaacgtcaaggccgcctggggtaaggtttgcgcgcacgctggcgagtatggtgcggaggccctggagaggatgttcctgtccttccccaccaccaagacctacttcccgcacttcgacctgagccacggctctgcccaggttaagggccacggcaagaaggtggccgacgcgctgaccaacgccgtggcgcacgtggacgacatgcccaacgcgctgtccgccctgagcgacctgcacgcgcacaagcttcgggtggacccggtcaacttcaagctcctaagccactgcctgctggtgaccctggccgcccacctccccgccgagttcacccctgcggtgcacgcctccctggacaagttcctggcttctgtgagcaccgtgctgacctccaaataccgttaagctgg

SEQ ID NO: 31619 - DNA, 315 bp, Homo sapiens
  misc_feature (1)...(315): n = A,T,C or G
aaagangacaccctgtgcttcaacatcaatgaggagcctggtgttatcctgagcctggtacaggaccccaacacaggcttctcagtgaatggacagctcattggcaacaaggccaggagccctgggcagcatgacggcacgtacttcgggcggctgggaatcgcaaaccctgccacggactttcagttggaagtgactcctcagaacattacgctgaaccccggctttggtgggcctgtgtttttctggagggaccaaactgtgctgcggcaggacggggtggtggtgaacatcaacaagaaaggaacctgtggg

SEQ ID NO: 31620 - DNA, 556 bp, Homo sapiens
  misc_feature (1)...(556): n = A,T,C or G
gccgcccccnnnnnnatttggactccctcgggggnccnnnaactgatcaccgtccgagagggccaatccaggtgtcggaggtgttcaatacagtggcccaagagctactgcagagaagcgacgaggagggccaggctccacggggggatgcagctgtggctctgaacaaggggcccgcgaggcaggccaaatgctgtgcccactaggtgcagctactcctgggggctgtggggaagacaccccctgcctgggccatggccagctctaggtggattctgattcactgtcaatgctgggttgctcccgagccctagatgttcctggaagttggccccctttatgaaaaccacttcccacagccagtgggaactgccagaggaagatctggcgtcgcatggctcccaggaaagtgctgtgccctatccccactgataccatctgattccccgatgcctgtgcctgttccacctggacggtggccccctcagcctggcagcctctggacagagaggaaggaaggatttggaaagtccccggagcacagcgacggtgggaa

SEQ ID NO: 31621 - DNA, 489 bp, Homo sapiens
  misc_feature (1)...(489): n = A,T,C or G
nttcgaatacagtncangtggngcaattcaaattctctgtcccttcaacgcctgggagggcggccccgccccctgcatcagctgtgcctccagctgtgcctgagaggtactgcctctctttctgggcctcagtctccccctctggaaagtgggtttttcaaatggtccctcacccctcaaacaggccacggtgttgtgagtccacatgagctcccatctctccacactatggtcccccaggtagctgagggcatggcctacatggaacgcatgaactacattcaccgcgacctgagggcagccaacatcctggttggggagcggctggcgtgcaagatcgcagactttggcttggcgcgtctcatcaaggacgatgagtacaacccctgccaaggttccaagttccccatcaagtggacagccccagaagctgccctctttggcagattcaccatcaagtcagacgtgtggtcctttgggatcctgctc

SEQ ID NO: 31622 - DNA, 494 bp, Homo sapiens
aattgattagcatacgagtggggaaggcctaggatctgtgctgaggatggcagctgaggcgatccgtatgcaggacccgaacccctacagcttccagtcagacgtctatgcctacggggttgtgctctacgagcttatgactggctcactgccttacagccacattggctgccgtgaccagattatctttatggtgggccgtggctatctgtccccggacctcagcaaaatctccagcaactgccccaaggccatgcggcgcctgctgtctgactgcctcaagttccagcgggaggagcgggccctcttcccccagatcctggccacaattgagctgctgcaacggtcactccccaagattgagcggagtgcctcggaaccctccttgcaccgcacccaggccgatgagttgcctgcctgcctactcagcgcagcccgccttgtgccttatgccccgccccagccaccagggagccaatctcagccctccacgc

SEQ ID NO: 31623 - DNA, 497 bp, Homo sapiens
  misc_feature (1)...(497): n = A,T,C or G
attgactcgcataccactccgngaggngcaattcaaatgaaggcgcacatcctccttcctctctacaacacccttttccaacccaaagtacgcatgtgtgggaaattccacattggagatggagctggggaagggatatgatgtcctacctctatcccttggctttgctcaggtgccatctgtcccctcgaggagttgtgtgatgtgtcccaccagtatggggccctgaccttcgtggatgaggtccatgctgtatgactgtatgggtcccggcgcgctgggattggggagcgtgatggaattatgcataagattgacatcatctctgcaactcttggtaagtgaatgctttgggccttcttatataccctccagagaggatgcccttacacagttcttttgtgcctcctccccaaagctatatgggttgtttggacagaattcacagccccaggctgctgccatcctggactccctctctccactcgcatnccatn

SEQ ID NO: 31624 - DNA, 545 bp, Homo sapiens
  misc_feature (1)...(545): n = A,T,C or G
cgcccccgatcgagcntccctncgngagnnnaatagatccatcgttcgagnggngcaantcgcacaagatttgtttataactagcagtgggagatcaagtgagggaccagatggccgaggctgcaggctcaggcccaggactctctaccccggaaggggtgctgctaagtaagcgagctgggtgggtacccaggtgctggccgggtacccaggtgctggccggcagcaccgtcgcactctcagtccggacccacacagcctggtgtcgcgctctccgcgatggcaataccgagattgccctctactgtccgactgcagcactacaacagcttcaagttcaaaaccaagaggccattttgagagtggaaaagaaatttaaacttcccgaaagaaggtccacgggctggagataaatatggaacacctcctatggaccacgcactatgctcagcgctggactaccttacctcattgaattatcacaacgacctttttcaagtaggcattatcaccacgcgacagataaggaccctaaggcacactgn

SEQ ID NO: 31625 - DNA, 311 bp, Homo sapiens
  misc_feature (1)...(311): n = A,T,C or G
agggaggaggagccaatgcatattcgagatgtctggggcatcgagggccccatcgatgccgccttcacccgcatcaactgtcaggggaagacctacctcttcaagggtagtcagtactggcgctttgaggatggtgtcctggaccctgattacccccgaaatatctctgacggcttcgatggcatcccggacaacgtggatgcagccttggccctcccttgccatagctacagnggccgggagcgggtctacttctttcaggggaaacaagaactggagtaccaagtncagcaacaacccaatcaagaagg

SEQ ID NO: 31626 - DNA, 538 bp, Homo sapiens
  misc_feature (1)...(538): n = A,T,C or G
aggggaattgagctctctcnnnnnnnaatcgtaccatcgtccgtgtggnggaattcgcaacatgaaggtgctccttgccgccgccctcatcgcggngtccgtcttcttcctgctgctgccgggaccttctgcggccgatgagaagaagaaggggcccaaagtcaccgtcaaggtgtattttgacctacgaattggagatgaagatgtaggccgggtgatctttggtctcttcggaaagactgttccaaaaacagtggataattttgtggccttagctacaggagagaaaggatttggctacaaaaacagcaaattccatcgtgtaatcaaggacttcatgatccagggcggagacttcaccaggggagatggcacaggaggaaagagcatctacggtgagcgctttcccgatgagaacttcaaactgaagcactacgggcctggctgggtgagcatgggccaacgcaggcaagacaccaacggctcccagttcttcatcacgacagtcaagacagcctggctagatggcangcatgtg

SEQ ID NO: 31627 - DNA, 531 bp, Homo sapiens
  misc_feature (1)...(531): n = A,T,C or G
ngggcactcgaccatcgtccgngtggngtaagacgaccatgccccggactcaccatctggagagaacagtccagccccgcaggggcgacttgcggaagtccaggactcttccatgccagttcctgcccagcccaaagcgggaggctctggcagctactggccagctcggcactcaggagcccgagtgatactgctggtgctctaccgggagcacctgaatcctaatggtcaccacttcttaaccaaggaggagctgctgcagaggtagcccctgggagtgctcgaccctggccagccctccgctccctccttcacaggaacctggtcctcaggacacaccagccagccaggtactcattgaccccagagggcctggagctggcccagaagttggccgagtcagaaggcctgagcttgctgaatgtgggcatcgggcccaaggagccccctggngaggagacagcagtgccaggagcagcttcagcagagcttgccagtgaagcaggggtccagcagcagccactggagctg

SEQ ID NO: 31628 - DNA, 448 bp, Homo sapiens
  misc_feature (1)...(448): n = A,T,C or G
nattgagnaactgagacnctcggccgngcggggaattccaaggggttcgcaggaaggcatgagacagcaggaggtctcctcccccagggtgtgtggctgggtggggaggggtcccatctggaaatcaagggcgcaatggatctagggtgaccagcccatcctggcccgcctgagacttttccctttttagcgctaaaagtgccagggccttgcctggtggctcagacctgtaatgccagcacattgggaggctgacaccggagaatcacctgagccaggagattgagaccagcctgggcaatatagtgagactccatctctacaaaataataaaataaattactagcaaggcgtggtggcatgtgcctgtggtcccagctaccagggaggctgaggtgggaggatcgcttgagcccagtattttgaggctgcagtgagccatgatcac

SEQ ID NO: 31629 - DNA, 553 bp, Homo sapiens
  misc_feature (1)...(553): n = A,T,C or G
cgccgccccccnnnnnnaattgatctccntcgngaggggcanccatcgtaacctcctagccctcagaagagtttgtcaggaacaaccacgtcattaacacccctcttcagacaatgcacatcatggcagacctggggccctataaaaagcttggctataagaagtatgaacatgtcctgtgtactctgaaggtggatagcaatggtgtgatcacagtaaagcctgacttcacgggcctcaaaggaccctacaggattgagacggagggggagaagcaggagctgtggaaatatacgatcgacaatgtttccccccacgcacagccggaggaggaggagcgggaacggcgagtgttcaaggatctttatggccggcacaaggagtatctcagcagcctcgtaggcaccgactttgagatgactgtcccaggtgccctccggctctttgtaaatggagaggtncgttcagcccaaggctatgagtatgacaatctctacgtccacttctttgtagaattgccactgctcactggtcaagcccagcattccagcaa

SEQ ID NO: 31630 - DNA, 561 bp, Homo sapiens
  misc_feature (1)...(561): n = A,T,C or G
nggcggggnnnnnnnncaattgaccagacgntcagggcgcannaattgagcatcgtccgagnggagcaattcctttntctttntctttctttctttcttttcattcttggtcatactgccatttttcttagccaattttctggccaaactcctcctcaccacttattttctgtgtgctgatgactatgctttactactaaatttggctcttttgtcttgccagttcacaccttcccttaaggcataataaccatttactacttaattttcgcttttctcctctatcttgctggggtggtgtaataaaattccagcttaaccaataagtaaaatggcttgccagtgatgataaagaccacatttgtttgggatatgtagcagcacaaatttaaaagtaaataaataaaacaagcccatctcaatcctaacttacagatactggtcagtgtgactganaactgaaattgttcatgctaaccaacgtttttcagtttccacctaacattntgttcagtttggtgccctcttgtgcctnctatttttacaaacacaactcagaan

SEQ ID NO: 31631 - DNA, 539 bp, Homo sapiens
  misc_feature (1)...(539): n = A,T,C or G
nggggagttgaacnccgntnnnnnnnnnatcgttccccactccgtgtggtggaattcgagacaaggccatccagctttagacccggngccctcgcactttaggaggccacagagctccctgctcacatgtctagtatgtggccttcatttgtagtcatgtcctgtcccacaaagatgagggtcaggctttcatagaggtcagctgcctggagcccgcagcagggtggagaatggcaaagggactccaagaggccaaggagagatgtatagcccatcatgcatcttcaggtctgctagagcaaaccctgagggctgctttagagagggttatcaagggagacttcttggaggaggtggtttctgactgacttgaatgccaggactgtttgccctgccccctgccatctctccttcccagatggtgctccaagaggcagcttgtggacctggtgatggaaggggtgtggcangagctgctggacagcgcccagaatgagatctgtgtggctgactggtggngcgctcgagagaactgcngn

SEQ ID NO: 31632 - DNA, 527 bp, Homo sapiens
  misc_feature (1)...(527): n = A,T,C or G
cgcccatcgtactcgtcagnggggttagatgctcctagacggngagatggccgaggccccgggcagcccccaccagcaggggctgtggctcgcaggggagggtgagcaggcccaggtgaagctactggtgaacaaggatggccgctatgtgtgtgcgctgtgccacaagaccttcaagacgggcagcatcctcaaggcccacatggtcactcacagcagccgcaaggaccacgagtgcaagctctgtggggcctccttccgcaccaagggctcactcatccggcaccaccggcggcacacggatgagcgcccctacaagtgctccaagtgtggaaagagcttccgggagtcgggtgcactgacccggcacctcaagtctctcaccccctgcacagagaaaatccgcttcagtgtgagcaaggacgtggttgtcagcaaagaggacgcacgtgcaggttctggaagctgagctgccggcttgggacagccacatcatcggtgacaggcgagcctatagagacttcacc

SEQ ID NO: 31633 - DNA, 452 bp, Homo sapiens
  misc_feature (1)...(452): n = A,T,C or G
nactggagaccctgagnancgtgcggnnggaaccggatggatgggtggtagatactggagacactttcttcaaggacatatgcagatagctaatcacctggctgttcctaggtcccccagcctcctgccaccatcattcagcagctccctcagcagccactcatagcacagattcctcctccccaggccttccctactcaacggtcaggaagtattaaggaagacatggtggagctgctgctgctgcagaacgcacaggtgcaccagttggtcctgcagaactggatgctcaaggccctgcccccagccctgcaggtaggctcagcccccagcagaaccctaggccaaggaaacagggcctgggtggtttttcttctggaaatttctgcatctgtgtagctctgaaagggcattcctggctcatgtctacagtctggctgtgaagctcccan

SEQ ID NO: 31634 - DNA, 500 bp, Homo sapiens
  misc_feature (1)...(500): n = A,T,C or G
nattgagncccatcgaacactgtccgngnggngcaattcgctcccggaacacaagctgtgaaacactagaccactatgatcccgactatgaattcctccagcaagacctctctaacgcagaccagatacctcagcagacggcctggaaccttagcccgttgccagagtctttgggggagtctgggtctccatttcttggccctcctttccagctgcctcttggcggccatccccagccagacggacctctggccccagggcagcagacagatacgccacctgctctccccgagaagaagcgcaggagcgcagcctcccagacggcggacggctctggctgcagggtgtcctacgagcggcatccctcgcagtatgacaacatctctggggaggacctgcagagcacagccccgatcccatccgtcccctacgcgccctttgctgctattctgccctttcagcatggaggttcctcagcccctgtcgaatttgtgggtgat

SEQ ID NO: 31635 - DNA, 499 bp, Homo sapiens
  misc_feature (1)...(499): n = A,T,C or G
naattgatgaccaatccgngnggcgcaattcccacctgaagtcgatggcgctcagtccgatcagcattccggtgaggatggtggcttcatcccgcagcatgatggctccagagtcatagaaccgtctgtggggaggcagagggccagagggtgcagcaggcccctggagcgcccccccccccccaaagctgctattgttggcttactgccaccccatcctgaaggaaggccaattttcctttttgatttgcacgcaggcctggagccttttttcccctttagcctggggctcgcacctggggccccatcacctaaaatgggggttccctgagccgactcctccctttgagctaccccttcctaatcaaggactgggttacccagatccttcatatcaggaagcaagtcttaatcattagtgcttgggatacagaaggggcgcaaaaaacgtgttaacttgaaacgtgtaaacttgggaatggaattcagtaaaaacatt

SEQ ID NO: 31636 - DNA, 495 bp, Homo sapiens
  misc_feature (1)...(495): n = A,T,C or G
natcgagcaccatgagagggcgcaattccgntctgccttccggtgcagcatgtggtgtctcagaactgtgacgggctccacctgaggagtgggctgccgcgcacggccatctccgagctccacgggaacatgtacattgaagtgagcagtcctgcagggacccagggtctccatgggcaggcgggtcccactcactgtgccctcttgcctctaggtctgtacctcctgcgttcccaacagggagtacgtgcgggtgttcgatgtgacggagcgcactgccctccacagacaccagacaggccggacctgccacaagtgtgggacccagctgcgggacaccattgtgcactttggggagagggggacgttggggcagcctctgaactgggaagcggcgaccgaggctgccagcagagcagacaccatcctgtgtctagggtccagcctgaaggtacgtgccgatgacacaatgagtgaaccgagcccctgcccgcc

SEQ ID NO: 31637 - DNA, 500 bp, Homo sapiens
  misc_feature (1)...(500): n = A,T,C or G
nattgagccccatcgaacactgtccgngnggnggaattcgacccatctggcccgccgcgatgctggcaacacggcggctgctcggctggtcgcttcccgcgcgggtatctgtgcgtttcagcggcgacacgacagcacccaagaaaacctcatttggctcgctgaatgatgaagaccggattttcaccaacctgtacggccgccatgactggaggctgaaaggttccctgagtcgaggtgactggtacaagacaaaggagatcctgctgaaggggcccgactggatcctgggcgagatcaagacatcgggtttgaggggccgtggaggcgctggcttccccactggcctcaagtggagcttcatgaataagccctcagatggcaggcccaagtatctggtggtgaacgcagacgagggggagccgggcacctgcaaggaccgggagatcttacgccatgatcctcacaagctgatggaaggctgcctggtggggggccgn

SEQ ID NO: 31638 - DNA, 523 bp, Homo sapiens
  misc_feature (1)...(523): n = A,T,C or G
gggaggnnncgggngnnnnnnnnnaattgagcccaatcagtgtggcggaattcacccggctcgagcggcccacgggttgacctaaggaagaagacagagactttctccacaagaagggttaagtctgggctgtgcagccagccagtgggtgaccaaggagggcaggtcatgctgatcagaaaggtacactgcatgactcagatgccacctgcacctacccagcaccctccacgtccccacctggcctgtgaatcttagacgccacctacacctgcccagcaccctcacatcctcacctggtctcctgcgcatcgcagatgccacctgcacccgcccagcaccctcgtactcacctggtctcctgcgcattgcagatgccacatgcacccacccagcaaccttgtcctcacctggtctctggctgtccagagttgcttcctgttgacgacagctctcctcagaagaaagccagcttccctctacaagtgctctgggaaaaggagagcaggttgaagtaacattn

SEQ ID NO: 31639 - DNA, 495 bp, Homo sapiens
  misc_feature (1)...(495): n = A,T,C or G
nttgatcgcacaccatccgngnggnggaattcctgagataaaggaagcagaccccctggctgcctcggaagcaagtcaacccaaaccctgtccccccgaagtgaccccccactacatctggatcgacttcctggtgcagcggtttgagatcgccaagtactgcagctctgaccaagtggagatcttctccagcctgctgcagcgctccatgtccctgaacatcggcagggccaaggggagcatgaaccggcacgtggcggccatcgggccccgcttcaagctgctgaccctggggctgtccctcctgcatgccgatgtggttccaaatgcaaccatccgcaatgtgcttcgcgagaagatctactccactgcctttgactacttcagctgtcccccanagtttcctactcaaggagagaagcggctgcgtgaagacataagcatcatgattaaattttggaccgccatgttctcagaagtacctgaccgccagcc

SEQ ID NO: 31640 - DNA, 499 bp, Homo sapiens
  misc_feature (1)...(499): n = A,T,C or G
aattgagncccatcgagcactatccgtgtggnggaattcctttgtctgtctttttctttcccccatgcacatcatgtagattaagctgaagatgtttattacaatcactctctgtggggggtggccctgctgctcctcagaatcctggtgccttgaagttctctgtgcatctgtccatcctccctatggccctggccagagctcagcatgggcaggggttctgggtaggacggtcactgtcctctctcctggactggtcttcccagccctaaaccctgccccaggaagcccacagcctcacctgctgctgcccctctaggtctgggcagccatgacctgcagggcccagagacactgtccttcccctcatccacccaaggccccagccagcgctcataccctgtcctttctccctgaccccaagggcacagaggcaaggcctcctgtctacagcagcttcctcagtttcctactgccttaggaggcccctgcttgtgct

SEQ ID NO: 31641 - DNA, 507 bp, Homo sapiens
  misc_feature (1)...(507): n = A,T,C or G
nattgagcncattgatgcactgntcagtgnggngcaattcatgctgtgtgccttatgaaatgctgggatctggaaaatccaaccaaccaacccaccggctcctcaccgtctccacctctgcctttgactgacacctcaatctgtcaatcggaaccgcctaccatgcgattggtcggatggcgtttcggggggcggtgcatgcagagaagccaacagagcagtaagcgcagcagccggagtgtggaagatgacaaggagggtcacctggtgtgccggatcggcgattggctccaagagcgatatgagattgtggggaacctgggtgaaggcacctttggcaaggtggtggagtgcttggaccatgccagagggaagtctcaggttgccctgaagatcatccgcaacgtgggcaagtaccgggaggctgcccggctagaaatcaacgtgctcaaaaaatcaaggagaaggacaaagaaaacaagttcctgtgtgtcttgatgtctgact

SEQ ID NO: 31642 - DNA, 505 bp, Homo sapiens
  misc_feature (1)...(505): n = A,T,C or G
nattgagcncactgagcactgtccgngnggngcaattccggngggcacctgcggagaccctttttgggggatggtctcaggaaaggctcctgatggaagcagctgtctatatctccgtgcccagctgcggcctggcacactgagggctctcgccaagagagtggcctggtgatgcttccttttgacagcctgagggctgcctcctctggagagccttccttgaccaagcccctgggtgtggccaggccccacagggccacaacaggtttctgcatctgctcctatggccactccttcttgcccccagctctcctgctgccaagatgccatcaccacagacagacactcctgggccggagctgcagagtcccaaggaggctgaggagccacagactccagctcagggctcccggcgaacaagcagcaggaaagagcccaatgcccaccgcaaggatggcacaaggctgggcctgggctccctgaggcaggccttctcccgggccag

SEQ ID NO: 31643 - DNA, 490 bp, Homo sapiens
  misc_feature (1)...(490): n = A,T,C or G
aggcgnnaggcccacccagggngtccctaaagngcccgcaannncnngaannnnagaatggtggacggtatcaaagagagtgtgtgctggggtccatcacctgccgctagtcctctaaagagctgcgagggcgatgcccttggctctcgcttccaagaactcctgctgcttcctgaagattatttcatgcctccgccaaagcgaagcctgtgctactgtgagtcttgccggaagctgcgaggagacgaggcccacacgcgcagaggggagcctccccgggaatatgcactgccctttggctggggcaggttcaacctcagagtgaatccccgcctggaggctgggacactaaccaagaagtggcacatggcatatcacgggagcaatgttgccgctgtacggagagtgctggaccgaggggagctgggagcaggtactgcctccatcctgagcttgccgcctttgaagggagaccctggggtaaggttcg

SEQ ID NO: 31644 - DNA, 502 bp, Homo sapiens
  misc_feature (1)...(502): n = A,T,C or G
atcgagccactgatgcgtgtccgagnggnggaatcccccgtcctgcggccccagctccgcatctgcctccgcgagtcgcccgcggagcagcctcggctggaatttctcatgcgcaagcgcggctggttcgtgcgagagctgcgtgttgaattcgccgccgagaactatctgagcgggggcggcccaggggacggaggtggcgcggacaccgtgactggaggggaggaagtccaggccctgcagctctcagctcgttggctggaagtgctgcgcacctacttggagctggtgctttgcgtgctggtcagcatccggaacaacaggttacacggtgtgggcacacaacctcattgccattgctcgtcttcggggctctgatctgaaagtgcttgaagtcaccgaagaaaggattgattttgaccaaggtgaactggccgaccaggatgtagatccagtgcataaccttattgagcaggtatccctgggcctggggcaaccttgg

SEQ ID NO: 31645 - DNA, 497 bp, Homo sapiens
  misc_feature (1)...(497): n = A,T,C or G
natttgacccctggcagngcggtggaattcacagacccggactggccttctgtaagagctttcgagacaaggtgagcgcgggtgcacggtctggcctgggggcagtcccccagactccaggcatcgcctgcatcacggacacccccaccccactacagggcatcttcctccatctgagcaatcagcatgaatttggccggctcctggccacttccagatacgacacggagcacctgcaccccgacctctggcagatcttcgacaaccccgtcgtgagtggggaccccacgcccagagcacacaggttccccgccttgtgctaaggaagacaccaaacgtgatggctgctgccagcgcaggacactgagtgggagggggcggtcccctgggggctgggagaccaaggaacanatctgatgtgccccccaccctctcacaggactggaaggagcagtacatccacgagaactacagccgggccctggaggggaaggagt

SEQ ID NO: 31646 - DNA, 497 bp, Homo sapiens
  misc_feature (1)...(497): n = A,T,C or G
natcgagtaccgtccagcgggcggaattcaggcaaacctgttgtccacagtctgtacaagcactgtgataggtttgagttaagacagtcacagtaggtaggaatacatgggaagggttttagtgtctatgtgtgcttttagaggtagaattgaaggaccctttgattggtcttagcagacagaaatctggtatgaatcctttaattgggcagtagctatagtatcttgagttattctgagtgtttgctcaatgtttctagtagtgatgatgacttgtagttgggatcctatgtgtaatttggcagaagaggacggtggcttcaaactttgtttgggatataaagttgaccccattttgaattattttaaaataatttgaaagattaatgaaaatgcatttttataactttcattattagtaaaacgtttgactttagaataatgctgtttttcaattaattattattatagtataatggctccaggtgaacttaacn

SEQ ID NO: 31647 - DNA, 469 bp, Homo sapiens
  misc_feature (1)...(469): n = A,T,C or G
nggagcgggccngnnttccgaaaacccctctcgatcgcanngncnngnaannnnnatgggnagtggtgctacacgatggacccaaagaccccattcgactactgtgccctgcgacgctgcgctgatgaccagccgccatcaatgctggacccccccagaccaggtgcagtttgagaagtgtggcaagagggtggatcggctggatcagcgttgttccaagctgcgcgtggctgggggccatccgggcaactcaccctggacagtctgcttgcggaattggcaagctaacaagtgagccttggggcaacggactgagagtcacaaatgacctagcagagcttctcttccagccatatgcctctcacgggctatgaggtatggttgggcaccctgttccagaacccacaacatggagagccaggcctacagcgggtcccactagccaagatgctgtgtgggccctcaagct

SEQ ID NO: 31648 - DNA, 461 bp, Homo sapiens
  misc_feature (1)...(461): n = A,T,C or G
tgcggctnaccacgatcgcacacatgtngcgnggcattccaggtgtgagccaccacgcttggccctgcccaggagtcatttttgtatctacaggtatcttcctatgctgtagacagatgccctttttcaaggcaaaaaccctagccatttttctcttctccttcagagtctgcaacatcctctcaactcatccaagtgactactgcctggtgctcttggggatgcagggaggcctgagaaggccaatgtctatacagaaagttctaacatagtgcactgagtcaatgtgggcactttaaagccctttcacctgccaagtcacgaagcacccctatagttgtgtttgtaaaatactggggggtttgaaggggaaaagggataactccaaggtaccatctttgcatttcagatccacacaacttaaagatctgctgtcgagtgaatggggaagcggcccacac

SEQ ID NO: 31649 - DNA, 498 bp, Homo sapiens
  misc_feature (1)...(498): n = A,T,C or G
agagtgccnncnnccaactgaaactagtgcatggcaggnaacccctgcccgagcagaggccctacacccaccgaggcatggggctccctgggctggtctgcttggccgtgctggctgccagcagcttctccaaggcacgggaggaagaaattacccctgtggtctccattgcctacaaagtcctggaagttttccccaaaggccgctgggtgctcataacctgctgtgcaccccagccaccaccgcccatcacctattccctctgtggaaccaagaacatcaaggtggccaagaaggtggtgaagacccacgagccggcctccttcaacctcaacgtcacactcaagtccagtccagacctgctcacctacttctgccgggcatcctccacctcaggtgcccatgtggacagtgccaggctacagatgcactgngagctgtggtccagacagaggggcaggccccagggtggagatgatctgccaggcgtcctcgggc

SEQ ID NO: 31650 - DNA, 501 bp, Homo sapiens
  misc_feature (1)...(501): n = A,T,C or G
aggggcgggggncccccaactgataccnatagatgatcatcgcgaangccgcggaanncggcggnggcaaagggacagtgggagagagggcaggtgtgggggctggaggggtgacactgagcccacccatagactgtcatgaggacattgggtttgacttggagtaagctggaaagccatcagagggttctggccaaagagtggcatgattgcccttaaatctttgagggagccctctcccgagtagttgatttcagatggtcacagtcaaatgttctgtgcttcctggctgctctgtgcagcctgagcagtccctgacaccctctctggcaggtccccggtagacccagctctgtgccccagcagactcatgcaccgatgccctgctttgttcagaagcagattctttatattttgcctgccttcttccttgccccagagaggctggccctcatctgggtgcccttgtgttctggagagaaggtggcaagacagtcagag

SEQ ID NO: 31651 - DNA, 465 bp, Homo sapiens
  misc_feature (1)...(465): n = A,T,C or G
agcggctnnnnnnaaatgactgcgtgcntangacgngncatggaattcccactgctggtgtagaagccatggtgaatcttctctgctttagcgtgagcaaaggcagaggcaccaaatagtactagtaatcatcatattctttacctccacacacaaagaaaatgtgttaagaaaaaacccattttcacttaagaacatcttgaagaagcagtattcattttattaaatctcaacccttgattatatatacatttaaaaaatatttatgtaatgaaatgggaagtatccattaaggtcttctgctgtataccaaagtatgatggttgccttgaagaaaaccacttgtacagttgtttcagttgtgagttaaaggccaggctctgtggctgatgcccgtaatcccagcattttgggaggccgaggcggacagatcacaaggttaggagatcgagaccatcctggccg

SEQ ID NO: 31652 - DNA, 491 bp, Homo sapiens
  misc_feature (1)...(491): n = A,T,C or G
ncctcgagatccctagtnagngngttttgattccactatanagagnggnggaattcgtaagcttgatggagaggcatccattatcaatcggggagggaaacttatcttcttttatgaatggagcgtcaaactaaactggacaggtacttctaagtcaggagtacaatacaaaggacatgtggagatccccaatttgtctgatgaaaacagcgtggatgaagtggagattagtgtgagccttgccaaagatgagcctgacacaaatctcgtggccttaatgaaggaagaaggggtgaaacttctaatagaagcaatgggaatttacatcagcaccctcaaaacatagttcacccacggcatgatcttacctacaatgaatggagagtcagtagacccagtggggcagccagcactgaaaactgaggagcgcaaggctaagcctgctccttcaaaaacccaggccagacctgttggagtcaaaatccccactt

SEQ ID NO: 31653 - DNA, 498 bp, Homo sapiens
  misc_feature (1)...(498): n = A,T,C or G
ggggcagggncccccaactgataccaactgatgagcgtcggaanngcctccgtantttgcggctttggagccacaggaagaaaagttggatgaccagaaaattcaggtgactcctccaggcttccagctggtctttttaccctttgctgatgataaaaggaagatgccctttactgaaaaaatcatggcaactccagagcaggtgggcaagatgaaggctatcgttgagaagcttcgcttcacatacagaagtgacagctttgagaaccccgtgctgcagcatcacttcaggaacctggaggccttggccttggatttgatggagccggaacaagcagtggacctgacattgcccaaggttgaagcaatgaataaaagactgggctccttagtggatgagtttaaggagcttgtttacccaccagattacaatcctgaagggaaagttaccaagagaaaacacgataatgaaggttctggaagcaaaaggcccaaggt

SEQ ID NO: 31654 - DNA, 449 bp, Homo sapiens
  misc_feature (1)...(449): n = A,T,C or G
ttgattgcgaacctaggccangnggtggaattcctgatgaacagcggtcgttaattgaatgaactccagtttattaatcttttaatctttaccatgcacattatacattccgtgctttggttgaaaaaacctttccctaactctgcgccacgatgataattgcctatgctccagaactttgcgatgacaattacgaaagtatttatagtcgtcctagagggaatcgatttttttggttgacatgaggcatggggtagttgcacatttaaaaaatagtgttatttttatagttagcttcttttaatcaacaataaatgtaatctttccatattggtacaaatacatctaccttattcttttaaactattacatagaattccatcaaatggatatattatagntgatgtgaccatttctttatgatatgacatntaaagtgcttccatttg

SEQ ID NO: 31655 - DNA, 496 bp, Homo sapiens
  misc_feature (1)...(496): n = A,T,C or G
ggcaggggccggcactgaagccncctaatgggcttcgcaagngncgcggaantcgnggaacagngcgagtgcttcgggggccggacctggtgctaaggctcccgacatacatcttgtctgagcagcccttgcctgaacgggggcgcctgccacctgatcgtggccaccgggaccaccgtgtgtgcctgcccaccatgcttcgctggacggctctgcaacatcgagcctgaagagcgctgcttcttggggaacggcactgggtaccgtggcgtggccagcacctcatcctcgggcctcaactgcctggcctggaactccgatctgctctaccaggagctgcacgtggactccgtgggcgccgcggtcctgctgggcctgggcccccatgcctactgccggaatccggacatatgacgacaggccctggtgctacgtggtgaaggacagcgcgctctcctgggagtactgtcgcctggaggcctgcgaatccctcacc

SEQ ID NO: 31656 - DNA, 411 bp, Homo sapiens
gaggcaggttgtgcagagacggaaacaggttgagagatgtacagtctcctgcttgccagtacacagcaatcaaaagtggccaaaataaaatcccagtccaagtctgggagactccaaagccctctctgccttctccccactaagaggcccttccaggcttatggtggacacagacaccacgtggcaacctggcaggggcagagaaaaacatttgcctttctttggtcttgctgccaaccattatcagggccatcgaggctccagacactgtaccagggactttcatttccctctctcagtcgaccctcactgccacccagcatcacatcgtggaggcctgtggaggccacaccacgtgacatctagaggctgggagagtcactgtggcctctatctctgcccagggctcct

SEQ ID NO: 31657 - DNA, 465 bp, Homo sapiens
  misc_feature (1)...(465): n = A,T,C or G
agccgctnnnnnnnaaatgaactagancnctagccgtgcggggaattccggtgaagctgccctccggctccacaaaggttatctcctcagccaacagagctgtggttggtgtggtggctggaggtggccgaattgacaaacccatcttgaaggctggccgggcgtaccacaaatataaggcaaagaggaactgctggccacgagtacggggtgtggccatgaatcctgtggagcatccttttggaggtggcaaccaccagcacatcggcaagccctccaccatccgcagagatgcccctgctggccgcaaagtgggtctcattgctgcccgccggactggacgtctccggggaaccaagactgtgcaggagaaagagaactagtgctgagggcctcaataaagtttgtgtttatgccnnnncnaanncanncaaanaaaaaaannanaantaaaaaaaaaaaacc

SEQ ID NO: 31658 - DNA, 466 bp, Homo sapiens
  misc_feature (1)...(466): n = A,T,C or G
tgcnnntnnntnnnacacgcatagacactctatgacgtgncattcaccttctccagacccagagatattccgccaacgcttcaggcgcttctgttaccagaacacttttgggccccgagaggctctcagtcggctgaaggaactttgtcatcagtggctgcggccagaaataaacaccaaggaacagatcctggagcttctggtgctagagcagtttctttccatcctgcccaaggagctccaggtctggctgcaggaataccgccccgatagtggagaggaggccgtgacccttctagaagacttggagcttgatttatcaagacaacaggtcccaagtcaagttcatggacctgagatgctcgcaagggggatggtgcctctggatccagttcaggagtcctcgagctttgaccttcatcacgaggccacccagtcccacttcaaacattcgtctcggaaaccc

SEQ ID NO: 31659 - DNA, 462 bp, Homo sapiens
  misc_feature (1)...(462): n = A,T,C or G
tgccnnnnnnnnnnaacatagagcccataggcagcgtcgtggaattcctacccctaatagccaaaatgggaaaggaacagactcatatcaacattgtcgtcattggacacgtagattccggcaagaccaccactactggccatctgatctataaatgcggcggcatcgacaaaagaaccattgaaaaatttgagaaggaagctgctgagatgggaaagggctccttcaagtatgcctggggcttggataaactgaaagctgagcgcgaacgtggcatcaccattgatatctccttgtggaaatttgagaccagcaagaactatgtgactatcattgatgccccaggacacagagactttatcaaaaacatgattacagggacatctcaggctgactgtgctgtcctgattgtagctgctggaggtggtgaatctgaagctggtatctccaagaatgggcaga

SEQ ID NO: 31660 - DNA, 243 bp, Homo sapiens
  misc_feature (1)...(243): n = A,T,C or G
acttggannnanaanataannatgncatcatgacaactgcacataaagaaaaatataaatgcatacttccccttgtgacaagtggggatgaggaagaagaaaaggattataaaggccctaatccaagagagcttttggagccactatttaaacaaagcagttgttcctacagaattgagtccttatggacttacgaagtatgtcatggaaaacacattcggcagtaccatgaagagaaagaaa

SEQ ID NO: 31661 - DNA, 477 bp, Homo sapiens
  misc_feature (1)...(477): n = A,T,C or G
agccnnntnnnntnnaaaccgggacgtcaggcaacgacagtgncattcaacttctgcaaacacacacatatttaggcaacgccttttttcgtcaacctcctaatatagagagttggatttcggaatgtcgaaagataccttcatattgcttcccggcacacacacacacggtgtcttttatgtgtggcttgtgtgaatgtgagtgcgtgtctctaggctctacatgtaggatgaggtcccctggtccttatctgctctcctcatccccaccttgttctaccagaaccagaggaagagatcattgccgaggactatgacgatgatcctgtggactacgaggccaccaggttggagggcctaccaccaagctggtacaaggtgttcgacccttcctggtgagcctgggtgagggggagctaacttctggcttcacccttcctgtgctgaccttggttgtgaggtttatggggacacaan

SEQ ID NO: 31662 - DNA, 506 bp, Homo sapiens
  misc_feature (1)...(506): n = A,T,C or G
nattggagcccttgatcactgtccgngnggngcaattccctccctccttcactctctcattccttcccttcctatcttacccaccattcccttcctccctcactcattcactccctccctgtctccccctctcatcccctccctctctcattccctttccctccctccttaactctcgttctctcctccctctctcattccttccctccctgtctcatttccccccttctttccctccctccctctcctcttctcccattgcctccctccctctttgattcccttctttcctcctctcctccacttgttcccttcgtcacgcgctcattccctccctcccgcggcctgctccttccccgctccctccgcggacggggccgctgaccgtagcgcgccccctgcgggatatcggggagaatcgcttaacaccgccagagtgaacaggtgctagtttgtgtgcccgttcctttactgagagtttgcagtaaatctaattcccagtcttn

SEQ ID NO: 31663 - DNA, 472 bp, Homo sapiens
  misc_feature (1)...(472): n = A,T,C or G
aggcccccnnnnnnnnnnaaccgaagattaccacactgaagcgncgnggaattcagactattggcctgcggggcctcatgagccctcaaccaagtggggcaaggaggaggctgtgcttagcacgggcttggcttttaaagccaggggctggatgagggcatcagcaaggctggtccaaggtggggtcagggaagacgttgggcaccaaggtggggagtgggcgccggaggtcccggcaggatggagggaccaggaatgtgggcgtcggggcaccagtggcaccacaggagaggagccactgacatcctgggcaccgcctgcccccaggtgaacacacccgcagccgaggtgctctacacagtcatccaggactgggcccaattggatgcggggagcatggtgctggacgtgtgctgtggcaccggcaccattggcctggccctggcccgggtgagccctcctgccctgctga

SEQ ID NO: 31664 - DNA, 455 bp, Homo sapiens
  misc_feature (1)...(455): n = A,T,C or G
nctcgatagcactacgccagngnggnggaattcctgctgtgcacttgggtcctggagcccttctccacccggatagattcttcacccttggcccgcctttgccccaccctactctgcccagaagtgcaagagcctaagccgcctccatggccccaggaaggattcaggggagaggccccaaacagggagccacgccagccagacaccccggccagaatggagctgactgaattgctcctcgtggtcatgcttctcctaactgcaaggctaacgctgtccagcccggctcctcctgcttgtgacctccgagtcctcagtaaactgcttcgtgactcccatgtccttcacagcagactgagccagtgcccagaggttcaccctttgcctacacctgtcctgctgcctgctgtggactttagcttgggagaatggaaaacccagatggaggagaccat

SEQ ID NO: 31665 - DNA, 466 bp, Homo sapiens
  misc_feature (1)...(466): n = A,T,C or G
aaaaaaaatttgataccatatgtttgagcngcatttccccggctcgagctgcgcgtgctgcggcgttaccggctgcagcggcgggaggactacacgcgctacaaccagctgagccgtgccgtgcgtgagctggcgcggcgcctgcgcgacctgcccgaacgcgaccagttccgcgtgcgcgcttcggccgcgctgctggacaagctgtatgctctcggcttggtgcccacgcgcggttcgctggagctctgcgacttcgtcacggcctcgtccttctgccgccgccgcctccccaccgtgctcctcaagctgcgcatggcgcagcaccttcaggctgccgtggcctttgtggagcaagggcacgtacgcgtgggccctgacgtggttaccgaccccgccttccttgtcacgcgcagcatggaggactttgtcacttgggtggactcgtccaagatcaagcggcacg

SEQ ID NO: 31666 - DNA, 467 bp, Homo sapiens
  misc_feature (1)...(467): n = A,T,C or G
agccnnnnnnnnnnnannccaggttgacangcagaancgncgaataatcgggagggcgcgcggccgagcggaggcggagtcggcgccgagaacatggctggaggcaaagctggaaaggacagcgggaaggccaaggctaaggcagtatctcgctcacagagagctgggctacaggtgctggagctggcaggtaatgcttctaaggatctcaaagtaaagcgtatcactccgcgtcacttgcagcttgcaatccgtggtgatgaagagttggattctcttatcaaggctaccatagctgggggtggtatgtattactacttaagccttgattcttattggtctttctgactaatatatcgttcagatcaatgatatagtatatttgatcggttaactagaaagcatataaactttaatttcataaatactaaatctataacaattctaagcttttcataatgagctga

SEQ ID NO: 31667 - DNA, 463 bp, Homo sapiens
  misc_feature (1)...(463): n = A,T,C or G
ggccnnnnnnnnnnncactcgagcctctagtgcagcgtcgtggaattcgtcatcagagggatcagcagctccagggaaggcctggctgccccgcttctaaatgccactccccctcccatcagcgttcgtgctgtcagccttgcagccttctcctactcattccagctccaatacccagcggctgccagaccgagtgaccggcggcttctcagtgaatggacagctcattggcaacaaggccaggagccctgggcagcatgacggcacgtacttcgggcggctgggaatcgcaaaccctgccacggactttcagttggaagtgactcctcagaacattacgctgaaccccggctttggtgggcctgtgttttcctggagggaccaagctgtgctgcggcaggacggggtggtggtgaccatcaacaagaagaggaacctggtggtgtctgtggacgacggtggc

SEQ ID NO: 31668 - DNA, 467 bp, Homo sapiens
  misc_feature (1)...(467): n = A,T,C or G
ggccnntnnnnnnnnnaatggatgtctantagagccagcgtcgtggaattccttggctaatatttttattttttgtagagaagaaggtctcactatgttgccccggcctcaggtgatcctcccacctttgcctcccaaagtgctgagattactcccacctcctttaagctcatagatgtacttaggacagtgcccagcaccaagcaggtgctcaatgtgctaccagctactcttatcatcattgctgtccagtgtttctttttttttttttttggagaaaaaatttttttttttgtgccccggctgggagggaagggggccaatttgggttactggcccctttggttccgggggtaaaggaaattttctggcttaaccccccaaggtccttggaatacaggggggggccccccacccccacaaattttttggttttaagaaaaaaaagggttcccccatgtgggcaa

SEQ ID NO: 31669 - DNA, 453 bp, Homo sapiens
  misc_feature (1)...(453): n = A,T,C or G
nctcgatagcactacccagngggnggaattcgtgcctgtagtcccaactacttgggaggcttagatgggaggattgcttgagcccaggaagttgaggctgcagtggagctgtgatcatgttactgcactccaactggggcaatagagtgagacactgtctcaaaaataataaataaaaactgcattttatcaggatccacagctggtgccttgcaccttgaatttgagaggaactaggataaagtccaaatgcaaacttggggtgcaagaacttgtaccttgcctagacctcacctagacagcctgctttctcaaggccgagccctggctgtaccaaaattctcactgtcccccgagcaaggcctgctttggtacatttttgcccccacctttccctctgtctgaaatgtcctttgcctgtccgttcactcagcatcttccgagaaccagttc

SEQ ID NO: 31670 - DNA, 470 bp, Homo sapiens
  misc_feature (1)...(470): n = A,T,C or G
aggcccgnnnnnnnnnannccaggtttacangacgacagcgncgnnggaattanngattctcctgcctaagcctcccgagtagctgggattatccgcatgcgccaccacgcccggctaattttgtatttttagttgagacggggtttctccatgttggtcaggctggtctcaaacttccaacctcaggtgatccacctgcctcggcctcccaaagtgctgggattacaggcatgagccaccgtgcccgaccgtaaccaaatgtttttaaaactccaaggggaggattctggcttcccctgtccgtgttccatctagccacacaggagccatggaagtggcagagcccagcagccccactgaagaggaggaggaggaagaggagcactcggcagagcctcggccccgcactcgctccaatcctgaaggggctgaggaccgggcagtaagggcacaggccagcgtgggtagn

SEQ ID NO: 31671 - DNA, 562 bp, Homo sapiens
  misc_feature (1)...(562): n = A,T,C or G
ggcggggnnnnacctggacctccntcnggnngccnnnnncttgaccatcgttcgtgtggngcaattcggaaggaagagtgagaaggaaggagaagacatcatcaaccagctccacaaaacccagggagccggttaatcatgtgctttcattaagagcagaaacagagttttagtgatattctgggtcctgaggcaaaattttctgaaggtgtttccctctagatctgcttatcagccatgttcaaataccattgtttcagtctattactccaagaaaatggcatctcgtccagccagagaacccacctcttttcataggccctaggtcctgagtggctctttggagtagctgtatcttggatcttgatgctccaagagtgaaactgtttctttcaactatggagttcagatcttgagccaaaaatctttcagcggctggtacaaaaaaaatccgctgtaaaaccatttacaatggtaccagccagaaatgtgataacctgtgtacattcagatttctgggttacctgaatggaactcttacacttattacctatcacaaggg

SEQ ID NO: 31672 - DNA, 464 bp, Homo sapiens
  misc_feature (1)...(464): n = A,T,C or G
atgcggntnnnnnnctttcagtcggattgcagagccncnaannntaaggaaggcggaggcaaccatgcgaggttctgagaattgcggcgagggtcgcctctttagacggtttctgagcacgaattctgaaatccccgccacttcctccctccgggggaagcgatcccctatggacaccgctaacagcatcatcgggctggatgatgatgacgaagatgaagcagctgctcagccagggccctcccacccactccccaatgcggcctcacctggggcagaagcccctagctcctctgagcctcatggggccagaggaagcagtagttcgggcggcaagaaatgctacaagctgcagaatgagaagctgttcgaagaggtccttgaactttgtaagatgcagacagcagaccaccctgaggtggccccattcctctataaccggcagtaacgagcccactctctgt

SEQ ID NO: 31673 - DNA, 479 bp, Homo sapiens
  misc_feature (1)...(479): n = A,T,C or G
cgcccccccncnnanaattgagaccnatgagaccatgcgcagngngcnggaattcgcgccaagggacgtgtttctgcgctcgcgtggtcatggaggcgctgccgctgctagccgcgacaactccggaccacggccgccaccgaaggctgcttctgctgccgctactgctgttcctgctgccggctggagctgtgcagggctgggagacagaggagaggccccggactcgcgaagaggagtgccacttctacgcgggtggacaagtgtacccgggagaggcatcccgggtatcggtcgccgaccactccctgcacctaagcaaagcgaagatttccaagccagcgccctactgggaaggaacagctgtgatcgatggagaatttaaggagctgaagttaactgattatcgtgggaaatacttggttttcttcttctacccacttgatttcacatttgtgtgtccaactgaaattatcgct

SEQ ID NO: 31674 - DNA, 470 bp, Homo sapiens
  misc_feature (1)...(470): n = A,T,C or G
aggcccggnntnnnnnannnccagggttacaagctgaagcgtcgaggaattctgaacgtctgaggttatcaataagctcctagtccagacgccatgggtcatttcacagaggaggacaaggctactatcacaagcctgtggggcaaggtgaatgtggaagatgctggaggagaaaccctgggaaggctcctggttgtctacccatggacccagaggttctttgacagctttggcaacctgtcctctgcctctgccatcatgggcaaccccaaagtcaaggcacatggcaagaaggtgctgacttccttgggagatgccataaagcacctggatgatctcatgggcacctttgcccagctgagtgaactgcactgtgacaagctgcatgtggatcctgagaacttcaagctcctgggaaatgtgctggcgaccgttttggcaattcatttcggcaaagaattcacctgtga

SEQ ID NO: 31675 - DNA, 499 bp, Homo sapiens
  misc_feature (1)...(499): n = A,T,C or G
nttttgccttgatacactatccgngnggngcaattcgagcttttgactcangtcaagctttggatgctgtaaatttttgagaaagccaactagtgtggaagcttgctgccccactgcagtgggtctgagtgacctgttggctttgtgcggaggcttgcatccagccagttgtatttattctgtgtgtgaacccctcctaggaaggcctccaggaaggctgccctgtggccacacccatcctcctttcctctctgctgactccacatttccaaaattcagtgcaaaaaaagccctgctgagcatcacatgctggactcttcccctgccacaccgctcagtgccttctgttctcttgagactccctctgagtagctgagtgaatccaaagccataattgaccctgaacgtangaggaggaaaaggcagagctgacctaagaagtgngaccctggccgggcgaggtggctcaagtctgtaataccagcgctttgggaggccg

SEQ ID NO: 31676 - DNA, 481 bp, Homo sapiens
  misc_feature (1)...(481): n = A,T,C or G
ccctccccccnnnnnnattgagaccccatgagancntaggccangnggnggaattccgccgctgcggagggagccgccgccatgtctgcgcatctgcaatggatggtcgtgcggaactgctccagtttcctgatcaagaggaataagcagacctacagcactgagcccaataacttgaaggcccgcaattccttccgctacaacggactgattcaccgcaagactgtgggcgtggagccggcagccgacggcaaaggtgtcgtggtggtcattaagcggagatccggccagcggaagcctgccacctcctatgtgcggaccaccatcaacaagaatgctcgcgccacgctcagcagcatcagacacatgatccgcaagaacaagtaccgccccgacctgcgcatggcagccatccgcagggccagcgccatcctgcgcagccagaagcctgtgatggtgaagaggaagcggacccgccccn

SEQ ID NO: 31677 - DNA, 470 bp, Homo sapiens
  misc_feature (1)...(470): n = A,T,C or G
agccnngntnnnnnnnanncctgggggtccatgatgccagctcctgggtaacatttgttgccgtaccacccctaacatcaagcacgccaccagaataaacttcaataacatccgaggtgctggtgttatcaacaatttgcgtgccaccagaatagatatgcgtattttttgccgttgacttactattcagagactgagttccgccttcaatcgtcgtgtccagcgcacggctctcatatactctttgctcaccgccatttttaatggttgttgtttctactgtgctctgttcaacatactggcgaccaccatttatggttgtgttcgttgccagacttccttgtactacgtcctgagagccagacttatttatcgttgtaccatcagcgtgcccttgaacttttactatctggctaccaccatcaatgagcattccattcgcactgcctgcctctacgcgtgaagcgccg

SEQ ID NO: 31678 - DNA, 479 bp, Homo sapiens
  misc_feature (1)...(479): n = A,T,C or G
cggtgcnggannncgcaactgagaccatcatcgagnccgtaagacggngcnggnggnggnggnggtttcttcttggcaggcaggcgggtgcggcctcgggccttcctagcagggtcaccaggtcgcagcgaggggtcccgcatgaagctgagcagtgtctcctcgtcctgcagcagttcctctgacagcagccctggagcagggtcctcgcggtgcccattgttcagtggccactcgctcatggccatgttctctgctgtgatctgcaccgactgtgccagccagctgttgaagaaggtgccatcgatggggaatgaggtggacaggcctgccagctgccccaggactgagtcaggccccgccttcactttctctttcttctcagtgctgcccttggagccctcgcagcccttcctcttcgagtcactcttcttgccctttgctctcctcccagaccgctctcgacacagatcctgttc

SEQ ID NO: 31679 - DNA, 462 bp, Homo sapiens
  misc_feature (1)...(462): n = A,T,C or G
aatgagacctnattgaagagcgctggaaancaccggcctgggcaggtggtgggaacgttgctggggtgggcatctgtgctttcggctgccctctggcccatgaaattcctcccaggggccaggccagagatgggccaggcagggggagggcaagtgagggaacatgaacccctggctgacctgagtcagaaagctgctggcccctaaattccagagattcagcaacaaagaggcctagtagggagaggagttactaggtttaggggtttttcccagaacacccaggactctggccaggggctggaaggtgctccaggctcaatgctgggcaatactcatggattaattggtgctggctgggcctgccagcctagtcgtggccccagggtccccactaaagggctccttctccagcgcccactctggtggcaaggtcttcactaccatcacctgcctggactg

SEQ ID NO: 31680 - DNA, 481 bp, Homo sapiens
  misc_feature (1)...(481): n = A,T,C or G
ccccccgcccccccgttgagaccntctttgagaccctaggcagngncgnggaattcagaaaaggggaaggcggagctaggtgggaagttcattggaatagacggtccagagaagagaatatgggtcagaagtcatgaggctttggcttagcatgggcagtgtggaaagctctagatccagtccccaaacttggccctagtccactgacttgttacataatcttgggcaaaacactgtaccttttgaacttcagctctttcacctgtgcacaaaagtgttagatctcctccacggccccctttagtcctcaagtctgtgctttagagtgttttcatgggagggaccctcccatcttcttctgccccagggtccccagttcaccttctcccaggaggacttcctgacttccatccttccctctctcacggaaatcgatactgtggtcttcattttcaccctggatgacaacctcacggaggtg

SEQ ID NO: 31681 - DNA, 462 bp, Homo sapiens
  misc_feature (1)...(462): n = A,T,C or G
attgagncccatcgagaccctcggcagngngcnggaattccccatgcagccctggctctgccaagtgcccaagagagaggagtcacagtgactggactcagacccgagtcctggcagagatgttgacggaggaggaggtggtaccttctgcacctcccctgcctgtgaggcccccgaagacatcaccagggctcagaggtggggccggggttccaaacctggcccagagactggaggccctcagagaccagattggcagctccctgcgacgtggccgcagccagccaccctgcagtgagggcgcacggagcccaggccaagtcctccctccccattgaaggccaagtgggaacccaggagactgctgtgtgacctcagactgggctccacactcttgggcttcagtctgcccatctgctgaatggagacagcagctgctactccacctgcagctgggctagg

SEQ ID NO: 31682 - DNA, 463 bp, Homo sapiens
  misc_feature (1)...(463): n = A,T,C or G
natcgaganccatttgaagngcgctggaattcgagaactgcgggaggcgggggaggaaagcggcgggcgagcgctggctgacattttcctgcccggaaggatgcatggcccggggtctcctgcacctgagggtgggcgggaggcggccccgcgggttgtgttactggaaaaaggggtctcgatccagaccccaagagagggttcttgggtctacttcagggaagaattggaggcgagtcacagagcgcagtgaaggaagcaagtttattggaatctactccgttagagagtgcaagtcctcagactgcaggaggaggaactcccgtccttcggtagtgtcactacttagaggcaactgtgaggagctgtgattaatcgtggaatgtgctgatgtgcccactaaagatgcctggtaagcagtggctcctctaacaagtgggcagcttggaactgggaacgagag

SEQ ID NO: 31683 - DNA, 463 bp, Homo sapiens
  misc_feature (1)...(463): n = A,T,C or G
attgaggcccatcgagaccataggccgngngcnggaattctgaaaggctccctgagtgtggaagagcagctgtcactcatcagtggttgtcccaatatccaagaagcagtagagggtgccatgcacattcagatggagtctcgctctgtcgcccaggctggagtacagcggcgtgaactcggcttactgcaagctccgcctcccgggatcacgccattctcctgcctcagcctcccgagtagccgggactacaggcacccgccaccacgcccagctaattttttgtattttttagtagagacggggtttcaccgtgttagccaggatggtcttgatctcctgaccttgtgatccgcccgcctcggcctcccaaagtgctgggattacaggcgtggtggctgaattaatttacattaccaccagcagtgtataagtattcccaatgtctgtattttaaaatgtt

SEQ ID NO: 31684 - DNA, 492 bp, Homo sapiens
  misc_feature (1)...(492): n = A,T,C or G
nttctgatagcagtncgtgtggtggaattcgtgtcaaggatgtgagaggcaagggctgctgggagagtatgtcccgtaggaaaggaggaaagatagtgccagaagtgaagagggaccctgatgtccaaaggacactggggtgggggtcatggggtggagtgggacaggagatggtggtgagtctgggagtgaggactcttcgggcgtctcctggtgcctgaaggaaacagggtcaaaagcacaatcggaggctggttatggtctgggtcaggaggggtggacagtggccttactgggcgtcggggggccctgaagttctggggctcaccagaacccctcctcctccaccagtaggagggcagggcaggcggcacgccctcctcagtccgtaaaatactctcggagttcggcttcacactaacactgtgattgggtttctttctcttttcagactgctgtggatgtttttcgaaagataattntggaggcaga

SEQ ID NO: 31685 - DNA, 463 bp, Homo sapiens
  misc_feature (1)...(463): n = A,T,C or G
natcgaganccatttgnagngctgtggaattcccgggcagtgcatttgcaccgacggctgggacggggagctctgtgatagagatgttcgggcctgctcctcggccccctgtgccaacaacgggacctgcgtgagcctggacgatggcctctatgaatgctcctgtgcccccgggtactcgggaaaggactgccagaaaaaggacgggccctgtgtgatcaacggctccccctgccagcacggaggcacctgcgtggatgatgagggccgggcctcccatgcctcctgcctgtgcccccctggcttctcaggcaatttctgcgagatcgtggccaacagctgcacccccaacccatgcgagaacgacggcgtctgcactgacatcgggggcgacttccgctgccggtgcccagccggcttcatcgacaagacctgcagccgcccggtgaccaactgcgccagg

SEQ ID NO: 31686 - DNA, 466 bp, Homo sapiens
  misc_feature (1)...(466): n = A,T,C or G
attgagnccaatcgaganccataggcagngngcnggaattcctgagaagatggtccggctggagagacgggtgggcggaggacagggaccaaaatgcagagaggatggtccggctggagagacgggtgggcggaggacagggaccaaaatgcagagaggatggtccggctggagagacgggtgggcggaggacagggaccaaaatgcagagaggatggtccggctggagagacgggtgggcggagggctgcaacagtggggtgtgaagaccctgagagcagcacctcccgcccgcatgggggtgccaggaggcaaagagcctttacccagagggttttcaactgaatgacactgtcaaagaaaagccaggatccactaaggcaagaagtattaaaagtattttagggaaagtcatttaaagctctataacattgtattttcatggaatcttctagattcttccccn

SEQ ID NO: 31687 - DNA, 463 bp, Homo sapiens
  misc_feature (1)...(463): n = A,T,C or G
natgagaccctaatcgaaggctgtaattcagnggncagaaattctcaattttttgaatagtttccatttcaaatatcttgttctacttggttcataaaatagtggctttcaaactgtagagctctggacttctcacttctagggcagagggagcctgaacaagtgaggctctgggttcctcattcctaattaaaccaatggaaagaaggggtctaataacaaactacagcaacacatttttcatttcagcttcactgctgtatctcccagtgtaaccctagcatccagaagtggcacaaaacccctctgctggctcatgtgtgcaactgagactgtcagagcatggctagctcaggggtccagctctgcagggtgggggctagagaggaagcagggagtatctgcacacaggatgcccgcgctcaggtggttgcggaagtcagtgcccaggccccacacagtn

SEQ ID NO: 31688 - DNA, 539 bp, Homo sapiens
  misc_feature (1)...(539): n = A,T,C or G
tctttgtttgatccgccacgttgagaacgatggattacgtcggtttctagttcgattactacaagacacagggggnnnaaanaatgagccattgaaggcctggaancccagaaaggaggcatgaagaagactctgctgctggatgtggggctgctgctgacctggtagagtgggcaggttctgggggaccagacggtctcagacaatgagctccaggaaatgtccaatcagggaagtaagtacgtcaataaggaaattcaaaatgctgtcaacggggtgaaacagataaagactctcatagaaaaaacaaacgaagagcgcaagacactgctcagcaacctagaagaagccaagaagaagaaagaggatgccctaaatgagaccagggaatcagagacaaagctgaaggagctcccaggagtgtgcaatgagaccatgatggccctctgggaagagtgtaagccctgcctgaaacagacctgcatgaagttctacgcacgcgtctgcagaagtggctcaagcctggttggccgccagct

SEQ ID NO: 31689 - DNA, 489 bp, Homo sapiens
  misc_feature (1)...(489): n = A,T,C or G
agggcctncccccctttgagatcgatttccgtggcgggaacctagcctcccaagtgctgggattacaagcacgagccatggtgcctggccacacatatactctaattaacattctttcctctcctgccttcgttgatatttttaccactttcatttactcttattcttcatggcttacatttcagccttgaggaatacatataatctaaattcagtggctcagctctgcctctgtgagttgtgaagaggacaaggtctgagaaggaatatctgatgccagatggtgggcctcttgtgtcctcaaggcaaaacctactctttgccggcacaaagaagtgagtagcattaataagcagaattaggatggagccagagaagccgtgaccatgggcgtggcatcctccagaggactgagagagcggngggcagcccggtcagtgagttgattangaaccagcgatagagatcgagaaagacataagccaatat

SEQ ID NO: 31690 - DNA, 472 bp, Homo sapiens
  misc_feature (1)...(472): n = A,T,C or G
aaaaaaaattcgagaccctaggccttgaggngcatttgctgcctccactctgcaggtgcagaaacacgacattcccgtctctaaacacacctagctcctaggcttggggtgggcctatcaaatgcagggagatggacacagcacaagggccagagcttcccatgagaaaggtgagggcagctgctccctgacccgggcatctgcacttgtccctctccaccctcctcatgggcagtggagactcagcaacaaaacaagttgagtgcattagcagccagctctggagccaagtcactcaccccacggccttggctgctggtggaggggccttcccctgggcagcctccaagaagacggccaagtgctcttactcagaccacggcgctgcttcctggcacctcgatttcccacaacaacatggggtgcagacaggctagggtcccctgccctggggcctggacggcatccagtt

SEQ ID NO: 31691 - DNA, 498 bp, Homo sapiens
  misc_feature (1)...(498): n = A,T,C or G
aggggcccccncncaattgaaactagatatgcactcgcagnggcnggaattcgcccgcgatgtggagaactcaggcttcaggagaccctggccctgctcctggttgttcctggtggctttcagctctctctgcaacctgagctgggggaggagccaggcctcatgcccagggctgggagtggggagcctggtgtgcacgcgtgcccaggcctgcacgtggaccgaccaggggaggggcccagagctctggctgggtcacccgcaccccacccccatctcctccagagccaccccaggaaaagcccggctggacgaggtcatggctgccgctgcccttacaagcctgtccaccagccctctccttctgggggccccagttgcagccttcagcccagagcctggcctggagccctggaaggaggccctggtgcggcccccangcagctacagcagcagcagcaacagtggagactggggatgggacctggccagtgaccn

SEQ ID NO: 31692 - DNA, 495 bp, Homo sapiens
  misc_feature (1)...(495): n = A,T,C or G
agggcntnccncncttagagatcgtttgcagtgtgcaggaattcgatcagacaggccttcggttaaatggacaaggcacttctctgagtcttagcatcttcatatgtaaaggggcctagtagctcctaccatacactatgaggatcagatgagaaagagtgtcaacatcttagcagggacagcactcaatcaatgattgtcgttgttttaccttgctctggttggggcatcttcaagtgcaggagtaggcccaggcctgcaggtgggtcctggccatgacacgggctgtgacttccttccagccccggggtgggccaggaagtggctgggaacccaggaaggggattttggtccatgcttaggtaggccatagccaataaaggataaagagagttctcttatgtcaaggagagacgttgactgtatcttgctacttatggttgatggaggctgggtgggaaagagtgccgtgaacgattagtgatgtctgtcagg

SEQ ID NO: 31693 - DNA, 497 bp, Homo sapiens
  misc_feature (1)...(497): n = A,T,C or G
aggggcccccccccaattgaaatcgatagcatagccangngcnggaattcgggcctgctcagcatccagaggagcagcatggggggccagatgcaatgcctgttggtttattacactccactgccttcttaccaagttccagtgggtagagactctcaaaatgaggtccagccgcctttccagcaacccatgctggtccctgtgagccagtctgtgcaaggaggcctcccagcagcggtggtaccagtgtactatagcatgatcccacctgctcagcagaacggaacgagcccttctgtagggtttctgcaaccccctggctctgagcagtaccagatgcctcagtctccctctccctgcagtccaccacagatgccacagcagtactcaggagtgtcaccttctggaccacgtgtagagagcatgcagctgaatgtccctaatggaccccagccccctcagaacccatccatggtccagtggagtcattgtaaata

SEQ ID NO: 31694 - DNA, 457 bp, Homo sapiens
  misc_feature (1)...(457): n = A,T,C or G
tgcggctnncccaggcctagagcactgcanggcannnnggagncgngagctgctctgccgaagaccttaaaatggccagaagtctggncccctaggctctggagccatacgtgacaaaaatggctcagggagctgttggaggcgtgttcatcacgacggcaggttccacgtctaacggcacaaggttctctgccaggtgacagtcgttgagggtgtgggagaggcgtcatctgggcctcccccggggtccaggggccaaggcagggcagccgtctcaggtgtggccatcaggtctgtggctgctctgacgtggcttgtctgtccaggcagtggggccccgctggctttccctgtgtggagagctgcttttcttagttggtttctgctcactaaaaactgaaagtaatacatggtggntgttttttcatagtatcacctaataagtaaagtaggaatg

SEQ ID NO: 31695 - DNA, 531 bp, Homo sapiens
  misc_feature (1)...(531): n = A,T,C or G
ggggagttgagnccctnnnnnnnatcgaccccgtccgtgtggtggaattcgatgttctaaatcctacctaaatattcttactcttaaagctatggtcataaaacccactggctttcttcaaaaggtagattacattattagaaagttgtaaagatatattatcaccaaactaaaactttgcttttgctttattcagaggaatttaaagataatagacaagaaatttctatttagggctatgtccctgtaccacactttagggaatgaaacactgtcatatgtcctgtcagataactgagttaaacatttcactttgcagttaacaaaacagctagagcctaggtataatgctgtggtatgtgtcttagtttttgctttttccgttctctcataataagtgatcctgagtatgtctatttttctctccaggatattttgctcatcaacctcattatagaacatatgatttgtgatacagatcctgaacttggagggagcagccagcttatgggcctgcttcgaactttagtt

SEQ ID NO: 31696 - DNA, 445 bp, Homo sapiens
ggtgaaccaggcgtggtggctcatgcccataatcccagcactttgggaggctaaggcaggcagatcacttgaggtcaggagtttgagaccagcctggccaacatggcaaaaccccacttctactaaaaatacaaaaattagctgggcgtggtgatgggcacctgtaatcccagctactcaggaagctaaggcaggagaatcgcttgaacccaggaggtggaggttgcagtgagccaagatcacaccactgggctacagagtgactccatctcaaaaaaaaaaaaaaaaaaaaaaagggggggaaagttaaccctgccccatggggccccagggggaataaagccctttccctttccccaccccccttaagccgaggacaaaaacaaagttctttcttgaagtttcttggtgaaggaacggccctttttaaggcacctcaacgggg

SEQ ID NO: 31697 - DNA, 489 bp, Homo sapiens
  misc_feature (1)...(489): n = A,T,C or G
cgggctcnaggggngnnttttgagaccctatcgcagtccctaggccanngcgnggaattcgagaaggaggtcccccacggcccttcaggatgaaagctgcggtgctgaccttggccgtgctcttcctgacggggagccaggctcggcatttctggcagcaagatgaacccccccagagcccctgggatcgagtgaaggacctggccactgtgtacgtggatgtgctcaaagacagcggcagagactatgtgtcccagtttgaaggctccgccttgggaaaacagctaaacctaaagctccttgacaactgggacagcgtgacctccaccttcagcaagctgcgcgaacagctcggccctgtgacccaggagttctgggataacctggaaaaggagacagagggcctgaggcaggagatgagcaaggatctggaggaggtgaaggccaaggtgcagccctacctggacgacttacagaagaagtggcagg

SEQ ID NO: 31698 - DNA, 502 bp, Homo sapiens
  misc_feature (1)...(502): n = A,T,C or G
tggagggaaggggnnncnnnnnaatcgatccacagtccatgtggtggaattcgtgacataaaaatagaaaagaggatgttctttcttgaaaataagcgacgacattgtaggtcctatgaccgacgtgctctccttccagctgtgcaacaagagcaggagttctatgagcagaaaatcaaagagatggcagagcatgaagactttttgcttgccctacagatgaatgaagaacagtatcaaaaggatggccagctgattgagtgtcgctgctgctatggggaatttccattcgaggagctgacgcagtgcgcagatgctcacttgttctgcaaagagtgtctcatcagatatgcccaagaggcagtctttggatctggaaagttggagctcagctgcatggaaggcagctgcacgtgttcgttcccaaccagtgagctggagaaggtgctcccccagaccatcctgtataagtactatgagcgaaaagccgaggaggaggttg

SEQ ID NO: 31699 - DNA, 427 bp, Homo sapiens
cctcctgtactagccgttcccttcagcaaggagggcactgagctcagggtgagggcagctggggtgtgtgcaggagctcaggctggagagggtgggtggagctggtgctgtggggctgaggggtatgggaaggctccccgcatgtgggggtggggtggacagagaccactccaggccctcagtgctgcttaggctaagagaggtggggtggagggacagggctggaagatctgggtagcccagaatgaggagggtgcctgtgctgtcactgaatgagagggagtggttcattccacccggctgccgagcctcagaggggggcattcctatcctgccccacctccctgtttatgctgccacctggaagccttgaggcccccaaattccagtacagacccagtggtgtgttcatggtggcgtggttgct

SEQ ID NO: 31700 - DNA, 451 bp, Homo sapiens
  misc_feature (1)...(451): n = A,T,C or G
nattgagnaactggagaccctcggacagngcggnggaattcgcagactgtgtccctgacaatgggaacagccgacagtgatgagatggacccggaggccccacagcacacccacatcgatgtgcacatccaccaggagtctgccctggccaagctcctgctcacctgctgctctgcgctgcggccccgggccacccaggccaggggcagcagccggctgctggtggcctcgtgggtgatgcagatcgtgctggggatcttgagtgcagtcctaggaggatttttctacatccgcgactacaccctcctcgtcacctcgggagctgccatctggacaggggctgtggctgtgctggctggagctgctgccttcatttacgagaaacggggtggtacatactgggccctgctgaggactctggtagcgctggcagctttctccacagccatcg

SEQ ID NO: 31701 - DNA, 470 bp, Homo sapiens
  misc_feature (1)...(470): n = A,T,C or G
aggacggnnnnnnnnaactgaggactganaatctggnagnnnnccgncggangcccagggaagacagggcgacctggaagtccaactacttccttaagatcatccaactattggatgattatccgaaatgtttcattgtgggagcagacaatgtgggctccaagcagatgcagcagatccgcatgtcccttcgcgggaaggctgtggtgctgatgggcaagaacaccatgatgcgcaaggccatccgagggcacctggaaaacaacccagctctggagaaactgctgcctcatatccgggggaatgtgggctttgtgttcaccaaggaggacctcactgagatcagggacatgttgctggccaataaggtgccagctgctgcccgtgctggtgccattgccccatgtgaagtcactgtgccagcccagaacactggtctcgggcccgagaagacctcctttttccaggct

SEQ ID NO: 31702 - DNA, 509 bp, Homo sapiens
  misc_feature (1)...(509): n = A,T,C or G
nattggaagccactggagcgccgtgcagtgcggtgcgatcactgagagaacccaccgtggcgctgcacgatgtcgacgagaccggcatgcaggccgcctgccgtgcagtgcccgcccacgctcactagtatggtgcggaggccctggagaggatgttcctgtccttccccaccaccaagacctacttcccgcacttcgacctgagccacggctctgcccaggttaagggccacggcaagaaggtggccgacgcgctgaccaacgccgtggcgcacgtggacgacatgcccaacgcgctgtccgccctgagcgacctgcacgcgcacaagcttcgggtggacccggtcaacttcaagctcctaagccactgcctgctggtgaccctggccgcccacctccccgccgagttcacccctgcggtgcacgcctccctggacaagttcctggcttctgtgagcaccgtgctgacctccaaataccgttaagctggagcctcggtagccgttcct

SEQ ID NO: 31703 - DNA, 470 bp, Homo sapiens
  misc_feature (1)...(470): n = A,T,C or G
ggggaggagcnggggccnnnnncctgagaaactgatgatctcggacangcggtggaattcgccccacgccagctcccttcctgaagccaccgtgcaccccgtgaaagcccagctagatggagtctcggtctgttgcccaggctggagttcagtggtgctatctctactcactgcagcctctgcctcctgggctcaagtgatcctcccacgtcagcctcccgagtagctgggactacaggcacacgccaccacacccggctaatttctgtgttttcagtagagatggggtttcaccatgttgcccaggctggtctcgaactcctgacctcaagtgatccatccgcctcggcctcccaaagtgctgggattacaggcgtgagccgccgcgcccggccagcactctccaatttctgatccaactgcattgtcatacagaaatcacaccttgatcgtgtttacagactcatttc

SEQ ID NO: 31704 - DNA, 469 bp, Homo sapiens
  misc_feature (1)...(469): n = A,T,C or G
ggggaggagccggntnnnnnnncctcgagacctgaggaccntcggaggaanccatgggggaggnggtcgcactctccttgaggcgccggttgccggccacaacccttggcggagcctgcctgcaggcctcccgaggagcccagacaggtgcagccacagcttcccggatcaagaaatttgccatctatcgatgggacccagacaaggctggagacaaacctcatatgcagacttatgaagttgaccttaataaatggggccccatgggattggatgctttaatcaagagtaagaatgaagttgactctactttgaccttccgaagatcatgcagagaaggcatctgtggctcttgtgcaatgaacatcaatggaggcaacactctagcttgcacccgaaggattgacaccaacctcaataaggtctcaaaaatctaccctcttccacacatgtatgtgataaaggatct

SEQ ID NO: 31705 - DNA, 464 bp, Homo sapiens
  misc_feature (1)...(464): n = A,T,C or G
agcgggctnnnaactgacctgacaccctacgccgnngcctggaattcaatatcgcggtcgatagagtgtaaacggcccgaaccaacccgataatctcccttacctgtgccttgcctttgacagccataggaggactgcgcctgacatgtaccttccttgaccgtggaccgtgccactgccactgctctttcgtaataaagcgagggagctggcctacggtgcctgaggagctggcattacatctcgatgcttggcagcccagagcaacctggggtgatcccgcgggctctcatggacctcctgcagctcacaagggaggagggtgccgagggccggccatgggccctttctgtcaccatgtcttacctagagatctaccaggagaaggtattagacctcctggaccctgcttcgggagaccttggaatccgagaagactgccgggggaatatcctgattccggg

SEQ ID NO: 31706 - DNA, 502 bp, Homo sapiens
  misc_feature (1)...(502): n = A,T,C or G
agcggccggnncccaataggaaactgagagcactcgcagngncccggaattcggaagcaggagaggttgcagccctgttctgaccctgccatcccgccctctcctcacccctgccccacagggactgcatcgccctctgcttcctcaacagcggcaccagctttgtggccggctttgccatcttctccatcctgggcttcatgtctcaggagcagggggtgcccatttctgaggtggccgagtcaggccctggcctggctttcatcgcttacccgcgggctgtggtgatgctgcccttctctcctctctgggcctgctgtttcttcttcatggtcgttctcctgggactggatagccagtttgtgtgtgtagaaagcctggtgacagcgctggtggacatgtaccctcacgtgttccgcaagaagaaccggagggaagtcctcatccttggagtatctgtcgtctccttccttgtggggctgatcatgctcacagagggcgg

SEQ ID NO: 31707 - DNA, 481 bp, Homo sapiens
  misc_feature (1)...(481): n = A,T,C or G
ngggtcgagatcatatccatgtggttgtattcgcggagagaaacccaaaatgcagccgcttcagaaggaaagcggccccatcaggtggggacagaagagggtaggcagcagaggccaggtctgtggacaaaagccccacttcagagtggttggaagccaggacaggagggactcatggaggtgaccgcttcacaggagtcctttctccagtcgtgctagggaggagcccctgcctgtccagcactgcccctgcctcttgctgtaccttgccagtgtgccctccccccgcccactaccatagtaggcatctggcttttcccaccaacccatctacctttttggtggtccagacctacagtctccttgcagagcactcctcctcccaccctcacttcaagtgaggtttggatgagattgaccacatccccttggtcacaaatattggctcaggaatggacatgtggccctgttcaagcctatg

SEQ ID NO: 31708 - DNA, 488 bp, Homo sapiens
  misc_feature (1)...(488): n = A,T,C or G
ngggctcgaaaccctatgnagngngnctgatgtacctagtcagtgtggtggaattctgacacctcaccatgtgtacgggaaaatgtgcccgctgtgtggggctctccctcattaccctctgcctcgtctgcattgtggccaacgccctcctgctggtacctaatggggagacctcctggaccaacaccaaccatctcagcttgcaagtctggctcatgggcggcttcattggcgggggcctaatggtactgtgtccggggattgcagccgttcgggcagggggcaagggctgctgtggtgctgggtgctgtggaaaccgctgcaggatgctgcgctcggtcttctcctcggcgttcggggtgcttggtgccatctactgcctctcggtgtctggagctgggctccgaaatggacccagatgcttaatgaacggcgagtggggctaccacttctaagacaccgcgtaaggtttagcctgtattcgtgtn

SEQ ID NO: 31709 - DNA, 500 bp, Homo sapiens
  misc_feature (1)...(500): n = A,T,C or G
attgagccactgatcactgtccgnannnnncgancactgangcttgnctggaagcctaccacgatgtcaatgtcactggcatgcagtcgtctcctctgcagggccgagctggggccattcaggcagccgtgggcctggagctgagcagtgatgtggccaccagcctcgatgtggccgtggaggggcttaacgggcagctgcccaaccttgacctgctcaatctcttccagaccttctgccagaaagggggcctgttgtgcacgcttcaaggcaagctgcagcccgaggactggacatcattggatggaccgctgcagggcctgcagacactgctgctcatggttctgcggcaggcctccggccgcccccacggctctcatggcctcttcctgcgctaccgngtggaggccctaaccctgcgtggcatcaatagcttccgccagtacaagtatgacctggtggcagagggcaaggctatggagggcatgttccgcaagctt

SEQ ID NO: 31710 - DNA, 508 bp, Homo sapiens
  misc_feature (1)...(508): n = A,T,C or G
aattgannncaatcgagcaccgctccgngnggngcaattccatccctgtagtcccagctactcaggaggctgaggcagaaggatcactggagcccaggaggttgagactgcagtgagctatgattgtgccactgcactcaaacctaggtgacagagtgagaccctgtctcagaataataataataataataataataataataataataataaaagtttaaatttcagcttccctactttgtaattgactgacttcaagcaaataatcttgtctataaatccatgaagagtgctaagccatcactggaatacattagcgaaaaacttgtatcaggtaactcaggtctctatataagaccccttaaaaaaatctgaaaatgtaaattagttcccattagtaggctgtgccttgtaggagaaagagaaatgaagaccctttctcactaacatgaacccttccttcccacactcccagataaaggttaaacacatgttaaaagaaccttgg

SEQ ID NO: 31711 - DNA, 455 bp, Homo sapiens
  misc_feature (1)...(455): n = A,T,C or G
gcgagccggnnnnnnnatagaactagtttncntaggccgngncgnggaattcctttctttctttctttctttctttctttctttctttctttctttctttctttctttctttctttctttctttctttctttcttgtttcatcctaccactcccaattaatctttccattttcgtctgcgtttagtaaatgcgttaactaggctttaaatgacgcaattctccctgcgtcatggatttcaaggtcttttaatcaccttcggtttaatctctttttaaaagatcgccttcaaattattttaatcacctacaacttttaaactaaactttaagctgtttaagtcaccttcattttaatctaaaagcattgcccttctattggtattaattcggggctctgtagtcctttctctcaattttcttttaaatacattttttactccatgaagaagcttca

SEQ ID NO: 31712 - DNA, 483 bp, Homo sapiens
  misc_feature (1)...(483): n = A,T,C or G
ggcgtntnnacctgactgcatncgttggngcaatccacctgcacgcctgccagggcctctctggggcagccatgaagtccctcgtcctgctcctttgtcttgctcagctctggggctgccactcagccccacatggcccagggctgatttatagacaaccgaactgcgatgatccagaaactgaggaagcagctctggtggctatagactacatcaatcaaaaccttccttggggatacaaacacaccttgaaccagattgatgaagtaaaggtgtggcctcagcagccctccggagagctgtttgagattgaaatagacaccctggaaaccacctgccatgtgctggaccccacccctgtggcaagatgcagcgtgaggcagctgaaagagcatgctgtcgaaagagactgtgatttccagctgttgaaactagatggcaagttttccgtggtatacgcaaaatgtgattccagccagactc

SEQ ID NO: 31713 - DNA, 493 bp, Homo sapiens
  misc_feature (1)...(493): n = A,T,C or G
agcggctgntnnnaattgaacatcgccagcactccagcgaggtcgaattcgtctgcggcagcggcagcaagacggtgcagtgaaggagagtgggcgtctggcggggtccgcagtttcagcagagccgctgcagccatggccccaatcaaggtgggagatgccatcccagcagtggaggtgtttgaaggggagccagggaacaaggtgaacctggcagagctgttcaagggcaagaagggtgtgctgtttggagttcctggggccttcacccctggatgttccaagacacacctgccagggtttgtggagcaggctgaggctcttgaggccaagggagtccacgtggtggcctgtctgagtgttaatgatgcctttgtgactgncgagtggggccgagcccacaaggcggaaaggcaggttcggctcctggctgatcccacttggggcccntgngaaggagacagacttattactagatgaatcgctggtgtcc

SEQ ID NO: 31714 - DNA, 491 bp, Homo sapiens
  misc_feature (1)...(491): n = A,T,C or G
gagcggtgnnnnnnccatcgactcgcctngcattggngcaattcctattatccagcctacagtaactatgcaacaaaaacaccaaggaacgttggtaggcatttctcttttggctgtcttctaaacaggtacttcagggctgccacaggttcacaggtgcagtggctgatgggaacttcaggttccaggtccggggcttcaggtatcacagacttgatccttgaaaggtgtatccaactatctaatcccagtactttgaccgcagaaggcgtggccagtatcactgaaaacggtgcctttccattggggttgtaattgttgaggaggtgacccctccgtccatgctttaacaagcaccttatctgctggcctgatttgaggtggctggttagcttccagtaccggaagccttttgagtncanacttctgtgtaaacctgctgacattgtcctaggttaactaggtattttactaaaccagctgtttctgan

SEQ ID NO: 31715 - DNA, 457 bp, Homo sapiens
  misc_feature (1)...(457): n = A,T,C or G
gaggggccggnnnnnacctgtactgcgtncataggccangncgnggaattcccgcctccctgctacaggcacgttcaaggccaaggcccttccctgccaatccccagacccagagctggaggcgggttctgctcccgtccaggccccactagccttggtccctgaggaggccgagaggaaagaagcctccagctgctcctaccagcagatcaactgcctggacagcatcctcaggtacctggagagctgcaacctccccagcaccactaagcgtaaatgtgcctcctcctcctcctataccacctcctcagcctctgacgacgacaggcagaggacaggtccagtctctgtggggaccaagaaagatccgccgtcagcagcgctgtctggggagggggccaccccacggaaggagccagtggtgggaggcaccctgagcccgctcgccctggccaan

SEQ ID NO: 31716 - DNA, 209 bp, Homo sapiens
tgtctcgacttcctccacagagtcggcacactatggctgccctctgggctcccagaacccacagcatgaaagaaatggtgctacccagctcaagcctgtgcctttgaatccggacacaaaaccctctagcttggaaatgaatatgctgcactttacaaccactgctctacctgactaaagaaatcgctctcgaacgtgaagagagagga

SEQ ID NO: 31717 - DNA, 230 bp, Homo sapiens
  misc_feature (1)...(230): n = A,T,C or G
cccnaangacatcngnccggagngaggtgggcgtggctgtcaccatggagccctgccggaagcagattgaccagcagaactgtacctgttgaggcacttttgtttcttgggcaaaaatacagtccaatggggagtatcattgtttttgtacaaaaaccgggactaaaagaaaagacagcactgcacataacccatcttccgggaagggaggccaggatgcctcaatgttn

SEQ ID NO: 31718 - DNA, 491 bp, Homo sapiens
  misc_feature (1)...(491): n = A,T,C or G
cgttctnaaggggcnnnnattgagaccctattcgagatcactagtccatgtggtggaattcgttaccccggggtgatataggggggccagacgtgtgccccgttcacccacccccaggcttgcatctgacctgtcccctggcccagcccttaggcccagctttcaacctgcttactcatttctcaggggattttgggaaggaatcagcaggtgacagttgctaagcaaccaaagggggtggtgtttcccaactgtcttgggacaaaaagggtaagagcacccttagatccagatgttgccaaggaaacccagagtgcccagctgtctggaatgaagtgacagaggtagaaaacagtaggccctcacaggaggccaccttcgctagcagggagtgggaggcttctttccagggatttgtgtctccgttctgaaggttctgcgtcctgttttgtcaattccctagacggttttgaagttatattctgttaaag

SEQ ID NO: 31719 - DNA, 470 bp, Homo sapiens
  misc_feature (1)...(470): n = A,T,C or G
agagccaggggtttgaacctctgagancntcngaagngncgnggaantccttggatgcaatgaggtctctaacaatactctcctgccctcaggttactttcaccccttcctgctgaaactcatccaacagcctcaaaatgcgagcatgtttgtcaacagacccgccctcggaatcctgcctccggagaactttgtggagaagctccggcagtccttgctctcggtggctcccaaagggatgtcccagctcatcaccatggcctgcggctcctgctccaatgaaaacgccttaaagaccatcttcatgtggtaccggagcaaggaaagagggcagaggggcttctcccaggaggagctggagacgtgcatgattaaccaggcccctggctgccccgactacagcatcctctccttcatgggcgcgttccatgggaggaccatgggttgcttagcgaccacgcactctaaag

SEQ ID NO: 31720 - DNA, 451 bp, Homo sapiens
  misc_feature (1)...(451): n = A,T,C or G
attgaaactcgantacactatccatgtggtggaattccggtgcttccctgaggctgaggcgcccggcctcccgcccgccgcgctccagatgaagtgtgagcactgcacgcgcaaggaatgtagtaagaaaacaaaactgatgaccaagagaatgtgtcaaccgatgcaccgagtccagcccaggaaaatggagagaagggagaattccacaagttggctgatgccaagatatttttgagcgactgcctggcatgtgacagctgtatgactgcagaggaaggagtccaactttcccagcaaaatgccaaggacttcttccgcgttctgaaccttaacaagaaatgtgatacctcaaagcacaaagtgctggtagtgtctgtgtgtcctcaatctttgccttattttgctgctaaattcaacctcagtgtaactgatgcatccagaagactct

SEQ ID NO: 31721 - DNA, 515 bp, Homo sapiens
  misc_feature (1)...(515): n = A,T,C or G
gggctctannnnnngnnnaatcgatacccctngaanncctcgataacatatgcagngncgnggaattcgcgcggaggtctggcctataaagtagtcgcggagacggggtgctggtttgcgtcgtagtttcctgcagcgtctggggtttccgttgcagtcctcggaaccaggacctcggcgtggcctaccgagttatggcgacgaaagccgtgtgcgtgctgaagggcgacggcccagtgcagggcatcatcaatttcgagcagaaggaaagtaatggaccagtgaaggtgtggggaagcattaaaggactgactgaaggcctgcatggattccatgttcatgagtttggagataatacagcaggctgtaccagtgcaggtcctcactttaatcctctatccagaaaacacggtgggccaaaggatgaagagaggcatgttggagacttgggcaatgtgactgctgacaaagatggtgtggccgatgtgtctattgaagatactgtgatctcactn

SEQ ID NO: 31722 - DNA, 455 bp, Homo sapiens
  misc_feature (1)...(455): n = A,T,C or G
ggggccggnnnnnaatagggaattcangcaacgacangncgnggaattccgatctgctgctcgtctcaggctcgtagttcgccttcaacatgccggaaccagcgaagtccgctcccgcgcccaagaagggctcgaagaaagccgtgactaaggcgcagaagaaggacggcaagaagcgcaagcgcagccgcaaggagagctactccgtatacgtgtacaaggtgctgaagcaggtccaccccgacaccggcatctcctctaaggccatgggaatcatgaactccttcgtcaacgacatcttcgaacgcatcgcgggtgaggcttcccgcctggcgcattacaacaagcgctcgaccatcacctccagggagatccagacggccgtgcgcctgctgctggccggggagttggccaagcacgccgtgtccgagggcaccaaggccgtcaccaagtan

SEQ ID NO: 31723 - DNA, 487 bp, Homo sapiens
  misc_feature (1)...(487): n = A,T,C or G
gcgcggntnnnaactgaactagcagcactgcgcgnggncgaattccagggtctagggtgttgttggagtggcagttggtccgaatttctcccgaagcccgcggaggagcggcgcgccgcgattcaccagcctggtcccttctgcggagagcgatgccgcttcccgacaccatgttctgcgctcagcagatccacattcccccggagctgccggacatcctgaagcaattcaccaaggctgccatccgcacccagccggccgacgtgctgcggtggtccgcgggctatttttcagctctgtcgagaggagatccacttcctgtaaaggacagaatggaaatgcccacggcaacccagaaaacagacacaggcctgactcaaggactcctgaaaagtttgcacaagcagtgtcaccacaagcggtatgtggaattaacagatcttgagcacaaaaggaagaacctgtggcctgccgaaaggaaaatcaa

SEQ ID NO: 31724 - DNA, 451 bp, Homo sapiens
  misc_feature (1)...(451): n = A,T,C or G
nctggatagcactacccangncgnggaattcccaacaccctctagcttggaaatgaatatgctgcactttacaaccactgcactacctgactcaggaatcggctctcgaagcgagaggaaccagacctcatcagcccaacatcaaagacaccatcggaacagcagcgcccgcagcacccaccccgcaccggcgactccatcttcacggccaccccctgcggcggacggttgaccaccagccaccacatcatcccagagctgagctcctccagcgggatgacgccgtccccaccacctccctcttcttctttttcatccttctgtctctttgttgctgagctttcctgtctttccttttttctgagagagtcaaagcctccacgactctgtttcccccgtcccttctgaatttaatttgcactaagtcatttgcactggttggagttgtgga

SEQ ID NO: 31725 - DNA, 453 bp, Homo sapiens
  misc_feature (1)...(453): n = A,T,C or G
agggccggnnnnaaattgggatgggagctacgacangncgnggaattcgagtcaagagatttttattttcccttcacaagctgaacaggagcctttggagagaacgctctggaccggtgagtgagccatgaggtcgggccacaggctctgaagtcgtgaagccttgggacggagcgggtggtgcttcgaggaagcgcgcccccggggccggtcccggagggctcgatccgcatctacagcatgaggttctgcccgtttgctgagaggacgcgtctagtcctgaaggccaagggaatcaggcatgaagtcatcaatatcaacctgaaaaataagcctgagtggttctttaagaaaaatccctttggtctggtgccagttctggaaaacagtcagggtcagctgatctacgagtctgccatcacctgtgagtacctggatgaagcatacccaggg

SEQ ID NO: 31726 - DNA, 457 bp, Homo sapiens
  misc_feature (1)...(457): n = A,T,C or G
agcggctgnnnnnnncccggacttgcgcancacttgtcgnggccntcgcagcactcagtgaggccgcccggcacacaaggcacgtttggcatttctctttgagagagtttatcattgggagaagccgcggggacagaactgaacgtcctgcagcttcggggcaagtgagacaatcacagctcctcgctgcgtctccatcaacactgcgccgggtaccatggacggccccgtcagccacacctgtcagcccaagcagagtgattcaggggctccccgggggcagacacctgtgcaccccatgagtagtgcccacttgaggctggcactcccctgacctcacctttgcaaagttacagatgcaccccaacattgagatgtgtttttaatgttaaaatattgatttctacgttatgaaaacagatgcccccgtgaatgcttacctgtgagataaccacan

SEQ ID NO: 31727 - DNA, 455 bp, Homo sapiens
  misc_feature (1)...(455): n = A,T,C or G
ggcggctnnnnnnaaaaggggcagtcgngcaaagtagagacgnggaannttgnaagccctatgtcatctcctacctggtggatttggacatggtcctcaaatgtctcctgtattatgccggctgggctgataagtaccacgggaaaaccatccccattgacggagacttcttcagctacacacgccatgaacctgtgggggtgtgcgggcagatcattccgtggaatttcccgctcctgatgcaagcatggaagctgggcccagccttggcaactggaaacgtggttgtgatgaatgtagctgagcagacacccctcaccgccctctatgtggccaacctgatcaaggaggctggctttccccctggtgtggtcaacattgtgcctggatttggccccacggctggggccgccattgcctcccatgaagatgcggacaaagtggcattcacaggc

SEQ ID NO: 31728 - DNA, 453 bp, Homo sapiens
  misc_feature (1)...(453): n = A,T,C or G
nttcgagttcgtagtccgtgtggcggaattcgggacggtggtcgcggcgctattgggggtcccagtccggcttaagacctctgggcgtggtgtccggctttgctggcccagcaagcctgataagcatgaagctcttatctttggtggctgtggtcgggtgtttgctggtgcccccagctgaagccaacaagagttctgaagatatccggtgcaaatgcatctgtccaccttatagaaacatcagtgggcacatttacaaccagaatgtatcccagaaggactgcaactgcctgcacgtggtggagcccatgccagtgcctggccatgacgtggaggcctactgcctgctgtgcgagtgcaggtacgaggagcgcagcaccaccaccatcaaggtcatcattgtcatctacctgtgcgtggtgggtgccctgttgctctacatggccttcctga

SEQ ID NO: 31729 - DNA, 486 bp, Homo sapiens
  misc_feature (1)...(486): n = A,T,C or G
agcgctgnnnnnnaattgaactgcgtcacagtggngcaattccacctggagccaaggatgcaaatggctcaacaaggacactgcttgagaagatgggagggaagccaagacccagtgggcgcatccggtccgtgctgcatgcagatgagatgtgagctggaacagaccttcctggcccacttcctgatcacaaggaatcctgggcttccttatggctttgcttcccactgggattcctacttaggtgtctgccctcaggggtccaaatcacttcaggacaccccaagagatgtcctttagtctctgcctgaggcctagtctgcatttgtttgcatatatgagaggggacctcacaaacctttgtgatgtgaatgcgaattaattttttccttggtatagggttgaggggaaataagttttgagtgagaaataaacgttttatgctgcnnaaaaaaaanaacannnaccaaccaaaaaaaaaaaaaa

SEQ ID NO: 31730 - DNA, 481 bp, Homo sapiens
  misc_feature (1)...(481): n = A,T,C or G
cgccccccatgatatcctcgtgaggccgtaggaagancnaananggaaggcttaaggataaattccttcttatgttacatttcaaaaaagattctgtgcagtgttttagttaagcccgcccggttaaaattagacctgctaagttcaaatcccaactccaccactacttgtggaactttagatatgttccttcacttctctgtgcctatttcgtcatctgcaaagtgaaacgatcatagaacctacctcatagagttgtgttacaagatgcaatgagtcaacaggcagaaagcactcagaacagtgcctgagacatgagttctttgtaagtgtttgatatgatggctgcttagttatctccctggtcgtgaaatcatagctttagattctgggtctagaatgggaggacccatggagaccactgggttcaagtctcttgttttagaagtgaagaaactgcggcccatagagaagtgactgg

SEQ ID NO: 31731 - DNA, 452 bp, Homo sapiens
  misc_feature (1)...(452): n = A,T,C or G
ntttgatagccactacccagngcggnggaattcgatgtgaagggcattgattctggagccagactgcctgggtttatctgccatggaccagctgggtgaccttgagcaagctgccttaacttgcctcagtttccccatctgtaaaatggagacggtgccatcctcccaggactagtgatgtgaaccctacagaacagggcctggcggtgtgtaggaagggttcgggattcacctaactgcatcctgctcgcttgcacacttccttacctgcccctcctgtggtttatctgtccctcagagggatgcggcagccctttgctgacagcttcagtggcctccgtctttgtgacatgtgtggtgcggttcagcccttccctgtttcttctcctgaggcccgagacccaccttgtgctctggggaggcgtttgctgcctgtggctatggtacagatc

SEQ ID NO: 31732 - DNA, 455 bp, Homo sapiens
  misc_feature (1)...(455): n = A,T,C or G
nttcgatatgcactagcccagtgtggnggaattctcgatggcaagggtgtccttcgccagatcactgttaatgatttgcctgtgggacgctccgtggatgaggctctgcggctggtccaggccttccagtacacagacgagcatggggaagtttgtcccgctggctggaagcctggcagtgacacgattaagcccaacgtggatgacagcaaggaatatttctccaaacacaattaggctggctaacggatagtgagcttgtgcccctgcctaggtgcctgtgctgggtgtccacctgtgcccccacctgggtgccctatgctgacccaggaaaggccagacctgcccctccaaactccacagtatgggaccctggagggctaggccaaggccttctcatgcctccacctagaagctgaatagtgacgccctcccccaagcccacccagccgcan

SEQ ID NO: 31733 - DNA, 248 bp, Homo sapiens
aaaggaccctgagatccaggaggccttgcacgaggaagtggtgggtgtggtgccagccgggcaagtgccccaccacaaggactttgcccacatgccgttgctcaaagctgtgcttaaggagactctgcggtaggacagaatgctgttctggggggcacaggatctctttgtggggagggaatcagaggaggaaatctgaagtgaagacaggtgggctggggctagtgacaaggatgagatgggagagg

SEQ ID NO: 31734 - DNA, 487 bp, Homo sapiens
  misc_feature (1)...(487): n = A,T,C or G
natcgagagcctatcgatgtggggcttttcttacagattgggaaatggtggtggggaaaccgaacaatttatgtttgctcttgaaactgttttaggtgtggcctgaagtcactgatcctgagaagttcgtgtatgaagatgtggctatcgcagcatacctgctgattctatgggaagaagaaagggctgagaggggactaactgccaggcagtcctttgtggacctgggatgtggaaatggcctcctggtccacatcctgagcagtgaggggcatccaggcagagggattgatgtccgaagaagaaaaatctgggacatgtatggaccacaaactcagttagaggaagatgcaatcacacccaatgataagacccttttccctgatgttgattggttaatcggtaaccattctgatgaactcacaccatggatacctgtcattgcagccaggtcttcctacaattgccgcttctttgtcctcccctg

SEQ ID NO: 31735 - DNA, 501 bp, Homo sapiens
  misc_feature (1)...(501): n = A,T,C or G
ggattcgatnncctnntnnnnnnnnnnnnaatcgatgatccctgtgcagngtcgnggaattcctgagtgtgggccgctcctcgctaactgcatgcagcctcccactctgcgcatgtctgcttgggcagaaaatgctgagacactgtggccggacctgacagtcagcacttggcagtgggctctgtggacccagcatttctcatagcgtcaacccacctcttgccttgttgaggctttttcctttcagatgagctgtccttgacattctgatgtggtgaaatggttagcagcatggactttggaaccagatagacctagatacaaaccacatgtctaacacttgctacctctgtgaccttgggcaaccccctccctcagcctcagttttctcatctgtaaagtggggagaatttccatcaagattgtccggagacctaaatgagataattcctggaaagtgtttagaacacagcatgtggtccctcaataggccgtggctgg

SEQ ID NO: 31736 - DNA, 486 bp, Homo sapiens
  misc_feature (1)...(486): n = A,T,C or G
cgccggccaactgataccctagatgatggccgtagncggagaacccctaaccaactctcttcctgtctcttcatttgctcccccagggtcactcaagatgtgtcaactgtctggagtggaatgagaaaggagagtaagtatgagctagagcacctgaagggtgctggggaaggaagtaaggagggtggaacagcaaggctcctcctgagaggatccaaggaaaagattggacccaaatgaaaagagactgctgctgtctgccgttcttcagcttagcccataattttcaacacaattaaacaatctcagatagatggaaagttggatgaccatccaaaccctgttttgttttgttttgttttgttttagagacagagtctcattctgtcacccaagcgctgtngaatggcgnngacntgnctcactgcnncctccacctttcaggntgaagcggatctccttaatcagcctcccaagtaactggga

SEQ ID NO: 31737 - DNA, 496 bp, Homo sapiens
  misc_feature (1)...(496): n = A,T,C or G
ggattgatnccccntnggnnnnnncnaactgatgaccctaggcagngtcgnggaattccccagacaggggtgggtggtgcatgaatgttgaattgcgttgggtggtaggtgggatgtttgtgtttgaagcctgtcctgctccccacctaggttctatgaacaccctagcccaccctgacagcccttttcctggagtccagcccccagcttggcatagttggtgaagacccattgtctgcctatcgccaggcactcagagaaagcctctatcccccttctgtgggttcacgggctctctggggccacgctgcaggtggtggcttgccctgttgcctggccctcagctcaggcccttggagtgcctctctgccctgtctgctgccccggctgctcctcttaccctccctccctctctgcccgcttccggcccagtttctcagctacctcagtgcctgtgaccgcctgttacgtcagggatatgaggaaggcctggtgg

SEQ ID NO: 31738 - DNA, 484 bp, Homo sapiens
  misc_feature (1)...(484): n = A,T,C or G
ccatagaagaccatcgcangncggnnaatagacctttagacagacgagccnnttttgtcccaccaccccaagacttgcttgagctacaaaataaggatcttcataaatttagcaccatctgaaaggaaggagattgtggacgggttcaatgcactccgagctgctcgcttccactacctgcaggaggcattcccaggggccagcgacgcagatctggtgccaaagctctccacgaactacctgaaggaaggctacatggagaagacggggcccaagcaaacggaaggcttccggaagcgctggttcaccatggatgaccgcaggctcatgtacttcaaagaccccctggacgccttcgcccgaggggaagtcttcattggcagcaaggagagtggctacacggtgctgcatgggttcccgccgtccacccagggccaccactggtcacatggcatcaccatcgtcacgcccgaccggaagtttg

SEQ ID NO: 31739 - DNA, 492 bp, Homo sapiens
  misc_feature (1)...(492): n = A,T,C or G
cgccggcctttagaaaccctaaactgagaccctggccaagncgnggaattccctggaggccaagaagagaaagtgtttcctggagcgagtgatccaatgtgtggtcagccctgctgctgaacaggaggccgaagacgagagctgcccggaggactgggcagcagctgttccagcagagacatcagcaaaagccatctagaggtggatccagagtgtggactaacagagaaaagaagtggagggagagcaggcctgcagctggccgcagacatagccagcctccagaaccgcattgactggggtcgaagccagctccggggactccaagagaaactcaagcagctggagcctggggctgcctgacatgcgcgcaaagaggcagggcagcgagcacagctgttctccgacatggctacgtgatctcaggccttcttccttcacaattagctcttgcccctaccccacgccagctaatgccccttctgtgtccct

SEQ ID NO: 31740 - DNA, 480 bp, Homo sapiens
  misc_feature (1)...(480): n = A,T,C or G
gatgatccctcgaggncggatgatagcatccgaacnacagagagnccgccaatagaaacataagagacaaagactcactatgtttctcaggctggtcttgaatttctggcctcaagcgatcctcccacctcagtctgccaaagtgttgggattatagacatgagccactgcacctggccgaccttgggcaagttcttaaacccttcaaagcctcatttttctccaatcacaaaagggaaagatggtaatattttccccaccaaattcttgtcggatgccctcacagaattgagattatgtacgtaaaacacaaggtgcctaacccggcacagagcaggagggctaagcgtgacatccagcacgtggtcagtggaatccagtattcctacccacctctctagtctcccctccacccctcttcctttcagaggcaccaagctgcttgtgggcttgtctgttcccactccctgcctgactgaa

SEQ ID NO: 31741 - DNA, 488 bp, Homo sapiens
  misc_feature (1)...(488): n = A,T,C or G
aggccccccactgagaccataggtagagngccgtaanncgagcaagactgtctccaaaaagaatattcaatactcccaagcatgtccctcacctcttagctgagagcagccagtgccctgatggcggcagacagctgccgacatattcccagggctgccgacatattcccaggcactacaacatcatagttaagagcacaggccccagaagcagctgcctggttcagctttctggcttgtcacatgttatatggcaagtcttgggccagccacttgacttccctggacctctacttcctcatctgtaaaatgggggtggtgatcattgccatctcatagggtggctgagtgggattaaaggagaacgtgtgttaagtttttaggaccttaccaggcatacattagcattctctattgcgagagaccctgcccggccacacaggatgggtgttgaagttcttctcggagagagttgctggctgggcgtg

SEQ ID NO: 31742 - DNA, 490 bp, Homo sapiens
  misc_feature (1)...(490): n = A,T,C or G
aattgactgagtacactccgagnggngcgaattagcaggagtgccagctggcaagcggtcctgcagacacagaggtgattgtggccttggctgtatgtggctccatcctcttcctcctcatagggctgctcctcaccgtcctcttccggatgcaggcccagcctcctggctaccgccacgtcgcagatggggaggaccacgcctgacaaccactcagcccccttccctccacctactaagggaggggggctgggccctcgctcctgactgttgctgctccccagcccatggacaggagatcctgggttgggcctccctctgatgaccccagccagatgagcgagtggggctcagcgtggcccatggtgcctgtcactcagcattcccatgcctgatgtttaccaagtgctgtgttggacactggctttctccaaacaggatttgcctnctccacgctccctacacacctgagatgtaaactggcagtcan

SEQ ID NO: 31743 - DNA, 505 bp, Homo sapiens
  misc_feature (1)...(505): n = A,T,C or G
ggatgtgccnnnnagggcgncctttgatncccctaatcgatatcctaggcagngtcgnggaattcgagccctgtacacaggcttttccatcctggtgactctgctcctcgctggccaggccacctccgcctacttcctgtaccagcagcagggccggctggacaaactgacagtcacctcccagaacctgcagctggagaacctgcgcatgaagcttcccaagcctcccaagcctgtgagcaagatgcgcatggccaccccgctgctgatgcaggcgctgcccatgggagccctgccccaggggcccatgcagaatgccaccaagtatggcaacatgacagaggaccatgtgatgcacctgctccagaatgctgaccccctgaaggtgtacccgccactgaaggggagcttcccggagaacctgagacaccttaagaacaccatggagaccatagactggaaggtctttgagagctggatgcaccattggctcctgtttgaaatg

SEQ ID NO: 31744 - DNA, 489 bp, Homo sapiens
  misc_feature (1)...(489): n = A,T,C or G
nggcgtcccaattgatanccnttnctagagagccgtaanncctcgcgtcgntgtggagcgctgtcttcccgcttgcgtcagggacctgcccgactcaatggccgccatggcatcagatgaaggcaaactttttgttggagggctgagttttgacaccaatgagcagtcgctggagcaggtcttctcaaagtacggacagatctctgaagtggtggttgtgaaagacagggagacccagagatctcggggatttgggtttgtcacctttgagaacattgacgacgctaaggatgccatgatggccatgaatgggaagtctgtagatggacggcagatccgagtagaccaggcaggcaagtcgtcagacaaccgatcccgtgggtaccgtggtggctctgccgggggccggggcttcttccgtgggggccgaggacggagccgtgggttctctataggaggaggggaccgaggctatggggggaaccggtt

SEQ ID NO: 31745 - DNA, 481 bp, Homo sapiens
  misc_feature (1)...(481): n = A,T,C or G
tactgaaacctcgaaggnctgataccgtcgaccgngcgggatgaggccgagcaagatggaattggggaggaggtgctcaagatgtccacggaggagatcattcagcgcacacggctgctggacagtgagatcaagatcatgaagagtgaagtgttgagagtcacccatgagctccaagccatgaaggacaagataaaagagaacagtgagaaaatcaaagtgaacaagaccctgccgtaccttgtctccaacgtcatcgagctcctggatgttgatcctaatgaccaagaggaggatggtgccaatattgacctggactcccagaggaagggcaagtgtgctgtgatcaaaacctctacacgacagacgtacttccttcctgtgattgggttgggggatgctgaaaagctaaagccaggagacctgttgggtgtgaacaaagactcctatctgatgctggagaaccttgccacaggaggag

SEQ ID NO: 31746 - DNA, 493 bp, Homo sapiens
  misc_feature (1)...(493): n = A,T,C or G
aggcgnnnagnnccancctaaatngactttgatanctncggaancncccagcncgnnctgatntactcggccctcattctgcacgacgatgaggtgacagtcacggaggataagatcaatgccctcattaaagcagccggtgtaaatgttgagcctttttggcctggcttgtttgcaaaggccctggccaacgtcaacattgggagcctcatctgcaatgtaggggccggtggacctgctccagcagctggtgctgcaccagcaggaggtcctgccccctccactgctgctgctccagctgaggagaagaaagtggaagcaaagaaagaagaatccgaggagtctgatgatgacatgggctttggtctttttgactaaacctcttttataacatgttcaataaaaagctgaactttcnnagagaaaatggaagcaagaactggcttcatactgaacttgcctccttttgaaggagaaccttggcgttgggttc

SEQ ID NO: 31747 - DNA, 469 bp, Homo sapiens
  misc_feature (1)...(469): n = A,T,C or G
nctcgatagcagtacgctagngcgngcaattccaacaacaaaatcacctaatgacgcctttctcagaacgtatccccgttgttaagtgatgcacggctgtgcttgcatctgttgttggatttttctgttccattaatttgcctttttgtgctattattaatatcgtattttagtatttgctaggataagctgtctctcattcctcttctcacccagcattttttggctatccccacaattttgtctcctggataagtttactcctttttaagaggcagctggcaggaagcctggtcagactaattcaagtgccccatgcagggagaaggcccggcttctatggtggcagctaccgtccatgcctcccatttgaagacgcagctccttctgcagcggagtcactaactgacccagccaagttggagggaagccaccaggaggggctgtgctgggcttgcttcccgcctcg

SEQ ID NO: 31748 - DNA, 469 bp, Homo sapiens
  misc_feature (1)...(469): n = A,T,C or G
natcgatagcctacgctagngcgnggcattcccaagaccgtgttcctgtcgggtctgccgccgcccccagcggagcccgagcccgagcccgaacccgaacctgaacctgcgctggacctcgcggcgctgcgtgcggtcgcctgcgactgcctgctgcaggagcacttctacctgcggcgcaggcggcgcgtgcaccgttacgaggagagcgaggtcatatctttgcccttcctggatcagctggtgtcaaccctcgtgggcctcctcagcccacacaacccggccctggccgctgccgccctcgattatagatgcccagttcatttttactgggtgcgtggtgaagaaattattcctcgtggtcatcgaagaggtcgaattgatgacttgcgataccagatagatgataaaccaaacaaccagattcgaatatccaagcaactcgcagagtttgtgccattggattatt

SEQ ID NO: 31749 - DNA, 511 bp, Homo sapiens
agccaggccttagaaccccctcccatagatccactatcgagagaggacgaattccaggtcaggagatcgagaccatcctgcctaacacggtgaaaccccgtctctactaaaaaatataataaattggctgggcgtggaggcgggcgcctgtggtcccagctacgcaggaggctgaggcaggagaatggcgtgaacctgggaggcggagcttgcagtgagccaagactgcgccactgcactccagcctggtgacggagtgagactctgcctcaaaaaaaaaaaaaaaaaaaggtgggtgttgggtctaataaccccggggaggaggggggggataccgggggggtctcctttattaagggcatgttttttggagaccatacctcctttcgaaaaaagaacttggttagtgaaaaaaacttgggagtttcttttcactggtgggacggagatttgttgggggggaaaggagacttctttcttccctgaagactctggggaaatagaccaatgg

SEQ ID NO: 31750 - DNA, 493 bp, Homo sapiens
  misc_feature (1)...(493): n = A,T,C or G
ggtnnttnnnaggatcggaaaccttcgaaggctctgagaccntcggaaaccatggagcttttaaacacagatccctgggcccaccctaaacatacttaatcaggatcagaatctcagggcctaagaatctgtattttcaggccgggcgcagtggttcacacctgtaatctcagcactttgggaggctgagttgggctgatcacctgaggtcaggagttcgagatcagcctggcaatatggtgaaaccccgtctctactaaaaataaaattagccaggcatggtggtgcacgcctgtagtctcagctactctggaggctgaggcacgagaatcacttgaacctgggaggcggaagctgcagtgagccgagatcatgccactgcactccagcctgggtgacagagtgagactctgtctcaaaaaaaaaaaaaaaaaaaaaaatttgtttttttacaaaccccccttaatatttttccatagcgtgcccatggggg

SEQ ID NO: 31751 - DNA, 493 bp, Homo sapiens
  misc_feature (1)...(493): n = A,T,C or G
taccgaaagccctcgcannnntnttatgnaccctacgcaagngccgnggaantccctaggcctcatggcggtccgagcttcgttcgagaacatctgtgagatcggctgctttgccaagctcaccaacacctactgtctggtagcgatcggaggctcagagaacttctacagtgtgttcgagggcgagctctccgataccatccccgtggtgcacgcgtctatcgccggctgccgcatcatcgggcgcatgtgtgtggggaacaggcacggtctcctggtacccaacaataccaccgaccaggagctgcaacacattcgcaacagcctcccagacacagtgcagattaagcgggtggaggagcggctctcagccttgggcaatgtcaccacctgcaatgactacgtggccttggtccacccagacttggacagggagacagaagatattctggcagatgtgctcaaggtggaagtcttcagacagacagtggcg

SEQ ID NO: 31752 - DNA, 487 bp, Homo sapiens
  misc_feature (1)...(487): n = A,T,C or G
tggtgcnaggggnnnncctgagaccatatcgagtgccgtggaattcgtccttcttaaaagtcatgctgcaggagatcccgggaaataggcgatgggcatcctcttctccccttctgttctagactcgcctgtgtcccaggggtcttttgctctaaaaggtgtgttatgtcggtcagtcagtgcccacagcacccagggttagcaaggtgatgaatggtagcagtgctaagcatgtggatgagacgttcatcctgagaggcagggctgggctggcccatgcctataaaccaggcctcctgagaatgaaggtgtgtggggtgggctgggagcttgaggagcctgcacctgtagagcagcgaggcccccgagcagccctgctgcacaggccagtcctgtgcttttggtctcatgggtccgtgccctcagctcttgcctggggtggggattgggggacacatgggcagggttcaggccagcaggattcctt

SEQ ID NO: 31753 - DNA, 434 bp, Homo sapiens
ctaaccgtgcttttcctgctcctcatctttactctccatccacacagatgccttcagtaccttgctactaaggagtcacctcccttgtttttactgtcataaaatgagactgtgatcgaaatctcccctctttggaatcctgcccttcagataagaagcaatgtgaattaagtgcttcctgggggccgggccccagcacttcacattcactcgattcacagcctccccgtataccgtctccccattttacaggggacaagcaagcagactcccagagaagcctgtgttcctaaccgctgcacctcctgctccttcagcaggatggggtcaccaggttacactccgaggcgtcagttccatccacgtgctcagcagggacgggaagcagctcacacccacttcttgttttccttcccaacatggtcttcttggtc

SEQ ID NO: 31754 - DNA, 446 bp, Homo sapiens
  misc_feature (1)...(446): n = A,T,C or G
ntcgagattcgtagtcagtgtggnggaattctcggatcctaaggaggcgagagtgaccgtgttccccttcaacatcctggacaaccccatgtactggggaagcacagccaactacctgggctgggccatcatgcacgccagccccacgggcctgctcctgacggtgctggtggccctcacctacatagtggctctcctatacgaagagcccttcaccgctgagatctaccggcagaaagcctccgggtcccacaagaggagctgattgagctgcaacagctttgctgaaggcctggccagcctcctggcctgccccaagtggcaggccctgcgcagggcgagaatggtgcctgctgctcanggctcgcccccggcgtgggctgccccagtgccttggaacctgctgcctttgggaccctggacgtgccgacatatggccattgagc

SEQ ID NO: 31755 - DNA, 497 bp, Homo sapiens
  misc_feature (1)...(497): n = A,T,C or G
agggccngcncccactgaaaactagagcgatcgcgaggaaccgcancttntcagtctatggcgggagggtgtgacattccgacgccacttcctggaaatgaagtctgttactgacagacatctgatggagctaaaagctgagcatgtgaggctttcagggtctctgttgacctgttggctgcgcttgactgtgggagcacagtctcgggaacccaacggatctggaagaatggatgggcgggagccggcccagctgctgctgctactagccaagacccaggagctggagaaggaagcccatgaaaggagccaggagttaatacagctgaagagtcaaggggatctggagaaggctgaacttcaggaccgggtgaccgagctctctgctctgttgacccagtctcagaagcaaaatgaagattatgaaaagatgataaaggctctgagagagacagtggagatcctggagacaaatcacacagaattaatggaacatg

SEQ ID NO: 31756 - DNA, 522 bp, Homo sapiens
  misc_feature (1)...(522): n = A,T,C or G
catcgaccttcgtccagcgtggnggaattcgagacgctaaccgcccttctgcgttccataaaggtggctccagaaagggcatcctctaccccaagcccaaagcctgctgggtgtcccccatggccaaggtcccagccgagagccccacgctcccgcccaccttccccagtagcccaggcctgggcagcaagcgcagcctggaggaagagggtgctgcccacagtgggaagagactgcgggccgtgtctccctttcttaaggaggcggatgccaagaagtgtggggccaaacctgcagggtccggcctggtctcctgccttctgggcccagccctggggcctgtgcccccagaggcctacaggggcaccatgctgcactgcccgctgaacttcactggcaccccgggccccttgaagggccaggctgcactccccttcagccccctggtcatcccggccttcccggcccacttcctggccaccgcaggcccctcgcccatggncgctggcctgatgcacttcc

SEQ ID NO: 31757 - DNA, 472 bp, Homo sapiens
  misc_feature (1)...(472): n = A,T,C or G
ntttgatcgacgtcgctaggccanngcgtggaattcgccatcctgcagtgggggtgaggtgcttggggtccattctttgtccctcagcttctcagagtccggccagcccttgtgttcccgtgccccacactttcctcctccccactgcagtgagtcaatagtccagggtggggcctggcctccctgccctgattggggactcaggaggtgaggcctggggggcttcctgccccctccttgcccacctgcctgcccccgggcagcacgggagggagagcagggtgagcacgcttgttggtttcagatgcactttctgcttgcattgccgtatctgtgcgttccttcatcctggtcctggctttatggaacaccatgtttttagcatgtttttaaataaaaacggataaagtgtcnnnngccctnnnnntnnnttnnannntnnnnnttaattattgaaacaaccgatcctcct

SEQ ID NO: 31758 - DNA, 467 bp, Homo sapiens
  misc_feature (1)...(467): n = A,T,C or G
nctgatagcctacttaggacgnggcattcggnggactggcctctaacattgtcatcaccgagggctgcctgagcaagtacagcggcgtcttctccttcctgctgcagctgaagctcatgatgtgggcgctcaaggacgtctgcttccacctcaagcgcacagccctgctgagccacatggccggctctgtgcagttccgtcagctgcagctgttcaagcacgagatgcagcatttcgtgaaggtcatccagggctacatcgccaaccagatcctgcacgtcacctggtgcgagttcagggccaggttggccaccgtgggcgacctggaggagatccagcgtgcgcacgcagagtacctgcacaaggccgtcttcaggggcctgctcacggagaaggcggcgcccgtcatgaacgtcatccacagcattttcagcctcgtgctcaagttccgcagccagctcatctcc

SEQ ID NO: 31759 - DNA, 484 bp, Homo sapiens
  misc_feature (1)...(484): n = A,T,C or G
gggttcgagtccgctcnnnnnnnggtcgtagtccatagtcagtgtggtggaattcaggagtcccctacttgcccactctgcaaagaacccttccgtcctgggagcttccggcccaactggcagctggctaacgtggtggagaacattgagcgcctccagctggtgtccacactgggtttgggagaggaggatgtctgccaagagcacggagagaagatctacttcttctgtgaggatgatgagatgcagttgtgcgtggtgtgccgggaggctggggagcacgctacccacaccatgcgcttcctggaggatgcagcggctccctatagggaacaaatccataagtgtcttaaatgtctaagaaaagagagagaggagattcaagaaatccagtcaagagaaaataaaaggatgcaagtcctcctgactcaggtgtccaccaagagacaacaggtgatttctgagttcgcacacctgaggaagt

SEQ ID NO: 31760 - DNA, 520 bp, Homo sapiens
  misc_feature (1)...(520): n = A,T,C or G
natcgaacatcgatccgcgngtgggaannccgacgcgctcaccccgctgggccgtctgtgggcgcggctttgcgaagtcatccatctctcggatcactctctggcagccttgagctctcttgaaagcccagccccgggacgagggaggagcgccttaagtgcccagcgggctcagaagccccgacgtgtggcggctgagccgggccccgcgcactttctcggccggggaggggttcgggctcgggcacccggagttggcccctcgtaacgccgcgggaaagtgcgggcgagggcagtggactctgaggccggagtcggcggcacccggggcttctagttcggacgcggtgccccctggtggcgctcaccgcgcgcgtggccttggcttccgtgacagcgctcggttggccgtcacagcagccctcggttggccctttcctgctttatagcgtgcaaacctcgccgcgccacggccaaaggacaggttggagctgttgatctgttgcgcaattgctatttt

SEQ ID NO: 31761 - DNA, 470 bp, Homo sapiens
  misc_feature (1)...(470): n = A,T,C or G
nattgaatgacgtcgtaggacanngcgnggaattcgaggagaaagatggcggctaccttactaactgctcggggagccgggccagcaccggtttgggggccggaggcgttcactccagactgggagagccgataagtttccactgggaccactatcatggccgtgcagtttgacgggggcgtggttctgggggctgactccataacaaccactgggtcctacatcgccaatcgagtgactgacaagctgacacctattcacgaccgcattttctgctgtcgctcaggctcaactgctgatacccaggcagtagctgatgctgtcacctaccacctcggtttgcacaggattgaactgaatgagcctccactgtgccacacagcagccagtttgtttaaggagatgtgctaccgataccgggaagacctgatggcgggaatcatcatcgcatgctgcgacccttaagaagg

SEQ ID NO: 31762 - DNA, 472 bp, Homo sapiens
  misc_feature (1)...(472): n = A,T,C or G
nttctgtccctatccgtgggtggagtccatggccaggctctgcggctgctctgagatgctcccagcaacccccctgcacacctgagctggttccagggctcccctgccctgaacgccacccccatctccaataccgggatcttggagcttcgtcgagtaaggtctgcagaagaaggaggcttcacctgccgcgctcagcacccgctgggctccctgcaaatttttctgaatctctcagtttactccctcccacagttgctgggcccctcctgctcctgggaggctgagggtctgcactgcagatgctcctttcgagcccggccggccccctccctgtgctggcggcttgaggagaagccgctggaggggaacagcagccagggctcattcaaggtcaactccagctcagctgggccctgggccaacagctccctgatcctgcacggggggctcagctccgacctctaagtcn

SEQ ID NO: 31763 - DNA, 443 bp, Homo sapiens
cctgttagagggtgatcttcagttttacaggaagtgggtcacgggttaattttaaatgtgattccgaatctcctttcagtcctcgagaagggccaatgagcatttttcagcagtcacagccagtgtgagtgctgctctttccacctgccttgcaaattctgtttcccaggggaatgtgtctactgcctggtggttcaaaggttggaaggcagggcagaggtgggggctgattctgctgggacaggtcttccagaggcagccttcccccactgcctgtccccgtccccaccaggctgcccttgggatggaccttttcattcttttctttatattctagacagtctcttgtgtctcattgtggtgctgtcccatttttcaagtgagggtaccggggtaggggagtggcctgcccagggtcacactatgagaggcccccacctgct

SEQ ID NO: 31764 - DNA, 479 bp, Homo sapiens
  misc_feature (1)...(479): n = A,T,C or G
atcgaaaaccctnnnaangngtgtgagtccctagtccgtgtggtggaattctttggttcagtggtgagtcataatgccccaaggaaaagacaaatccaggaaggccggccctgaaagttaatggctgtcttttctgttttgtgtgacacaagctcggagtgaggatgccaggtcatctccctctcagagacgtagaggcgaggattccacctccacgggggagttgcagccgatgccaacctcgcctggagtggacctgcagagccctgctgcgcaggacgtgctgttttccagccctccccaaatgcattcttcagctatccctcttgactttgatgttagttcaccactgacatacggcactcccagctctcgggtagagggaaccccaagaagtggtgttaggggcacacctgtgagacagaggcctgacctgggctctgcacagaagggcctgcaagtggatctgcagtctgacg

SEQ ID NO: 31765 - DNA, 478 bp, Homo sapiens
  misc_feature (1)...(478): n = A,T,C or G
nttgtgtccactagtccatgtggttgaattccgcgtgcttatgctcctgtactcttcagagaagaaaatcttcattggcctcatcccccatgaccagggcaactttgtcaacggcatccggcgtgtcattgccaaccagcagcaggtcctgcagcggaacctggagcaggagcaacagcaacgagggatgggggggtagtggttaccccgggctgggcccctccaggagtcacagatgaggcccccgcagagactggtgacacgcttctgagcaggggcccctggggacttcaactgcccagcaacatggaggatggtgtcctgaggcctccaaggacggtccccacccctctacgtttccccaataaagccttttaaaaacccccnngaatgagagtaaacgagctcacctcaaaaacagaagacaaaaaatggcatttgttcaaaaggggggcgccctttgtatttaaataggcct

SEQ ID NO: 31766 - DNA, 487 bp, Homo sapiens
  misc_feature (1)...(487): n = A,T,C or G
cggggccagannnccnnncctgatacccatcgagagcctggaacacgcgggccgggtggccgccatttttggcctggagttcctcatggtgccccagttgtgcgaggacaaacactcacagtgcaagtgggtcatgggttccatcctcctcctggtgtctttcgtcctctcctccggcgggctcctgggttttgtgatcctcctcaggaaccaagtcacactcatcggcttcaccctaatgttttggtgcgaattcactgcctccttcctcctcttcctgaacgccatcagcggccttcacatcaacagcatcacccatccctgggaatgaccgtggaaattttaggccccctccagggacatcagattccacaagaaaatatggtcaaaatgggacttttccagcatgtggcctctgatggggctgggttggacaagggccttgaaacggcttgctgtttgccgataacttggggtgtcagccaga

SEQ ID NO: 31767 - DNA, 521 bp, Homo sapiens
  misc_feature (1)...(521): n = A,T,C or G
agggacataatagttgaaannnaggnngnnnnnggattgagnccctatcgaacccatccaggggcggatacggaattggttgcagaaattccacagcctcttgcaactttttcctttgcaaaccacacgatccagatccggcaggactggagacacctgggagtcgcagcggtggtttgggatgcggccatcgttctttccacatacctggagatgggagctgtggagctcaggggccgctctgccgtggagctgggtgctggcacggggctggtgggcatagtggctgccctgctgggaggtggaatttaattctcctccccttgaatatgggctggacaaagagaaaaatggtagctcaacagtggagacacctggacagcactttaaccaagtgatcaaagttaatatcgccaattatgtatgtgctcccggatgtgatgttatgagaaaggcacactatacctctgtggaattcctccccaaaacctattatctcaatctatccatagaanacactg

SEQ ID NO: 31768 - DNA, 451 bp, Homo sapiens
  misc_feature (1)...(451): n = A,T,C or G
nactgagaccctgaggacntgcgnggaattcgncctatccacagctgctgggcctctctgtggccaccatggtgactcttacctacttcggggcccactttgctgtcatccgccgagcgtgcctggagaagaacccgtaccaggctgtgcaccaatgggccttctctgcggggttgagcctggtgggcctcctgactctgggagccgtgctgagcgctgcagccaccgtgagggaggcccagggcctcatggcagggggcttcctgtgcttctccctggcgttctgcgcacaggtgcaggtggtgttctggagactccacagccccacccaggtggaggacgccatgctggacacctacgacctggtatatgagcaggcgatgaaaggtacgtcccacgtccggcggcaggagctggcggccatccaggacgtgtttctgtgctgtgggag

SEQ ID NO: 31769 - DNA, 466 bp, Homo sapiens
  misc_feature (1)...(466): n = A,T,C or G
gtaatgaccgntntatntgggantctangcagnggcnggaaancnnaccaagaaagaagattcctgccagctgggctactcggccggccccttttgggaattaccagcacgtatttctataatgggacatccatggcctgtgagactttccagtacggcggctgcatgggcaacggtaacaacttcgtcacagaaaaggagtgtctgcagacctgccgaactgtggcggcctgcaatctccccatagtccggggcccctgccgagccttcatccagctctgggcatttgatgctgtcaaggggaagagcgttctcttcccctacgggggctgccagggcaacgggaacaagttctactcatagaaggagtgcagagagtactgcggtgtccctggtgatggagatgaagagctgctgcgcttctccaactgacaactggccgggctgcaagtcagaggatggcccg

SEQ ID NO: 31770 - DNA, 471 bp, Homo sapiens
  misc_feature (1)...(471): n = A,T,C or G
ntcgagacctcgagcaccctaggnagagtggaggaagttcccaccactggctgcacgctgatggtttccacactttcacacaaaggggagccttcgagcggggcactctcacgcgccttcaagtgcacaaaagccaatgacacggtgccgtgggttgccctgtgtaggagcgtctctttaatgggctttgtaggcacagttaatgcatacaaacgcctcagtctatttcttcaccaccaccattccccgccgcggcgttttctgtatttgtttctttaacaaagagcacagcctgtccggtgcgcgcggggctccttttgctcccctccagggctcctgcagcctcgccgcgatggacctggcacctggcgcggtattcaccagctgatttctgggctccagcgttaccctttttacggcttcacaaccagtctggagcaaagaagaaacactgaggaatataagtgatag

SEQ ID NO: 31771 - DNA, 536 bp, Homo sapiens
  misc_feature (1)...(536): n = A,T,C or G
cggannnnnnnnaagggagnnnnnnnnaggggnnnnnnnnntttgaaccaccatctcgaagggccgtattccaactcacccctcccttctgaacacagaagcctcttcctggaggccgcctgccatgactccgattccctggagcccttgaacctgtcatcgggctccaagaccaagtctccatctcttcccccaaaggccaaaaaacccaaaggcttggaaatctcagcgcccccgctggtgctctccggcaccgacatcggctccatcgccctcaacagcccagccctcccctcgggatccctcaccccagccttcttcaccgcacagacaccaaatggattgcttctgactccgagtccactgctctccagcatacatttctggagcagccttagtccagttgctccgctgagtcctgccaggctgcaagggccaagcacgctgttccagggatctgcgccgccccttcgtgttacctgggattatatgaccctgcctaaaggattggcactgaagaatacactatgtttagt

SEQ ID NO: 31772 - DNA, 528 bp, Homo sapiens
  misc_feature (1)...(528): n = A,T,C or G
agggtactntanagangnnnnnnaggggnnnnnnaatcgaccacatatcgagtggccgtattcacagagtggaatgtatctgaagacataactgctgtttagcaaggagaggggagaaaagtttagggaaggggaaatgtcaagaaggtgttgtccccctttgtcctagccccatgacatgaaggctgccgggatccacatcgcctgggacacctgaaggggtagacagggctctgggaaggagggatctggtttccattaaatgtanaggatggagggtgttggttggaaggttgaggatacaggggattttgattccggctgagcctacactccaaacggcacagaggaggccggacacagtggctcacgtctgtaatcgagcactttgggaggccgaggtgggcggatcacttgaggtcaggagtttaagaccagcctggccaacatggtgaaaccccatttctattgtaaatacaaacattagccaggcttgggtgcaggcgcctgtaaccccagctactcagn

SEQ ID NO: 31773 - DNA, 529 bp, Homo sapiens
  misc_feature (1)...(529): n = A,T,C or G
cgactttananagctgnnnnnnagggggnnnngggatcgancccctatcgaacactttccaagnggnggaattccggaagccgaggaaggctgagcgcgggctctcaaggaaagtagtcgcggaatctcagttagcggtggagaggcagtatgtccggttcaatggcgactgcggaagctagcggcagcgatgggaaagggcaggaagtcgagacctcagtcacctattaccggttggaggaggtggcaaagcgcaactccttgaaggaactgtggcttgtgatccatgggcgagtctacgatgtcacccgcttcctcaacgagcaccctggaggagaagaggttctgctggaacaagctggtgtagatgcaagtgaaagctttgaagatgtaggacactcttctgatgccagagaaatgctaaagcagtactacattggtgatatccatccgagtgaccttaaacctgaaagtggtagcaaggacccttcaaaaatgatacatgcanaaggttagtatctccttaacg

SEQ ID NO: 31774 - DNA, 421 bp, Homo sapiens
gtgatgctgtgctatgaattttcaagtaattgtgaaaaagttaaacattgaagtaacgaatttttatgatattccccccacttaagactgtgtattctagttttgtcaaactgtagaaatgatgatgtggaagaacttaggcatctgtgggcatggtcaaaggctcaaacctttattttagaattgatatacacggatgacttaactgcatttttagaccatttatctgggattatggttttgtgatgtttgtcctgaacacttttgttgtaaaaaaataataataatgtttaatattgagaaagaaactaatattttatgtgagagaaagtgtgagcaaactaacttgacttttaaggctaaaacttaacattcatagaggggtggagttttaactgtaaggtgctacaatgcccctgga

SEQ ID NO: 31775 - DNA, 472 bp, Homo sapiens
  misc_feature (1)...(472): n = A,T,C or G
ntcgagacctcgagnaacactaggngcgagtggtggaattcattcggcttcttacactaggcccgggacctcctcttctggatggagagcgttatccggctgatcgagacccaggagaggcccacggatgtctgctctgtggaactgctcatgaagtatcaccagggcatcactgcatagattgaaacccggagcacgaacttccgtgcctgcctggagcttggcgagtccctgctgcagcggcagcaccaggcctcacaggagatccgcgagaaactgcagcaggtgatgtccatgaggaaagagatgaatgagaagcgggaagcccgctgggagcggctccgcatgttgctggaggtgtgccagctctcgagggatgcctctgtggctgaggcgtggctgattgcccaggagccctacctggccagcggtgactttggacacacagcggacagtgtggagaagctcatcg

SEQ ID NO: 31776 - DNA, 460 bp, Homo sapiens
  misc_feature (1)...(460): n = A,T,C or G
aatcgagacctctaggcacngncgnggaattccgcagcggaggttttcctggtttcggaccccagcggccggatggtgaaatcctccctgcagcggatcctcaatagccactgcttcgccagagagaaggaaggggataaacccagcgccaccatccacgccagccgcaccatgccgctcctaagcctgcacagccgcggcggcagcagcagtgagagttccagggtctccctccactgctgtagtaacccgggtccggggcctcggtggtgctcctgatgcccctcacccacccctgaagatcccaggtgggcgagggaatagtcagagggatcacaatctttcagctaacttattctactccgatgatcggctgaatgtaacagaggaactaacgtccaacgacaagacgaggattctcaacgtccagtccaggctcacagacgccaaacgcattaac

SEQ ID NO: 31777 - DNA, 463 bp, Homo sapiens
  misc_feature (1)...(463): n = A,T,C or G
nattgaaacctcgtagaccctagtccagngtggnggaattcagtggacagctgagctactgagttctagaaggcaccgggcattggtggggcagagcctcacgtggacccacgtggggaaagaagcagaggctccgtcacggggagttgtcgtgaccttgaacttggcatcatctttgaagaagctgaagggaaagaaggaatgacagagggagtgcctttccatccacatcggtcaagctggcatccagattggggacgcctgctgggaactctattgcctggaacatggaatccagccaaatggcgttgttcttgacactcaacaggatcagctggaaaatgcaaaaatggagcacacaaatgcatctttcgataccttcttctgtgagacaagagctgggaagcatgtgcctagagcactcttcgtggacttggagccaactgttatagatgggatccgg

SEQ ID NO: 31778 - DNA, 462 bp, Homo sapiens
  misc_feature (1)...(462): n = A,T,C or G
gggcccgnaaacgagaccatagacagcgtcgggaannccgatgaggaagtggcaggcaggcaggctggccccggggacttctctctggccctgctttctccgatcgctccgccgttgcccgcctggcccctacggagtccttagccaggatggaggctgttgtgaacttgtaccaagaggtgatgaagcacgcagatccccggatccagggctaccctctgatggggtcccccttgctaatgacctccattctcctgacctacgtgtacttcgttctctcacttgggcctcgcatcatggctaatcggaagcccttccagctccgtggcttcatgattgtctacaacttctcactggtggcactctccctctacattgtctatgagttcctgatgtcgggctggctgagcacctatacctggcgctgtgaccctgtggactattccaacagccctgaggccg

SEQ ID NO: 31779 - DNA, 264 bp, Homo sapiens
ccgggcctcgcactggcggagagaccggcactctgttcggtggacgccgctgacctggggtcagacccgtgggctggacccctgcccaccccgtacgaaccctgaggcctaggggagctgttgagccttcatagactgcatgtgggaagagggctacttcacctacctcacagggctgctgtgaggggcgctgtgatgcagttccaaagcacaggtgttggcgcaccccactgtgctctcaataaatgtgcttgctgtattaga

SEQ ID NO: 31780 - DNA, 462 bp, Homo sapiens
  misc_feature (1)...(462): n = A,T,C or G
natcgagncctcgtagaacactaggccatgtggtggaattccgaaattctgtctctaaataaataaataaattcaccaatggctcctcatagatctcaggagaaagtctaaagttcccaacatggcctgcagggtcctgcaaggtctcccctttgcctgcctgtccagccccatctgttcccactttgcccttactcttgatcattctctcctgtgcctgaactttttcttcaacccttatccccttctgcctaacttttacttatttggcaagttccagctcagaattccttcctctggaaagccttttctgactttcgaagaccaggttaaatgtctattacagaaagtcagacaccatgccctgcctgttggtccactgccccttctgtgatgagaatgtggccctgcactgttccccagtaggagctccatgcagccgcctgagcctgcccctatctg

SEQ ID NO: 31781 - DNA, 266 bp, Homo sapiens
  misc_feature (1)...(266): n = A,T,C or G
tgagcccnccctttttaatacgacgtagatgagctgcaaaacngcacccnannngnnggttaaagttaatttttctagaaagcatctgaattgactaggtttttcctatattaaaaactcaaaacttgttaactctgtactttaataaaatttaaaattaaaactgcgttgtttttttctcttctgctagatacatatataattaaagtactcaagttagttgttttgcagagatgttgccttcacatgctaatcaggtctctcag

SEQ ID NO: 31782 - DNA, 264 bp, Homo sapiens
  misc_feature (1)...(264): n = A,T,C or G
aagcgtccngtcggttgcctcggtttcaccggcanngngcnggaanncacgccttgaggcggctttgcggagctgctgctttggcgggagttggattctggtgtgttgtttctgtggggagaaggagagtgccagaggtgactggttcatggttcttctaagctctcatggccaccatgttggaaggcagatgccaaactcagccaaggagcagccccagtggccgagaggctagcctgtggtcgtcaggctttgggatgaagn

SEQ ID NO: 31783 - DNA, 460 bp, Homo sapiens
  misc_feature (1)...(460): n = A,T,C or G
natctgagacctctagtcccngtggnggaattcgcaagggtgggagccaagggagtggacacagcaggtagggccgggagacttgggtgaagcagtggaagccagagttctgaccctgctggagaagtgtcatgagggcctcagacaggttcacccactgagcaggaggtcttgcagcctgacccaccctgcatcctgttcaggccgggatcatctccttcctgggcttcttctggcccctttctgcatctcttcttgacaacatggcacaaatgaccagggttcttcccacctcaggtctttctgtggcttcctgctgcctgccatctatgttagccccaccgaccttaccctccacatcactgttttcctgtctgtcacccgtaagactttcagtgcctggggccttttcacatgggagtctgctttggagactgctccccttgcctgcttagccccc

SEQ ID NO: 31784 - DNA, 496 bp, Homo sapiens
  misc_feature (1)...(496): n = A,T,C or G
nttcgatagcantncgtgnggnggaattccttggactccacgacctcctgatgttcctgaccatgctgcttaccaccccttccgccgtctggccatcttggctgcttcagcaacaccagccacctcaaatcctgatccagctgtgtctcgtgtcatgaatatgaaaatcgaagaaacaaccatgacaacccaaaccccagcccccatacaggctccctctgccatcctgccactgcctgggcagagtgtggagcggctctgtgtggaccccagacaccgccaggggccagtgaacctgctctcagaccctgagcaaggggttgaggtgactggccagtatgagagggagaaggctgggttctcatggatcgaagtgaccttcaagaaccccctggtatgggttcacgcatcccctgaacacgtggtggtgactcggaaccgaagaagctctgcgtacaagtggaaggagacgctattctcagtgatgcccggcctg

SEQ ID NO: 31785 - DNA, 490 bp, Homo sapiens
  misc_feature (1)...(490): n = A,T,C or G
gggactggattccctntgnannnnccctgagnacactagtccgtgtggtggaattccaacttctcccgctcccccccctacactgatgatgtcaaatggttgctggggctggcagcaaagctgggtaacacctcccctccctaggaccattgccccccccccacctgctctccccaccttccttatcccagacctccttcctagctcttgctcaaagttgaggccttggtcgggtatgtgtgcgtgcgcggggggcggagggttacctcagctcctggggtggagggaggctctctgccaggccagagctgagatctgtaagttgggtccctagggcagaggtggccacccccgtctcatgcccctccccctgccccccaggagtgaactacgtgcaccagttctgtgtgggggcagccaagggggtgctgagcccgtttgtgctgcaggagatcgtcatggagacgctgcagcggctgagtcccgctct

SEQ ID NO: 31786 - DNA, 487 bp, Homo sapiens
  misc_feature (1)...(487): n = A,T,C or G
ggggcctgaatccctctnannnnnctgatgtcactgtccatgtggtggaattcggagggcaagtttgtccggctgcgcaacaagtccaatgaggaccagtccatgggcaattggcagatcaagcgccagaatggagatgatcccttgctgacttaccggttcccaccaaagttcaccctgaaggctgggcaggtggtgacgatctgggctgcaggagctggggccacccacagcccccctaccgacctggtgtggaaggcacagaacacctggggctgcgggaacagcctgcgtacggctctcatcaactccactggggaagaagtggccatgcgcaagctggtgcgctcagtgactgtggttgaggacgacgaggatgaggatggagatgacctgctccatcaccaccacgtgagtggtagccgccgctgaggccgagcctgcactggggccacccagccaggcctgggggcagcctctccccagg

SEQ ID NO: 31787 - DNA, 482 bp, Homo sapiens
  misc_feature (1)...(482): n = A,T,C or G
gggactgagtacatctccagngggctgaattccctctattggatgattatccgaaatgtttcattgtgggagcagacaatgtgggctccaagcagatgcagcagatcctcatgtcccttcgcgggaaggctgtggtgctgatgggcaagaacaccatgatgcgcaaggccatccgagggcacctggaaaacaacccagctctggagaaactgctgcctcatatccgggggaatgtgggctttgtgttcaccaaggaggacctcactgagatcagggacatgttgctggccaataangtgccagctgctgcccgtgctggtgccattgccccatgtgaagtcactgtgccagcccagaacactggtctcgggcccgagaagacctcctttttccaggctttaggtatcaccactaaaatctccaggggcaccattgaaatcctgagtgatgtgcagctgatcaagactggagacaaagtgggg

SEQ ID NO: 31788 - DNA, 465 bp, Homo sapiens
  misc_feature (1)...(465): n = A,T,C or G
aatgagaccccatcgagacctctggccangngcnggaattcgaacgcgggtccacgcgtgtgatcgtccgtgcgtctagcctttgcccacgcagctttcagtcatggcctccggtaacgcgcgcatcggaaagccagcccctgacttcaaggccacagcggtggttgatggcgccttcaaagaggtgaagctgtcggactacaaagggaagtacgtggacctctttttctaccctctggacttcacttttgtgtgccccaccgagatcatcgcgttcagcaaccgtgcagaggacttccgcaagctgggctgtgaagtgctgggcgtctcggtggactctcagttcacccacctggcttggatcaacaccccccggaaagagggaggcttgggccccctgaacatccccctgcttgctgacgtgaccagacgcttgtctgaggattacggcgtgctgaaaacagg

SEQ ID NO: 31789 - DNA, 495 bp, Homo sapiens
  misc_feature (1)...(495): n = A,T,C or G
agtggcccgcccncaatggnnccatttagcatccgcagnggcnggaannctgcccatgctgtccagagcttgtttggccagtggccccagcccccgtctgcgcctgagctctttgtgtccttcctgccccctggtcagagtagttccctctgtatccctggcagcccctgtgctatcctaagcctgggcatgtgcctcttgcccttgttggtcagagcaaaatgccttttcccagcttgttgcccaacctccagcacaggcctcagtctgccccctgggtcttgtccaaggtgactgattaactatgtagtgacatgcacggaccctcttccctcagctcccagccaaatggtctgggatgcccggcctggcgcagatcctggcctgttcactggcttcaagccagaggtgttgtcaggcctggtcctggctgcgtcccgcacttgcccagtcccccagagtcttgcctcagtttcttcctttgcagtgaaactn

SEQ ID NO: 31790 - DNA, 494 bp, Homo sapiens
  misc_feature (1)...(494): n = A,T,C or G
tctcgaatcccttnnnangttcgagatncctagtccgtgtggtggaattccatgcagaatatattggcagttctcttgagtcagctgatgaaaacccaagagccagcaggcagtctggaggaaaacaacagtgacaagaacagtgggccacaggggccccgaagaactcccacaatgccacaggaggaggcagcagagaagaggccccctgagccccccggacctccaccgccgccacctccaccccctctggttgaaggcgatctttccagcgccccccaggagttgaacccagccgtgacagccgccttgctgcaacttttatcccagcctgaagcagagcctcctggccacctgccacatgagcaccaggccttgagaccaatggagtactccacccgaccccgtccaaacaggacttatggaaacactgatgggcctgaaacagggttcagtgccattgacactgatgaacgaaactctggtccagcctt

SEQ ID NO: 31791 - DNA, 475 bp, Homo sapiens
  misc_feature (1)...(475): n = A,T,C or G
catgaaccctggaagngcgnctgattgtcatggagagccgcagccgcgtggcgcagagcgcgatctctaccgggacacgtgggtgcgatacctgggctatgccaatgaggtgggcgaggctttccgctctcttgtgccagcggcggtggtgtggctgagctatggcgtggccagctcctacgtgctggcggatgccattgacaaaggcaagaaggctggagaggtgcccagccctgaagcaggccgcagcgccagggtgaccgtggctgtggtggacacctttgtatggcaggctctagcctctgtggccattccgggcttcaccatcaaccgcgtgtgtgctgcctctctctatgtcctgggcactgccacccgctggcccctggctgtccgcaagaggaccaccaccgcgcttgggctgttgaccatccccatcattatccaccccattgacaggtcggtggatttcctcctg

SEQ ID NO: 31792 - DNA, 483 bp, Homo sapiens
  misc_feature (1)...(483): n = A,T,C or G
gggaagcagtagggagggggaattgagttgagggtgaggggactgagnngctgttgtccacacaaacttgttgctcagnntttctgcnnaggtgagacgnnngtggcagagaaatgtccttgtttttgccaatgggtcagaacatttaccttttacttagtganncacctcgattcannggtgactgggtgacaatgggttttcagtctcttttaccacaccttgcggnnggaggagacaagaaaacccagaaacacggcttctgtgtggggaagaanntacggtgaagtggttcctgatgaaattgagttcctggcgtccagggtgcttgtcgcattgtcctcgtgttcacgaaggtggatggtgcttgttttatagctaaggaaacacatttggaaggtcagtcattgtccagggtacctgcctagacaatcacagtgctgggacccctgcctggcaccctctggctctgagcctcgcact

SEQ ID NO: 31793 - DNA, 502 bp, Homo sapiens
  misc_feature (1)...(502): n = A,T,C or G
agaggccggcncnaattgaaactgagagctatgtgcagngngcnggaattccactacttccagaacacacaaggcctgatcttcgtggtggacagcaatgacagagagcgtgtgaacgaggcccgtgaggagctcatgaggatgctggccgaggacgagctccgggatgctgtcctcctggtgttcgccaacaagcaggacctccccaacgccatgaatgcggccgagatcacagacaagctggggctgcactcactacgccacaggaactggtacattcaggccacctgcgccaccagcggcgacgggctctatgaaggactggactggctgtccaatcagctccggaaccagaagtgaacgcgacccccctccctctcactcctcttgccctctgctttactctcatgtggcaaacgtgcggctcgtggtgtgagtgccagaagctgcctccgtggtttggtcaccgtgtgcatcgcaccgtgctgtaaatgtggcagaa

SEQ ID NO: 31794 - DNA, 479 bp, Homo sapiens
  misc_feature (1)...(479): n = A,T,C or G
catgagaccatcgaagngccgactgattttgatcgtgagaaccgccgacattgatgagaaggccccggaggccccacagcacacctacatcgatgtgcacatccattaggagtctgccctggccaagctcctgctcacctgctgctctgcgctgcggccccgggccacccaggccaggggcagcagccggctgctggtggcctcgtgggtgatgcagatcgtgctggggatcttgagtgcagtcctaggaggatttttctacatccgcgactacaccctcctcgtcacctcgggagctgccatctggacaggggctgtggctgtgctggctggagctgctgccttcatttacgagaaacggggtggtacatactgggccctgctgaggactctgctaacgctggcagctttctccacagccatcgctgccctcaaactttggaatgaagatttccgatatggctactcttattacaacn

SEQ ID NO: 31795 - DNA, 476 bp, Homo sapiens
  misc_feature (1)...(476): n = A,T,C or G
cgagttcccngggggnnccnaattgagnccntactcgcagatctaggacagngcggnggaattcaaacgggctggcgacctggttgaattccacaagttccccaacttcaccttccgggacatcgagtttgagctcctggactacggaccaaacgggatgctgctccctaaagaagggaggctggagaaggtgtacgatgccctcaaggacgcccaccccaagctccacgtctacaagaaggaggcgttccccgaggccttccactacgccaacaaccccagggtcacacccctgctgatgtacagcgaccttggctacgtcatccatggggtgagtcgcctgctggaggcaccacctccaggggctccctccccaggctctgggtcttcttttttttttttgaaaccagggtcttgctttgttgcccaggctggagggcaagggcaggatctaagctaactgcagccttaaactc

SEQ ID NO: 31796 - DNA, 475 bp, Homo sapiens
  misc_feature (1)...(475): n = A,T,C or G
attgagccctttgaacgcccatgagttcagttgtaganccnnccccattgggtagaggcagcaaagcangcccagcggtttttacagcaaacacctgtgtttttgagtaaggagcaagaagagctgatccggacactcctgggggcccacacccgccacatgggcaccatgtttgaacagtttgtgcagtttaagcctccagctcatctgttcatccatcaccagcccttgcccaccctggcccctgtgctgcctctggtcacacacttcgcagacatcaacactttcatggtactgcaagtcatcaagtttactaaggacctgcccgtcttccgttccctgcccattgaagaccagatctcccttctcaagggagcagctgtggaaatctgtcacatcgtactcaataccactttctgtctccaaacacaaaacttcctctgcgggcctcttcgctacacaattgaagatggag

SEQ ID NO: 31797 - DNA, 471 bp, Homo sapiens
  misc_feature (1)...(471): n = A,T,C or G
agggggctnnaaactgaattcagacatactccgnngcgtggaattcctggcatctctgccgaggctgctggaatcgactggggcatcttcccggaatcagattcaaaggatcctggaggtgatgggatagactggggagacgatgctgttgctttgcagatcacagtgctggaagcaggaacccaggctccagaaggtgttgccaggggcccagatgccctgacactgcttgaatacactgagacccggaatcagttccttgatgagctcatggagcttgagatcttcttagcccagagagcagtggagttgagtgaggaggcagatgtcctgtctgtgagccagttccagctggctccagccatcctgcagggccagaccaaagagaagatggttaccatggtgtcagtgctggaggatctgattggcaagcttaccagtcttcagctgcaacacctgtttatgatcctg

SEQ ID NO: 31798 - DNA, 488 bp, Homo sapiens
  misc_feature (1)...(488): n = A,T,C or G
ctttgagcccttttgancnnccactgagatcaactgcacgagccgcggaacnatcaggctaagcgacccgggcggggcggagtgaatgatctctcaggagggaggatggttgttgcaggggtgaggagcgcancgggcggcgagcgggaggcactggcctccagagcccgtggccaaggcgggcctcgcgggcggcgacggagccgggatcggtgcctcagcgttcgggctggagacgaggccaggtctccagctggggtggacgtgcccaccagctgccgaaggccaagacgccaggtccggtggacgtgacaagcaggacatgacatggtccggtgtgacggcgaggacagaggaggcgcgtccggccttcctgaacaccttaggctggtggggctgcggcaagaagcgggtctgtttctttacttcctccacggagtcggcacactatggctgccctctgggctcccagaacccacaacatgaaa

SEQ ID NO: 31799 - DNA, 479 bp, Homo sapiens
  misc_feature (1)...(479): n = A,T,C or G
gatggaacctangaggncggatgatatcgtccgaacacggggaggcccacaaagaggccatgagccggaaactgggtcagtattagagccagggccctccattgtccttcgccaaagtgaacagcatcagccccggctccccagccagcatcgcgggtctgcaagtggatgatgagattgtggagttcggctctgtgaacacccagaacttccagtcactgcataacattggcagtgtggtgcagcacagtgaggggaagcccctgaatgtgacagtgatccgcaggggggaaaaacaccagcttagacttgttccaacacgctgggcaggaaaaggactgctgggctgcaacattattcctctgcaaagatgattgtccctgcggaacaggaacaggaaagcatcttcccttgccctggacttgggtctagggatttccaacttgtcttctctccctgaagcataacgatcttgaaag

SEQ ID NO: 31800 - DNA, 517 bp, Homo sapiens
  misc_feature (1)...(517): n = A,T,C or G
gcgtttnnnnnnnnngnnnaatcgatanccttnccangnatcgagaccatattccatgtggnggaattccacagactcagagagaacccaccatggtgctgtctcctgccgacaagaccaacgtcaaggtcgcctggggtaaggccggcgcgcacgctggcgagtatggtgcggaggccctggagaggatgttcctgtccttacccaccaccaagacctacttcccgcacttcgacctgagccacggctctgcccaggttaagggccacggcaagaaggtggccgacgcgctgaccaacgccgtggcgcacgtggacgacatgcccaacgcgctgtccgccctgagcgacctgcacgcgcacaagcttcgggtggacccggtcaacttcaagctcctaagccactgcctgctggtgaccctggccgcccacctccccgccgagttcacccctgcggtgcacgcctccctggacaagttcctggcttctgtgagcaccgtgctgacctccaaataccg

SEQ ID NO: 31801 - DNA, 475 bp, Homo sapiens
  misc_feature (1)...(475): n = A,T,C or G
gatgaaccctcgaaggnccatgatttcgtcttaaggaccccaggccctccgggagctcaagggaacgcccgagacccccacctctcactttgctgtgagcccgggaaccccagagaccactcctgtggagagctgagggggcggctaccgtcccctctgcaggctcattcctccttggtctcctgcttcccctcacgcgaatttctttcaaagccatctgtttgcatccttgtgttttgctgtggtttttaaaggagcgcccacgaagtgtagtggctgacgatttcaacctcacacagcagtttgtaaccgcaagcattctctttgaattctcacagaattcagcaagaagtagaaacctgttatttactacattgtgatttaactttggatgtgaatttagtcacctttagcccttcagataagcctagccagtacatatttcagcacaggcaagttttttggtatttaagtn

SEQ ID NO: 31802 - DNA, 494 bp, Homo sapiens
  misc_feature (1)...(494): n = A,T,C or G
nttcggatcaccatccangnngggcaattcaccaaggacaggcaggaccccgtcccctgctcacacagctcttcaagcttaccaaggacaggcaagaaccccgtcccctgctcacacagcttttcaagcttaccaaggacaggcaggaccccgtcccctgctcacacagctcttcaaacttaccaagtgccctctcccctgttgagggcacagcaaccccaggccctccctcccacctcagctgaagccccaatcttccaaatcggaaccagcaagtcttagggctggcacgcatctgggcctctagctgagaacccggactctcaggcacctcaatgccccttgcccagggcagaggcccaccccgtgggttggtgcagtggctgccctgggctccacgggcagcacagggagtctgtccaggaagcagcccagccggngtcagtattccgtggagccagtcctgagctgggaggggcatttaacacccctga

SEQ ID NO: 31803 - DNA, 481 bp, Homo sapiens
  misc_feature (1)...(481): n = A,T,C or G
ggggccnaggganncnnattgagaccccatcgagagcgtcggaaacccccatgatggagaattgagaaggcctggagctgctgaagactgctattgggaaagctggctacactgataaggtggtcatcggcatggacgtagcggcctacgagttcttcagggctgggaagtatgacctggacttcaagtctcccgatgaccccaactagtacatctcgcctgaccagctggctgacctgtacaagtccttcatcacggactacccagaggcgtctatcgaagatccctttgaccaggatgactggggagcttggcagaagttcacagccagtgcaggaatccaggtagtgggggatgatctcacagtgaccaacccaaagaggatcgccacggccgtgaacgagaagtcctgcaactgcctcctgctcaaagtcaaccagattggctccgtgaccgagtctcttaagcgtgcagctggccc

SEQ ID NO: 31804 - DNA, 491 bp, Homo sapiens
  misc_feature (1)...(491): n = A,T,C or G
tggggcnagggnnnnnnatcgagaccctatcgagatccctaggcagngtggnggaattcatccctgtctcaggaaggttttatagtattgggaaactgaaagacctactgtgaaggtataagttttccacaagtttaagtttttacttgatagcttgaacttgatcaagctatcaagcatgaggttgatagcaaatattattgttttcctttaagtgaaaggcccacttggttcattttcaagaaaatgtctgccaaatacatacccaatacatacccaagtctgagtaacaagatacagtttgtcatttttttcttgtaaatatgtgccttgagaaaaaaaaaaaaagggcagccaattcaatttgcaactcaaataataaaaagggtttttctttgaaaaaactattgtcctttggtaggcagcaaaaatgctttatgcatattatgaattccatcacccaaaatattaaaagacattttaggggctat

SEQ ID NO: 31805 - DNA, 530 bp, Homo sapiens
  misc_feature (1)...(530): n = A,T,C or G
aggtctccttcgangananaaggaannnnnnntttcgaaccccctatcgaagcactctccagagaggnggaattcgagttagtagatttatgattctgatctacaaattaacatttttgatgccaaaattagggtcttggtaagaaatttctatcagttattgaaactgaaagtgagtcagattggtagcatgacgtaaggttttaacagttcagaagatcctcatggcagctttaatagccatgggttcttttggggtaatgtacacacctaactgcatttgttttgacttctttaatgtttgaatgtttcactctgttgtaaagtcagcataagccatcatgtgggctttcttcattcttcagcatattatccgcttcgctttctgtttatcacttttctgctgaaatgtacatgtttggctctactccttggttatttttaggcttaaaagcatgcaatccgtttttcagccacttttagatactcatgcaacatagcctacttttattaaatcaaaatgaaggtct

SEQ ID NO: 31806 - DNA, 536 bp, Homo sapiens
  misc_feature (1)...(536): n = A,T,C or G
naaaggacatcccttcagggggaattcgctagactatctttgcttttatgcttggactacgtttgaactccatgctgaaagtaggggaaggggaagcattgaaagatgtgaccaggatagttacagagtcagacttgccttttaaaataagatgtctctggcagccagattggaggggctcagaccagagacgggtagacaggaagtggtgggaagttcatagaccaaggcaagcccgttggcctgcaggagaggacctggagtctgtgctgctgggaggtgagaatgaggtgacccctagagggtgtatacagtgtcccataggaaagtgagctcatttgggagggacggngatggaaagttgaccagtggcagtgatatcagttagctgtgccgctgtcttagcaccgtggacctgcgtggcttgttccagcgtccctgcactcccgcggctatttgctaagctcttctgtcagacacagatggttgccagcaatttacttgaacgcgactgctacagtgatggtccaggacan

SEQ ID NO: 31807 - DNA, 467 bp, Homo sapiens
  misc_feature (1)...(467): n = A,T,C or G
cttggaccttgaggccgattgattcgttgagcccaccnncttaggccaaagngcacaccctggctccctcctttccttgttccggcggctgagttttcagcggagtaaggagcgctccctactgcatggggacttccacgcgctctccgctgggcctggactcttctcctatatccgccactgggaccagaatgagcgttttctggtagtgcttaactttggggatgtgggcctctcggctggactgcaggcctccgacctgcctgccagcgccagcctgccagccaaggctgacctcctgctcagcacccagccaggccgtgaggagggctcccctcttgagctggaacgcctgaaactggagcctcacgaagggctgctgctccgcttcccctacgcggcctgacttcagcctgacatggacccactacccttctcctttccttcccaggccctttggcttctga

SEQ ID NO: 31808 - DNA, 513 bp, Homo sapiens
  misc_feature (1)...(513): n = A,T,C or G
agggcgtggcaaaaaaaannncttgcctcgcacaccatccgngtggtggaattctgaggtttgtgtcaggaagatctcgactaccagccaacactgctgacatttctcagagatttcaaatcatgaaggttgataggccttacgacagtctgcctacctcacagacctgcttcttccagctgaggctgcccccgtactccagccagctggtcatggccgagcgcctgcgctatgccatcaacaactgccgctcaatcgacatggacaactacatgctctcgagaaacgtggacaacgccgagggctccgacactgactactgaccgtgcgggtgctctcaccctcccttctctccctcaataatgctcacttctgatttgatgttgatatacttttatggtaactacatagatgttataagaacataaaccaacattataaacaatggccacatttagttactctaaatgtaacaaagaaattagatgtttttatttttctgtgattgtacaa

SEQ ID NO: 31809 - DNA, 492 bp, Homo sapiens
  misc_feature (1)...(492): n = A,T,C or G
gaggcccnagggggggnnnaatcgagacccctatcgagagcactaggcagtgtggtggaattcgttttgtgagctgcttccccggagcagcggagcgtggagtcgtcacttcgggcacaagtgcccttcgagcagattctcagccttccagagctcaaggccaaccccttcaaggagcgaatctgcagggtcttctccacatccccagccaaagacagccttagctttgaggacttcctggatctcctcagtgtgttcagtgacacagccacgccagacatcaagtcccattatgccttccgcatctttgactttgatgatgacggaaccttgaacagagaagacctgagccggctggtgaactgcctcacgggagagggcgaggacacacggcttagtgcgtctgagatgaagcagctcatcgacaacatcctggaggagtctgacattgacagggatggaaccatcaacctctctgagttccagcacgtn

SEQ ID NO: 31810 - DNA, 414 bp, Homo sapiens
gataatgccgagctcaccctcaatgtggccttgggcaaggtcttcacagggggcgccctgtattttgggggcctcttccaggcacccacagccctgacggagcccctggaggtggagcacgtggtgggccagggtgtcctccaccgtggcggccagctgcatggagcccggcccttgggcactggtgagcgttggaaccttgtcgtctggctccgagcctctgctgtgcgcaacagcctctgtcccatgtgctgccgtgagcccgacctggtggacgatgagggcttcggtgatggcttcacccgagaggagcccgccacggtggatgtatgtgcgctcacctgagcttgcttgggcccagtgtgggggtggcaggcaggtgagggctccgttgccttggtctgggggcagaaa

SEQ ID NO: 31811 - DNA, 547 bp, Homo sapiens
  misc_feature (1)...(547): n = A,T,C or G
cttgtattggaacgccctnnnnnnnnnnattgagcatcgtccgcgnggngcaattcagaaaaagaaaaagaattcatcagtgacatttgacagaatatatctataaaaatgatttattatggatataaagagaccaaaaaagagagatctgtatgtccaacaggaaggtgtcattgaataatccatgcacatcagtaaatagaaaattgtgcagacactaaaaattgtgttttcaaggaataatgaatgatatgagaaaatgctattatggcaagtgaaaacacacaggatacaacatcgtatagtcacaatgatctcaatttttaaatcatatttaatagtattttaaaataagaaagaaatgcatcaatgttaacagtccttctttctaggccaccaccagaaagggattatgggtaatctctctcactctcaaagnatttctgtatttccatgttatatatagaatcatatacctcccacaagcagaaactataactntaagaaaaatggttnttcaaactaatttaaggttggcgcgtcaatg

SEQ ID NO: 31812 - DNA, 490 bp, Homo sapiens
  misc_feature (1)...(490): n = A,T,C or G
cgggccnnaggggggnnaatcgagancctatcgagatccctaggcagngncgnggaattcggcgaacagtgctgagtggcggcagcctctacatcgagatcccgggcggcgcgctgcccgaggggagcaaggacagctttgcagttctcctggagttcgctgaggagcagctgcgagccgaccatgtcttcatttgcttccacaagaaccgcgaggacagaggtaggtgacccgtatcgcctgcagtagggtgcgtgggggtgcctgcgccgccccttcattctcagcccgcaggcacggtctccctgcgggggtggggggtgcgggcggggggttctggtcggcaggggttctgacggcttctcccccgcagccgccttgctccgaaccttcagctttttgggctttgagattgtgagaccggggcatccccttgtccccaagagacccgacgcttgcttcatggcctacacgttcgagagagagtctn

SEQ ID NO: 31813 - DNA, 484 bp, Homo sapiens
  misc_feature (1)...(484): n = A,T,C or G
cgggtcnaggggnnnnaatgagaccatattgagngccgtggaattcggagattgtgcggcggaagcagcagccgccccctcgcactcccttggaccagccagtggacattggccccttcattcccccagctctccctggggcttgtgctgaccccggttgctggctcttggtgatgtctgcaggcaccagaggccatgcagtgggcctggagggggcttgatcatgaggcacatctctgatccaggacatgaaggcatacctggagggagcgggcgcggaattctgtgacatcactctgttgcttgacgggcacccacggccagcccacaaggctatcctggccgcccgctccagctactttgaagccatgttccggtccttcatgcccgaagatgggcaggtgaacatctccatcggggagatggtgcccagcaggcaggccttcgagtccatgctgcgctacatctactacggcgaggtcan

SEQ ID NO: 31814 - DNA, 536 bp, Homo sapiens
  misc_feature (1)...(536): n = A,T,C or G
ggaattgatcnccntcgngnngggcattgaanagcactaacgaacagggaacttgtaaaactaaggggaaaagggcagaagagaggcagcagcgtggtccctgcaagcgtccgctttcctggccaagcagcccccagcacgcctgctttgtggggcagggccatgcggccccgaggaaggatgcggtgagccagagggttccagacaaaggaggggatccccaaggctctgggccagccagtccctgttttactggcaccacggtccctcctaggcgaggacgaagagggaaggggtggagacctccaccttctctgcgtgtggctgcgtccctttacagaatgacaggcccttacttccgagggcggngactaatgtgtaaggcttaacagatccaattccagaaattatctgtggttttttcaatcaccctcttgtgctccccccaccccccattaaatttcatcttttatctttaaaaannnnnnnnnnnnnnnnnnnnnnnnnnnnnnnnnnnnnnnnnnngannnngnngg

SEQ ID NO: 31815 - DNA, 527 bp, Homo sapiens
  misc_feature (1)...(527): n = A,T,C or G
cgggcctcgaccccgttcgnnggggtagtatcacctaggctcttctggagaagcccagagcactgggcaatcgttacgacctgtaacttgagggccaccgaactgctactcccgttcgcctttggcgatcatcttttaaccctccggagcacgtcagcatccagccaccgcggcgctctcccagcagcggaggacccaggactatcccttcggcgagacggatggaaaccgagccccctggaggacctgcccctgcagttctgcctcacacggctcaagtcaccaccgtgaacaagggaccctaaagaatggccgagccttgggggaacgagttggcgtccgcagctgccaggggggacctagagcaacttactagtttgttgcaaaataatgtaaacgtcaatgcacaaaatggatttggaaggactgcgctgcaagttatgaaacttggaaatcccgagattgccaggagactgctacttagaggggctcatcccgatttgaaagaccggactggtttcgctgtc

SEQ ID NO: 31816 - DNA, 536 bp, Homo sapiens
  misc_feature (1)...(536): n = A,T,C or G
gggaattgagcgtccttcgngngnnatctgaccatcagtcagtgtggtggaattccacatggcggaacgcaggagacacaagaagcggatccaggaagttggtgaaccatctaaagaagagaaggctgtggccaagtatcttcgattcaactgtccaacaaagtccaccaatatgatgggtcaccgggttgattattttattgcttcaaaagcagtggactgtcttttggattcaaagtgggcaaaggccaagaaaggagaggaagctttatttacaaccagggagtctgtggttgactactgcaacaggcttttaaagaagcagttttttcaccgagccctataagtaatgaaaatgaaatatgataaagacataaagaaagataaagataaaggaaaagctgatagtggaaaagaagaagataaaaagagcangaaagaaaatataanggatgagaagacnnnnnnaaaaaaaaaaaaaaaaaaaaaggcggccgccccgccccaagaaatatctggttgcgctgttattttgg

SEQ ID NO: 31817 - DNA, 514 bp, Homo sapiens
  misc_feature (1)...(514): n = A,T,C or G
aggtcgccgggggnnnnaannnacctcgaatcgcagtnccgtgtggtgcaattcatgattttattccaaatgtaatttaattgctgctgttgggctttcgtttctgcaattcagctttgtttaaagtgatttgaaaaatactcattctgaacatatccatgcgcaatcatgataactgttgtgagtagtgcttttcattcttctcacttgcctttgttacttaatgtgctttcagtacagcagatatgcaatattcaccaaataaatgtagactgtgttaatatttattgaatccctgtgtgcaaagggctctgataagagcttatgtcagacaaaacataaaaagcatggattatataccatgacttangagatacaagcataaatgcataataaattatgaatgcaattggcaaaacacatgacaaaatccagcaaataatggattgccgaatcaaccgcagagacaataaatattatgagttgggatttgaactcaggttttggattacag

SEQ ID NO: 31818 - DNA, 472 bp, Homo sapiens
  misc_feature (1)...(472): n = A,T,C or G
ggggagagccgggcgcnnnnnccttgagnaactgagacnctacgcagngcggnggaattcatatgacctgcagacgtggatgggcagcccgtcgatcttcgtctacgactgctccaatgctggcttgatcgtcaagtccttcaagcagttcgcactacagcgggagcaggagctggaggtagctgcaatcaacccaaatcaccctcttgctcagatgcctttgcctccgtcgatgaaaaactgcatccagctggcagcctgcgaggccaccgagctgctgcccatgatccccgacctcccggctgacctattgacctcctgcctcaccacccccatcaagatcgccctgcgctggttttgcatgcagaaatgtgtcagtctggtgcctggcgtcacactggatttgatagaaaagtaagtaggatttttaagctcttggggctctctggatctgatgagtttcttttccttn

SEQ ID NO: 31819 - DNA, 495 bp, Homo sapiens
  misc_feature (1)...(495): n = A,T,C or G
aacttgaattgcaataccgtcccgagnggngcaaatccgaggaacccgaggaggtcagggagcaagaccagagagacgagtccgaggaatgtgatgagcctcatgagtcctatgagccccacgctccctatgcgccccacaagccccgggactcctatgcaccttacgaactccatgggccccatgcagcccccaaactcctcaaggcccgtgaaccccgccagctccgccacacccgtgagccccgcaagtcccgcgaggccaaggaaaccgagttgcttcccagcgccgcagtaatgatctccccctctctgatcaccagagccccgccacggcctcagctgtctttcctgggtgaagaaagaatgtgagacttggcatgttgtctccatgcatatagtggaggaccggcattcaaagccatatcatgggccaggcatggtggctcacgcctgtaatcccagcactttgggaggctgaggcaggtgggtcacc

SEQ ID NO: 31820 - DNA, 538 bp, Homo sapiens
  misc_feature (1)...(538): n = A,T,C or G
cgccagattgatgaccntcccgnnnngtcgtacantcgtccgtgtggnggaattccagatgatggagaggtgtaaatagaaggatgaggaaagatggaggaactaaaggaagggtggggagaaagatgggagagagatatcaggataagggaaagatagagaagaacacagatggaagactggatggattgatgggtggatatatagaaaggtagacagatggaaagagagatggaaggtagacctttacacaatgagggatggatagacagatctcgggtacagcagaaagatctccccaataaatgcccacaaaccctctggtcagagcaggcctttcctcccaaccccgggcaggtgggcatcgttggcaggaccggggcagggaagtcctccctggccagtgggctgctgcggctccaggaggcagctgagggtgggatctggatcgacggngtccccattgcccacgntgggctgcacacacttgcgctcaggatcagcatcatcccccaggaccccatcctgttcccttggt

SEQ ID NO: 31821 - DNA, 528 bp, Homo sapiens
  misc_feature (1)...(528): n = A,T,C or G
ngggcatcgagctcgttcgnggggttggaccttcgctcccagaatccctcaccagagtccaactgtcaccggatctcctggcgaccctgcctgagccagcctccccggggcgccaggcctgcggcaggaggcacaagaagaggacgttcctgcggccacgtatcatcggcggctcctcctcgctgcccggctcgcacccctggctggccgccatctacatcggggacagcttctgcgccgggagcctggtccacacctgctgggtggtgtcggccgcccactgcttctcccacagcccccccagggacagcgtctccgtggtgctgggccagcacttcttcaaccgcacgacggacgtgacgcagaccttcggcatcgagaagtacatcccgtacaccctgtactcggtgttcaaccccagcgaccacgacctcgtcctgatccggctgaagaagaaaggggaccgctgtgccacacgctcgcagttcgtgcagnccatctgcctgcccgagcccggcagcacctttc

SEQ ID NO: 31822 - DNA, 544 bp, Homo sapiens
  misc_feature (1)...(544): n = A,T,C or G
ngaatttgatcccccctnnnnnnnnncatcgtaccatcctccgtngtggggaattcgtgattagtcaggatcaatcagtggagaggagattaaaactcacatctgggagtccggaatcagaacttgtagttcttttttttgaaatggagtctcgctctgtcgcccaggctggagtgcagtggcgtgatctcggctcactgcaacctctgccttccgggttcaagcaattctcccacctcagcctcctgagtagctgggattacaggcgcccaccaccacagccggctactttttgtatttttaggagagacggggtttcaccatgttggtcaggctggtcttgaactcctgacctcatgatccacctgccttagcctcccaaagtgctgggattacaggcgtgagccaccatgccctccgagaacctgccgactagcgcctccgtgtccacccacatgacagcaggagcgatggccgggatcctggagcanctcgtcatgtacccggtggactcggtgaagacacgaatgcagagtttgagtcn

SEQ ID NO: 31823 - DNA, 535 bp, Homo sapiens
  misc_feature (1)...(535): n = A,T,C or G
ggcattgatctccntcgnnggggaattgattngccagtttgcagaagcaggaggtgaagaacttgcaccagcgtctggaagggcagcggccagagaacaagggcaagaaccgctacaagaacattctcccctttgaccacagccgagtgatcctgcagggacgggacagtaacatccccgggtccgactacatcaatgccaactacatcaagaaccagctgctaggccctgatgagaacgctaagacctacatcgccagccagggctgtctggaggccacggtcaatgacttctggcagatggcgtggcaggagaacagccgtgtcatcgtcatgaccacccgagaggtggagaaaggccggaacaaatgcgtcccatactggcccgaggtgggcatgcagcgtgcttatgggccctactctgtgaccaactgcggggagcatgacacaaccgaatacaaactccgtaccttacaggtctccccgctggacaatggagacctgatttcggagatctggcattaccagtacctgan

SEQ ID NO: 31824 - DNA, 450 bp, Homo sapiens
  misc_feature (1)...(450): n = A,T,C or G
nactgagaccctgagancgtgcggnggaatccattccatttaactgattcttttaaaagaaagataggcgtatatacaccatgccaaaataataataaggtacctatgtgagaattgcaaattataccccagggtagcatttaggcagcgtcggcaaaaagtgagttaataaatcagaagctacatattaaaaaaaaaatcagtcaatccgtcgtgtgtttaattcttgcctaaagtaaatggagatattgttttgctttggtaaccagcaatttttaatttttttttattgcccgcaaattgagattgttttgttaaaatctgttgatctagcagcaagtagaattattcaactggaatcttgtattctattcagagcttaattttccgttaaggaaaaaaatgagcttcagtttgtgttgtgatgtgtataatttgcatgctgaatca

SEQ ID NO: 31825 - DNA, 524 bp, Homo sapiens
  misc_feature (1)...(524): n = A,T,C or G
nccgagctcgttcgnnggggtagactcccagcaaccccaggctgaagcaggttcccaagctcagaggcgcactgtgacccccagctccggcctgtcctccaacaccaagcacagcagcctggggctggcctcccaaatgagccatgagatgatacatccaaagcagacagctccaccctggccgagtccaagctgggagattcaagggacccatgagttggggtctggcagcctcccatccagggcccccatctcatgcccctggctgggacgtggctcagccagcacttgtccagctgagcgccaggatggaacacggccacatcaaagaggctgaggctggcacaggacatgcggtagccagcacacagggcagtgagggagggctgtcatctgtgcactgcccatggacaggctggctccagatgcagggcagtcattggctgtctcctaagaaacccatatccttacccttctttgnngactgangggaaccccggngtggccacagggccgcctgcggg

SEQ ID NO: 31826 - DNA, 545 bp, Homo sapiens
  misc_feature (1)...(545): n = A,T,C or G
ngaccttgatcatccctcgngaggnnncatcggaccatcgtccgngaggngcaattacagcaccctggctttcaacacctacgtccacttccaagggaagatgaagggcttctccctgctggccgagccccaggagttctgggtggacaacagcacctcagtgtctgttcccatgctctctggcatgggcaccttccagcactggagtgacatccaggacaacttctcggtgactcaagtgcccttcactgagagcgcctgcctgctgctgatccagcctcactatgcctctgacctggacaaggtggagggtctcactttccagcaaaactccctcaactggatgaagaaactgtctccccggaccatccacctgaccatgccccaactggtgctgcaaggatcttatgacctgcaggacctgctcgcccaggctgagctgcccgccattctgcacaccgagctgaacctgcaaaaattgagcaatgaccgcatcagggtggnggaggtgctgaacagcattntttttgagcttgaagcggatg

SEQ ID NO: 31827 - DNA, 530 bp, Homo sapiens
  misc_feature (1)...(530): n = A,T,C or G
nattgaccacttcgtgtggggttaacagancgataggaagcttgcgtccacaagatattacgtcaacagcagcacctatttggaagcaacgtaactgactgctcgggcaacttttgtttgttccggtcggaaaccaaggaccttctgttcagagatgacacagtatgtttggccaaacttcatgacagaaacacatatgaaaaatacttaggagaagaatatgtcaaggctgttggtaacctgagaaaatgctccacctcatcactcctggaagcctgcattttccgtagaccttaaaatctcagaggtagggctgccaccaaggtgaagatgggaacgcagatgatccatgagtttgccctggtttcactggcccaagtggtttgtgctaaccacgtctgtcttcacagctctgtgttgccatgtgtgctgaacaaaaaataaaaattattattgattctatatttcaaactcaaggcctgagaacccttatccanggagaactcaaccccccacagaggaggagctgt

SEQ ID NO: 31828 - DNA, 541 bp, Homo sapiens
  misc_feature (1)...(541): n = A,T,C or G
cggcncagtttgatgcccccttcgnnnnnnttctgaccatcactccagtgtggggaattcacagccgggcggccgggcggngacgcgccccggactcttctcagttgagagtgcggttcctgggcaggtttccacaccagttcctttccgcgtccttcggccctggctctggctgcctggcggaggtggggtagcatttgtcatttgcacactgctggctttatctttggggctgcaccccgaggcaacaaatgcaggatgctctgtcacccacatgtccaccaccatctggtttgccttttggctactttgactttctccttaaatgcttcctgtgctgagcaaacattccacagccagcagagcaatggagagttcatggccactcttcccagtatcagcaagcaatttggggtgatcgtttggaagcctcagaggaaagatgtcatcaggcttcctgtggctttgtccttcagcagtggggctcggcttgctttcacctgccttaggaagatttctggcttccgagctctgatatggn

SEQ ID NO: 31829 - DNA, 536 bp, Homo sapiens
  misc_feature (1)...(536): n = A,T,C or G
cggnccgattgatcatctntcgngngnnatcgagcatcgtccgngnngggcaatcagccagtgggaacccagacccataggagacccgcgtccccgctcggtctggtcaggccccgcgctatggagttcctctgggcccctctcttgggtctgtgctgcagtctggccgctgctgatcgccacaccgtcttctggaacagttcaaatcccaagttccggaatgaggactacaccatacatgtgcagctgaatgactacgtggacatcatctgtccgcactatgaagatcactctgtggcagacgctgccatggagcagtacatactgtacctggtggagcatgaggagtaccagctgtgccagccccagtccaaggaccaagtccgctggcagtgcaaccggcccagtgccaagcatggcccggagaagctgtctgagaagttccagcgcttcacacctttcaccctgggcaaggagntcaaagaaggacacagctactactacatctccaaacccatccaccagcatgaagaccg

SEQ ID NO: 31830 - DNA, 533 bp, Homo sapiens
  misc_feature (1)...(533): n = A,T,C or G
nttttcctactgaccatccctcgtgtggngtagtaccacgagagcatggccacgctgcgccggcttcgggaggcgccgcggcacttactggtttgcgagaaatccaacttcggcaaccacaagtcgcgccaccggcatcttgtgcagacgcactactataactacagggtttcatttctcattcctgaatgtgggatactatcggaagaactgaaaaacctggtcatgaacactggaccctattactttgtgaagaatttacctcttcatgaattaattacacctgaattcatcagtacctttataaagaaaggttcttgctatgcactaacatacaatacacatattgatgaagataatactgttgccctgctaccaaatgggaaattaattntgtcactggataaagacacttatgaagaaactggacttcanggtcatccatctcagttttctggcagaanaaatatgaaaattattggttccatttgatttgatggaattatccttaaacttggggatctagaangatg

SEQ ID NO: 31831 - DNA, 526 bp, Homo sapiens
  misc_feature (1)...(526): n = A,T,C or G
acttgaacccctccngngngcntgatcacgttagagtggngccactcccacgagagcatggacacgctgcgccggcttagtgaggcgccgcggcacttactggtttgcgagaaatccaacttcggcaaccacaagtcgcgccaccggcatcttgtgcagacgcactactataactacagggtttcatttctcattcctgaatgtgggatactatcggaagaactgaaaaacctggtcatgaacactggaccctattactttgtgaagaatttacctcttcatgaattaattacacctgaattcatcagtacctttataaagaaaggttcttgctatgcactaacatacaatacacatattgatgaagataatactggtgccctgctaccaaatgggaaattaattttgtcactggataaagacacttatgaagaaactggacttcagggtcatccatctcagttttctggcagaaaaattatgaaatttattgttccattgatttgatggaantatcctttaactt

SEQ ID NO: 31832 - DNA, 489 bp, Homo sapiens
  misc_feature (1)...(489): n = A,T,C or G
cgtgttccnagnnnnnnnnncctcgaganccctatcgagtgtcgtggaattcggagctggtggtgcaggccgtgccgctgccctggctggtgggacccttcgcgcccatccttgtggagcgacccgagcccctgcccgacctggcggacctggtggacgaggtcatcgggggccctgacccccgctgggcgcacctggactggccggcccagcagagagcctgggaggcagagcacagggacgggagtgggaatggggatggggacaggatgggtgttgccggggacatctgcgagcaggaacccgagacccccagctgcccggtcaagcacaccctgatgcccgagctggacttctgacccatgggccagtggaggcggggaggaaaggccacctgcacaccccgatccctgctgccccctggtggccacacgtaagctcgaggccttggccttgacccttctttggaatcaggcccaactccggatn

SEQ ID NO: 31833 - DNA, 478 bp, Homo sapiens
  misc_feature (1)...(478): n = A,T,C or G
ggaggggccggnntnctnnnncccagggacccctgagaacngtcgaggaanccgnggaggtgtcggcctctgggcggatgttgacattgtgttgttgttattgctgatggtaatggcggcggcggtggcggcgacggtccagaccccatcccctctgtagccggagccgagacagccgacagcgaactccgcggcctcggagccggcggcagcggcgactcccctcagcctccgccgcctcgcccgccggtaccccggcgccaaccccgggagtcaggccctttgggcaggggagctcggaggctcaggatggcggatttcgacgaaatctatgaggaagaggaggacgaggagcgggccctggaggagcagctgctcaagtactcgccggacccggtggtcgtccgcggctccggtcacgtcaccgtatttggactgagcaacaaatttgaatctgaattcccttcttcattaactg

SEQ ID NO: 31834 - DNA, 478 bp, Homo sapiens
  misc_feature (1)...(478): n = A,T,C or G
atcgagaccctggncagggcggtagaatgcataacacgacctgccaggacctacagatagaagtgacagtcaaaggccacgtcgagtacacgatggaagcaaacgaggactatgaggactatgagtacgacgagcttccagccaaggatgacccagatgcccctctgcagcccgtgacacccctgcagctgtttgagggtcggaggaaccgccgcaggagggaggcgcccaaggtggtggaggagcaggagtccagggtgcactacaccgtgtgcatctggcggaacggcaaggtggggctgtctggcatggccatcgcggacgtcaccctcctgagtggattccacgccctgcgtgctgacctggagaagctgacctccctctctgaccgttacgtgagtcactttgagaccgaggggccccacgtcctgctgtattttgactcggtccccacctcccgggagtgcgtgggctttgg

SEQ ID NO: 31835 - DNA, 516 bp, Homo sapiens
  misc_feature (1)...(516): n = A,T,C or G
aggcccnncnnnncttttgaaaatcgatccactgntcagagtggtgcaattccacaatcattttcccctggagccaaggaaaggttcactttacagtcatctgaatggctggagacccagggcgcaaggagcacatcctatcaaaggccagagaccttggccctggcatgggcaggcttgggccctgccaaccttcatgtgaaatagtgataataaatatggaaagagcagcgtttgtcaagggccctgacacaccaggcattgtgcctggcatgtcacacattgttctaggaagggactttggtggcaaagaagtgaaactcactcaaactagcatcaaaaagagacttagagaaaggacgccagggaccctctgagaaatggagacggagggttagctgggctttgtgggccattgcagctgctcggtcacacgtgccagccccttgctccctgcacatggcctccttgctgactcangttcctactcccctgctcccccgactagcggagctn

SEQ ID NO: 31836 - DNA, 478 bp, Homo sapiens
  misc_feature (1)...(478): n = A,T,C or G
ntttgtcccgtcggnnntttctagatcctcggcagngcggggaantcggaatggaggattggaagcaggacagccaacttcagaaggccagggaggacatctttatggagaccctgaaagacattgtggagtattacaacgacagtaacgggtctcacgtattgcagggaaggtttggttgtgagatcgagaataacagaagcagcggagcattctggaaatattactatgatggaaaggactacattgaattcaacaaagaaatcccagcctgggtccccttcgacccagcagcccagataaccaagcagaagtgggaggcagaaccagtctacgtgcagcgggccaaggcttacctggaggaggagtgccctgcgactctgcggaaatacctgaaatacagcaaaaatatcctggaccggcaagatcctccctctgtggtggtcaccagccaccaggccccaggagaaaagataan

SEQ ID NO: 31837 - DNA, 486 bp, Homo sapiens
  misc_feature (1)...(486): n = A,T,C or G
cggggtccaaggggnnnnncctgagaccatatggagtgtcgtggaattcaccacagttgccacaccatggggtggagacgtgggtcaccacgggcttgggagcaagcgccttctgcagcacaggaagccgaagctggggtcaggtgaggtcgctacccctggaggtctggcataagggccccaccctcaggtctcctacactggccccattttactttggggtccaaggacaggatggtcaacagggcagggtggacagcgtgccagcgccgcgcagggccacctccctgggtggatgcatcacactaaggaagtgagtgccaaggggatttagtggtgtggttctttcaaagggaggtcagggtcaatgggaatctgctcggacactcaacatgggggtgggtgcactccttggaggaggaggaacacgttcaggggattgtgaggtcttgcacaagccacgtggggcaccttggcttcccggca

SEQ ID NO: 31838 - DNA, 494 bp, Homo sapiens
  misc_feature (1)...(494): n = A,T,C or G
natcgagcacgatcgaagggcgctatncgncaccttggaggacttctatggggtcttctcctctcctggatatacacacctagcctcagtctcccacccccagtcctgccattggctgctggacccccatgatggccggcggctggccgtgcgcttcacagccctggacttgggctttggagatgcagtgcatgtgtatgacggccctgggccccctgagagctcccgactactgcgtagtctcacccacttcagcaatggcaaggctgtcactgtggagacactgtctggccaggctgttgtgtcctaccacacagttgcttggagcaatggtcgtggcttcaatgccacctaccatgtgcggngctattgcttgccttgggacagaccctgtggcttaggctctggcctgggagctggcgaaggcctaggtgagcgctgctacagtgaggcacagcgctgtgacggctcatgggactgtgctgacggcacaa

SEQ ID NO: 31839 - DNA, 494 bp, Homo sapiens
  misc_feature (1)...(494): n = A,T,C or G
agttatncagacannnnnnaatcgataccntggcagngcctgattaccnctgtggcagaccaacgggngaagcagatgtcgagttcgcaactcatgaagatgctgtggcagctatgtcaaaagacaaagcaaatatgcaacacagatatgtagaactcttcttgaattctacagcaggagcaagcggtggtgcttacgaacacagatatgtagaactcttcttgaattctacagcaggagcaagcggtggtgcttatggtagccaaatgatgggaggcatgggcttgtcaaaccagtccagctacgggggcccagccagccagcagctgagtgggggttacggaggcggctacggtggccagagcagcatgagtggatacgaccaagttttacaggaaaactccagtgattttcaatcaaacattgcataggtaaccaaggagcagtgaacagcagctactacagtagtggaagccgggcatctatgggcggga

SEQ ID NO: 31840 - DNA, 476 bp, Homo sapiens
  misc_feature (1)...(476): n = A,T,C or G
ttttgatagccctcgaagngcttgaaaacccttggatgccacctggcagctgttagaacaatatcctgcagcttttgagttctccgaaacctacctggcagtgttgtatgacagcacccggatctcactgtttggcaccttcctgttcaactcccctcaccagcgagtgaagcaaagcacggaatttgctataagcaaaaacatccaattgggtgatgagaagggcttaaaattcccctctgtttgggactggtctctccagtttacagcaaaggatcgcacccttttccataaccccttctacattggaaagagcacaccttgtatacagaatggctccgtgaagtcttttaaacggacaaagggaatccccggaacataataaaatctcttctgtatagaaaagctacagctccacactaagaggaatgccgtctgccttaaagaatggaatcatcagtgaccaagaattactt

SEQ ID NO: 31841 - DNA, 494 bp, Homo sapiens
  misc_feature (1)...(494): n = A,T,C or G
cgagaataanagggggannnnaattggaaaccctatcgtagtccctagtcagtgtggtggaattcgaaagctgcggtgctgaccttggccgtgctcttcctgacggggagccaggctcggcatttctggcagcaagatgaacccccccagagcccctgggatcgagtgaaggacctggccactgtgtacgtggatgtgctcaaagacagcggcagagactatgtgtcccagtttgaaggctccgccttgggaaaacagctaaacctaaagctccttgacaactgggacagcgtgacctccaccttcagcaagctgcgcgaacagctcggccctgtgacccaggagttctgggataacctggaaaaggagacagagggcctgaggcaggagatgagcaaggatctggaggaggtgaaggccaaggtgcagccctacctggacgacttccagaagaagtggcaggaggagatggagctctaccgccagaaggtggn

SEQ ID NO: 31842 - DNA, 497 bp, Homo sapiens
  misc_feature (1)...(497): n = A,T,C or G
natcgagcccaattcgagnggcgcaattcgcgggagcgtctgtacctctgcggcgtcactgggagcccgacggaaaactgcgctaaaggcttgtctttcccctgcccgaccgaaggagccgaccttgcctgcgctacagcttccttattttcgtcgcctgttctcctgatcctgcgtgttctaaaaaccccttaggctttccatgggttcccagaccatggcggtggcgctgcccagggacttgcggcaggacgccaacctggcaaagaggaggcacgcggagctgtgcaggcagaagcgggtcttcaacgccagaaacaggataattggggtgaaagggcaggggccgggacggggttagagcggcagatgcgggcgaggggctgcgtggagggggaaaggagatgagttctaggatgaaacatctgagccaggaggcagcaaacggcctcctgcagggccaataatgctccctctcgagctcgcctggagtcacn

SEQ ID NO: 31843 - DNA, 495 bp, Homo sapiens
  misc_feature (1)...(495): n = A,T,C or G
natcgagccctattcagaggcggaattccagnggactgtactgctttgcccacagactccattccccattcatgctgttttcacagcccagtaatggccaactgctcagcacctgtgtgccctgctgtcaggcaggtaagacccacagtcctctgggcctaaactgctgaagcctgcaccacaaggcgggcacggcattccaacacctcttcaggctcaacagcctttagaggctacactgagtcctctttttcatgctcttcctggntttcaagtgtcaattaaaatttgtcttcagaagaaacttgaaaataagtatctgatgccgtcatcaggatagactagtattagctttcgcagctgaagttattgctctcccagccctaataataacttaccaagtgcttattatttatcaggcactggtccaagtccttcaatcagattgtctcacctgatcctcccaacagccctaggaagcaggtcttactacan

SEQ ID NO: 31844 - DNA, 478 bp, Homo sapiens
  misc_feature (1)...(478): n = A,T,C or G
gggagcgnnccnnnnnnaactgagaaaactgcnaggtcanggaagngncgnggaannnggtacaacctggccatcggttccacctgcccctggctgaagaagatcatggacaggatgacagtgagcacgctggtgctgggagagggcgctacagaggcggagatcagcatgaccagcactcgttggcggaaaggtgtctgtgaggagacgtctggagcttatgagaaaacagatactgatgggaagtttctctatcacaaatccaaatggaacataaccatggagtcctatgtggtccacaccaactatgatgagtatgccattttcctgaccaagaaattcagccgccatcatggacccaccattactgccaagctctacgggcgggcgccgcagctgagggaaactctcctgcaggacttcagagtggttgcccagggtgtgggcatccctgaggactccatcttcaccatggctg

SEQ ID NO: 31845 - DNA, 472 bp, Homo sapiens
  misc_feature (1)...(472): n = A,T,C or G
ttcgagaccctcgaagngcctgatatcctcggagaggacgagagcaggnttgcccgcgagtgtataccatgtgcaggtgagtgatgccccatgtgcccggaaggggtgccagtgctacaagaggtggaccagctgctcaacgccgcagggggtggtggaatggccggggatggcagaatggcaggcagggtgaaccttcttcgtgaccctctcctcctcctctccagagccatgaacaccagccaggtggaggcgctggggatccagatgctgcctggctaccgggacccctaccacggccggcccctcaccaagggtgagctgggctgcttcctgagccactacaacatctggaaggaggtgtgtcctgagtgatgggcggcgccagagttatgactctagatctcatcggagatttggacgggaaaggggttgaaagagttcctcacagccccggctaggcatccagccg

SEQ ID NO: 31846 - DNA, 461 bp, Homo sapiens
  misc_feature (1)...(461): n = A,T,C or G
ttccaacttaagacaatcgtaagngcggncgaantcgaaatcctgagtgctgaggaagggcatggctgctggacaggcgtcatggttgtaccaggtcccagggagacagctgtcatggcttatgctataggtcgcctgagcccccagcttccacccaggatggcaaactgtagcaaggaccccaccagtaaacaggacaacagcgatcatctccttgaaggcaaacatggggcccaaacatgccaggctcaaagggtctcctgtttgactctcaagccccggccaggccaaggccatctccatctttacagatgagaagcctggagcttgcagagctaaacacctgttccagcacagttgtaaggcacagaactgggactggtgcccagccctggctgtgactcctcgtccagcagcccacaccctcctcctagtgtcccaagttctccaccatccttccc

SEQ ID NO: 31847 - DNA, 459 bp, Homo sapiens
  misc_feature (1)...(459): n = A,T,C or G
nacttaagacgatccgtagnaacngcggngnaanncaaagaggaaaggcagaatttttccttgctatggctggaacaaacgcacttttgatgctggaaaacttcatagatggaaaatttttaccttggagctcatatatagattcttacgacccatcaacaggggaagtgtattgcagagtgccaaatagtggaaaagacgagatcgaagccgcggtcaaggccgccagagaagcctttcccagctggtcatcccgcagcccccaggagcgctcacgggtcctgaaccaggtggcggatttgctggagcagtccctggaggagtttgcccaggccgagtctaaagaccaagggaaaaccttagcactggcaagaaccatggacattccccggtctgtgcagaacttcaggttcttcgcttcctccagcctgcaccacacgtcagagtgcacgcagatgg

SEQ ID NO: 31848 - DNA, 495 bp, Homo sapiens
  misc_feature (1)...(495): n = A,T,C or G
natcgagccctatccgagnggcgcaatncacgggcgtccctgcccactcgtgtggcaagggaggggagggcaggagggctcggcctgagcagggtgctggggggagagcgcaatacctcacgcgggctgccgtcctaatcaacgtgcctatggcgggaccacgctcggagcctgcctcttctgcgactgttactttttctttgcgggatgggggtgggggttccctctccaggtggttgtccaggcccaggtcccggccctgggtgctcagccagctcggctaggccctgcgcctccctgcgcttcccccttcaggaagggtgtgtgccacctcgttgcactggatcccagtggctgcttgggggagaggcgtttgccatcactggtgttgtcacctccctgtttctccaccaagggcttgggcctctcggggctggggcctcccaggggatggggacccagaggtgcagtggccgcccacatccatggcctagg

SEQ ID NO: 31849 - DNA, 479 bp, Homo sapiens
  misc_feature (1)...(479): n = A,T,C or G
ggnaattgacaccctggaanntatggtttctactggaagngccgcggaannnganggnggaccgtggcggcgtgggtgaagccgcagctgttggagcgtctcctgcatctgttcctggcctaaacccgacgctaggctggagggagcgactgcgggccgggctggcggggactggggcctcgttgtggttcgtggcggggctggggctgctttacgccctgaggatccctttgaggctgtgtgagaatttggcagcggtgactgtatttttaaattcattgacacccaaattctatgtggcacttacagggacctcttcattgatatcaggactaatatttatatttgaatggtggtacttccataagcatggcacatcttttattgagcaagtatctgtaagccatttgcaaccactgatgggaggaacagagagcagcatttcagaaccaggttctccttcgaggaacagagaaaat

SEQ ID NO: 31850 - DNA, 267 bp, Homo sapiens
agtttgatgttgttgaaagagaaaagggagcggaggcagcaaatgttacaggtcccgctggggctccagttcaaggcagttaatatgcagcagaccgtaaccattatagacgctatccacgtcgtaggggtcctccacgcaattaccagcataattaccagaatagtgagagtggggaaaataacgatggatcggagagagctcccgcatgccagtgcccaacaacgcgcgacctaccgcatgcgaaggttaccaccttactacatg

SEQ ID NO: 31851 - DNA, 499 bp, Homo sapiens
  misc_feature (1)...(499): n = A,T,C or G
tggganataanaaaacttgaactcgtgagccatatccatgtggtggaattcgtggatgcaaaggaaaggaaaggaaaggatgccagagccctgatgaatcttcacaacaacagagctggcaggaaggctgtaaagcggttcttgaaacaagagtgcaagtgccacggggtgagcggctcatgtactctcaggacatgctggctggccatggccgacttcaggaaaacgggcgattatctctggaggaagtacaatggggccatccaggtggtcatgaaccaggatggcacaggtttcactgtggctaacgagaggtttaagaagccaacgaaaaatgacctcgtgtattttgagaattctccagactactgtatcagggaccgagaggcaggctccctgggtacagcaggccgtgtgtgcaacctgacttcccggngcatggacagctgtgaagtcatgtgctgtgggagaggctacgacacctnccatgtcacccggn

SEQ ID NO: 31852 - DNA, 475 bp, Homo sapiens
  misc_feature (1)...(475): n = A,T,C or G
atgatagcctngaannnttttagaacctcggaagngcggggaanncctcccccagaaccctgaggccaagggggccactggctacccctactgcgcggcggcccaggagctcggactgctggtcctggagagctgcccccagaagaagctggagtgcatagtgcggaccctgcggatcatctgtgtctgtgcggaagactactgccccaccccagaggccacaccccaggccgggcccccgcccatcgctgcagctgccattggtgccgatgacctgctgcccatcctgtccttcgtggtgctgaggagcggcctccctcagctggtgtcggagtgcgcggccctggaggagttcatccacgaggggtacctgatcggagaggagggctactgcctcacatcactgcagagtgccctgagctacgtggagctgctgccccggggaggcctggccaagtagtacagctagagcccn

SEQ ID NO: 31853 - DNA, 474 bp, Homo sapiens
  misc_feature (1)...(474): n = A,T,C or G
tgaggtncccnaggtggnnnnnaatcgaagacaccttcgagngccgtggaanncggcggagaagaaaacttcggagatggggtttggctatgctgcccaggctggtttctaactcctggcatcaagcgatcctttggcctcccaaagtgctgagattacaggcgtgcgccaccacacccggcctcaccaggcgctggctgcatggccagatctggagcccgggagcaggttctgtgtagagggagtcactctgggagtcatttgcttgtgggtgatcatcagagccctttgtttggagtcaaaatcccaggaagagtgcatagactgagcagagaagagggccagccacctccatagaggcagggagagcagccgagctggagccggaggattcctggacatggagaaggcctgcagttttgtcaaggaagcaagcaaagggtctctttctactcgatgaagttcgctcccagg

SEQ ID NO: 31854 - DNA, 494 bp, Homo sapiens
  misc_feature (1)...(494): n = A,T,C or G
cgtcttncncaggnngnnnnnnttttgaaaaccctnatcgagnaccactagncagtgtggtggaattcaagcgacccaaggagccgagcggctccgacggggagtccgacggacccatcgacgtgggccaagagggccagctgagccagatggccaggccgctgtccacccccagctcttcgcagatgcaagccaggaagaaacgcagagggatcatagagaaacggcgtcgagaccgcatcaacagtagcctttctgaattgcgacgcttggtccccactgcctttgagaaacagggctcttccaagctggagaaagccgaggtcttgcagatgacggtggatcacttgaaaatgctccatgccactggtgggacaggtacccatgctcttctctttcaggcgtcattcatacaacaaatattttgaggctgggccctggggatatgctggtgagcaaagtccacacgctgcccactctgaggagctcagtca

SEQ ID NO: 31855 - DNA, 500 bp, Homo sapiens
  misc_feature (1)...(500): n = A,T,C or G
cggaaaaaaaaaacttgaactcgtatgtcctagtccagngtggnggaattcgaatgacctgtggctgaacgagggcttcgcctcctacgtggagtacctgggtgctgactatgcggagcccacctggaacttgaaagacctcatggtgctgaatgatgtgtaccgcgtgatggcagtggatgcactggcctcctcccacccgctgtccacacccgcctcggagatcaacacgccggcccagatcagtgagctgtttgacgccatctcctacagcaagggcgcctcagtcctcaggatgctctccagcttcctgtccgaggacgtattcaagcagggcctggcgtcctacctccacacctttgcctaccagaacaccatctacctgaacctgtgggaccacctgcaggaggctgtgaacaaccggtccatccaactccccaccaccgtgcgggacatcatgaaccgctggaccctgcagatgggcttcccggtcatcacgg

SEQ ID NO: 31856 - DNA, 501 bp, Homo sapiens
  misc_feature (1)...(501): n = A,T,C or G
ggcgggtannnnnntttcggactcgtagtccgtgtggcggaattccaccaagaccagctgggtaggggaagagttgggtataagcaaaactgggagctaaaggaaacactgccagcgccacccacctttctgccacagccatgttctgtctgttcccatcaacagcctagctctgtggaagagaggaagccacagctaccccacccgctccccaacccgagtttcaggcagtgccttgcagtaagctcagagctagaaaccacgtcctgaggctgcctttgagatcacatgtgtctacaaggcctggctgtccccatctgtggagtcagaagcagaggctgcacagcaccactgccggaactgtggccacatcttctgcaacacctgctccagcaacgagctggccctgccctcctaccccaagccggtgcgagtgtgcgacagctgccacaccctgctcctgcagcgctgctcctccacggactactgaacgtncgtnct

SEQ ID NO: 31857 - DNA, 478 bp, Homo sapiens
  misc_feature (1)...(478): n = A,T,C or G
atttgagaccatatgcanngggactgagaccctccggactggcgggaagcgggacttcattaccggcttcacttgcctgcactgggccgccaagcacggcaggcaggagcttctggccatgctagtcaacttcgccaacaaacaccagctgccggtgaacatcgacgccaggacgagcgggggttacaccgccctgcacttggcagccatgcacggccacgtggaggtggtgaagctgctggtgggggcctacgacgccgatgtggacatcagggactacagtgggaaaaaggcctcccagtacctgagtcggagcatcgccgaggagatcaagaacctggtgggagccctggacgagggtgacggggaaagcgccgcgggtagcggcggcgggcgctggaggctttcaaaggtgcttccctcgcatctcatcacctacaaactctcacacgccctagaagatggaggggaccatcan

SEQ ID NO: 31858 - DNA, 477 bp, Homo sapiens
  misc_feature (1)...(477): n = A,T,C or G
atttgataccctatgcaggcggctgagaccctagagcccccgcgctgtccgccctgagcgacctgcacgcgcacaagcttcgggtggacccggtcaacttcaagctcctaagccactgcctgctggtgaccctggccgcccacctccccgccgagttcacccctgcggtgcacgcctccctggacaagttcctggcttctgtgagcaccgtgctgacctccaaataccgttaagctggagcctcggtggccatgcttcttgccccttgggcctccccccagcccctcctccccttcctgcacccgtacccccgtggtctttgaataaagtctgagtgggcggcnnaaaaaaaaaaaaaaaaaaaaaaaaaaaaaaaaaaaaaaaaaaaaaaaaaaaaaaaaaaaaaaaaaaaaaaattttnnaaaactcccccctttaaaaaaaaggcccctctaaaaccccgtttaaattcttttg

SEQ ID NO: 31859 - DNA, 485 bp, Homo sapiens
  misc_feature (1)...(485): n = A,T,C or G
taatgataccctcganangncntntgagacccttcgaagnngcgnggaantcaaccacncagcattcatcctccttgggtggctcgagccacagagaggagattccaaatactaccaccacacaacacagcagcacgttatctacgcagcagaataccctttcatcatcaacatcttctgggcgcacttcgacatccactcttttgcacacaagtgtggagagtgaggcgaatctccattcttcctccagcactttttccaccacatccagcacagtctctgcacctcccccagtggtcagtgtctcctccagtctcaatagtggcagtagcctgggcctcagcctaggcagcaactccactgtcacagcctcgactcgaagctcagttgctacgacttcaggaaaagctcctcccaacctccctcctggggtcccgccgttgttgcctaatccgtatattatggctccagggctgttacatgcc

SEQ ID NO: 31860 - DNA, 462 bp, Homo sapiens
  misc_feature (1)...(462): n = A,T,C or G
agcggcttttnnnaaagactgcgcgcatatgacgnggcattccaactactcgagaggctgaggtgagagaatcgcttgaacccgggaggcggagattgcagtgagcggagatcccgccactgctgtccagcctgggcaacaaagcaagaccctgtgtcaaaaaaaaaaccacaaataatttttttttaaaatatgcttgtaacaaaattgcatttggcaaattataggatgtgaaatgtataatattaactgacacgactcccatcccaggcagacaagcaaccctcattatgaaaattacattttgtttaaaaaaattccctcaacaggcatccccaaagctttctgggcatcagcagagcagacgtccagttcgggggtccacgccagtatgcggcagtggcgcggggccgaggctgctcacaggctgggtgccgacagcccagctctcctttgaaataa

SEQ ID NO: 31861 - DNA, 487 bp, Homo sapiens
  misc_feature (1)...(487): n = A,T,C or G
gcccgaattgagaccantgggaanattgcagaacactaggccagngcggtggaattcccgcttatgagaggggaagatggcgacaaagccgctccacctcccatgtcggcacaggtccctggaattcccatgccaccaccacctttgggactcccccctctgcagcctcctccgccacccccaccacctccaccaggccttggccttggctttcctatggcccacccaccaaatttggggcccccgcctcctctccgtgtgggtgagccagtggcactgtcacaggaggagcggctgaagttgactcatcatcaggcggcattgctgatgcaccacgaggagcgtgccaagcaggtagggcaggcggcacccctggccttggactcattaggtccctgaaggggcagcggagccttacagaaagctgggtcctacaactaaggcttctgggaaggtacctactaaagattggaaccatggcccttga

SEQ ID NO: 31862 - DNA, 543 bp, Homo sapiens
  misc_feature (1)...(543): n = A,T,C or G
naattgatcaccntcgggagnnnncatcgatgcaccatcagngnggngcaattcgngggggtggnggaacagggggaacatcagactgccgaggtatgagtttgggttctcatcttcttcccatgaggcttttgaaaccccaggatgatgcctcctagaggccttgctgtcaaattcaataggcaataacatgaaggatttactcagccaggctcatgagaccagctctgaggaagctgtgcttttcttgtactgatcggtgatgtgcatcaccctaagggatagtaaacagatgaaacccagaaagtccagtcaaaagagcaccctctgggaatgaagatctagtgaagactggggagacagatgaggaaagagtcctgaacaggagccactcattccagctttgtctccatagcctgcccgcccacgatggatgaagtgcgtggaggagacaggcacgttcttcgagcccacgctggcggctntgtttggtcgtgaggcctttggcccgagcacccgaagtgctgtatgtgagagctcttn

SEQ ID NO: 31863 - DNA, 477 bp, Homo sapiens
  misc_feature (1)...(477): n = A,T,C or G
ggcccaatgagaccctangcattngatggcattcgccgcccacgggcagcggggaagaaatctgggcaaagccatgagccctccgaggctgagctccagtttaggggctcacctgccttgcatcgttccgagtcctgtactggactgcatcaggccgcgtctcctcagggtgagtacttgtggcctcagggtaaagggcttttctcaggacgcgaggccattgctgggagaggcagattaggctggggatccggactccgttcctagcatctgctacctcaggacggagacgaacatgctataaaatgtttaaccgtgtgataacaactctcctaaaaaggaaaggggatgcccctgaggagactcggtgctccccacagaactccccagcgatcccagatgggagaagctgagctgcgcgggcgctgccctcactccgggggtgaaacgtggctgtgatttccacaggtgacagan

SEQ ID NO: 31864 - DNA, 487 bp, Homo sapiens
  misc_feature (1)...(487): n = A,T,C or G
cgcccatttgagacccctcngnanattgcagaacactaggacangccgnggaantcctcagtaagggtacttccaacttgggaaagacgatcttgaaagaagagatggaaaagtcattgccgatccgaaggagaacccgctctctgcctgaccggacacccttccatacctccttgcaccagggaacgtctaaatcttcctctctccccgcctatggcaggaccaccctgagccggctacagtccacagagttcagcccatcagggagtgagactggaagcccaggcctgcagatctatccctatgaaatgctagtggtgaccaacaaggggcgaaccaagctgccaccgggggtggatcggatgcggcttgagaggcatctgtctgccgaggacttctcaagggtatttgccatgtcccctgaagagtttggcaagctggctctgtggaagcggaatgagctcaagaagaatgcctctctcttctg

SEQ ID NO: 31865 - DNA, 417 bp, Homo sapiens
  misc_feature (1)...(417): n = A,T,C or G
gtggggtgccagtggaagagagaaagcaggcgagtgtttacggcctgacttgggaggccggcggatcagcaattgcagaagcaggcagcggcagagagggaatggtgcaggcaggcgctgagaaggacgcgcagtccatctctctcagaaaagaacaatgggaaaccaaacatcaaagaacagaaaggaagatccctaaatacgttccgcctcacctttctccagataagaagtggcttggaactcccattgaggagatgagaagaatgcctcagtgtgggatccggctgcctctcttgagaccatctgccaatcacacagtaactatttggaatggtgagcgaactgcggngagccggtgggagctcattcagactgcacttctcaacaaatttacacgacccccaaactttgagg

SEQ ID NO: 31866 - DNA, 478 bp, Homo sapiens
  misc_feature (1)...(478): n = A,T,C or G
gccaaatgagaccctggccagtggagtggcactcccagagtccaatctcatatgcagaaatgtgaatcttttccttctcttacatggttcaggtgccacggggtaaattagggcttctgcaaaacccagaggcctctccttccagcccctttcccactgtccctgccatgccagtgcccacctgagggaactgtccaggggttgggtgccttatctcacacaccccaccagacagctcagcctcatgctcagcccagggcctggtggtcccagcagcctgagtccagcccccggtggtcagaaaggaaggccttccagactcttgctcggctgtggtctccccacctcactccatctctgggtgctcggcgtttgccctgcatgagccagaagagctactggggtgcaaggacgccaactgaccgcatcctgcgcctcccgngcttccaggacatgctggccctgcagatcatcgacc

SEQ ID NO: 31867 - DNA, 456 bp, Homo sapiens
  misc_feature (1)...(456): n = A,T,C or G
attgagacctgaggccangtgcgggactaatagaacgaggacattgcttcgcattgactgagcaggtgtgattctattctgctcattaccctctgcctcgtctgcattgtggccaacgccctcctgctggtacctaatggggagacctcctggaccaacaccaaccatctcagcttgcaagtctggctcatgggcggtttcattggcggtggcctaatggtactgtgtccggggattgcagccgttcgggcagggggcaagggctgctgtggtgctgggtgctgtggaaaccgctgcaggatgctgcgctcggtcttctcctcggcgttcggggtgcttggtgccatctactgcctctcggtgtctggagctgggctccgaaatggacccagatgcttaatgaacggcgagtggggctaccacttcgaagacaccgcgtaaggtttagcctgtatg

SEQ ID NO: 31868 - DNA, 422 bp, Homo sapiens
  misc_feature (1)...(422): n = A,T,C or G
ctccaaaaagcacatttttaactaccacaaaacccgtatcactcttagaatccaccaaaaaaaccatccctgaacttgatcagccaccaaagctccgtggggtgctccaagggcatttggagagctccagaaatgacccttttctccaccccgacttttgctgcctcctccccctgggcttctatgtcttgggtctcttctggctgctctttgcctctgtggtcctcatcctgctgctgagctgggttgggcatgtgaaaccacaggccctggactctggccaaggtgctgctctgaccacagccacacaaaccacacacctggagctgcagaggggacggcaagtgacagtgccccgggcctggctgctcttccttcgaggttcgcttcccactttccgctccagcctcttcctgtgggtn

SEQ ID NO: 31869 - DNA, 459 bp, Homo sapiens
  misc_feature (1)...(459): n = A,T,C or G
nttcgagatctctagtccgtgtggtggaattccacttttctgggatttctgggggttcaggcagcacccccaccccagaatcttcctgagctctcattcccagtgaaccaaacccatggaagccagagatggaaaagcctaaccggccagcggaggcagcgtggctgcagagcacatgaggcctggctaggctgtgtgacctcggcaagggacaccccacgctggagcccagccactgggaaggctctgcttagggcctgactcctggtgggggtggggtgcggttggaacaagagtgctggtttctgaaccgaggagagcccacatccagtgtcgtccaagaccaggaatgcccaggtggggccctgctcacctgtgttcttctgtgttcccagctggttcatggggcggcggcccgagtacacagaccccaaggtggtggctcanggtgaaggccgg

SEQ ID NO: 31870 - DNA, 526 bp, Homo sapiens
  misc_feature (1)...(526): n = A,T,C or G
agannnacnnnnagggcgnncccaggnnnnnnnnnaatcgataccatcttgagggccatccgcgtgggctattgngtgctgggtgcctgcccttggcttccagaacagctgtcagcctgagtagagggtgagggggcctcctgctgcatgtagattccttctgcagagccctggccaggatgtgagtggccgtgtctcattgcctcagacatgcagcagcatgagtgcgcgatgagctggagggcccactacggggaggtctactctgtggagttcagctatgatgagaacaccgtgtacagcatcggcgaggactggatggtaagcggctgcaggattcatataagagagcaccgcgatgacatgtgggccggctgcaggttgtggacatacctgttactagctgtgcaacctggngcctctgtttgcagctttgctatctgcagaatagggataaactagaaaattcgcttacaatctttgcgagggtttagtgaattcagtgggaggtggctatccctatgaa

SEQ ID NO: 31871 - DNA, 483 bp, Homo sapiens
  misc_feature (1)...(483): n = A,T,C or G
atttgaaacccgagagccctacgcaggngcnggaattccatctccagggatcagagacaggcctgccacctcccttttctgaaaagatgcctttgggtgtcatgccctggggtggcactggaagcctgggatggaaccaggaacctgggactgtgcggggacccccctcacaccccttcaccagctggcttcctgccctccctgttagccatcaccctctggtcaccaaggtgctgtgcccggccctgggctggatgctgggaacccagagtgaattcgaagtggcccggcccaggggagccaacgtgtggcccaacatggacgctcaggacagctgggagacggcaccggccgggcccagggcagtgccagagtgcccacagaggccagccctgtcccactgggcttcacctgctcgtgctgcctttccctagagccctgggggcttcctaggaatgtgccgcacccgccgccctgctgccn

SEQ ID NO: 31872 - DNA, 465 bp, Homo sapiens
  misc_feature (1)...(465): n = A,T,C or G
caatgagcccatnatcgagaccctagaccangncgnggaattcgcatgaaggcatggtggtaggcactgcaggacgcctcgtcgcccggtgagccgacctctatgggcataagaactctgccacgcaagaggagctgcttttgagggactcactggcagggggcgcaagactgcctgagcaggggccccaggatgttccgttgctgtacctgaggggcatggcctacatggtgcaggccttgcgccagtccttccacgggcagggcgaccgccggacctgggaccgcacccctgtcttcatggccgcctccttcaaggatgggctgtacatgcatagcgtggtggatgccatcaagaggtctagccgatcccgtgagcgggaggctgcggaggtgctgacgggggagcccgacaccaaccacaacctgtgtgaggcactctagcggaacaacctatgagcctgca

SEQ ID NO: 31873 - DNA, 465 bp, Homo sapiens
  misc_feature (1)...(465): n = A,T,C or G
nattgagacctnattgaganccgtacgcagngngccggaaatctcacgcccttgccctaacgcgctttgctgagagcctggcccctgcccagggcttgggtctggtgagctgagcagcttcctgtggatggtgtggggccggcctctggcctggctcacctggccactgtccagccagccttgtgacagactccggcctgaaggcagaatgaacccacacctggagtgaggaagggggcctggcacggttggccaggctctgcctgattgccagccagcgggcatctgaagccgggtccttcgcccgccggaggctgccgtccgtctctcctgctgcgctcgtgccagctccgagggtgtcctcccagggagcttctcttctcaacaggccttgcgaggctggggtgagaggtgatagaggcagcactgtgcatgattccgagagggtgtggtggcactgccagc

SEQ ID NO: 31874 - DNA, 482 bp, Homo sapiens
  misc_feature (1)...(482): n = A,T,C or G
cccccccccgccnnnaannaaatgagaccatcatagagngctgtaanactnngcgngcctgtggagggacgtgggtggggattggcaggatcctggtatccgctagcatgtcataatgctgagctttgtgaagacccttaccggcaagaccattacccttgagggggagcccagtgacaccatggaaaatgtgaaggccaagatccaggataaggaaggcattccccccgaccagcagaggctcatctttgcaggcaagcagctggaagatggccgtactctttctgactacaacatccagaaggagtcgaccctgcacctggtcctgcgtctgagaggtggtatgcagatcttcgtgaagaccctgaccggcaagaccatcaccctggaagtggagcccagtgacaccatcgaaaatgtgaaggccaagatccaggataaagaaggcattcctcccgaccagcagaggctcatctttgcag

SEQ ID NO: 31875 - DNA, 462 bp, Homo sapiens
  misc_feature (1)...(462): n = A,T,C or G
aacgagacccaattgaagngcggtggaattcgccctgaaacggcgcccgtcgtgcgactccaagtccctcagttctccggccaactggcctaatttgggggttccctccccgcggagtggggtctgcggtgaggatgtggactccgaggaagacagagccctcccttattctcggccacctcccctccccgagggcaggcgggtgagaggttgcgcttttttgggaaagagttccccagaagtgatgtacgtgctcgagaaggacaagatgtcgatgtctcatcactgatgttaacttggatcagttggttaaggtggcgtttgccagccttcttctttggatctactggccagaatcctccttttcaaagacccctttcagtggactatgtctcttagacaacttttctctgttaccagctcctggatgaagagtctttaagctatgtttgctacaatgta

SEQ ID NO: 31876 - DNA, 479 bp, Homo sapiens
  misc_feature (1)...(479): n = A,T,C or G
tgggcggagcnnnaattgagnncccatcgatgtccctagtccgngngcnggaattcggcttctctcccctgcagcccggcctgctgctgctcatcatcctggcccctggcccctacctcagccttgtgctccagcacctcgagccggatatggtcctgccggtggcagcctatgggctgatcctgatggccatgctgtggcgcggcctggcccagggcgggagtgccggctggggcgcgctgctcttcacgctctctgatggcgtgctggcctgggacaccttcgcccagcccctgccccatgcccgcctggtgatcatgaccacctactatgctgcccagctcctcatcacactgtcagccctcaggagcccggtgcccaagactgactgactagggagcttgaagggccggtgttcaggccctctcctcctgcaaggacctgggcctcccagcccagcccagcctgagaaatacccn

SEQ ID NO: 31877 - DNA, 270 bp, Homo sapiens
  misc_feature (1)...(270): n = A,T,C or G
tggggnaggnncttgannnctttttaagnctccctcgcangngccnccannncctgggaggnaggctacntggaaagttaaagagactcacggtcactgggtgggtgaagcttatatgtgacagcatgctggcatccctcacagccctcgcttgctcttggcaccttccctgcctgggctcccactttgggggcatttgaggagcccttcagccccccactgcactgtgggagcccctttctgggctggccaaggctggaacccactccc

SEQ ID NO: 31878 - DNA, 504 bp, Homo sapiens
  misc_feature (1)...(504): n = A,T,C or G
natcgagccatcgatcactgtccangnggnggaattcacaagagagctggggcctggcgaggctaacagactatcctgatggtgtgagggagggatcggcctctgagggctgcttccacccatctcaccagtggctgcaggctccaggcgccactttccttgagtctatgttctttccaagcatcctgcagctccagaagctctggagccgccagcactgagagaagcgatggagctgcatgcagggtgagtgtaggaccgggcggagctgctctgtggctggcgggcacattctttgtcaacatgagcatctctcactgttcctagaccccctggctccccagcttccttggagccaggcgtggccacaggaaaatgtttaggtcaatgacaggtgagcaaaagtgtgaatacaacctccaggagttttcttaaaggaagggacaggcccttcccctcctcatgtctccttctggctgcctggaaggcacatgtgagggctgn

SEQ ID NO: 31879 - DNA, 465 bp, Homo sapiens
  misc_feature (1)...(465): n = A,T,C or G
gggggccggnnttctgagatcaagttcggtacgcagngncgnggaannnnatnacctatcttagaaatgacttgccatgttgaacttactttttgaaagagagagaaaacagaaagaaaacagaagttgtggtatgcagaataacacccctgcccccacccaaggatgtttacaggttaatattcaaaacctgtgagtattttaccctacatggcaaaacagtctttgcagatatgattgtgtgatttcaggagattatccgggaccatctgggtgagtccagtctaattacatggttttgaaggtggagaactttttccagctatggtcagaaagggatatgactgcagaaaaaggctcagagaaatctgtcattgttggatttgaagacagcggaaggggaccgtgagccaaagaatgtgagaaacctctggaaggtggagaagacccagtacagattctcct

SEQ ID NO: 31880 - DNA, 487 bp, Homo sapiens
  misc_feature (1)...(487): n = A,T,C or G
ngctcgaganccntagtccagngnggngttagacgaccctctgttacctccagaagcttctgagaagaatgatgtgaaaagacagggagtgggttctaggcaaagaaaacataatgaccattcagaggaatcagtagcacagctcacagataaagtattttattactatctgaagttttcttttgttttcatgcaggacattttaaaaacgtatatggcagcagaaacctgtttctcaatagaaaaaatacattcagaggcatttctgggatagtctatctgtgttagtatttggtgctatctatgtccagccaagttatctaccctcaaattctgactaatcatgtttgtgctttgggtatttaaaattacatacatatatattctttttgccaaaaacaaaagtcttgcttcttgtcaaatgattgctaaagtagatcttacattntttggtattatgtatgtatttatacacatccccaacaca

SEQ ID NO: 31881 - DNA, 461 bp, Homo sapiens
  misc_feature (1)...(461): n = A,T,C or G
ggaggnnnnnnnaacgagtaccggaagctggaganncaaaggagagaaagggcttccagggctggctggagaccatggtgagttcggagagaagggagacccatggattcctgggaatccaggaaaagtcggccccaagggccccatgggccctaaaggtggcccaggggcccctggagccccaggccccaaaggtgaatcgggagactacaaggccacccagaaaatcgccttctctgccacaagaaccatcaacgtccccctgcgccgggaccagaccatccgcttcgaccacgtgatcaccaacatgaacaacaattatgagccccgcagtggcaagttcacctgcaaggtgcccggtctctactacttcacctaccacgccagctctcgagggaacctgtgcgtgaacctcatgcgtggccgggagcgtgcacagaaggtggtcaccttctgtgact

SEQ ID NO: 31882 - DNA, 262 bp, Homo sapiens
  misc_feature (1)...(262): n = A,T,C or G
gcgtncccctttgaaaccctacggaggcagctngcancnnccccnnnnnnnggnnnnnacccaaactagaaaaatcagggaaccccagactcaggtttagtagagattccaaagaagcagagaagggtcagttcactgaggggccacacctgccccagggccaggccactgtccatcctggtgccaccaccaccctgctggcctggccccccccaaccagacagcagtccccacccagcccagcaccggtaaccttgagaat

SEQ ID NO: 31883 - DNA, 266 bp, Homo sapiens
  misc_feature (1)...(266): n = A,T,C or G
aggtcccngttttgatnccctccgattacacgcgagcangngccggaannncgagagnngnaggagcttcctgcttcaacagtgcttggacggaacccgtcgctcgtttttcaccccggccgggcgcccatagccagccctccgtcacctcttcaccgcaccctcggactgccccaaggcccccgccgccgctccagcgccgagcagccaccgccgccgccgccgtctttccttagtcgccgccatgacgaccgcgtccacctcgc

SEQ ID NO: 31884 - DNA, 471 bp, Homo sapiens
  misc_feature (1)...(471): n = A,T,C or G
aggagcggggnnnnnntaccgaagtaccgcnaagctnggaagngncgnggaannncacggncgcaacaacggcaagaagctcatgactgtgcgcatcgtcaagcatgccttcgagatcatacacctgctcacaggcgagaaccctctgcaggtcctggtgaacgccatcatcaacagtggtccccgggaggactccacacgcattgggcgcgccgggactgtgagacgacaggctgtggatgtgtcccccctgcgccgtgtgaaccaggccatctggctgctgtgcacaggcgctcgtgaggctgccttccggaacattaagaccattgctgagtgcctggcagatgagctcatcaatgctgccaagggctcctcgaactcctatgccattaagaagaaggacgagctggagcgtgtggccaagtccaaccgctgattttcccagctgctgcccaataaacctgtctgccc

SEQ ID NO: 31885 - DNA, 475 bp, Homo sapiens
  misc_feature (1)...(475): n = A,T,C or G
cctcccacaggttcggtcccgcantanngangatcatcgcnangnncngngnggagctgcagcgtatccacaggccccaggatgcaggccctggtgttactcctctgcattgtagccctcctcgggcacagcagctgtcagaaccctgccagccccccggaggagggctccccacaccccgacagcacaggggcgctggtggaggaggaggatcctttcttcaaagtccccgtgaacaagctggcagcggctgtctccaacttcggctatgacctgtaccgggtgcgatccagcacgagccccacgaccaacgtgctcctgtctcctctcagtgtggccacggccctctcggccctctcgctgggagcggagcagcgaacagaatccatcattcaccgggctctctactatgacttgatcagcagcccagacatgcatggtacctataaggagctccttgacacggtcacccgcc

SEQ ID NO: 31886 - DNA, 466 bp, Homo sapiens
  misc_feature (1)...(466): n = A,T,C or G
aggacagnnnnnnnaaatgagaactgagtaacctcgggaanncantcnggccacacagagaatcagtcggcctattgtcaacctctttgtttcccgggaccttggtggcagttctgcagccacagaggcagtggcgattttgacagccacataccctgtgggtcacatgccatacggctggttgacggaaatccgtgctgtgtatcctgctttcgacaagaataaccccagcaacaaactggtgagcacgagcaacacagtcacggcagcccacatcaagaagttcaccttcgtctgcatggctctgtcactcacgctctgtttcgtgatgttttggacacccaacgtgtctgagaaaatcttgatagacatcatcggagtggactttgcctttgcagaactctgtgttgttcctttgcggatcttctccttcttcccagttccagtcacagtgagggcgcatctn

SEQ ID NO: 31887 - DNA, 496 bp, Homo sapiens
  misc_feature (1)...(496): n = A,T,C or G
aggggccngcncccttttgaacccattagcnatcgcagngngcnggaattcctgggaacccagagtgaattcgaagtggcccggcccaggggagccaacgtgtggcccattatggacgctcaggacagctgggagacggcaccggccgggcccagggcagtgccagagtgcccacagaggccagccctgtcccactgggcttcacctgctcgtgctgcctttccctagagccctgggggcttcctaggaatgtgccgcacccgccgccctgctgccctggcattggcctaggtgggcgctgcagctccatggccccacagaggccgcttgtccaggcagggagggccgctcagggcgggtaccatgcctgctgccctctcacaggactgccttcagggcatccggagcttcctgaggacacaccagcaggtcgcctccagcctgaccagcatcggcctggccctcacggtgtccgccttgctcttcagctccttcc

SEQ ID NO: 31888 - DNA, 468 bp, Homo sapiens
  misc_feature (1)...(468): n = A,T,C or G
gtccgtcccaatggagcccctngatcgcagaccctaggcagngnggnggaattcgccaagggggctatgggacgagatggagcaacaggcccctcgggaccccaaggcccaccgggagtcaagggagaggcgggcctccaaggaccccagggtgctccagggaagcaaggagccactggcaccccaggaccccaaggagagaagggcagcaaaggcgatgggggtctcattggcccaaaaggggaaactggaactaagggagagaaaggagacctgggtctcccaggaagcaaaggggacaggggcatgaaaggagatgcaggggtcatggggcctcctggagcccaggggagtaaaggtgacttcgggaggccaggcccaccaggtttggctggttttcctggagctaaaggagatcaaggacaacctggactgcagggtgttccgggccctcctggtgcagtgggg

SEQ ID NO: 31889 - DNA, 429 bp, Homo sapiens
aagatataaaaaattagcccggcgtggtggtgcacgcctgtaatcccagctactcgggaggctgaggcaggagaattgcttcaacctgggaggtggaggctgcagtgagccgagatcgcaccactgcgttccagcctgagcgacagggcaagactcagtctcaaaaaaaaaaaaggggaaaaaaaaaagaaaaaaaatgggtgaacccatggggaaaaaactaaggaataatcctttcccagggggaaaagaattgttttaaaaaaaattaatttggaaaccggccttttttttggccttttttttaatgtccgggttaatttaacaacccctttaagtttgggatggtttatttggggggaggggcccccccaaaatacccttttgaacccaaaatggccttggttttttaaaccaacggcttgaatt

SEQ ID NO: 31890 - DNA, 493 bp, Homo sapiens
  misc_feature (1)...(493): n = A,T,C or G
ggagtaccnnnnnttggaanccccctgatnttcctactgcagagtcgaggaattcgttggatttctagctttttttctggatacttcatggggtactgtaattgtgttgactaattgatgctctttcctggagtctcactcattaattgggcccatttctatggaaggcacaaatattgtaatgtaagaatcagatatatgctggtgatgctgtgtgaagcagcagagctgctgtgaactctctggggtcccaaaagtctaggaagtttggaaaatcctcttccttgtctaggcctgtgcttccctgtcctctctgtttgctttgcttcctctgtctttctcctttccttgctcttggttatcttctgaaagatgaggcttcacttttccacaccttcctgaccctccctgtccccaaagcagcgatgcatctgaaatggcctaaaaaggcgtggaaacccaggggttcctgttctggcagaagttcctcagt

SEQ ID NO: 31891 - DNA, 272 bp, Homo sapiens
  misc_feature (1)...(272): n = A,T,C or G
cattgcgtagtcattgaatcctgatttttctcagccactttgccaaccgcggacctccgtggctggtgacacccccccaacccaggcctgccacagaaggcacccacacactcgacccactgggccatgcttggcttatgcacctcagcccacctgtggtatagcttatacctgcattcatcggntcccaagttcttgtcccgcgtccaagaagaatgaggttacactgacaattcaaagggtgaggagagtggagaacaattttattgagc

SEQ ID NO: 31892 - DNA, 466 bp, Homo sapiens
  misc_feature (1)...(466): n = A,T,C or G
agtngtaggggggcccgnnaactgaaaaactgagacctcggaagngcgnggaattcggaaatgaggaccggccggacgatgccctgcagactgctctgaagagaaggagggaccttctgcagagactccgggaggccaccctcatgcacataaccctggaagggtcttccagtcatggccatcctgcccggagaggcgcctgtacctggcccaggctggcctgagcctgatgctgggggtgcctctgtggcgttggggctccccgtccccgtgtgcagcagctctgcatcggccttgcaggaacaacacctcctggacgagctctctcgggcccaggcctggagcgggccaagcagaggagccctcgggtcagccctgcccccagagctgccccccacgggcatcctacccactgcctccccatccccgctggccccagacccgccaaggatcatcctgcctacgg

SEQ ID NO: 31893 - DNA, 477 bp, Homo sapiens
  misc_feature (1)...(477): n = A,T,C or G
nggctcgtgtccctagtccgtgtggtggaattccttcttttgggacaaggtttcccaagtgattcataaaacataacacctcatatttttcatcgaattgaaccagcatcttgctgctctgtgtgtgtctctggactggcagcatcagcctcacctgggagcttggtagaaatgcaccaggtcagaacctgcatttagcaagatcccagcagattcatatgcatgttactaggttggtgcaaaggtaattgcaggttttacagttaaaagtaacattcatctaagaagcactgacctggactccatcctcacctatcatgtagctccccacctccccaaaataattttcatgtaagtgacttagactgcatggagccaactttgcagaggcatttgggaagggtgtgttttcctgccaccctcaccctgcagcctccaccacatggcccactcagcacctccctaagcagatgtggg

SEQ ID NO: 31894 - DNA, 463 bp, Homo sapiens
  misc_feature (1)...(463): n = A,T,C or G
cgccgctccaattgagaccacttatagagggctgtatnccccggctcgagcgcgctggccgggaggccgcggcgaggcgagaaaagccccccgcacggtcccgggagtgaggccgccattttaacctgattttggccttcaaggcttctggagttacagtgaatgatgaagtcatcaaagtttttaatgatatgaaagtaaggaaatcttctacacaagaggagatcaaaaagagaaagaaagcagttctcttctgtttaagcgatgacaaaagacaaataattgtagaggaagcaaagcagatcttggtgggtgacattggtgatactgtagaggacccctacacatcttttgtgaagttgctacctctgaatgattgccgatatgctttgtacgatgccacatacgaaacaaaagagtctaagaaagaagacctagtatttatattctggtgtgtaaaaaa

SEQ ID NO: 31895 - DNA, 502 bp, Homo sapiens
  misc_feature (1)...(502): n = A,T,C or G
atttgattcgcaccacagtccangnggtggaattcggacagcctggagtgcacagccatgacagtgcagatcctgctgaagctggaccgcctggacctcgcccggaaggagctgaagagaatgcaggacctggacgaggatgccacccttacccagctcgccactgcctgggtcagcctggccacgggtggtgagaagctgcaggatgcctactacatcttccaggagatggctgacaagtgctcgcccaccctgctgctgctcaatgggcaggcggcctgccacatggcccagggccgctgggaggccgctgagggcctgctgcaggaggcgctagacaaggatagtggctacccggagacgctggtcaacctcatcgtcctgtcccagcacctgggcaagccccctgaggtgacaaaccgatacctgtcccagctgaaggatgcccacaggtcccatcccttcatcnaggagtaccaggccaaggagaacgactntgaca

SEQ ID NO: 31896 - DNA, 499 bp, Homo sapiens
  misc_feature (1)...(499): n = A,T,C or G
agcggncccgcccccnattgaaactcgatagctatatgcagngngcnggaattcggggcctccacactaaggaggggcagggctggcagtgacgagggaaacctctcgctgagggttggggcaaagtcacccctggaaatcgaaggggccgctggtggtctcttgaggtccaccagcctcaaatgcatctcttcagacggtgttgggggcacaaccctactccccgaaaagtcgaaaacccaattcagttcctgcgagtccctcttagaatccagaccgagcatggggagaaaactgagctctccgaccacacccagggacatgctgttgtcgcccacactgcgtcctcggaggcggtgtctggagtcctctgtggacgatgcgggctgtccagaccttggaaaggagccgcttgttttccagaaccgccagtttgcccacctgatggaggaacctctaggcagtgacccattcagctggaaactcccaagcctcgact

SEQ ID NO: 31897 - DNA, 478 bp, Homo sapiens
gggttgtgtccgctagtccgtgtggtggaattccagagaacccaccatggtgctgtctcctgccgacaagaccaacgtcaaggccgcctggggtaaggtcggcgcgcacgctggcgagtatggtgcggaggccctggagaggatgttcctgtccttccccaccaccaagacctacttcccgcacttcgacctgagccacggctctgcccaggttaagggccacggcaagaaggtggccgacgcgctgaccaacgccgtggcgcacgtggacgacatgcccaacgcgctgtccgccctgagcgacctgcacgcgcacaagcttcgggtggacccggtcaacttcaagctcctaagccactgcctgctggtgaccctggccgcccacctccccgccgagttcacccctgcggtgcacgcctccctggacaagttcctggcttctgtgagcaccgtgctgacctccaaataccgttaagct

SEQ ID NO: 31898 - DNA, 479 bp, Homo sapiens
  misc_feature (1)...(479): n = A,T,C or G
gggtcgataccgttnnaannnttcgtagaccctagtccatgtggtggaattcggcttgtggacatggggaccgggagtgccgtggtcagcttggagcactggtcactgtgcacttggtgaggtgtggcccagtgctgggcagcccttggcagccactctcgggctgcagaccccttggtgccactgctgagtacagggggtgtggccccatggcctggctggaacggccagggccttgctttgaggacccgtggccgccttttcttgggcacgcctgttttcagccaagcctgggagagaatcagcgaatttctgtctcagctggcccgtgaccaaggccagcccccaggctgtgggcccacaatgaggccagagacaggccatgttccgcacctgcttcgggaaacatgcctggtgtgatggccccgtaggctgccatgccctccagcctcagttttcctggtggaaggatcccttgg

SEQ ID NO: 31899 - DNA, 424 bp, Homo sapiens
ctgctggcgcctggcagccaccgcctgggaggttactgtaaggcccgcagctcccgccagctcccgcggactgctgccgcctccttaccatgaagccagtaagtcgtcgcacgctggactggatttattcagtgttgctgcttgccatcgttttaatctcctggggctgcatcatctatgcttcgatggtgtctgcaagacgacagctaaggaagaaatacccagacaaaatctttgggacgaatgaaaatttgtaactcttctggatttaattatctgaaaatacagttctttccctcatgcttatgtagatataaaaataaaattcataatgcaaagttaaaaaaaaaaaaaaaaaaaaaaaaaaaaaagcgcccgttcaattttaaaggccccgttaaaccccgttaataaccctcgatgg

SEQ ID NO: 31900 - DNA, 451 bp, Homo sapiens
  misc_feature (1)...(451): n = A,T,C or G
nactgatnaactttgagacnctcgacagngcggnggaattcctaaaatctaggtacccagggtcctcatttgacatatgtggcacatccttaacaacacaggtcttcaggtcataccaagggtcattgctttgtggcccaaagaagatggcatggaagccgctccctctacccgcagccccgccagcctctcttgatactgggattgccctggggaggaagatgtgggagggagttggcattcaacctgtcaggaccacctgggggccacttcctttctagtggtgcagacttaggggcagggtctttccaatcttccactgaattggaagcaggttcctagggaggctgtgctgaggcctggactggcctctgactccctccctcttggctgcagaggccgcagcccaggcccagtgctcggccatggccccttgggctcccggggcccg

SEQ ID NO: 31901 - DNA, 470 bp, Homo sapiens
  misc_feature (1)...(470): n = A,T,C or G
ngcccggggnnnnnnaacagcatatactagggacctgcgannnncnnnnaaaatagaaaagagnaagctgaggaggctctccacttggctgtcatggatagatttgaattcagacagtcccagagcccacccttgcgcctaggaaacccataagaaggtcaaagaatgcgactatccttatctccctcacaggcccaggacttcagcattttggggaaaagatccagtttgctccacaagaaaataggaatgagagaggaaatgtcattatgatgccaggaggcttttgaaatcttcaagagggaccacgctgacagcgttaccatcgatgacaacaaacagattctgaaacagagattttctgaagccaaggccctgggagaaagtataaatgaagcaagaagtaaaattggtcacctgaaggaagatatcacccagcggtatatacagtaagtagccctatgaatctn

SEQ ID NO: 31902 - DNA, 501 bp, Homo sapiens
attgagccactgatcgccgctgcgtacgctgccgtcactgtaagctgctttcatgcggaacgcctgctctccctcctgctgcgagtctggaattgggccacgtgctgggtatcaggtgcctatgtgaacagctcccaataaacccttgggcactgagttgctagtgagctcctctggtacagaacacgtcacactggttcagtgttgcggctggtttaggggagaattaagtccgtcctgtccgtcttccctggtgaggactccagaagctcctgcctggggccctccggacagcccagacacctcttcgcgtggctgatctcgctctgcgtccttttgctgaatgtagcttagctctgagggtggctctgtgctggacccagtgactcttcctggggaatcatcaaacctgggggccccaaagcagccgcagccacagctccacatcctctccggcaggcatcccatctgcctcctcccgggtgcgtcccacgtgcctgg

SEQ ID NO: 31903 - DNA, 471 bp, Homo sapiens
  misc_feature (1)...(471): n = A,T,C or G
aggtcgaggcagggccnnnnnaattgagnaactgagatactacgacangcggtggaattcctaaaattaagtaaaagcctcttttttatattcttaacatatgttagatctaaaggaagaaataagagattattaatcctcttgatgaaaggctctaacatgctatcaactagagggtcagtaaacaataactactattacagataacatatatccagtgcttccaatgtgtcaggcagtgttccatgctctttaaatatattaacttatgtaatctgcaaaataaccatacaaaataggtagcattcttattctttctttatagatggagaaactgagacagcatttatgagacttccctaaacttaggtctaatgtggtaggctgaataatggtttctcaaacattttcatatcctaatcctcagaacctatgaatgttaccttacatcttaaaagggactttgcaggn

SEQ ID NO: 31904 - DNA, 474 bp, Homo sapiens
  misc_feature (1)...(474): n = A,T,C or G
agggaagagccnggntgnnnnnnnaattgtagaccctgagtancgtgcggnggaatcccgggtcgcgggtgtggagactcagcatggttccatccagacaccctgcgtggtcaactgtgcaggagtgtgggcaagtgctgtgggccggatggctggagtcaaggtcccgctggtggccatgcaccatgcctatgtcgtcaccgagcgcatcgaggggattcagaacatgcccaatgtccgtgatcatgatgcctctgtctacctccgcctccaaggggatgccttgtctgtgggtggctatgaggccaaccccatcttttgggaggaggtgtcagacaagtttgccttcggcctctttgacctggactgggaggtgttcacccagcacattgaaggcgccatcaacagggtccccgtgctggagaagacaggaatcaagtccacggtctgcggccctgaatccttcacgcccga

SEQ ID NO: 31905 - DNA, 458 bp, Homo sapiens
actcgagaatcgtagaacagtgtgccagagtggcggaactctcgagggccctcgtctgctggccagaccacccctagtcaccacctggtgccttcacctgccccatctccagggcctggtccggtaccccctcgccccccagcagcagaaccacccccttgcctgcgccgaggcgccgcagctgcagacctgctctcctccagcccggagagccagcatggcggcactcagtctcctgggggtgggcagcccctgctgcagcccaccaaggtggatgcagctgagggtcgtcggccgcaggccctgcggctgattgagcgggacccctatgagcatcctgagaggctgcggcagttgcagcaggagctggaggcctttcggggtcagctgggggatgtgggagctctggacactgtctggcgagagctgcaagatgcgcaggaacatgatgcccgagg

SEQ ID NO: 31906 - DNA, 488 bp, Homo sapiens
  misc_feature (1)...(488): n = A,T,C or G
gatggtngcatcngannncttactggatcatcgaagnggcgggaanncaggctgagaacggtaagcttgtcatcaatggaaatcctttcaccatcttccaggagcgtttatccctccaaaatcaagtggggcgatgctggcgctgagtacttcgtggagtccactggcgtcttcaccaccatggagaaggctggggctcatttgcaggggggagccaaaagggtcatcatctctgccccctctgctgacgcccccatgttcgtcatgggtgtgaaccatgagaagtatgacaacagcctcaagatcatcagcaatgcctcctgcaccaccaactgcttagcacccctggccaaggtcatccatgacaactttggtatcgtggaaggactcatgaccacagtccatgccatcactgccacccagaagactgtggatggcccctccgggaaactgtggcgtgatggccgcggtgctcttcagaacatctg

SEQ ID NO: 31907 - DNA, 453 bp, Homo sapiens
  misc_feature (1)...(453): n = A,T,C or G
attagactcgtgtacactantcagtgtggtggaattctaagccttaccgtgctcagagtcagtcaggactgcttgaacaggccttcccagctgcccacagcagggaagcttggcagctgaggtcttcggtggatttcaaagccctgctaaagatggcatcctctgtgatgttttccgcaactgctcctccaaatggataggcactgtcctggctgtcaccttattatggtctcttgatttcctcagtagacagtgcctccagggcagggcagtgtcttaggtctctcatacctggcactcaagtgttcgcctgatttcctggcatccccgagcagtcacttcacctgatgaagacactgcacccagagaaactggatgcctagcaagttaacattaggttctggagctacaggatataccaagttaaggtgtggtgaggggagtcctgctgtn

SEQ ID NO: 31908 - DNA, 472 bp, Homo sapiens
  misc_feature (1)...(472): n = A,T,C or G
cggatatncnccgatttgggacctcanntatnggcatgcggaacgacggccaacactgaccccttcaaggacgacctcaagatcgacctgatgccccatgattttatcactcatttcttgcgcgtcctggccatcgagaccaatcaggagaaggcgatggcgcacgccgaccccacggagctggcgctgagcggcctggaggccttctctttcgactacatcgacaagtggcccctttcgctcattatcaacaggaaagccctcactcgctaccagatgctcttcaggcacatgttctattgcaagcacgtggagcggcagctctgcagcgtctggatcagcaacaaaaccgccaagcagcactcgctgcactccgcccagtggtttgctggggctttcactctgcggcagcgaatgctcaacttcggccagaatattcaatactacatgatgttccaagtgatggaaccga

SEQ ID NO: 31909 - DNA, 491 bp, Homo sapiens
  misc_feature (1)...(491): n = A,T,C or G
agtttnnncnagggggnnnnnttttgaaaccctnatcgtagaccctantccatgtggtggaattcgccgcaaccagaggattctctacaccgtgctggagtgccagcccctcttcgactccagtgacatgaccatcgctgagtgggtttgccttgcccagaccatcaagaggcactacgagcagtaccacggctttgtggtcatccacggcaccgacaccatggcctttgctgcctcgatgctgtccttcatgctggagaacctgcagaagactgtcatcctcactggggcccaggtgcccatccatgccctgtggagcgacggccgtgagaacctgctgggggcactgctcatggctggccagtatgtgatcccagaggtctgccttttcttccagaatcagctgtttcggggcaaccgggcaaccaaggtagacgctcggaggttcgcagctttctgctccccgaacctgctgcctctggccacagtgg

SEQ ID NO: 31910 - DNA, 499 bp, Homo sapiens
  misc_feature (1)...(499): n = A,T,C or G
ggatgtgccnncnagcccccccactgataccctctttagaggcgtgancgcgaagcttcgagcgggcgtactgttgaaagcgacaagtggaggcgccgctctagcggtcgggactctgtactatggcggctagtgatacagagcgagatggactagccccagaaaagacatcaccagatagagataagaaaaaagagcagtcagaagtatctgtttctcctagagcttcaaaacatcattattcaagatcacgatcaaggtcaagagaaagaaaacgaaagtcagataatgaaggaagaaaacacaggagccggagcagaagcaaagagggaagaagacatgaatccaaagataaatcctctaagaaacataagtctgaggaacataatgacaaagaacattcttctgataaaggaagagagcgactaaattcatctgaaaatggtgaggacaggcacaaacgcaaagaaagaaagtcatcaagaggcagaagtcactt

SEQ ID NO: 31911 - DNA, 506 bp, Homo sapiens
  misc_feature (1)...(506): n = A,T,C or G
ggatgttcnnnnggtccncccactgataccctcnatagatgaccactaggccagngtcgnggaattcgggatccaggcaaaggggtctccgggccagagttcggccgctgttctgcgccttgctgctgtcactcggtcgcttcgtccggggcgacggcgtgggaggagaccccgcggtcgcgttgccacatcgccgtttcgagtacaaatacagcttcaaggggccgcacctggtgcagagcgacgggaccgtgcccttctgggcccacgcggggaatgctattccaagttcagatcaaattcgagtagcaccatctttaaaaagccaaagaggctcagtgtggacaaagacaaaagcggcctttgagaactgggaagttgaggtgacatttcgagtgactggaagaggtcgaattggagctgatggcctatcaatttggtatgcagaaaatcaaggcttggagggccctgtgtttggatcagctgatctgtggaatggtgttgga

SEQ ID NO: 31912 - DNA, 464 bp, Homo sapiens
actcgaagaccctgaagatccactatcggcagagtggccggaatgtctccactggcatggacccgggtactcacaagtgatctacggtcgtaagcgcttgttcctttacccacctgagaagacgccagagttccaccccaacaagaccacgctggcctggctccgggacacatacccagccctgccaccgtctgcacggaccctggagtgtaccatccgggctggtgaggtgctgtacttacccgaccgctggtggcatgctacgctcaaccttgacaccagcgtcttcatctccaccttcctcggctagccaaaacagctggcaggactgccggtcacacaccagcacgttccacctcgtgctcacggattttattacacagatagtggcggcaatgggctcaggccagcccaccctcacctgctcttccagcccacatagggggacgatcacggtccagcat

SEQ ID NO: 31913 - DNA, 451 bp, Homo sapiens
  misc_feature (1)...(451): n = A,T,C or G
ntcgagactcgtagtccatgtggtggaattcctcctgtccctcatcctcattcctgtcctgtcccttgtcgcctgaatctctggctgtctctggccaccccagtccttctccctgccatgggttgttgctgtgggggttgcaggaagggaaaggcctgggtgcctctcgttcccattggggctttcagaagcacatgcagggattgatgggcagatggctaattggagaagtgaccccaggcagtgccgctgtggagtaaggaagcggagccaacaatggcatcttctcaagtcggttttcctttggaagcagtgtagggcaggcctcagtgttgtctcctggccaaggctggtgctggtgatagttatgtccacccgctttcccctgtccttggcaggggctgcacccaggggcatgccggcactttccagtggccctatgtgtggcccc

SEQ ID NO: 31914 - DNA, 503 bp, Homo sapiens
  misc_feature (1)...(503): n = A,T,C or G
agatgtcccnnnnnagggcccccttatgataccctcgatagagagccgtaatncgctaccggcagaaggactcctatatcgccagccagggccctcttctccacacaattgaggacttctggcgaatgatctgggagtggaaatcctgctctatcgtgatgctaacagaactggaggagagaggccaggagaagtgtgcccagtactggccatctgatggactggtgtcctatggagatattacagtggaactgaagaaggaggaggaatgtgagagctacaccgtccgagacctcctggtcaccaacaccagggagaataagagccggcagatccggcagttccacttccatggctggcctgaagtgggcatccccagtgacggaaagggcatgatcagcatcatcgccgccgtgcagaagcagcagcagcagtcagggaaccaccccatcaccgtgcactgcagcgccggggcaggaaggacggngaccttctgtgccctg

SEQ ID NO: 31915 - DNA, 493 bp, Homo sapiens
  misc_feature (1)...(493): n = A,T,C or G
natttgatncccctngnannnncnatcgagatccactatccatgtggtggaattcagtcgcggagtagtcctcatggccgccccgccggagcccggtgagcccgaggagaggaagtcccttaagctcctaggatttttagatgttgaaaatactccctgcgcccggcattcaatattgtatggttcattaggatctgttgtggctggctttggacattttttgttcactagtagaattagaagatcatgtgatgttggagtaggagggtttatcttggtgactttgggatgctggtttcattgtaggtataattatgcaaagcaaagaatccaggaaagaattgccagagaagaaattaaaaagaagatattatatgaaggtacccacctcgatcctgaaagaaaacacaacggcagcagcagcaattgaacaatcttgagcatagaagtcaatgtaaacgaagttaagatcaaccacataaaacatttcatg

SEQ ID NO: 31916 - DNA, 486 bp, Homo sapiens
  misc_feature (1)...(486): n = A,T,C or G
natcgagacccctgtccagnggcngtagataacagataaatctacatggtacctatgaatcctgtaatttgtttagggagatcttgtcactcatccctggttcctgcccatactgtttggtctcgttcttgcagtttgcttggaacagggccagagccccacatgagattgtcagcaggagtgaggagcgccagtccctactcctcagcagggacccagcacagcaatccggttgttctcggttagactgggtcggggccaggggagaagcagtcacccctgtgtagagggttcccgctgtgcttctgagcagttgctttgttcagaagtgttaggagggtcagattgtgccataattgttattaaagagaanacacgcccaccttcctttctcccctgctggccattgttcattgagttttactganggcagccttttgtggagtcanggaggtttgccanaggcctgtagatgcctcctgacaa

SEQ ID NO: 31917 - DNA, 480 bp, Homo sapiens
  misc_feature (1)...(480): n = A,T,C or G
tctgaaccctcggagnggcngatgatcatcatgcatacngcgaacgaccaaggacacacccatgctgggtctcctcatggcgatttttagtgtcatttttatgaatttcaacaaggccagtgaggctgtcatctgggaggtgctgcgcaagttggggctgcgccctgagaatgactgggctctctcagcgcttgctgcccgtgttgtcctttggcaagagaggatggtcctaggattgcatcagtctggtggtctggtggagcgggtggggtgctggactgggtagagggcccagggttctgacctgggtggatgacgggcaaatggtcctgaactctctgctggctctctccttaatgtcctctgtctggtctaagctgagatgttagatagacctttacggatccctgacaaagaggcatctggtcttaactgcttgcttctagtggccatgtgctcattactttcttcacttcattn

SEQ ID NO: 31918 - DNA, 486 bp, Homo sapiens
  misc_feature (1)...(486): n = A,T,C or G
gtctgagagccttacgcagnggcggattgataccagtttgacatccactatggctcgggcagcctctccgggtacctgagccacgacactgtgtcggtgccctgccagttatcgttgtcagtctctgccctgggcggtgtcaaagtggtgaggcaggtctttggggaggccaccaagcagccaggcatcaccttcatcgcagccaagttcgatggcatcctgggcatggcctacccccgcatctccgtcaacaacgtgctgcccgtcttcgacaacctgatgcagcagaagctggtggaccaaaacatcttctccttctacctgagcatggacccagatgcgcagcctgggggtgagctgatgctgggtggcacacactccaagtattacaagggttctctgtcctacctgaatgtcacccgcaaggcctactggcaggaccacctggaccatgtggaagtggacagcggtctgaccctgttcaat

SEQ ID NO: 31919 - DNA, 437 bp, Homo sapiens
cccggtgccgcggacgttggagagaacaagacgccggtcctgccgctgatgcggcagcggtgctccttctacaagccactgatgggtggccggatcgttcgctgcgtgttcattgacgctgggacgggccacctcaattgtactttcctaacaataggaggtgacgggctctgatccacctactacatgttcttctctccggaccatgcggcggctgccattgccaaggctggcattccggtgtatgcctggaagggcgaaacggacgaggagtacctgtggtgcattgagcagaccctgtacttcaaggacgggcccctcaacatgattctggacgacgggggcgacctcaccaacctcattcacaccaagtacccgcaggttctgccatgcatgcgaggcatctctgaggagaccacgtactgtgtccacaacct

SEQ ID NO: 31920 - DNA, 490 bp, Homo sapiens
  misc_feature (1)...(490): n = A,T,C or G
gcccggccaactgaaaccnttaatgagnaccctangaagagncgnggaattcattgtgttcatgcgcagggcccagtcatggaacttgaggcacagggtgccatggtggattctgggaaggggaaggcaaccagagtgggcaaaacgagggccctggagcagacacggcagcaaggggagcctgcagcgctcccagcggactccgccacgtcctgctggtggagcaaaggcgggctgccatgttgtgagtggccaagggtcgctcactgggcaggaacattgtcaaggccattcatgcttggaatagggtctctcttcagctctgaggcaaatctgttctctaattttcagatgacttcaaggggaacgtgtaccaccacccctctggatgaagcctgctgggagcgtgaatgacatggccctggatgccttcgacttggaccggatgaagcaggagatcctagaggaggtggtgagagagctccacaag

SEQ ID NO: 31921 - DNA, 505 bp, Homo sapiens
  misc_feature (1)...(505): n = A,T,C or G
ngaggggaggggnnnnnnnnnnnatttgatntacgatncacagtggaggaaggcgaaaacgcagactctaaagaatatgtcaactatgatacaagtagcagctagccttataactaactgtaaacactgtctgtgggttttaagttttacctgagcattggatattaacagaccattagcccaactttcaaaaatatgaaccctatgaacttcacaactgaagtcagatctgtctgcctgagagaggtaaaatcatgtcatgaaatcaaacggtggctgatgcgcccaaattctggcctcatcctctaactggaggacatctggcaggacagcaactgggctgtgccttttttcagtccagcaacatctttcactcaacccacgccatttggcagtttccccattgcccctggcacctagccctccggtaccgggaactaaatatctttgaccatcccgcccgcggggtctgcctacttaacctgaggcaggtgaaagagcctcn

SEQ ID NO: 31922 - DNA, 498 bp, Homo sapiens
  misc_feature (1)...(498): n = A,T,C or G
aggcgnnnnagcgccagactgagaccancccaaatcctncgcanaagccgngnaantngcgcgaccttatctccaacaatgagcaactgcccatgctgggccggcgccctggggccccggagagcaagtgcagccgcggagccctgtagacaggcttttccatcctggtgactctgctcctcgctggccaggccaccaccgcctacttcctgtaccagcagcagggccggctggacaaactgacagtcacctcccagaacctgcagctggagaacctgcgcatgaagcttcccaagcctcccaagcctgtgagcaagatgcgcatggccaccccgctgctgatgcaggcgctgcccatgggagccctgccccaggggcccatgcagaatgccaccaagtatggcaacatgacagaggaccatgtgatgcacctgctccagaatgctgaccccctgaaggtgtacccgccactgaaggggagcttcccggagaacctga

SEQ ID NO: 31923 - DNA, 546 bp, Homo sapiens
  misc_feature (1)...(546): n = A,T,C or G
aaggggaagcagnccnnnnnnncaattgaaatcgaccactgtccagcggggcgaattcggaagtgttggtgggaagaagggatcggtggagaagtgcccgctgtgcaaggggcgggggatgcagatccacatccagcagatcgggccgggcatggtacagcagatccagaccgtgtgcatcgagtgcaagggccagggtgagcgcatcaaccccaaggaccgctgcgagagctgcagcggggccaaggtgatccgtgagaagaagattatcgaggtacatgttgaaaaaggtatgaaagatgggcaaaagatactatttcatggagaaggagatcaggagcctgagctggagcctggtgatgtcataattgtgcttgatcagaaggatcatagtgtctttcagagacgaggccatgacttgatcatgaaaatgaaaattcagctctctgaagctctatgtggcttcaagaagacgataaaaacattggacaatcgaattctttgtattacantccaagcacgtgaggtgataaagcacggggacct

SEQ ID NO: 31924 - DNA, 482 bp, Homo sapiens
  misc_feature (1)...(482): n = A,T,C or G
natcgagaccatagtccanngggggtagacaacggtgtctgtgaggagacgtctggagcttatgagaaaacagatactgatgggaagtttctctatcacaaatccaaatggaacataaccatggagtcctatgtggtccacaccaactatgatgagtatgccattttcctgaccaagaaattcagccgccatcatggacccaccattactgccaagctctacgggcgggcgccgcagctgagggaaactctcctgcaggacttcagagtggttgcccagggtgtgggcatccctgaggactccatcttcaccatggctgaccgaggtgaatgtgtccctggggagcaggaaccagagcccatcttaatcccgagagtccggagggctgtgctaccccaagaagaggaaggatcagggggtgggcaactggtaactgaagtcaccaagaaagaagattcctgccagctgggctactcggccgg

SEQ ID NO: 31925 - DNA, 487 bp, Homo sapiens
  misc_feature (1)...(487): n = A,T,C or G
tgtgtccnnaggggcccnnactgagaccatattgagngcggtggaattcctcaggggatgctttgtccagcccgcaggcattttatccagcagacaagcagaagcagcagttttgtcattcgagccgcctcccctgccatggtacattacgtgagcaggcggctggctgtgctgtgctctgtggagatcacacgtgagattcgacagcactcgcttctgcaggcttctctttcctgggttcttttagatgagagagagccagaagaggcggggctgcggaaggcgctgggaaaatgaatggagtgatggtctttagcagtgtgcccgtgactggagtgttctgagtgctgccagaactctgagtcacagttgcatggacttatgtggcggttaatggtggtgtgggaagcctgcctgggttcctaagggatacttcatgaaagcattgaggaaaaaaccaggtttcttgcagttaaaatggtttctt

SEQ ID NO: 31926 - DNA, 470 bp, Homo sapiens
  misc_feature (1)...(470): n = A,T,C or G
aatgatagcctagcagngcttgaaaccatcccttccacacaaaggtctggatgagagtagaggacaattttttaaatgcgaagctatgactgctaaatgggacatactgattttgtaacaacaacaaaaaacaaaccctggcacctagggaatctcaaaggaggcaaagactgatcatctttgtttttcaatactgcctttccgctcttccctaaaaacttccatgctacctttttaagatgctgcaagcactttgaattcaaacagcctgctgagcctgtgctcaaacctatgagagcagggagtggcctcagctcctgcacttcccacacggaacacctccagatgtcatccacagtcgtgaggctgataacctgatgtcatggaccaacatggaactgactgtcttcagattctttgtgggaaagagattcctcgctggatcaatcgacttgcctacttcagctcct

SEQ ID NO: 31927 - DNA, 466 bp, Homo sapiens
  misc_feature (1)...(466): n = A,T,C or G
cggtgnctnannccaggctagcaaagcgatgtgccgnggaattccgctcgctgtgtgccttanactccatctcatgtccctccccatcccctggctttccctccctccttgccccatcctgggccagccagcagggctcctcctctggctcttcagacctttcagccagtgctgtcagtgcccctgggagggaagggcatccctgaggcacccgaatggtccctcagggtgcagggaggcagaagcctggccacagaggagcctcctaaggcagcagctgcagcaagcgcaccctctccccactctccccacgccagagcggcttccagagcagatgctgtttccatcctcctcgtcaaaaccattctcgctgctgagcttgacaatctgggcaaggcttgtggggcgcttgacaaacagaatctgccctgtgccgcctggttccgtggcctccagcatgagcctg

SEQ ID NO: 31928 - DNA, 502 bp, Homo sapiens
  misc_feature (1)...(502): n = A,T,C or G
ggaggggnnnnnnnagnatccgataacgtacgcagnngcttgagaacactcgcagctccgcctggaagggcagagagagagccacggagtgagggacccttggatgatagtgcttcccaaagaccaccccgacacagccaacacagaaagaaagggaaaagattccagagacgttccagcataaggccatgcagggccggctggagctcgtgggcaggggctgccgacctctgagctgggtgtgctgggagccagggatcactgggtgccggccacagaggaaggtccctgaggacacagtaccgaagtctgatcccaaaggaggaaggaaggtgggccggggagaaggtctgagtgcagggatggtccaggaggaggactggaagctgcaggatggctgcagggggccgtggaccctcctgggctgaagctcacttctttcccgcctcctacaggggcaggggagccagggctgcgagttcttgctgtggaactctaatgg

SEQ ID NO: 31929 - DNA, 513 bp, Homo sapiens
  misc_feature (1)...(513): n = A,T,C or G
gccacgcccttagatccccctccnnttagatccacctatcagagnngggcaattcgacactgaattctctgggtggctttcttgtggccccatgggatgcagcgtgtgggctgtctgaaggaccctgctttttccaagggccgaggggctgcctttcctttgtgtgtattaagcttttcaaacaatggaggggatggaaagccctggtgtcctgacgggagccaggtcggcctgagagctgtgccgctcctctgtcttgtcagtggaggtgcctgggtggggagcaggtctcaggcctcttgtcctctccccagtggctccaggcctcactagtggcaagggcaggatgaggctgcaccgctgggaagagtctatctaagttcttggcttggagtcccgtgtcgtctccgcccagaggaagatctccagagttcacctttcccttttccttgagntgagctgaatgccccaccccagctctcttttccttctgagagcttttgctggaggagg

SEQ ID NO: 31930 - DNA, 536 bp, Homo sapiens
  misc_feature (1)...(536): n = A,T,C or G
aggggnagagcncnnnnnnnattgacatcgtccgcggtngaattcgacgaacatccctatgaatgggcagagtatcaggcgggcagtgtgattcttggagcaaatacccggccagacttggatctccgagaccccatctgtgatgacttcttccagttgtggcaagacatggctgagagcaacgccaatatctatgagcagatcttccgctgcctgccatccaatgccacgcgttccctgcggactctccgggagtacgtggccgtggagcccttggccacggtcagtccccccttggctcggtctgagctcacccaggtccagggccacctggtccacttccccctcaagttcctagaggatgagtctttgctgcccccgctgggtagcaaggagggcatgatccccctagaagtgtggacatagttgaggcccccgtcagggagaggtcaccagctgctgtgccccaccacgtctggctccctgccccttaaccccaaggactganggcagtgccctttgagatctggggaggc

SEQ ID NO: 31931 - DNA, 523 bp, Homo sapiens
  misc_feature (1)...(523): n = A,T,C or G
tgggcgttgagctcctcagggggtagatctcggactggcttggcacgcgatggacgggatacaggaaggaccacagcgttgcccccagccctttgcctgcccccacctcctgctcccgggcccatgggcaactgtgccatccttgccagcaggcagcctgtgcccaggtcagtaggtggggatcatgactctggtactctgccacaattgaggcttatccaccattctgctaagttttctcatctgtatacagaggccgctggctctaaagggctaagtcctagaaagggactgtagctctggcttccgacactgctttttggttattctacagactaccaccctcatcatcagtatctttggtctgtgagctgcaggtctggcaggggctagcatgggctagggcaccacagccaaaggcttgggtctcacttggactatntgaccaagatcagcgggtgctaagtggccgctggcgccctccacttcggggccttcnctctgaccccaggcttagacttgg

SEQ ID NO: 31932 - DNA, 412 bp, Homo sapiens
  misc_feature (1)...(412): n = A,T,C or G
aggcggnagagccccctgagaccanttcacntnctncgcaangccgngnaantaannggnttgttctctttatggcttggcttcattccgacctggggtggggccacatccaacccactgcccactggctggccgtctggcctgccccgcggttccaaccacagtggtgaagcagcgcttgcagatgtacaactcgcagcaccggtcagcaatcacctgcatccggacggtgtggaggaccgaggggttgggggccttctaccggagctacaccacgcagctgaccatgaacatccccttccagtccatccacttcatcacctatgagttcctgcaggagcaggtcaacccccaccggacctacaacccgcagtcccacatcatctcaggcgggctggccggggccctcgcc

SEQ ID NO: 31933 - DNA, 492 bp, Homo sapiens
  misc_feature (1)...(492): n = A,T,C or G
gccccccccnnagtttggacaccttcgaannatccgggggtcctcgaaaanccacnaagacagacaaacgaccccaatgtgggcgaaggaacaccttctagactggagccgcatagtccacgtgacaaggagacccaggatagaaacactgtgcggaggacacggtgtcaacctcggaaggggcctcctatgctttccacaccaaattcccccacgggagaaaccctgccacaaggcccaggaaaccacagaccccaagccaactgtgcctagcacagacaccaaggaatgacagcgatgccagtgacgccaggaggacttggcccctagccccatcatcggctgtatgatgattggtgtgtctgcggcctccctctcgtcagactgcagccttgngggacacgtagaactctgtctcctcgccctcaggngccttgagcttacacttcccgcagcacagcagcgggtggaagaacaccacagacagcagag

SEQ ID NO: 31934 - DNA, 479 bp, Homo sapiens
  misc_feature (1)...(479): n = A,T,C or G
catagagaccttggcnagggcgggactgattcataggaccaacggctctgttgcctgaggnccccctgtgacccccgagtgtgaacactgtgggcaacgacaccatcttggtggccccatgtgggcagagcccatccatgacctggattttgtgggccgtgtcctggaggctgtgagcgctaaccccggccgcttccacacctcggagcggatccgaggggtcctgagcgtcatcactgaggagctcccggacgtgcctctgtactacaccctggaccagctgagcagcaccatccactgcaacacaccaagcctcctgcagttgcggtcggccctcctccacgctgacttccgggtctcactctcccacgcctgtaagaacgctgtgaagacggatgcccctgcctctgccctctgggacatcatgcgttgctgggagaaggaatgtccngtgaaacgggagcgactatcagagacta

SEQ ID NO: 31935 - DNA, 505 bp, Homo sapiens
  misc_feature (1)...(505): n = A,T,C or G
ccccccccatgatcccatccgatagatcaccntcacgaactccctgggncctcacaggcagcggttctccagccatcagtggaaccaacccagccgactccccaggccgtggtgtctgcagcccaggcaggcctgctccggcagcaggaagaactggacaggaaagctgccgagctggaacgcaaggagcgggagctgcagaacactgcagccaacttgcatgtgagacagaacaactggccccctctgccctcgtggagccctgtgaagccctgcttctatcaggatttctccacagagatccctgccgactaccagcggatatgcaagatgctctactatctgtggatgttgcattcagtgactctgtttctgaacctgcttgcctgcctggcctggntctcgggcaacagctccaagggagnggactttggcctctccatcctgaggattctgatcttcactccctgtgccttcctttgttggtaccgacccatctataagg

SEQ ID NO: 31936 - DNA, 503 bp, Homo sapiens
  misc_feature (1)...(503): n = A,T,C or G
cgccccccccnnnaggattgataccactggaannncactgagaccnttaggaagggccctggagatcggcagcctgtttttgatctacaaatggtcatacggcgaaccgttgatccgattgatcatcgccggaccgatcctgatgggctgcatgtttttgatgcgcacccatcgcttggggctggtctttttcgccgtcgccattgtcgctatttacgggcaaaccttccccgccatgctcgactatccggaagtggtcgtgcgcttaacgctgtggtgtatcgttgttggcctctatccaaccttgctgatgacgttaatcggcgtgctgtggtttcccagtcgtgccatttcgcaaatgcatcangcgcttaatgatcggcttgatgatgccattagtcacctgacagacagcctcgcaccgctacccgaaacgcggatttgaaagagaggcgctggcgctacaaaaactcaatgtcttttgcctcgcggacgatgccaat

SEQ ID NO: 31937 - DNA, 519 bp, Homo sapiens
  misc_feature (1)...(519): n = A,T,C or G
attgacctcgaccactgtccgagnggngcaattcctagtggggacgccctactacatgtcaccggagaggatccatgagaacggctacaacttctagtccgacatctggtccttgggctgtctgctgtacgagatggcagccctccagagccccttctatggagataagatgaatctcttctccctgtgccagaagatcgagcagtgtgactaccccccactccccggggagcactactccgagaagttacgagaactggtcagcatgtgcatctgccctgacccccaccagagacctgacatcggatacgtgcaccaggtggccaagcagatgcacatctggatgtccagcacctgagcgtggatgcaccgtgccttatcaaagccagcaccactttgccttacttgagtcgtcttctcttcgagtggccacctggtagcctagaaagctaagaccacagggttcagcaggttccccacaaggctgcccagccttacagctgatgctgaaggcagagc

SEQ ID NO: 31938 - DNA, 410 bp, Homo sapiens
attgccgtgatcatggccgctctcatgagctcactcacctccatcttcaacagcagcagcaccctgttcaccattgatgtgtggcagcgcttccgcaggaagtcaacagagcaggagctgatggtggtgggcagagtgtttgtggtgttcctggttgtcatcagcatcctctggatccccatcatccaaagctccaacagtgggcagctcttcgactacatccaggctgtcaccagttacctggccccacccatcaccgctctcttcctgctggccatcttctgcaagagggtcacagagcccggagctttctggggcctcgtgtttggcctgggagtggggcttctgcgtatgatcctggagttctcatacccagcgccagcctgtggggaggtggaccggaggccatc

SEQ ID NO: 31939 - DNA, 519 bp, Homo sapiens
  misc_feature (1)...(519): n = A,T,C or G
nattgacatcgtccagcggtggcaattcgctcctgggcaatgacacgaggacctaggtcaggtgacaggtggatttcaccaggagagggagatgaggcaggatggtgggtgccaagaaagagggtcctcagcagaaggggtttactaagaaaacagcagctctgaggcggcggcaccagaggcaggaaaggactgggatgaccagggcggctgggccccaggcctctcccaagagaggatccgggacctccagctgagtgggtgtggcccccagacccagcctcttcggcggtgttctccctcacctgtgctcctcacccgggcaggtgggagaacaaggacatctacgcggcagccatccggagcctgcggctgcgggagctgcagaatgtggagtgcgtgacggccgtgcgggccggcctgggctccatcatccccctgcagctgctgaccatgctcagcccactggagatggagctgcgcacctgcggcctcccctacatcaacctcgagttcctc

SEQ ID NO: 31940 - DNA, 553 bp, Homo sapiens
  misc_feature (1)...(553): n = A,T,C or G
aggtgnncgcagcacggcccnnnnnnnnatttgacaatcgatccactgntcagagtggngcaattcacctattccctctgtggaaccaagaacatcaaggtggccaagaaggtggtgaagacccacgagccggcctccttcaacctcaacgtcacactcaagtccagtccagacctgctcacctacttctgccgggcatcctccacctcaggtgcccatgtggacagtgccaggctacagatgcactgggagctgtggtccaagccagtgtctgagctgcgggccaacttcactctgcaggacagaggggcaggccccagggtggagatgatctgccaggcgtcctcgggcagcccacctatcaccaacagcctgatcgggaaggatgggcaggtccacctgcagcagagaccatgccacaggcagcctgccaacttctccttcctgccgagccagacatcggactggttctggtgccaggctgcaaacaacgccaatgtccagcacagcgccctcacagtggtgcccccaggagggttgcccagggcaccca

SEQ ID NO: 31941 - DNA, 490 bp, Homo sapiens
  misc_feature (1)...(490): n = A,T,C or G
cggggccnngggagnnnnnaattgannccctatcgtagacactaggcagngnggnggaattcgacgacgccggctctgcacccctgaagagcagcgggcagcaccagaatgacaaaggcaagaacgtccgccagaggaactcttcctgaggcaggtggcccgaggacgctccctgctccgcgtctgcgccgccgccggagtccactcccagtgcttgcaagattccaagttctcacctcttaaagaaaacccaccccgtagattcccatcatacacttccttcttttttaaaaaagttgggttttctccattcaggattctgttccttaggattttttccttctgaagtgtttcacgagagcccgggagctgctgccctgcggccccgtctgtggctttcagcctctgggtctgagtcatggccgggtgggcggcacagccttctccactggccggagtcagtgccaggtccttgccctttgtggaaagt

SEQ ID NO: 31942 - DNA, 479 bp, Homo sapiens
  misc_feature (1)...(479): n = A,T,C or G
ggaggaccccggggnggggnnnnaattgagnnccacttccgtagacattagtacatgcggtggaattccgcgggcggcgacggagccgggatcggtgcctcagcgttcgggctggagacgaggccaggtctccagctggggtggacgtgcccaccagctgccgaaggccaagacgccaggtccggtggacgtgacaagcaggacatgacatggtccggtgtgacggcgaggacagaggaggcgcgtccggccttcctgaacaccttaggctggtggggctgcggcaagaagcgggtctgtttctttacttcctccacggagtcggcacactatggctgccctctgggctcccagaacccacaacatgaaagaaatggtgctacccagctcaagcctgggcctttgaatccggacacaaaaccctctagcttggaaatgaatatgctgcactttacaaccactgcactacctgactcagg

SEQ ID NO: 31943 - DNA, 522 bp, Homo sapiens
  misc_feature (1)...(522): n = A,T,C or G
nattgaacatcgatcagcgntgngcaanncgacaatttgagcctagcgtactttgcagcagccctcaaataactcagcctcctcaagggggcatctgatagatgcccgtgaacatgtcttctccggcctggccaggctgcccaccattggaaacatcccccagggcctgaccccactgccgagggctgcagcaccccccacacctgctgggctgacgtgtgtcctggctcctgtcttcccctgaagccaggccacccagctccctccagggccaggcagggaagcaccaagccctggcgtgcacctgcacccactcaaacgccgaagccttcgtgtcatcactgtcacacgggccactcagcacccatgaagtccaccacgggtctctggggcaatccttctctgaacgcaaaaccctgccctggctctcccaggtctgccagccacgcatgccgggtctgagactcccccggaccgctgggtgctgcttggagcccctcctggcccaggactgatgggcan

SEQ ID NO: 31944 - DNA, 472 bp, Homo sapiens
  misc_feature (1)...(472): n = A,T,C or G
nattgatagacgtcgctaggacagngcgnggaattccgggcagaggcggaacgtgatgttctcttcccggggtacacccatttgcagagggcccagcccatccgctggagccactggattctgagccacgccgtggcactgacccgagactctgagcggctgctggaggtgcggaagcggatcaatgtcctgcccctggggagtggggccattgcaggcaatcccctgggtgtggaccgagagctgctccgagcagaactcaactttggggccatcactctcaacagcatggatgccactagtgagcgggactttgtggccgagttcctgttctgggcttcgctgtgcatgacccatctcagcaggatggccgaggacctcatcctctactgcaccaaggaattcagcttcgtgcagctctcagatgcctacagcacgggaagcagcctgatgccccagaagaaaaaccccg

SEQ ID NO: 31945 - DNA, 481 bp, Homo sapiens
  misc_feature (1)...(481): n = A,T,C or G
natcgagaccctagccagggggttgattgccttgaggngacgccctgccagcgtgaggtagagaagacccaggtctgaagaggggaggatcaagtcagagaagcgtagatgcccatctgagatggaggaggctcccgtccgaggggaggggacactcctgtctggaagggacagaggccttcagatgaggagccaggaggcccaggcctgagggaggagaagggcctagtctgatggggagaagggcccttgcctgaaggcagagcagtttcctgcctgggaaggtcatcccagccccgcccatcagtctgaattggacatcaccagtgcccaggacattggaggtctgagggaaaagtctagaaagatgatggggctggtcacacactaattaccaatgggaaagctaaggtgagttccaagtttggcttcaccagagaaaactaatttgtgtggcattccagaaagacctgcanactcg

SEQ ID NO: 31946 - DNA, 552 bp, Homo sapiens
  misc_feature (1)...(552): n = A,T,C or G
acgtccagatagcagcnccnnnnnnnnatttgaaaatcgatccgcagtccagagtggngcaattccgagatgtcacaacaagaatcacactaccatctcaccctgcattagggacgccaaaacagcagcttcatacaatggctcagaaaacaatcttcagtactggcacgccagtggctgcagccacagtagcacctattttggcaaccaacaccattccttcagcgaccacagctggatctgtgtcacacacgcaagctcccacaagtaccattgttaccatgacagtaccctcccattcctcccatgctactgctgtgaccacctcaaacatcccagtcgccaaggtggtgccccagcagatcacgcacacttctcctcggatccagccagactaccctgccgagaggagtagcctgattcccatctccggacatcgggcctctcccaatcctgtggccatggaaacccgaagtgacaacagaccgtctgttcccgttcagttccaatattttttgccaacttaccccccttctgcatacccactggcgg

SEQ ID NO: 31947 - DNA, 472 bp, Homo sapiens
  misc_feature (1)...(472): n = A,T,C or G
nactgatagcgctacgtagngcggngcaattcctctatactcccaacgtgaaggtgagccgtctcctgattttgggaggggccaacgtgaactacaggacagaagtgttaaataatgccccaatcctgtgcgtccagtctcaccttggccacgaggaagttgtcactctgctcctggaatttggtgcctgcctggacggaacgtcagagaacggcatgactgccctctgttacgcagcagctgctggccacatgaagctggtgtgtctgctgaccaagaagggagtgagagtggaccacttggataagaagggccagtgtgcgcttgtccacagtgccctacggggccacggtgacattctccagtacctgctgacttgtgagtggtcgccgggtcctccccagccaggcaccctgaggaagagccacgccctgcagcaggcgctgaccgcggcggccagcatgggccacan

SEQ ID NO: 31948 - DNA, 472 bp, Homo sapiens
  misc_feature (1)...(472): n = A,T,C or G
ntttgatgacctcgctaggacangccgnggaattcgtggtgggcatccatcttcttgtccttcagccgtggggatgtgcggtaggcagccttcccgcccagggcctcccagaagccatctggctcgctgccttctgccacctgcacaggttgggcccgcagcaccctgagcagctcctgggcccccgtcttctctgcctcgctggctcctgtacccacccacaggtaggcggctgagggggttttcagaacaaaggcatcgttggagttcagtgcaccagccttaggcaatacctcaacagcccgggtggctccagcgctgttggcgcggacctggaagaggcgggtgctggcaggggctgtctgcccgccctcgcgggaggtgccgcccttgtagatgatcatgggcttcccaccaaacaggctcatgaggtgggcgggctccttgccttggaccacacggctctggacag

SEQ ID NO: 31949 - DNA, 485 bp, Homo sapiens
  misc_feature (1)...(485): n = A,T,C or G
aggcnnnnnnnnccccggaagttcagngancggcncgnccaattnggnttcagctacttcctggcgctcggatttgcatattgagcccggagggcggggaagtgaccgtttggtccctgcccaaggtttgggtgtttggtgtggccgtcgcgcagggctttgaaggcacagaaacctggcgactcagtctgcagctccggggagtggagcagcccgggccagccttctcctgtagggacggacggaaggatctccggaggagcctgggcttcgcaggcacatcgactacacctctcgcgtctcctttcctttccttccgacccatccccaaggtattattaggaagggggtgctcccaagagcggaggaggtgcgctctgatcccttccaacattaggggttctctagagaaaggatgcgatatgccgaggtgatgctcggggtctcgctgagttcttaataatcattacaaagtaagttccttg

SEQ ID NO: 31950 - DNA, 457 bp, Homo sapiens
  misc_feature (1)...(457): n = A,T,C or G
naccgagntaccgtgtaacctgcggagnaaccnggagggnggncaggacaccagcacagggttcagccagagcttcggccttggctgcgccagcctggtggccagtggtggtggaggcacggagcacaggggtgggtcatgggacacaggccacaggccacatgccacgtgcacacctggaggcacctgccttgccttggtcccttcctatgatggctgctgccgccaagactcaccatagctgggggacagggtggagggtgcagaagcccttggagaggtggcctcctccctcagatatctcctaggccagcccccgactgcctggatgggaccattattgctttagagggacagggaagggcaagagctgcggcctgggtcaggaatcccaacaagcaagggctgcgctattagttcgttacaccaagaaagtaccccaagtgtcaactccaag

SEQ ID NO: 31951 - DNA, 482 bp, Homo sapiens
  misc_feature (1)...(482): n = A,T,C or G
agggnttnnnnnnnaaggttagaccagtatgggcaatnnccattgagagacaccacccatggtggttgtgggcattgtgggctacgtggaaacccctcgaggcctccggaccttcaagactgtctttgctgagcacatcagtgatgaatgcaagaggcgtttctataagaattggcataaatctaagaagaaggcctttaccaagtactgcaagaaatggcaggatgaggatggcaagaagcagctggagaaggacttcagcagcatgaagaagtactgccaagtcatccgtgtcattgcccacacccagatgcgcctgcttcctctgcgccagaagaaggcccacctgatggagatccaggtgaacggaggcactgtggccgagaagctggactgggcccgcgagaggcttgagcagcangtacctgtgaaccaagtgtttgggcaggatgagatgatcgacgtcatcggggtgaccaagg

SEQ ID NO: 31952 - DNA, 449 bp, Homo sapiens
  misc_feature (1)...(449): n = A,T,C or G
ntccgaaatcccgctaagctnggaaanaccnannagtanggaaacccgggctgcccaggactttttcagcacgtgtcgctctcctgatgcctgctgtgaactgactctgcagccactgcgtcgctggcctctggatgctgccatcattttctccgacatccttgttgtaccccaggcactgggcatggaggtgaccatggtacctggcaaaggacccagcttcccagagccattaagagaagagcaggacctagaacgcctacgggatccagaagtggtagcctctgagctaggctatgtgttccaagccatcacccttacccgacaacgactggctggacgtgtgccgctgattggctttgctggtgccccatggaccctgatgacatacatggttgagggtggtggctcaagcaccatggctcaggccaagcgctggctctatcaag

SEQ ID NO: 31953 - DNA, 449 bp, Homo sapiens
  misc_feature (1)...(449): n = A,T,C or G
ntcgagattcgtaggccgtgnggnggaattcgncagagggtctccccagacacccgagcacccacccgcttcgtggatgatgaggagctatcgtatgtgattcagcggtaccgggaggtgcacgacatgcttcacaccctgctggggatgcccaccaacatcctgggtgagtgcccccaaccctgatggcctgtctccctggggtggcttcagggccagggcagggcttgcctatctccaccaccctctgcatcacctggcttggtgcctcaatttctgctttacctgaacatcttagtagcatctttgccacatgtcccccttctttctcccactgcccctcagggctcctgcactaatggagcagcagagcccatcttcaaggctcctggtgtctttttaggctttagctgcctccctgctctgaaacctcagtagctccctaaggc

SEQ ID NO: 31954 - DNA, 452 bp, Homo sapiens
  misc_feature (1)...(452): n = A,T,C or G
nctgagnaactggtatctatgaaggncgnggaantcgtgggttcatgtcattcaatttatcattttcattggggatctccatttggaatccattaattcatgaggttttgcctcattccacacagcttccatatctgaagtgtttagtggagcaaaaattgtaccataaacttgtgtttactcttttcattcggatcatagtcaaagggctgtagcattactgaaacagtcacagttgaccctgggtcaataattccactgttgggcctcacacagtaccggtgaggcacggtagtcttcactttgaaacacacttttctatccgatggatttcgcaatttaagatttgtagtgactacatctgtgaaggggcctttgaatttgaggtctatgggcgggtcgaggaccaggatctgctcgtgcttcgccgtggccccggaggcagacgccag

SEQ ID NO: 31955 - DNA, 456 bp, Homo sapiens
  misc_feature (1)...(456): n = A,T,C or G
natcgagnnacttgagaacctcggaggnaacccngccacattctgatataactgcttcaacactagggggtcctaaaggctttctatcttgctagtccctggggcctcaacatctcatactggttcccttaactctgcctatacctctgtaaataattccttcactaagttctcttgatgaagcaaaaacagacagctgaaaagtcctctatctcctacaagggccctaactggcaccccagatgacacagagcctgcctgcttatgctgtagtctgcctactctgctgtctcttcacatggtctcctcagaactgaactattgtatccatctcacactttatgcctcttctttcttaggcaccccgtccctccatccttccagaaccatctttgaggtctcatggctaataaaaacctaggctttacctgttccctctgtaatccctccaaaaga

SEQ ID NO: 31956 - DNA, 485 bp, Homo sapiens
  misc_feature (1)...(485): n = A,T,C or G
ngagcgccnnnnncaactgtttacgttagctancgcanggncgaattcattatctgttatcactggacaaagacttgaggtgacaatagtgactgggtaatcagggtcaactttggcatgaccaaataatatcctgaacagtattgattcagagtaatccatgttctgagctttgttgttttctgatgcgtggggacggatcagtaatgtgcaggttgttagaacaccagtgacttctctgtggctgagtgcatcgacaagtgtgtggtgggaggagacggcggctccgtccggagcaggagctgtcatgtggggagctggcccaggctcatgagagcaacttgcgctggctgagggaacggcaggtccaggcgggcagcgctgtctggcgcctccctttctgcggtgccggaatctgcttgtctgcgaccgtccgctttggtagctgccagccacatggggctgttgctaatgtggcaggtgta

SEQ ID NO: 31957 - DNA, 483 bp, Homo sapiens
  misc_feature (1)...(483): n = A,T,C or G
ngagcgccccctnnaactgtaaacagcggctccggcaanngcgagactgggaacaggatgacacaacagaacgggagcaacctcggcgcaaacactcccgccggagcctgcaccggtcaggcagtggcagtgaccacaaggaggagaaagccagcctgtcccttgagacctctgagagctcacaggaggcaaagagtccgaaggtggagctgcacagccactcagaggtccctttccagatgctagatggcaacagtggcttgagttctgagaagatcagccacaacccctggagcctgcgttgtcacaagcagcagctgagccgcatgcgctccgagtccaaggaccgaaagctctacaagttcctcctgcttgagaacgtggtgcaccacttcaagtacccctgcgtgttggacctgaagatgggcacgcggcagcatggcgatgacgcgtcagctgagaaggcagcccggcagatgcgga

SEQ ID NO: 31958 - DNA, 490 bp, Homo sapiens
  misc_feature (1)...(490): n = A,T,C or G
gagcgcccccnnnnaattgaaactgagtaccgctccgagnggccgaattcattcagtgtccccatgacagctccctgccctcagcctctgagaacagccatggcgaagctaagaccaggcatgggtaggggggctgctgtccattcctctctctcccttgcaggtgatgctggtgaaaaacttatcggtgtctcggggcctggtgaatggtgcccgaggggtggtagttgggttcgaggcagaagggagagggctaccccaggtgcggttcctgtgtggagtcactgaggtcatccacgctgaccgctggacggtgcaggccaccgggggccagctcctcagtcggcagcagctgcccctccagctggcctgggcgatgtccatccacaagagccaaggcatgaccctggattgtgtggagatttctctgggccgtgtgtttgccagtggccaagcctatgtggccctttctcgggcccgcagnctgcaa

SEQ ID NO: 31959 - DNA, 491 bp, Homo sapiens
  misc_feature (1)...(491): n = A,T,C or G
ggagcgccnnnnnncaatgaaactgagcagcgctcccagnggncgaattcgaggaggagcccggagctgcagccaccggggagccaggcagcaaagcacctgctctgagtggccatggggaagcgatacttctgtgactactgcgaccgctccttccaggacaacctccacaaccgcaagaagcacctgaacgggctgcagcacctcaaggccaagaaggtctggtacgacatgttccgagatgcagctgccatcttgctggatgagcagaacaagcggccctgcaggaagtttctactgacaggccagtgcgactttggctccaactgcagattttcccacatgtcagagcgagacctgcaggagctgagcatccangtggaggaggagaggcgagccanggagtggctactagatgctcctgagctccccgagggccatctggaggactggctggagaagagagccaaacggctgagctcagccccaag

SEQ ID NO: 31960 - DNA, 493 bp, Homo sapiens
  misc_feature (1)...(493): n = A,T,C or G
nggagcgccnnnnnnnnaactgataactaccgagtctgggcaatnngcagcgtntggctgagtattacggcctctaccgagacctgttccacggtgccacctttgtgccccgagtccccctgcacgtggcctacgctgtgggtgaggatgacctgatgcctgtgtactgtggcaatgaggtgactccaaccgaggtaaccactcacttgtgcccctcctccctgccctgtgcaaacacagacacatcccatctcagtgtcacagacactcctgggtttggaattttgttgttctctgtctctttgatttcctggaagacgacaccatgacaatttcaaagaaaatagaacaaaatgaaggaaaaagaggctctgtcttagcacattcctgtgaccagcctgctgtctgtggtgtgccctcctggcccggccttggcacatgttcgtttttgtggttggtgcctggacaggcaactctgcagggctgcttcttn

SEQ ID NO: 31961 - DNA, 490 bp, Homo sapiens
  misc_feature (1)...(490): n = A,T,C or G
ngaggccnnnnnnacatgaatactaatactatcccagnggncgaattcggaggggggagactgttgtagattaaaagccctaagagacatattaagcaaattcaatgtgaagactttagatcctgatatgaacaaaccaactgtaaaacaccagttacaagatataatgcaataaacactgactactgatgacagtaaggaattactatcaacttcttttaagggataccgtaatttatattaataagccttgatctttaaaataaaatatttattaaaacattattaaaaacaaatattccattaaccacaacttgaaagtcatcaatgacaacagagtttgatgattattcatagggaagtgacttccagccatatataacattgctaaaattgtacttaccaagtggatatcatgtaaccctcgttaatagaacaaactctccacccggaagcacctgtcctcttgatttctctgtcccaatccgaa

SEQ ID NO: 31962 - DNA, 484 bp, Homo sapiens
  misc_feature (1)...(484): n = A,T,C or G
ngaggccnnnnnnaatgagactgccagtctggcaatnccggacagctccaagggctccgaccaggccatatcacgctccgcgtgcgcagccacctggccgccctctggcccttcctgggcatcgtggctgaggtgctggtgctggtcaccatcatcttcatctacgagaagcgccggaagcccgaggacgtcctggatgatgacgacgccggctctgcacccctgaagagcagcgggcagcaccagaatgacaaaggcaagaacgtccgccagaggaactcttcctgaggcaggtggcccgaggacgctccctgctccgcgtctgcgccgccgccggagtccactcccagtgcttgcaagattccaagttctcacctcttaaagaaaacccaccccgtagattcccatcatacacttccttcttttttaaaaaagntgggttttctccattcaggattctgttccttaggattttttccttctg

SEQ ID NO: 31963 - DNA, 496 bp, Homo sapiens
  misc_feature (1)...(496): n = A,T,C or G
nggacggccnnnnnnnnttactgaatttgntccagcgttgtgcaattcctgatatgtattttgcatattttctttcagtctgtggcttgtgtttgccttctcctaatatttattttgcttatttaacctcaaaaatcacaatccaattattttttaagtaccaatgacatccaggtttacagtttttaaaaaggttgacaaatcctaatgctgtattcttatttaccattgactccttttgtggttggttgcatttgaagaatgaatcgagtcatcaagcccaacatgggctcaacctcaaacctcacattcttaaccaggatcctcgctgctatcatctgagagtcagcctgtggcctgtccaagttggctgggtctggctgagctgattggagcggccgacatttttgctgactggagtcatgctatctttgccagtttgctggaatagacacagacaccgattgggtcacgctgaagacattcctgtcttgtg

SEQ ID NO: 31964 - DNA, 492 bp, Homo sapiens
  misc_feature (1)...(492): n = A,T,C or G
ggaggccnnnnnnccctgagaactaccagcgctccgcaggngcaattnctctgtgggacctcttgggggcaaggtggggtgaggccggggagtagggaggtcaggcgggtctgagcccacagagcaggagagctgccaggtctgcccatcgaccaagttgcttgggccccggagcccacgggtctggggatgccatagcagccaccaccgcggcgcctacggctgaggcagggactcggcctctgggaggtttacctcgcccccacttgtgcccccagctcagcccccctgcacgcagcccgactagcagtctagaggcctgaggcttctgggtcctggtgacggggctggcatgaccccgggggtcgtccatgccagtccgcctcagtcgcagagggttcctcggcaagcgccctgtgagtgggccattcggaacatttggacagaagcccaaagagccaaattgtcacaattggggaacccacattggcc

SEQ ID NO: 31965 - DNA, 479 bp, Homo sapiens
tatcgcagtccctagtcagtgtgtagtaattccaccgaagaggccaagaaacagatcaacgattacgtggagaagggtactcaagggaaaattgtggatttggtcaaggagcttgacagagacacagtttttgctctggtgaattacatcttctttaaaggcaaatgggagagaccctttgaagtcaaggacaccgaggaagaggacttccacgtggaccaggtgaccaccgtgaaggtgcctatgatgaagcgtttaggcatgtttaacatccagcactgtaagaagctgtccagctgggtgctgctgatgaaatacctgggcaatgccaccgccatcttcttcctgcctgatgaggggaaactacagcacctggaaaatgaactcacccacgatatcatcaccaagttcctggaaaatgaagacagaaggtctgccagcttacatttacccaaactgtccattactggaacctatgg

SEQ ID NO: 31966 - DNA, 470 bp, Homo sapiens
  misc_feature (1)...(470): n = A,T,C or G
nttcgaagaaactgaagaaccgtggcggaaggcgngatgtgcctcgaatctcagctactcgggaggctgaggcaggagaatcgcttgaacctgggaggtggaggttgcattgagccgagatcgcgccactgcactccagcctgggcaacagaccgagactccgtctcanaaaaaaaaaaaaaaaaaaaaaaaaacggggccgggaggaaaaaaaaaaccgaaaaaaaaaaaaaaaaaaaccccgccggggggttttaaaaaaaaaccgcggggggaagaaaccccccaaggggggtgtttaacccggggggggggccaccccccgggggaaaaaaaaaaaaaaaaaaggggttgccctcttttaaagggggggggaaaaagtcttcagaaaaggggggccaaaggccccaaaaaaaaaacctttttaccctggtaggggaaggacccaaaaggggggggggcggaaccag

SEQ ID NO: 31967 - DNA, 486 bp, Homo sapiens
  misc_feature (1)...(486): n = A,T,C or G
aggacggannnaatcggatcgatancaatnngcgnggaattcgccaccagcacaagcccaaccctgacctacccatctcaccctgtgccccacgtttctggaccaccatgacctctgaccttggtaatcccgttagatggtataacttgtgtccccagcccccaacctctcaggtcactctctgctttgaccctgtaatccccaactcatgaccaccatacagcagtgatgtcacgtgtcccaccaatcctgtatgatccctctgacttgtgacccctggcccccaggtcctgggtgctgaccacccagatgtggccaagcagctcaacaacctggccctgctgtgccagaaccagggcaagtttgaggacgtggagcggcactatgcccgggccctgagcatctatgaggcactgggcgggccccatgaccccaacgtggccaagaccaagaacaaccttggctcagcctacctgaaacagaacg

SEQ ID NO: 31968 - DNA, 479 bp, Homo sapiens
  misc_feature (1)...(479): n = A,T,C or G
aggagtgcagaggcccccncaactgaganccagggacccatcggaanngcgnggaantcctagtctgggcaacagagttcagtgttgcaatcacagctcattgcaatctccaactcttgtctgggcaacagagtaagatccatctctaagagaaatttaaggccaggcgcagtggctcaagcctgtaatcccagcactttgggaggccgaggcgggtggatcatgaggtcaggagatcgagatcatcctggctaacacggtgaaaccccgtctctactaaaaatacaaaaaattagccgggcatggttgcaggtgcctgtagtcccagctactcgggaggctgaagcaggagaatggcctgaacccgggaggtggagctcgcagtgagtggagatggcgccgctgcactccagcctgggcaacagagcaagcctccatctcagangnnaaagnntnaataaataagcagagggggcctg

SEQ ID NO: 31969 - DNA, 490 bp, Homo sapiens
  misc_feature (1)...(490): n = A,T,C or G
atttgatagccnntcnannnnnnnnatcgtagttcctagtcagtgtggtggaattccttggtctggtcagagtggcgtgagctgcccggcgcctgccctgcccaagtgaccagggatgtgtgtgtgtgtccatgtgtatgcgtgtccgtctgtctgtctagtgtctgggtttggcccaagactgcgctgtagttacattaatgctcagacagccacccctgccactcacccctcctgacccaggccttgctgactctctgagctggggaggtgggaggccaggcgagcctgactctgttgatctacccgtgcctgggcccctcccctcagagcccatggtaacgaacccctagaaaggagagaacgggcgtcaggggtgcacagtccacagctgaagagcaaggtttcgtggcagcacggcccggcccctcaccctctgtccccacgaggggacccatggnggctgtctttgcagggcacagatgaccan

SEQ ID NO: 31970 - DNA, 468 bp, Homo sapiens
  misc_feature (1)...(468): n = A,T,C or G
nttctgagactcgagatcactaggccaagtggnggaattcgcaggagttgttcggcatcacaggtagctgagcggctgcccttgggtgacacctccgagaggcagccagacccagagccctctgagccgccactcccgggccaagacagatggacactgccaagagccgacaatgccctgctggcctgtctccctagggaattcctgctatgacagctggctagcattcctcaggaaggacatgggtgccccccacccccagttcagtctgtagggagtgaagccacagactcttacgtggagagtgcactgacctgtaggtcaggaccatcagagaggcaaggttgccctttccttttaaaaggccctgtggtctggggagaaatccctcagatcccactaaagtgtcaaggtgtggaagggaccaagcgaccaaggatgggccatctggggtctatgcccacatac

SEQ ID NO: 31971 - DNA, 420 bp, Homo sapiens
gcctaaggctggtgcactgaactccaacgatgcctttgttctgaaaaccccctcagccgtctacctgtgggtgggtacaggagccagcgaggcagagaagacgggggcccaggagctgctcagggtgctgcgggcccaacctgtgcaggtggcagaaggcagcgagccagatggcttctgggaggccctgggcgggaaggctgcctaccgcacatccccacggctgaaggacaagaagatggatgcccatcctcctcgcctctttgcctgctccaacaagattggacgttttgtgatcgaagaggttcctggtgagctcatgcaggaagacctggcaacggatgacgtcatgcttctggacacctgtgaccaggtctttgtctgggttggaaaggattctcatgaagaagaaaagacaga

SEQ ID NO: 31972 - DNA, 461 bp, Homo sapiens
  misc_feature (1)...(461): n = A,T,C or G
cttgagaccctagncatagatgggcatatcagaggtggtgagcttaatgaatgaggatgagaagactgttgtccggctgcaggagaagcggcagaaggagctctggaatctcctgaagattgcttgtgtgaagcaaggtccgtggtcctgtcagtggaagcccggatagcatgaatgcctctcgacttagccagcctgggcagctgatgtctcagccctccacggcctccaacagcttacctgagccagccaagaagagtgaagaactggtggctgaagcacataacctctgcaccctgctagaaaatgccatacaggacactgtgagggaacaagaccagagtttcacggccctagactggagctggttacagacggaagaagaagagcacagctgcctggagcaggcctcatgatgtggggggactcgaccccctgacatggggcagcccatagcaggc

SEQ ID NO: 31973 - DNA, 472 bp, Homo sapiens
  misc_feature (1)...(472): n = A,T,C or G
cctggatgaccttccgcagngncgnggaannctccatctaaatttttttcagctgggttttgaggaatataagagctttcaatgataaaggtttgttgtagttgtcttatgtgctgaatttgcagatgatcagatgctgggcagaattctgatttatttttgtttcctaaaattaagatagcttgaatattatttcacattcctttttcttttttaaataaacaggtttgctttggaaaggcttaatgatggaatgttagcatcttcactagggtaaagaagaacaaaaagaatgttgctggaacgtaaaatagtatttaaaagttaatgaacacttctctagttttcttagttatggccttaataattagtctcttggcttaaatgtccactggttttactttgacacagttgaacaacactgtggttaagtctctggtatttaggctggcaatatatatattaaccatat

SEQ ID NO: 31974 - DNA, 460 bp, Homo sapiens
  misc_feature (1)...(460): n = A,T,C or G
atgtgctnnaaccgaccgtgancaacgacangcgnggaannngnncagaaagagaagaaggaaagcggggccggttccttcaggacccgcctcatggggctccgcggcggcttggggaccacttggagccccgtcctggggagaaaacagctcacgtctatggccctgactgcttaggcgggagctgcgcgcagctcagcttctccggggcatttttttctacacgctgggtgagctatgaacaggccaactgcaagggcgagcagtttgtgtttgagaagggcgagtacgcccactgggactggtggaccagcagccagaggacagactcagcagcctgaggcccatctaagtggacagccaagagcacaagatcatcctctatgaaaaccccaacttcaccgggaagaagatggaaatcatagatgacgatgtacccagcttccacgcccatggctan

SEQ ID NO: 31975 - DNA, 482 bp, Homo sapiens
  misc_feature (1)...(482): n = A,T,C or G
cacggaagccctctgaangncgtaggattgacttcgtannnncccnnnnncggncagncccaggccaccacctcggaaggatccggtagcctccaaggcctccccactgccattcgagccatggcagcgcaccccaccatcagaagagcctgtgcttttccagagctccctgatggtctgagggtcccacccctgccccactttaccatagagaccactgccttggtggcaggtccctccccaggtcccctgagatggggtatggaggggcccttccctctcggccttcgagcactttctttcacttactgtgtcaaagccctgggtcctctttttgatgggcaccggcccctctgaacgtgatgggacctgccttctccactagtagctgggcagctcacaattcacacctgtgtacctgccacatccctcacttggtggacaacacccagaaggtcttgagtcccccacccctgggtggg

SEQ ID NO: 31976 - DNA, 488 bp, Homo sapiens
  misc_feature (1)...(488): n = A,T,C or G
cgctgagaccctcgaannnncccctgagtgcctcggtaanngcgcggaanncgggacagctgcttgggttctaaagctcctgctctcttctctttcccctccaaccagttcaatctcatccctcccagcagctccccttccaccccccggggaactgaagattgtcctggccgcgacctgagacctccatgagtggagggaagagcgatctatgtctcttcccccagcagctcggaccactcccagccccccatccccccgttccccaggggagctggggaattcctgccaagcaccttgaatgggaggggcctcacagagggcagggccagggtccagcaggggtggggggttcctgctctgtccctgcccgtccccacccagtcttgccctcccatcctctcatctattcccccgctggagacggaagatcttttattttctattatttataacttcagacttgcgccccctgttctttctttccc

SEQ ID NO: 31977 - DNA, 470 bp, Homo sapiens
  misc_feature (1)...(470): n = A,T,C or G
natcgagacctcgtagaccactaggcagngtggtggaattcgcaaaacacatcagacttcccacagtggaactggcacaagataacagtgcacccaatttatccaaattgtcactttattgtgcagttgtaataaaaaatatttttaagcatgtaagtttcagaagttttaacacacagaggtccgtactgaaaacagttttggtcaagatactaagagaaataaattcaagatgtgctataagatgtatgagagtaaggagaactcagtactaggtgaggtctgttgtgtaaattgtgtgtgtgtgtgtgtacacacacaccagtcaagtcaaaggaaaggacaagagacggtatatccataatgtcccagagtcagaatggtagacatcctaacatgatgggtttggtggggagaccatcttcttactttatgaaagaaaagacaaagatatcaactcaaagtctaan

SEQ ID NO: 31978 - DNA, 484 bp, Homo sapiens
  misc_feature (1)...(484): n = A,T,C or G
ntcgagaccatatnannnngtttgagtccactatccatgtggtggaattcgaagctcatgaggcgttacatagccatgtgccgcgagaagcagcccatggtgccagagtctctggctgactacatcacagcagcatacgtggagatgaggcgagaggcttgggctagtaaggatgccacctatacttctgcccggaccctgctggctatcctgcgcctttccactgctctggcacgtctgagaatggtggatgtggtggagaaagaagatgtgaatgaagccatcaggctaatggagatgtcaaaggactctcttctaggagacaaggggcagacagctaggactcagaggccagcagatgtgatatttgccaccgtccgtgaactggtctcagggggccgaagtgtgcggttctctgaggcagagcagcgctgtgtatctcgtggcttcacacccgcccagttccaggcggctctggatgaan

SEQ ID NO: 31979 - DNA, 464 bp, Homo sapiens
  misc_feature (1)...(464): n = A,T,C or G
ttgttcgaccccgnatcgagattcatagtcagtgtggtggaattccaactgtgttcactagcaacctcaaacagacaccatggtgcacctgactcctgaggagaagtctgccgttactgccctgtggggcaaggtgaacgtggatgaagttggtggtgaggccctgggcaggctgctggtggtctacccttggacccagaggttctttgagtcctttggggatctgtccactcctgatgctgttatgggcaaccctaaggtgaaggctcatggcaagaaagtgctcggtgcctttagtgatggcctggctcacctggacaacctcaagggcacctttgccacactgagtgagctgcactgtgacaagctgcacgtggatcctgagaacttcaggctcctgggcaacgtgctggtctgtgtgctggcccatcactttggcaaagaattcaccccaccagtgcagg

SEQ ID NO: 31980 - DNA, 485 bp, Homo sapiens
  misc_feature (1)...(485): n = A,T,C or G
nctcgagacccctagtccagngtggngtagttcctccgtcaaagcaaagcagaagctgctgaagcacggggcgaacttgctctgaactgcacccaggaggtgactgggaaggataaaaccagcaaaggaagctctgccttttataattgaaaaggcccctctattttatttttcttgaaaacattcccttttttaggaaccaaatgatatttgagtttttgttattccttttgcagattgggatgtgttttgggggcaggggttagttcttcaggtcggcagacccagagcacttgataaagaactgtatttaatcggtagtgttggggccgggacgggcttggctccctctctgccatactgagcctgaggtattacatatctcctgctgttccatcccagcttgaattggtgccacaagcttccaagttggcattntttctagaacctgatcgtccactagcccagagtgtgtgtgttcaacn

SEQ ID NO: 31981 - DNA, 476 bp, Homo sapiens
  misc_feature (1)...(476): n = A,T,C or G
ttcgagtccatatccaggggtttattccagttaccctgggacacaaggtccttgtgtgtggagctgggccaatcgggatggtcactttgctcgtggccaaagcaatgggagcagctcaagtagtggtgactgatctgtctgctacccgattgtccaaagccaaggagattggggctgatttagtcctccagatctccaaggagagccctcaggaaatcgccaggaaagtagaaggtcagctggggtgcaagccggaagtcaccatcgagtgcacgggggcagaggcctccatccaggcgggcatctacgccactcgctctggtgggaccctcgtgcttgtggggctgggctctgagatgaccaccgtacccctactgcatgcagccatccgggaggtggatatcaagggcgtgtttcgatactgcaacacgtggccagtggcgatttcgatgcttgcgtccaagtctgtgaatgtn

SEQ ID NO: 31982 - DNA, 506 bp, Homo sapiens
  misc_feature (1)...(506): n = A,T,C or G
atgganatannnnnnanactcgatnactgagtggcntatgcagngngcnggaantccagtcatggagaggtcatctcagttccacacaagatcatcacccaccttcgaaaagagaagtacaatgctgattatgatctgtcagctcggcaaggggcagacaccctggccttcatgtctctcctggaggagaagttgctcccggtgctggtacatactttttggatagacaccaagaactacgtggaagtgacccggaagtggtatgcagaggctatgccctttcccctcaacttcttcctgcctggccgcatgcagcggcagtacatggaacggctacagctgctgactggggagcacaggcctgaggacgaggaagagctggagaaggagctgtaccgagaggctcgggagtgtctgaccctgctctctcagcgcctgggctctcaaaagttcttctttggagatgcccctgcctccttggacgccttcgtcttcagctacttggn

SEQ ID NO: 31983 - DNA, 463 bp, Homo sapiens
  misc_feature (1)...(463): n = A,T,C or G
tgggggctnnaaactgacatcgcagcatctgcgnggcattcagngagggggctcctctgtgaacccaagaaacttcaaggaaccccacagcgtctcccttatgacctcccatctccagattaggaagctatggattcccagagggtcctttggaagtatctagaaatgtccagggtgagtctagccaggttcaccttcaggatgctttccccatgccctgtggttgagacggctccgatgtcattgtcggcataacctccagctcctgctcaaaaagggtgattgttctgagcagtaacagtcaagaaattcaaatccatattagaagtcggacactacatgaaagttaaatcgcgaagggtgctcaagtaccgacaaaggtcagctaccagcctcagagtcctttagccttggaaggattcgcctttaccctcccacagttgatacagaagcacagaagatt

SEQ ID NO: 31984 - DNA, 435 bp, Homo sapiens
atgcactaccacacccggctaatttttgtattttttgtagggacaggagtttcactatatttcccaggctggtcccgaactcctgggctcaagtaatccgcccacctcagcctcccaagttctagggttacaagtgtaagccactgcgaccagcctaaagcttgtttctgagggttgaaaaccactttagggctgttctttcaaggcaaaggatttggttcggcttagaacttgaggagtggggaatccacgttctccttgtcagcctcagggctcagctggatcagaggggagctcaggtctatgagctgtcccaccaccggtgaaggtttggccacatttttattcatgtctggagtgtttgtcatgaggtcgatcagaggcctgctttcagatcctacagccacgtgtgcttctggggtatcgcagaagtcg

SEQ ID NO: 31985 - DNA, 486 bp, Homo sapiens
gggctcgagaccctagtccatgtggtgtagtatagcgtgggcagccaggcggtggcgcggaggatggatggggacagccgagatggcggcggcggcaaggacgccaccgggtcggaggactacgagaacctgccgactagcgcctccgtgtccacccacatgacagcaggagcgatggccgggatcctggagcactcggtcatgtacccggtggactcggtgaagacacgaatgcagagtttgagtccagatcccaaagcccagtacacaagtatctacggagccctcaagaaaatcatgcggaccgaaggcttctggaggcccttgcgaggcgtcaacgtcatgatcatgggtgcagggccggcccatgccatgtattttgcctgctatgaaaacatgaaaaggactttaaatgacgttttccaccaccaaggaaacagccacctagccaacgggatagctgggagtatggccaccctgctccac

SEQ ID NO: 31986 - DNA, 480 bp, Homo sapiens
  misc_feature (1)...(480): n = A,T,C or G
gagcggggccccnnaattgagacccaatgaagtgcgtggaatncggcgcggaccaggcctgaaggggagctctgagacagagcaaacacccaccccagaacaagccgacacacagggagacgggggcctggagccagccctgagccagaggcagaatggatggacagacaggccatggaggcagcactgagccagcaccacacgtccatcctgggacagacgggcctggacttcacggcaagacccccctctcttccccactgggttctgccaccaccaggaggatttcaagaaagcaccaaagaccagggagctcggatccatactcggggggcctcagcccttgggaggggacacctgaggcagccagcgccccctccccagtacccagaactgcctgcaggtgccttgttgctggcttgtcttcagaaagggactgttctgggtggctggatctccagggtaccctccaccccagcn

SEQ ID NO: 31987 - DNA, 509 bp, Homo sapiens
  misc_feature (1)...(509): n = A,T,C or G
aggcncgnnnnntttgacatcgaccgcgtggggaattccacaagctgctggcttggagcggcgtcctcgagtggcaggagaagcgcagaccctactctgactccactgcaaagctgaagcggaccctgccctgccaagcctacgtgaaccaaggcgagaacctggagaccgaccagtggccgcagaagctgatcatgcagctgatccctcagcagctgctgaccaccctgggccccctgttccggaactcccagttggcacagttccacttcaccaacagagactgcgactcgctcaaggggctctgccgcatcatgggcaacggcttcgcgggctgcatgctgttcccccacatctccccctgtgaggtgcgcgtgctcatgctcctgtactcgtccaagaagaagatcttcatgggcctcatcccctacgaccagagcggcttcgtcagtgccatccggcaggtcatcaccacccgcaagcaggcagtgggacctggtggtgtcaan

SEQ ID NO: 31988 - DNA, 476 bp, Homo sapiens
  misc_feature (1)...(476): n = A,T,C or G
ngggggagggggcccgnnncattgagaaactgagnatcactcggaagngcggnggaattccagttctccgtgttcctcggtctcatcttcttcctggagctggcaacagggatcctggcctttgtcttcaaggactggattcgagaccagctcaacctcttcatcaacaacaacgtcaaggcctaccgggacgacattgacctccagaacctcattgactttgctcaggaatacgtgagtccagtgtccagcctgggacacctgtaggaggcgccttcctggcagacgaatgagggagcaagttccctgtgatgggaccatctccttacccacctgggctagcgggccccaggagagagacccaggagtgtcctcgtccgaggagagccagcccctgctgatccttatgggtccccatttgcctagtgccataaggccacggccttgggaaacagaaggcacgggctccacactag

SEQ ID NO: 31989 - DNA, 491 bp, Homo sapiens
  misc_feature (1)...(491): n = A,T,C or G
nggtttgagacccctngccangngcngtagtagaccctagtcagtgtggcggaattcatcaaagcagatttaggatcgaactgactgaaggatttataaaaatactttcatcaattcagtacagtttctcatcttaaagattatctttctaaatctcagcacttttaacagagcagagatatagctacctataatgaccagccatgtcaagcttaatgttattaaatgatataagggagttaatgagatcactttccaaaaaatgttgcactttttattttattttttatttattttattttatttttttttttgagacggaagctcactctgtcgcccaggctggagtgcaggggcgggatctcgggatctcggctcactgcgagctccgcctccccggttaacgccattctcctgcctcagcctcccaagtagctgggactacaggcacgtgccaccatgttcgcctaattttttgcatttttagtaag

SEQ ID NO: 31990 - DNA, 482 bp, Homo sapiens
  misc_feature (1)...(482): n = A,T,C or G
natcgagatccctttccannggggtagatcctcctagatggcgcagaggtgagaagcaaaatggtgctgtccaacacatcaccgcagatcaccttcctgaagctgacgccacagttggctgtgggtcagcttgccggctgctgatcttggcgggactccttcatgtgcctgggagctggctggtggtggctggtccaggaccgtttctgctgggatgaccgggtgggggactcggctatgctccatgtgtctgtcctcctccagcacggtagtccaggcatgttctcaaggtctggcaaagggcaaaagcaggcaagctcaagcatgcatgcaagcatcacatggtttgatctctttgcatcctgtttgctagcattggccagaccaagtctcatggccaagcctagagtcagagtgtgagagcactgcanggttacacggaagtgggtgtgcaaacagggaggggtgagctttggtggcag

SEQ ID NO: 31991 - DNA, 465 bp, Homo sapiens
  misc_feature (1)...(465): n = A,T,C or G
agcgtgcntnaaacggatcgnagancnctctccanngcgnggaattcaattaatctgatcccagaagtctttcattaagtggccagtcatgcacagcaatatcatgggcacagagattaaggttatgaaatctggtcaaagtcagcacccatatgggaaaaggcagtttagtaggaccccaagttttgtagactgctctagacgtcgctcattctgcagctcatcctgaggaaaggctggcttctgacccaccttggttaactgaccaaacccctggggccattcttcttcctgataggggtccttgggatatgtcttcactggtgaacggtctccatggcggtacagctgagagaataaaatggtttgcctataggtcagaagcatccccttgatagggacccagagcctaccttttgccccatgttagggaaggaagtctcattccctctgggaagcctactg

SEQ ID NO: 31992 - DNA, 471 bp, Homo sapiens
  misc_feature (1)...(471): n = A,T,C or G
ggtggagcggcccccnccctgaganncctttagngccaggaaaagcgnnggaannannnaacatctgcctgaagctttatggctactatgtcagcatcatcaactgccacctgtctccccacatttccaacaattaccagcggctggagcactttgaccggatcctggagatgcacaattgtgaggggcgagacatcccaaacatcctggaccacgacctcattatctggtttggagacatgaactttcggatcgaggactttgggttgcactttgttcgggaatccattaaaaatctgtgctacggtggcctgtgggagaaggaccagctcatcattgccaagaaacatgacccgctgctccgggagttccaggagggccgcctactcttcccgcccacctacaagtttgataggaactccaacgactatgacaccagtgagaaaaaacgcaagcctgcatggaccgatn

SEQ ID NO: 31993 - DNA, 474 bp, Homo sapiens
  misc_feature (1)...(474): n = A,T,C or G
nggggggaggggccggncccattgaganngctgggaccttcggaagagcggnggaattcatccccctggctatggagggcggactctaagatgaatcccgacctggacaccggccacaacacatcagcacctgcccactggggagagttgaaaaatgccaacttcactggccccaaccagacctcgagcaactccacactgccccagctggacatcaccagggccatctctgtgggcctggtgctgggcgccttcatcctctttgccatcgtgggcaacatcctagtcatcttgtctgtggcctgcaaccggcacctgcggacgcccaccaactacttcattgtcaacctggccatggccgacctgctgttgagcttcaccgtcctgcccttctcagcggccctagaggtgctcggctactgggtgctggggcggatcttctgtgacatcntggcagccgtggatgtcctgtgc

SEQ ID NO: 31994 - DNA, 508 bp, Homo sapiens
  misc_feature (1)...(508): n = A,T,C or G
tggacgggccnaanaannnntttgactgacttaccgtccgngngggcaattcggaaacagcctgggctcttgggagcagagtccagtgggtgtgaggctgacttgccgacggtcggcaggtaatggctctcagccggcgaggcggtcccacagctctcctcccaaggcagcctgaggaggaggaggccgggtgcctgtttggtggcagcttcagcctagggatacctgaagctgttgagcaacacctttatgaaatgttgccagagcagcaacacttccctgtgggcacagccccgggaaatccggtaccaagtgagcaaggtggcaggacccacccaagcctgatacgcatctgggcccgccgggctcagcaggggaggctgctacggctgcccacttcccagcaccgtctgtcaggcttgaacccctctgtgctgttcccttcctggctaatagggagacccttcgcaggcacccactgtttcaacttgaccctcccaccccctgg

SEQ ID NO: 31995 - DNA, 473 bp, Homo sapiens
  misc_feature (1)...(473): n = A,T,C or G
agatggcnnnnnnncnnnaactgagaactgagaaccgtcgggaaccctactacggttccctttgccgagtcagttcaatcaggtctgatgtgagcaatttacacacttgtctcagaaagtccctcagggtttgtagaggactgcaggggggcatccgctgcagactcagcctttctctgcagccatcctgcagtgggggtgagcgggcacaggctgagaactgctcttgggtggtggaagcaggtgtcacggtgcaagtctccccctgcacccctcccccagcttgagccgtgtcacccccctctccctccagcatgggcctgtgtctcaggctctctggaaggtggccctgccccggaccctcttgcaggtgtcctggtttgacttggaactagatggccatctttccaggctttggtggcccaagagcagtctgggtggatggaagtggctgtcccctcctctccagcccn

SEQ ID NO: 31996 - DNA, 489 bp, Homo sapiens
  misc_feature (1)...(489): n = A,T,C or G
cagcncggnnnnaaccgggtacngncngcatacgcagngagcnggaantcggcctctgtgcgccgtctgcactcgttgcaggcgacgatgcagagggctgtaagtgtggtggcccgtctgggctttcgcctgcaggcattccccccggccttgtgtcgtccacttagttgcgcacaggtgggatagagggtgctgatcttggagggtgggggaaggaagcggctgttggctacgtccctggtgggactaaacccacccgcccacaggaggtgctccgcaagacaccgctctatgactttcacctggcccacggcgggaaaacgtgggtgtttgcgggttggagtctgccagtgcagtaccgggacagtcacactgactcgcacctgcacacacgccagcactgctcgctctttgacgtgtctcatatgctgcagaccaagatacttggtagtgaccgggtgaagctgatggagagtctattggttggag

SEQ ID NO: 31997 - DNA, 487 bp, Homo sapiens
  misc_feature (1)...(487): n = A,T,C or G
cggcttctnnnaactgaagactaagtgcgtgtgcaggaactcgcccctgagccagggacgcccaaggacatgcctgttacccaggtcctgtaccagcactagctggtcaagggcatgacagtgctggaggccgtcttggagatccaggccatcactggcagcaggctgctctccatggtgccagggcccgccaggccaccaggctcatgctgggacccaacccagtgcacaaggacttggctgctgagccacacacccaggagaaggtggataagtgggctaccaagggcttcctgcaggctaggggaggagccacccccgcttccctattgtgaccaggcctatggggaggagctgtccatacgccaccgtgagacctgggcctggctctcaaggacagacaccgcctggcctggtgctccaggggtgaagcaggccagaatcctgggggagctgctcctggtttgagctgcattcaggaagtgcg

SEQ ID NO: 31998 - DNA, 473 bp, Homo sapiens
  misc_feature (1)...(473): n = A,T,C or G
gggtgggaggggcccgncncactgaaaactganacctncggaagngcggnggaantctgccgggagtacttgggcggggcctggcgccgagtgcagcccgaggagctgagggtttaccccgtgagcggaggcctcagcaacctgctcttccgctgctcgctcccggaccacctgcccagcgttggcgaggagccccgggaggtgcttctgcggctgtacggagccatcttgcagggcgtggactccctggtgctagaaagcgtgatgttcgccatacttgcggagcggtcgctggggccccagctgtacggagtcttcccagagggccggctggaacagtacatcccaagtcggccattgaaaactcaagagcttcgagagccagtgttgtcagcagccattgccacgaagatggcgcaatttcatggcatggagatgcctttcaccaaggagccccactggctgtttgggac

SEQ ID NO: 31999 - DNA, 543 bp, Homo sapiens
  misc_feature (1)...(543): n = A,T,C or G
acactggagctcgttcangnggnggcannctctgaccntcctccatgaggcggaattccagctacatttcagtgataaatgtgcatattaagaataattcttttggggaaagaaattatgaatcttcaggacagtctacaatggtttagagttacattctgcctacacttttatgacttgctgctattgttttaaaaaccccacttactctcttcctttctgatttctaaagtaagcctcagaatttccaaaccaattcatccacagctgtttctgggctggtttttaaagtagctgcaacagaatcatgaggctttccctttttatcaaatacgaaaaacattttttaaaattctgcacacccagtgatcatcttttgtgcgggaaagcaagatgatgatggatgattttattcatccttttagtaaagacacaaaacatttttctcaacatttgtacagttctgaaaaaaacctggtcaccaaaaatatcttctctgctaattcagccattcttgggctccagntaggggagctggngccc

SEQ ID NO: 32000 - DNA, 311 bp, Homo sapiens
  misc_feature (1)...(311): n = A,T,C or G
cataactaaatggggatctagagaaagtggagactgcctctggagcagggaggttctagatgaatgactgatgaagacacagcagcacggtggtgaggccattgaatgcttctaagactgcacttggcaacatcacaagctgcagaatcccgtgccacatatgacctgctgttcacggttcttgccaggatcacacctgagaagaggaagataatggagaagcaaaacctgctctgcncccnctcntgctctcacaattggccaggcgcaactattgggaatggtttgatgtgtttactccccgagaacag

SEQ ID NO: 32001 - DNA, 491 bp, Homo sapiens
  misc_feature (1)...(491): n = A,T,C or G
aggcccccnnnnaactgggnccctcnagcatcgcgcagngngcnggaannctttattagtctcttgcacagggtcccccggggccccagcacatagaccactctaaatcagcaggcccagggctcaagtgactgcacctgtgcagtcccctctgcatgaataaggagccggcaggatgccaagtgcaaggccagtgagtgcgggtctcccgggctccctctgttcgcaccacgtgcagtgggtgccaccagcctccgcctcaccctcaccgtctcccattttctcctcacatggtctctctgtgggagggtgtcagctgctgctctgttcctcttaacaatcccacaagagacctgcctctcggggacgcctcaccagtgccctggctgggcatttgtgctgttcctactctgcagtcacacgtgctctcacaagtggccagtcgcacctattgggtatgggtttcatgtgtcttactccccgagagcagn

SEQ ID NO: 32002 - DNA, 482 bp, Homo sapiens
  misc_feature (1)...(482): n = A,T,C or G
gggggcccnnnccccnnncccttgagnccttgagantcngtcggaagngcggnggaanncgncngcgaaggaaaaacacactgattatcataatgagttcctgacctggccatcccgttgtgcccttgaccagccccgtgtctcctcagggtgtcccagcaccagcctggcacagagtggggctcagttagagtatgtgggatgttggtttcgccaggcacgtgggccgtggcccggctgggtcggctgaagaactgcggatggaagctgcggaagaggccctgatggggcccaccatcccggacccaagtcttcttcctggcgggcctctcgtctccttcctggtttgggcggaagccatcacctggatgcctacgtgggaagggacctcgaatgtgggaccccagcccctctccagctcgaaatcggcagactangatggaagtgccctgtgagctggggggcccttcaaagggccaagg

SEQ ID NO: 32003 - DNA, 527 bp, Homo sapiens
  misc_feature (1)...(527): n = A,T,C or G
nctgacctctcaggggggaatctcgaatctcgaatctgaggcatcctctgactccactcagagagggtgagggccttcttaagatacaaatggcggaggattgctgccagagaagtctggtcagagccacagggtctgcctccagccaaacgggagcttttggtgagaaggtgttggacaggggattggcgcccccctttggtttggcctccatcctcatctctcttgggccaagccagctgcctaggtcccccaagcatgggggaccccttcccacatataagttgagaaggtgcctgccatagccaggagcgcatctcaatggaaacatcactggggtcacttgggaagaggacttcggggtagaggctgggaggagccccttgacatgcctgtcctgaaagcggctgcctccattatccattcccaagatgcctgatcagaaaccaaccatgaatgaacccctggctccttcaccacccccacgatnggtatgatgctgccggcacagctgggatacacacggg

SEQ ID NO: 32004 - DNA, 546 bp, Homo sapiens
  misc_feature (1)...(546): n = A,T,C or G
ngtttgttgggacantcnggagngnngcnnntttcgatcccccctccgngnggnggaattcgcccagccaacatctcaggtagcatcttggggtccagaaaaatcctacctttcctggcctttccgctcccacttctctgggtggaaagggaatggccagaagcccgtcaccctcagccctcacctgagctgagagttgtctctgaaagttcatcttctgatcctctgagtgtctggatttctgccacctcctctgggttgccctgacctgggcttcctggcctcctgctcctccttgctctccctccctccctaggaaaaactgctctgctccatgctctggccagcagcgacggggtgcagatccacaatactgagaacattcgtctcttactggaaggaggggcagacgtcaaggccaccaccaaagatggggacacagtgttcacctgcatcatcttcctgcttggtgagaccgtgggaggggacaaagaggaggcccagatgatcaaccgcttctgcttccaagtcacacggctgctgctg

SEQ ID NO: 32005 - DNA, 488 bp, Homo sapiens
  misc_feature (1)...(488): n = A,T,C or G
acgccttctnnnncctagggcctgantgtcatgtgcaggaacncnntgnntataaaaacgcaacctcttcaaagactcagcactgccacatcatatgagtggacttgtcctcatcagctaactgataggagaacaatgccctaaagtaatggatttatccacctactcacgccagtttcatgcaggagggaactttccagatggcacattgccccatttccaagaccttccgctgacaaatgcatcatattaattatgatggaaaacaagtaagaaggcatgctctacaaaaattaggtcacttgcccaggagcggtggctcacacctgtgattccagcactttgggaggctgaggtgggcagatcatgaggtcaggagatcgagaccatcctggctaacacggtgaaaccccgtctctactaaaatacaaaaaattggctgggcatggtggcatgcgcctgtagtcccagctacttgggaggctgag

SEQ ID NO: 32006 - DNA, 539 bp, Homo sapiens
  misc_feature (1)...(539): n = A,T,C or G
ngcttttgaaccccctcgngnggngcatcggtcctcatccgtgtggtggaattccacaacctttntggcctggccttctcccttaatggagtagagctcctgcacctcaacaatgtcagcactggctgcatcctgctgggcggactcttcatctacgatgtcttctgggtatttggcaccaatgtgatggtgacagtggccaagtccttcgaggcaccaataaaattggtgtttccccaggatctgctggagaaaggcctcgaagcaaacaactttgccatgctgggacttggagatgtcgtcattccagggatcttcattgccttgctgctgcgctttgacatcagcttgaagaagaatacccacacctacttctacaccagctttgcagcctacatcttcggcctgggccttaccatcttcatcatgcacatcttcaagcatgctcagcctgccctcctatacctggtccccgcctgcatcggntttcctggtctgggtggcgctgcnccagggagaagtgacagagatgntcagtt

SEQ ID NO: 32007 - DNA, 535 bp, Homo sapiens
  misc_feature (1)...(535): n = A,T,C or G
ngacccttgatcatccntcagngnggnggatttgagacactctacctggccatggcctgcatctttgccttcatcctcagctttggcattggccctggtgagtgggcccaaggggctctgggcatccgtcatcacatagaaggagtgatgggtgcctgggtgcacagtgggtgggtgtgaatgcaatgtcccctgcaggccctcagagaccacctcatgccggggcttctgggagggaatggcaggaggagagcactgaggggccccccatacagactgggcctgggctcccactcccatgtctgggctggggtcggggagaggcaggcagggaaccctggccagcagccccctgtccctgcccctccttctagccggagtgacggngatcctggccacagagctgtttgaccagatggccaagcctgctgcctgcatggtctgcggggcgctcatgtggatcatgctcatnctggncggnctgggattccctttatcatggaggcctttgnccacttnctctatgtccttttcn

SEQ ID NO: 32008 - DNA, 487 bp, Homo sapiens
  misc_feature (1)...(487): n = A,T,C or G
gcggcttctnnaaactggacctaactgcagtggcgggaactcgggatggatgatgaccccgaagaccgcatgtcctacttaactgccatgggcgcagactatctgagttgcgacagccgcctcatcagtgactttgaagacacggacggtgaaggaggcgcctacactgacaatgagctggatgagccagccgaggagccgctggtgtcgtccatcacccgctcctcggagccggtgcagcacgaggaggtgaggcgaggcaggccacgggcaggaacaggagagcctggtgttttccttgcactctcgtggacagctgtgtgttcagggtgctgtggaaggcattcctaagggttggagcagatgacttccagggagtctctcgctttgagtccacgctggcatggttgcagtctgtgggaaagtggggcaggcaggtggacttcagaagagcttgaggggtcagcactccgcacacccatgcccn

SEQ ID NO: 32009 - DNA, 210 bp, Homo sapiens
  misc_feature (1)...(210): n = A,T,C or G
nnaactagaccatcgtccgtngggnggatcgatgggcggtctcggggactgtggtggtgatgtggtcctagccagtcagctactttgggaggctgaagcaggaggatcccttgagcccaagagtttgaggctgcagtgagctatgatcatggcactgcaccccaccctgggtgagatagtgaaaacctatctcttaaaaaaaaaaaaaaa

SEQ ID NO: 32010 - DNA, 543 bp, Homo sapiens
  misc_feature (1)...(543): n = A,T,C or G
agacnnagagcgnccnnnnnncccttgacttcgtccgcgtggngcaattcccttggtgtttccatatatgttttacaatcagtgtctcaatttctaccaaaaaaacatgccttctggaatttcaatagcaattcccttgaacgcatttttgaataccttttctgaatgtcttgaatacatgttgggaagaatcggtgtcttaacagtctccagtgtccacgcgttgactgccgtgtgtgactccagtcggcgtctcaacagtctccagtgtccacgcgttgactgccgtgtgtgactccagtcggcgtctcagcagtctccagtgtccacgcgttgactgccgtgtgtgactccagtcggcgtctcagcagtctccggtgtccacgcgttgactgccgtgtgtgactccagtcggcgtctcagcagtctccggtgtccacgcattgactgccgtgtgtgactccagtcggcgtgtcagcagtctccggtgtccacgcgttgactgccgtgtgtgactccagtcggcgtctcagcaatctccgg

SEQ ID NO: 32011 - DNA, 452 bp, Homo sapiens
tcgttgtgaccgcctgtagagccaactactcccgaggctgacgcatgagaatgctgtgatgccacgaggcagaggctgccatatgctaagagcgcgccactgcactcttgcctgggcatcagaacgagactttgtcttgtgatttactgataaagagaaggaattcgtcagtgacattctggcagaagatatctattataatgatttattatggatataaagagaccaaaaagagagatctgtatgtccaacaggaaggtgtcattgaataatccatgcacatcagtaaatagaaaattgtgcagacactaaaaattgtgttttcaaggaataatgaatgatatgagaaaatgctattatggcaagtgaaaacacacaggatacaacatcgtatagtcacaatgatctcaatttttaaatcatatttaatagtattttaaaataagaaagaa

SEQ ID NO: 32012 - DNA, 465 bp, Homo sapiens
  misc_feature (1)...(465): n = A,T,C or G
nttcgagacctcgtagaccataggcagagtgcggcaatgacggatgggcacgttgccagccgcatggaggcagcagagacacccgagatccagctggggcaaggggaactgatatgtgggctgtgggctgttccactaggcgtggccacctctgcacatgggccttggcacttaggaaatatgggtgctgctgcattgggaccttgtgtgggtgcagagcaggatggctgctgcgtggagggtaattttgtcccctggagagtgattggtgaccctcttccctgctgctgctgtttgcaggctcctggcctatactacctctgacgccctgatcctgagttcctctgccctcctctgctgccagcagcgctgttggtggcctcaccctcctccagtacccaggcaccaaagatggcaccaccatcctcctgcttgtaccacagggtgctgctccctgggccaact

SEQ ID NO: 32013 - DNA, 484 bp, Homo sapiens
  misc_feature (1)...(484): n = A,T,C or G
agggatttgatagcactcgaannntcagtagaatcctaggaagngcggnggaaatctcgatgccgccttcacccgcatcaactgtcaggggaagatttacctcttcaagggtattcagtactggcgctttgaggatggtgtcctggaccctgattacccccgaaatatctctgacggcttcgatggcatcccggacaacgtggatgcagccttggccctccctgcccatagctacagtggccgggagcgggtctacttcttcaaggggaaacagtactgggagtaccagttccagcaccagcccagtcaggaggagtgtgaaggcagctccctgtcggctgtgtttgaacactttgccatgatgcagcgggacagctgggaggacatcttcgagcttctcttctggggcagaacctctgctggtaccagacagccccagttcattagccgggactggcacggtgtgccagggcaagtggacgca

SEQ ID NO: 32014 - DNA, 490 bp, Homo sapiens
  misc_feature (1)...(490): n = A,T,C or G
cgtgcgcggggagcgccctactgaaaccctcatntgatnagcattcgaannnncnnnnaannccaagacactctaccaggtgaaggggaagaagaacatccgngccaccgatcgggcactgaactgggacagcttcaacactggggactgcttcatcctggacctgggccagaacatcttcgcctggtgtggtggaaagtccaacatcctggaacgcaacaaggcgagggacctggccctggccattcgggacagtgagcgacagggcaaggcccaggtggagattgtcactgatggggaggagcctgctgagatgatccaggtcctgggccccaagcctgctctgaaggagggcaaccctgaggaagacctcacagctgacaaggcaaatgcccaggccgcagctctgtataaggtctctgatgccactggacagatgaacctgaccaaggtggctgactccagcccctctgcccttgaactgctgatn

SEQ ID NO: 32015 - DNA, 486 bp, Homo sapiens
  misc_feature (1)...(486): n = A,T,C or G
gattgccgggggnnnnnnaaactgagaccatcgatcgagngctgtaagacgacaccggacatgctcgcccatatactgattggggctgcgaacagcacacacagcacccacatgacccagagggacccatatgaagtgatccccaacctccaagatggaaccctgatccttctggcggccaccactgtggcttacgaggggctggacatcccacattgcaatggggtggtgcggtatggtctctatgccaatgaaatctccatggtccaggccaggggccgtgcccgggccgatcagagtgtatacgcgtttgtagcaactgaaggtagccgggagctgaagcgggagctgatcaacgaggcgctggagacgctgatggagcaggcagtggctgctgtgcagaaaatggaccaggccgagtaccaangcaagggatcctgtggtcatcaacaaagtcttcaaggactggaagcctgggggtgtcat

SEQ ID NO: 32016 - DNA, 455 bp, Homo sapiens
  misc_feature (1)...(455): n = A,T,C or G
ntttgatagcactacnccagngnggnggaattctgacatttagttgattattttctgctacagacctggtacactctgattttagataaagtaagcctaggtgttgtcagcaggcaggctggggaggccagtgttgtgggcttcctgctgggactgagaaggctcacgaagggcatccgcaatgttggtttcactgagagctgcctcctggtctcttcaccactgtagttctctcatttccaaaccatcagctgcttttaaaataagatctctttgtagccatcctgttaaatttgtaaacaatctaattaaatggcatcagcactttaaccaatgacgtttgcatagagagaaatgattgacagtaagtttattgttaatggttcttacagagtatctttaaaagtgccttaggggaaccctgtccctcctaacaagtgtatctcgattaataa

SEQ ID NO: 32017 - DNA, 485 bp, Homo sapiens
  misc_feature (1)...(485): n = A,T,C or G
gagggattgaccaatcgagtccactatccatgtggtggaattcgattgtcaagacattgccaataagggagctaaacagagcgggctttactttattaaacctctgaaagctaaccagcaattcttagtctactgtgaaatcgatgggtctggaaatggatggactgtgtttcagaagagacttgatggcagtgtagatttcaagaaaaactggattcaatataaagaaggatttggacatctgtctcctactggcacaacagaattttggctgggaaatgagaagattcatttgataagcacacagtctgccatcccatatgcattaagagtggaactggaagactggaatggcagaaccagtactgcagactatgccatgttcaaggtgggacctgaagctgacaagtaccgcctaacatatgcctacttcgctggtggggatgctggagatgcctttgatggctttgattttggcgatgatn

SEQ ID NO: 32018 - DNA, 494 bp, Homo sapiens
  misc_feature (1)...(494): n = A,T,C or G
gagtnctcnnagggggggnnnccttgannccctatcgagatccctaggcagngnggtggaattcccagcttcaaagttctggaagctagagatatccaagagcagccagaggacaggaagacctggctgagccagaggtcgaagctgcggcaggagctagagtcctttggtgatgtaaagaggtggctggagaacaagcccagcatcacgccttcagaggccaaggtcttacacatgatccacgaggagcagagtgcccagccaaatgcctcccaggcaactaccaggaccaccaggaagaaagcccccaggctctcccggctgtcccgccagatggtgccccagctccagctgcccgagccccctgccctgtcggtcatgtactcctacctgcatagccgcaagatcaagatcctggagatatttcacaaggtgggccagggtgagaaccagagaatcaccagggaggagttcatcgcggctgtaaaggcagg

SEQ ID NO: 32019 - DNA, 484 bp, Homo sapiens
  misc_feature (1)...(484): n = A,T,C or G
tgggtccnagnnnnnnnaaactgataccccatggagngccgtggattccacgngaggcccggacccctgcccaggtatgggcagatggccgtttcctccaccttccgccaccttcctgaaatgtggtgccaggggcagcttggtgtgtgaggggaaggagggttcccactcctgctgggccccggggcctgggctgaagaaaaggccccaccatccatccatgttccttctccgggatggacgtggggcccagctccctgccccaccttgggctgaagctgctgctgctcctgctgctgctgcccctcaggggccaagccaacacaggctgctacgggatcccagggatgcccggcctgcctggggcaccagggaaggatgggtacgacggactgccggggcccaagggggagccaggaatcccagccattcccgggatccgaggacccaaagggcagaagggagaacccggcttacccggcca

SEQ ID NO: 32020 - DNA, 498 bp, Homo sapiens
  misc_feature (1)...(498): n = A,T,C or G
nattgagncccatcgagcatgtccgngnggnggaattccagaggagaaactggaacatgtccgtgctctgatcaaaaagtattctgatcatttggagaacgtctcaaagttggttgagtcaggaattcagtttatggatgagccagaaatggcagtgtttctgcagaatgccaaaaccctgctaaaaaaaatctcggaagcatcaaaggcatttcagatggagaaaatagaacatggctatgagaacatgaaccacttcacagtcaacctcaatagagaagaaaagataatacgtgaaattgacttttacagagaagatgaagatgaagaagaagaagaaggcggagaaggagaaaaagaaggagaaggagaagtgggaggagaagcagtagaagtggaagaggtagaaaatgttcaaacagagtttccaggagaagatgaaaacccagaaaaagcttcagagctctctcaggtggagctgcaggctgcccctggngc

SEQ ID NO: 32021 - DNA, 456 bp, Homo sapiens
  misc_feature (1)...(456): n = A,T,C or G
atttgttcgcagtacactagtccagngtggtggaattagatgaacccccccagagcccctgggatcgagtgaaggacctggccactgtgtacgtggatgtgctcaaagacagcggcagagactatgtgtcccagtttgaaggctccgccttgggaaaacagctaaagtaaggacccagcctggggttgagggcaggggtagggggcagaggcctgtgggatgatgttgaagccagactggccgagtcctcacctaatatctgatgagctgggccccacagatggtctggatggagaaactggaatgggatctccaggcagggtcacagcccatgtcccctgcaaaggacagaccagggctgcccgatgcgtgatcacagagccacattgtgcctgcaagtgtagcaagccccttttccttcttcaccacctcctctgctcctgcccagcaagactg

SEQ ID NO: 32022 - DNA, 519 bp, Homo sapiens
  misc_feature (1)...(519): n = A,T,C or G
gagaaacgaannnnnnnnnnnttttgatcgcagtncgtgtggnggaattcgttgaactgatcgtggccaacaccaagactggacggaatgctcgccgattttctgcaggccagtgggaagcaagaaggggctggaggctgttcaactgctccgcctcccttgactggccccggatggttgagtcctgcttgggctcaccttgctgggccagcccccaactccttcggatcatcttcaaagccatggggcagggcctgccagacgaggagcaggagaagctgctgcgcatctgttccatttatacccagagtggagaaaacagcctggtgcaggagggctctgaggcctcccccattgggaagtctccatatacactagacagcctgtattggagcgtcaagccagccagctccagcttcgggtctgaagcaaaggcccagcaacaggaggagcagggcagtgttaatgatgtcaaggaagaggagaaggaggagaaagaggtcttgccagaccaggtaa

SEQ ID NO: 32023 - DNA, 498 bp, Homo sapiens
  misc_feature (1)...(498): n = A,T,C or G
agggtccccgaggggccccaactgaaaccccctagntanctncggaagngcggnggaattcgtgtcatggtcgacaagtagtcctcagaataggtctatatagaagaaagagcattgtgctgggagtcaagtaggttcaggttgtagtttggttctgccactgactcgtgtgaccttggccaagtcactttactacttagggcctgtttccccatctggactagtgacatgatgtttaaagttccatcacctctaaattctgtgtttctgtctaaaacttggcattaggtgaatgggcttaatttttaagacatgcctctctataaattatcaagaagcagccaccctaaaatgtaactaaaaggtgcctataatcttttcataaacgttgattggaaggatactgtaaggaatcaaccaagaggagtgttggagaataagacttgaacaatatttctccagcattgtccaggggagagggtgctcttttgattacca

SEQ ID NO: 32024 - DNA, 468 bp, Homo sapiens
  misc_feature (1)...(468): n = A,T,C or G
agaggccggttcttaccatcnaactaggaacctcgnggaancctgnggagatgntattgagaggggtaactacttgagtgcgggacagtcccaaattggttgtgtcacccctgcatggaaacgcaggatttcctaagcctggccactgctcgcccccacagtatctgggctccatgctgatcaaagatctgcgagggacagaatccacgcaagacgcctgtgccaagatgcgggtagggtgcctgtgtgggctggagggcgctgtgggactggccagcagaaggcagcaatgggggcagtagctgcagttgcctgggccctgctgcactatgtaaggatgggaaggaagctgggacctgtggaagcccaggaggcttatccctgagaaggggcactgacagggccaccccttggttcctgtagaaatctacggagcacatgaagaagaatcccaccatcatcctgtcn

SEQ ID NO: 32025 - DNA, 497 bp, Homo sapiens
  misc_feature (1)...(497): n = A,T,C or G
natcgagcactgttcgagnggcggaattaaagtccagtctctcctcggcttgcaatggaccccaactgctcctgcgccgctggtgtctcctgcacctgcgctggttcctgcaagtgcaaagagtgcaaatgcacctcctgcaagaagagctgctgctcctgctgccccgtgggctgtagcaagtgtgcccagggctgtgtttgcaaaggggcgtcagagaagtgcagctgctgcgactgatgccaggacaacctttctcccagatgtaaacagagagacatgtacaaacctggattttttttttataccaccttgacccatttgctacattccttttcctgtgaaatatgtgagtgataattaaacactttagacctgggaaaanaannnaanaaaaaaaaaaaaaaaaaaaaaaaaaaaaaaaaaaaanannnnnnnnnnccccccccttaaaattaaagggcccccaaaaacccccttaaatttccttttttgtg

SEQ ID NO: 32026 - DNA, 447 bp, Homo sapiens
tttgatgcatacccaggcgggaattagatgaacccccccgagcccctgggatcgagtgaaggacctggccactgcgtacgtgtatgtgctcaaagacagcggcagagactatgtgtcccagtttgaaggctccgccttgggaaaacagctaaagtaaggacccagcctggggttgagggcaggggtagggggcagaggcctgtgggatgatgttgaagccagactggccgagtcctcacctaatatctgatgagctgggccccacagatggtctggatggagaaactggaatgggatctccaggcagggtcacagaccatgttccctgcataggacagaccaaggctgaccgatgcgtgatcacagagccacattgtgccttgcagtgtagcaggcccctttcccttcttcaccacctactctgctgctgcccagcaagactgtggg

SEQ ID NO: 32027 - DNA, 479 bp, Homo sapiens
  misc_feature (1)...(479): n = A,T,C or G
aatgagaccctggcagngcggatgattacatagctcgggcagagaagctggactgcagctggtttcaggaacttctcttgacgagaagagagaccaaggaggccaagcaggggctgggccagaggtgccaacatggggaaactgaggctcggctcggaaaggtgaagtaacttgtccaagatcacaaagctggtgaacatcaagttggtgctatggcaaggctgggaaactgcagcctgacttgggctgccctgatcatcctgctgctccccggaagtctggaggagtgcgggcacatcagtgtctcagcccccatcgtccacctgggggatcccatcacagcctcctgcatcatcaagcagaactgcagccatctggacccggagccacagattctgtggagactgggagcagagcttcagcccggnggcaggcagcagcgtctgtctgatgggacccacgaatctatcatcaccctt

SEQ ID NO: 32028 - DNA, 501 bp, Homo sapiens
  misc_feature (1)...(501): n = A,T,C or G
naattgagacccatcgagaaccgctccgngnggngccanncgccaaagagtaaaaactcaagggatggttgctgaggagcattcaggaggcctggggtgttatcagggatcaagtgtccgtttgatttcacagacccgtaagtgttcagtgtcttgagcaaactgtgaagaggagaccctggcctctgatttcaaaggcgccagcgttttaccggggccggtgcagataatggaagaaaggtgttttgccagggacttttccggggtatgcagtggggctggtgaggggtctgccttagcaggaagcccttgcctttgctgtaaagaaactagcacgcgacaaaacgaaagcatcaaagagccaacaggatgcggcccgagccctccctggcacgtcgccccgagccgcgcggggaagagtgaccttatggcccgcctcgcgcacacaggccaggcacaggttgaaagttcaaggcattttgttttttcacctgtttcctt

SEQ ID NO: 32029 - DNA, 345 bp, Homo sapiens
gaattcacacagggtccgagaaggggcctggtcgggcccagtagtccagggctcgaactcggtaggagccagagacagcacctgtgtctgggctgaacacaaagaggttgaaggtcgatggcttcctgctgaccggggtgtacgccttaccgtcctgagagaactggatctcgtatgtccacaggcacttggagcccacgtgttcatccgaccagaccagaaccagctgcccttgggtcaggggcagggcgcggagccgcgtgacctgcccgggcggcttctcggggcgcgcacacacgtgcaccagcaaaagcgacggcagccgcagcgcggggcgcagggtca

SEQ ID NO: 32030 - DNA, 237 bp, Homo sapiens
  misc_feature (1)...(237): n = A,T,C or G
cncgacacctntctacctcctgtctgcaaggataaatgtgccatgatgaaggaattaaccggggatgaggagggggggctgttgcctttctgtgagtatcctcacgagaatgaggatccagagagtccacgtggccctacttggcgtcctgctccctgtcttagggttgtgtccgctgtaagcctgtggatggttcctgggtgtctcacagatgtgttttctacagtcggcatcaac

SEQ ID NO: 32031 - DNA, 476 bp, Homo sapiens
  misc_feature (1)...(476): n = A,T,C or G
agggagaccctatgcagggcttagagcnccgtggggacgggaggcgcgagctgaccttctgtaggaagacgggcttgcgggtgatgggaatcgtggagaatatgagcggcttcacctgcccacactgcacggagtgcaccagcgtcttctccaggggcggcggagaggagctggcccagctcgccggggtgcccttcttaggctccgtgcccctggaccctgcgctcatgaggaccctggaggagggccacgacttcatccaggagttccccgggagccccgccttcgctgcactcacctccatagcccagaagattctggacgcgacgcccgcgtgcctcccctgactaaggccaccttgcagccgctttccagggccaccaagggctctgctccagcctctcagagaaacagaggcctgggctcggttcccgggccctgcaggggcaggcccaggcagcgtcagcgggagagct

SEQ ID NO: 32032 - DNA, 485 bp, Homo sapiens
  misc_feature (1)...(485): n = A,T,C or G
cgccnncnnnaaatgagactgacagcactcgcagngngcnggaantcagtcttcagagtggtgcgagagaattgctgggatccagaagttcgtattagagaaatggaccaaaaaggagtaacagtgcaagccctttccacagttcctgtcatgtttagctactgggccaaacctgaggacactttaaacctgtgccagcttttaaacaacgaccttgccagcaccgttgtgagctaccccaggaggttcgtgggtctggggacgttgcccatgcaggcccctgagctggcggtcaaggagatggagcgctgtgtgaaagagctgggctttcccggggtccaaattggcacccacgtcaacgagtgggacctgaacgcgcaggagctctttcctgtctatgcggcagccgaaaggctgaagtgttccctgttcgtgcatcccttggacatgcagatggatggacgaatggccaatactggcttctt

SEQ ID NO: 32033 - DNA, 476 bp, Homo sapiens
  misc_feature (1)...(476): n = A,T,C or G
attgaaaccctanccaggggactgagagcatacatcgcgtcggaggggaaggctgaggaaaggtacaagaagctggaagaccttctggagaagagcttttctctggtgaagatgccgtccctgcagcccgtggtgatgtgcgtcatgaagcacctgcccaaggttccggagaaaaaactgaagctggttatggctgacaaggagctgtatcgagcctgcgccgtggaggtgaggcggcagatctggcaagacaaccaggccctcttcggggacgaggtttccccactcctgaagcagtacatcctggagaaggagagcgctctcttcagtacagagctctctgtcctgcacaactttttcagtccttcccccaagaccaggcgccagggcgaggtggtgcancggctgacgcggatggtggggaagaacgtgaagctgtacgacatggtgctgcagtttctgcgcacgctcttcct

SEQ ID NO: 32034 - DNA, 490 bp, Homo sapiens
  misc_feature (1)...(490): n = A,T,C or G
actgagaccantgngcagnggcgatagaagacccctaggccagngcggnggaattcggcgcagccctacctggacgacttccagaagaagtggcaggaggagatggagctctaccgccagaaggtggagccgctgcgcgcagagctccaagagggcgcgcgccacaagctgcacgagctgcaagagaagctgagcccactgggcgaggagatgcgcgaccgcgcgcgcgcccatgtggacgcgctgcgcacgcatctggccccctacagcgacgagctgcgccagcgcttggccgcgcgccttgaggctctcaaggagaacggcggcgccagactggccgagtaccacgccaaggccaccgagcatctgagcacgctcagcgagaaggccaagcccgcgctcgaggacctccgccaaggcctgctgcccgtgctggagagcttcaaggtcagcttcctgagcgctctcgaggagtacactaagaagctcn

SEQ ID NO: 32035 - DNA, 488 bp, Homo sapiens
  misc_feature (1)...(488): n = A,T,C or G
ncttgatcgccatncgttggggcaattcagagggctcctccggcgccgccgagctgcgcccgctgccttcacaccccggacatccgcgccacactgacccagaccccaggaggcctcaccccacagcaagagaaagaccacgagcatggacatgatggtcgcgctcactccggtgcagtgagtgtctgggtgttggatcctggaacctgttctagaaggagacgctgagttctccccactctacctggagctgctgaggtcaagtggagagtgccggggctgaagcccagcgagcccctccctgtcacaccacactgcacatgtgacaccaaaggcatttattgagcatctactgtgtgccagatgcaaagaagacagtgggataactgggcaaggagcattctaggcagagggaacagccagtgcaaacatgggagatgcgggtgcagtgagaagcagcagaggagaccaggagttgaggcgactgc

SEQ ID NO: 32036 - DNA, 500 bp, Homo sapiens
  misc_feature (1)...(500): n = A,T,C or G
gtgggggannnnnnnnaacctcgatattcgtgtgccgtgtgcnggaattcgtctccttcacttcgccctccagctgctgcagctgcagcccgaccgcgagcgtgccaagcgtcttcttcagctagcggagcggtggcggcggcccccctcaggacaccaccagattcccctcttcccgcggcctcgccatggcgacccacggacagacttgcgcgcgtccaatgtgtattcctccatcatatgctgaccttggcaaagctgccagagatattttcaacaaaggatttggttttgggttggtgaaactggatgtgaaaacaaagtcttgcagtggcgtggaattttcaacgtccggttcatctaatacagacactggtaaagttactgggaccttggagaccaaatacaagtggtgtgagtatgggctgactttcacagaaaagtggaacactgataacactctgggaacagaaatcgcaattgaagaccagatttgtcag

SEQ ID NO: 32037 - DNA, 472 bp, Homo sapiens
  misc_feature (1)...(472): n = A,T,C or G
ntcgagactgatnacactaggccagngcggnggaattcggaggggggagtggggggaaaatgatcaattctgaggccacaaacatcaaaacaaaggcaatctagtctcctttctggggaagaggttctgaaaactttcaagctccctggcagaaaaacattttcagggaggctaaggggtaagggttgcaccaatcaggtagggccctcctgcccccagccacaaacccttccatacctgccagcctcctttggacagattttgtggaaattttgtgaattctgaggccaagggaactgaggtgtgggggtctcacagaagtgtgataaattctagaaaactagctgcaagggaccagatctgggcccaaccctgtgatgggcaggtgggcatgggctgcatgtagtggttctcctggtggcaatggcggctggacggaggatgtggtggagcaaagaagggggtgggaggg

SEQ ID NO: 32038 - DNA, 472 bp, Homo sapiens
  misc_feature (1)...(472): n = A,T,C or G
nttcgaagttcgtaggcagtgnggaggaattcgggaaggccatctgacactgtttttgcttttaaaggtttcttttgattcgaccaaacacctgagtgatgcctcaattaagaagcggcagctggagaggcagaagcttcaggaactggagcagcaaagagaagaacaaaagcgcagagagaaggaagcggaggagaggcagcgagcggaggaaaggtaccttctgcgggagcgggccctcggcgctggtgtccggcacctgggagtgtgcgcagacccgtgtgcgtgtgtctgcatgtattcctgtgcgtgtgtgtgtgcatgcatgcttgtgagcttgtgtgtgtacctgtgtgcatggacgcacgtgtgcctgtgaaccggtgtgtgtactttgtatgtctctatgtgcgcccgagtgtgtgcctgagcatctgtgtgcacgtgtgcctgtgtgtgcgtgcatgtgtgg

SEQ ID NO: 32039 - DNA, 364 bp, Homo sapiens
gaagaacatgacgacgagaagagaggggcccaccgccggctgcaggagcagcgggagcgcctgcatggagccctcgcgctcatagagcttgccaacctgactggggcgccactccgacagtagcttggacactgactcttccactgtacaaaagtactgcccagcatacttaaaaagtagatccttgggcataagctaagcaccttatttgcttatcataggctgctattctgtagaaatttatgaagaatgttattgccccagaatatggggtgagagagaactgcacttttttaatatggaaatgaattcatcgtaaagattaaaatattttgtaaatatggactgcacagtacagggtagg

SEQ ID NO: 32040 - DNA, 497 bp, Homo sapiens
  misc_feature (1)...(497): n = A,T,C or G
ngggagannnnnnnnacctcgatatcgttntgcgtgtgcnggaattcatttctagcagacactgaagggagagggagaggaacaagccccagggaccctttatccgacttccttccacctgggggactccctccacgggcccttgctttaagggcaaatggcgagggcaccagaacacagggaggccatgccggaggtccctgctgcaaccatgcggccccccagctcactcccagcagccaagacgaaggggggcctgggctccccctagggcaggcgcctctgattctctccaccgagaggcacctcccatgccggcctcttcctggggtgactcccagaaccttcttggacccatgaacatttcaatctggggtggggccttccctgggcatccaagtggtgggaatctgtccctagcccctagaactcctggagggctgggcccacctctgtctgcatcccgtccccattccccgccccgggtggcaggggct

SEQ ID NO: 32041 - DNA, 507 bp, Homo sapiens
  misc_feature (1)...(507): n = A,T,C or G
gaggaanntnnnnnaggaccgagtagggtatncangngctggagttcattaagaacatcgagctgttcgacaagctggccctgcgcttccacgggcggctactctttctcaaggatgtcctgggggacgagatctgctgctggtctttctacgggcagggccgcaaaatcgccgaggtgtgctgcacctccattgtctatgctacggagaagaagcagaccaaggtggaatttccagaggcccggatcttcgaggagaccctgaacatcctcatctacgagactccccggggcccagacccagccctcctggaggccacagggggagcagctggagctggtggggctggccgcggggaggatgaagagaaccgagagcaccgtgtccgcaggatccatgtccggcgccatatcacccacgacgagcgtcctcatggccaacaaattgtcttcaaggactgacctctgacccttcccctgccttcctcttgccttgggacccaatccc

SEQ ID NO: 32042 - DNA, 472 bp, Homo sapiens
  misc_feature (1)...(472): n = A,T,C or G
nttgagactgagacccatagccagngcggnggaattccgggggcacacgggggcggtatttagcgtggactacaatgatgaactggatatcttggtgagcggctctgcagacttcactgtgaaagtatgggctttatctgctgggacatgcctgaacacactcaccgggcacacggaatgggtcaccaaggtagttttgcagaagtgcaaagtcaagtctctcttgcacagtcctggagactacatcctcttaagtgcagacaaatatgagattaagatttggccaattgggagagaaatcaactgtaagtgcttaaagacattgtctgtctctgaggatagaagtatctgcctgcagccaagacttcattttgatggcaaatacattgtctgtagttcagcacttggtctctaccagtgggactttgccagttatgatattctcagggtcatcaagactcctgagatagcg

SEQ ID NO: 32043 - DNA, 471 bp, Homo sapiens
  misc_feature (1)...(471): n = A,T,C or G
ntcgagatcgatggccatgnggnggaattcggaacagcagcggtgaagcccctcggctcggccgagaccgccgtgcccattgctcgcctcggttgccgccgctttagccgcagccgctgctgccgccgccgggggagaggcagcctattgtctttctccgcggcgaaggtgaggagctgtctcggctcggcccgcgggggagccccgggagccgcacgaatgggacaacagaagaagtgacttcaaaagaagacgaagaggaagagatggatgaagatatagaagacttagatcactatgagatgaaagaagagcctattagtgagaagaagttggaggatgaaggaactgaaaaagaaaattgggcaatattagagaaaattatgaagactgaaaggcaaggccatttaaatgtgttgaccctgatagtcctttgcacagtgatctttagatcttataaagaagcgatag

SEQ ID NO: 32044 - DNA, 462 bp, Homo sapiens
  misc_feature (1)...(462): n = A,T,C or G
gccggttnnnnnnnaactgagaactcgagacgtgcggggaactcgcgtctgcagcaccgtcccaggctgagccagcctgcccaccccggcaagcctgtggtggtggtggggcccatgggccaggctggcaagcagccatggcctccacagccatcatggtacccgtggggctcgtgtttgtggcctttgccctgcatttctaccgctccttggtggcacacaagacagaccgctacaagcaggaactagaggaactgaatcgcctgcagggggagctgcaggctgtgtgagactggtgttagccaccgctcactgcaagcactgcctccctccggggtctgtaagaggccgcaggggcctacagacctcatccccccatcccctggctggagccacttccagtggccactctcaggcagagttcagattcctgcccgcagggtcctctgggctgggccttgg

SEQ ID NO: 32045 - DNA, 470 bp, Homo sapiens
  misc_feature (1)...(470): n = A,T,C or G
nttgactgaatcactaggacagngcggnggaattcgaggaagccaagatccttcggctcagtggaaaaccacaaaatgcgccagagggttatcagaacagactgaaagtactctacagccaaaaggccactcctggctccagccggaagacctgccgttacattccttccctgccagaccgtatcctggatgcgcctgaaatccgaaatgactattacctgaaccttgtggattggagttctgggaatgtactggccgtggcactggacaacagtgtgtacctgtggagtgcaagctctggtgacatcctgcagcttttgcaaatggagcagcctggggaatatatatcctctgtggcctggatcaaagagggcaactacttggctgtgggcaccagcagtgctgaggtgcagctatgggatgtgcagcagcagaaacggcttcgaaatatgaccagtcactctgcccgg

SEQ ID NO: 32046 - DNA, 470 bp, Homo sapiens
  misc_feature (1)...(470): n = A,T,C or G
aggagcgggnnngnnttccgaaattccgttacgtccgcanngncnngnaannngntnttggntcgggcggctgagaagaccgcgcggggctggagacaggtagcagtacggtgggcggggcttcatgccggatgtgatagtctgcagtcgtttcggttggcagcctggcgggtgggagatgcggcggccacctgctgcaaagaaccgaagggaaggttagaagtacgaaggcagtttggagctggggctaagcagctgtcgcacggtcagatcatgggctccaccaagcactggggcgaatggctcctgaacttgaaggtggctccagccggcgtctttggtgtggcctttctagccagagtcgccctggttttctatggcgtcttccaggaccggaccctgcacgtgaggtatacggacatcgactaccaggtcttcaccgacgccgcgcgcttcgtcacggaggggct

SEQ ID NO: 32047 - DNA, 500 bp, Homo sapiens
  misc_feature (1)...(500): n = A,T,C or G
gagtnnncnncnccnaatagagatcgatagcagtgngcaggaactccgtcattgatggagcctgaaccgtgtgctcctcggcagatgctgttgttgttacttccctccaagaggctggaaaagggctcacagctgctgagcaggaaccggagggtgacccatttcaggaggtgccggtaccagcctgactaggtacaggcaagcttgtgtgggcccaacaggcccttggtagagctggtgccagatgtgggctcacatcctgggcatgatgggccgagccacctcggatcccactgattggccagccgagcgagaaccaggctgctgcatggcactgaccgccgcttccagcttcctctgagccgcagggcctgctacgcgggcaagcgtgctgcctctcttctgtgtcgntttgttgccaaggcagaatgaaaagtccttaaccggggactcttcctttatcccctcctttaccccacatatgcaatgacttttaattt

SEQ ID NO: 32048 - DNA, 470 bp, Homo sapiens
  misc_feature (1)...(470): n = A,T,C or G
tccgaaacctcgaagngctgaaaccgtccgaagnggctgaggtgacacagtccgaaatagggcagaaacagaagctgcagactgtgctggaagcagtacatgacctgctgcggccccgaggctgggcgctccggcggagcgtggactcaattcacgggaagaacctggtggccatcctccacctgctggtctctctggccatgcacttcagggcccccatccgccttcctgagcatgtaacggtgcaggtggtggtcgtgcggaaacgggaaggcctgctgcattccacccacatctcggaggagctgaccacaactacagagatgatgatgggccggttcgagcgggatgccttcgacacgctgttcgaccacgccccggataagctcagcgtggtgaagaagtctctcatcacttttgtgaacaagcacctgaacaagctgaatttggaggtgacggaactggagacc

SEQ ID NO: 32049 - DNA, 466 bp, Homo sapiens
  misc_feature (1)...(466): n = A,T,C or G
ggagggccggnnaactgaaancctgcctgtcatgtagngccgcggaannngnganncagcagatagacctccagggcccggggccgtggggcttccgcctcgtgggcggcaaggacttcgagcagcctatcgccattttccgggtcactcctggaagcaaggcggctctagctaatttatgtattggagatgtaatcacagccattgatggggaaaatactagcaatatgacacacttggaagctcagaacagaatcaaaggctgcacagacaacttgactctcactgtagccagatctgaacataaagactggtctcctctggtgacggaggaagggaagcgtcatccatacaagatgaatttagcctctgaaccccaggaggtcctgcacataggaagcgcccacaaccgaagtgccatgccctttaccgcctcgcctgcctccagcactactgccagggtcag

SEQ ID NO: 32050 - DNA, 484 bp, Homo sapiens
  misc_feature (1)...(484): n = A,T,C or G
cggggaagggnncccgtttcgagaccatagacgtcgtaggaantcgagagaggagatggcgtctaccagaaggggatggacttcattttggagaagctcaaccatggggactgggtgcatatcttcccagaagggaaagtgaacatgagttccgaattcctgcgtttcaagtggggaatcgggcgcctgattgctgagtgtcatctcaaccccatcatcctgcccctgtggcatgtcggaatgaatgacgtccttcctaacagtccgccctacttcccccgctttggacagaaaatcactgtgctgatcgggaagcccttcagtgccctgcctgtactcgagcggctccgggcggagaacaagtcggctgtggagatgcggaaagccctgacggacttcattcaagaggaattccagcatctgaagactcaggcagagcagctccacaaccacctccagcctgggagataggccttgcttgctg

SEQ ID NO: 32051 - DNA, 493 bp, Homo sapiens
  misc_feature (1)...(493): n = A,T,C or G
ggggcacnanaaacttgaactcgtgaccctagtccatgtggtggaattcggaggaggaagaagaactggaagaggtggaagacctggagtttggcacagcaggaggggaggtagaagaaggtgcacctccaccctcaaccctgcctccagctctgcctccccctgagtctcccccaaaggtgcagccagaacccgaacccgaacccgggctgcttttggaagtggaggagccagggacggaggaggagcgtggggctgacacagctcccaccctggcccctgaagcgctcccctcccagggagaggtggagagggaaggggaaagccctgcggcagggccccctccccaggagcttgttgaagaagagccctctgctcccccaaccctgttggaagaggagactgaggatgggagtgacaaggtgcagcccccaccagagacacctgcagaagaagagatggagacagagacagaggccgaagctctccatga

SEQ ID NO: 32052 - DNA, 481 bp, Homo sapiens
  misc_feature (1)...(481): n = A,T,C or G
ncttgagattcgtatagccgtgtgcnggaattcaatcatctgtgtggtttttcatatttaactctttatctttttgttcaactctttcatcctttcagaatttattttgctgtttattgagaggaaatgggaaattaagttccccgccctgtgtgtgaaacagctgtttcgcaccttatagtttgttctttctgagtctttttctgggatttttatttttattttttgagacggagtctcgctctgctgcccaggctggagtgcagtggcgcaatctcggctcactgccagctccgcctccctggttcatgctattctcctgcctcagccttccgagtagctgtgattataggcgcctgccaccacgcccagctaattttttatatttttagtagagacagggttttaccgtattagccaggatggtctcgatctcctgacctcatgatccgcctgcttcggcctcccaaagttgtggaan

SEQ ID NO: 32053 - DNA, 463 bp, Homo sapiens
  misc_feature (1)...(463): n = A,T,C or G
ggagcgnnnnnnncctgatanactggtagccgngagaanncangagngaagggatcaacttctctgacaacctacgccggtgtgtggtgatggtgggcatgcccttccccaacatcaggtctgcagagctgcaggagaagatggcctacttggatcaaaccctccccagagcccccggccaggcacccccagggaaggctctggtggagaacctgtgcatgaaggccgtcaaccagtccataggcagggccatcaggcaccagaaggattttgccagcatagtgctcctggaccagcgatatgcccggccccctgtcctggccaagctgccggcctggatccgagcccgtgtggaggtcaaagctacctttggccccgccattgctgctgtgcagaagtttcaccgggagaagtcggcctcttcctgatgggcaaccacaccactgcctggcgccgtgccctt

SEQ ID NO: 32054 - DNA, 535 bp, Homo sapiens
  misc_feature (1)...(535): n = A,T,C or G
agtatantannagtnaagcnncnnnagnnnggnnncnngaattgaaaaccctaatcgatacactatcgcgagnggnggaattcggatcctgctctggtgtcctccacaccagaatcaggggttttcttcccctctgggcctgagggcttggatgcagcagcttcctccactgccccgagcacagccaccgctgcagctgcggcactggcctactacagggacgctgaggcctacagacactccccagtctttcaggtgtacccattgctcaactgtatggaggggatcccagggggctcaccatatgccggctgggcctacggcaagacggggctctaccctgcctcaactgtgtgtcccacccgcgaggactctcctccccaggccgtggaagatctggatggaaaaggcagcaccagcttcctggagactttgaagacagagcggctgagcccagacctcctgaccctgggacctgcactgccttcatcactccctgtccccaatagtgcttatggnggccctgactnttcca

SEQ ID NO: 32055 - DNA, 491 bp, Homo sapiens
  misc_feature (1)...(491): n = A,T,C or G
gcgtagggnnnnnnnnnaatcgaagaccatagatagccntgcggaannccagaaaggagatggcgtctaccagaaggggatggacttcattttggagaagctcaaccatggggactgtttgcatatcttcccagaagggaaagtgaacatgagttccgaattcctgcgtttcaagtggggaatcgggcgcctgattgctgagtgtcatctcaaccccatcatcctgcccctgtggcatgtcggaatgaatgacgtccttcctaacagtccgccctacttcccccgctttggacagaaaatcactgtgctgatcgggaagcccttcagtgccctgcctgtactcgagcggctccgggcggagaacaagtcggctgtggagatgcggaaagccctgacggacttcattcaagaggaattccagcatctgaagactcaggcagagcagctccacaaccacctccagcctgggagataggccttgcttgctgcct

SEQ ID NO: 32056 - DNA, 487 bp, Homo sapiens
  misc_feature (1)...(487): n = A,T,C or G
agtgctccccctgagacctttcgcagnggcgggaattcctaccacaggtttctagagccatctgggctttccgggaacctggaccagactctggcccagtaggatgtccccgtgtcctccccagcagagcaggaacagggtgatacagctgtccacttcagagctaggagagatggaactgacttggcaggagatcatgtccatcaccgagctgcagggtctgaatgctccaagtgagccatcatttgagccccaagccccagctccataccttggacctccaccacccacaacttactgcccctgctcaatccacccagattctggcttcccacttcctccaccaccttatgagctcccagcatccacatcccatgtcccagatcccccatactcctatggcaacatggccataccagtctccaagccactgagcctctcaggcctgctcagtgagccgctccaagaccccttagccctcctggan

SEQ ID NO: 32057 - DNA, 540 bp, Homo sapiens
  misc_feature (1)...(540): n = A,T,C or G
cgcnntacattncaggggtgnnnnnnnnaggggggnncncnnnaattgaaaaccctaattgtancaccatngcaagnggncgaattcgggtgtacagccacgtgtctacctatgtgtctttctgggaatgtgtaccatctgtgtgcctgcagctgtgtagtgctggacagtgacaaccctttctctccagttctccactccaatgataatagttcacttacacctaaacccaaaggaaaaaccagctctaggtccaattgttctgctctaactgatacctcaaccttggggccagcatctcccactgcctccaaatattagtaactatgactgacgtccccagaagtttctgggtctaccacactccccaaccccccactcctacttcctgaagggccctcccaaggctacatccccaccccacagttctccctgagagagatcaacctccctgagatcaaccaaggcagatgtgacagcaagggccacggaccccatggcaggggtggcgtcttcatgagggaggggcccaaagccctn

SEQ ID NO: 32058 - DNA, 513 bp, Homo sapiens
  misc_feature (1)...(513): n = A,T,C or G
ggttacnnagggggggccaggggnnnncctgagaccttctgagggccattgccanagaccctttggatctgcctgacaacccccgcaataggcattttaccaacagcgtgcctaaccctaggatctcagatgctgaacttgaagctgaacttgagaaactgtccttatcagagggaggtttggtcccaagcagtaaatctccaaaaaggcaattggaaccgactctaaagccattgtaggaccctcaagtgaaggaccctcatgtaaaagagagaccaggcttgctgggtgtgtacatagttatttaaacaagaaactctcagaatgtgtttggaagaggagaaaggagaaccactgattttatctggatgctactacttactacaggacagatagaatttctggaagcgatgctccaaaggcttgctcccagctgtatcatggacctgccttctcatctttatagtgccacgatttatacagtcctgtgtctgacctgtcatttcatagcct

SEQ ID NO: 32059 - DNA, 476 bp, Homo sapiens
  misc_feature (1)...(476): n = A,T,C or G
agggccccccccactgatactgagcatcgcagaaccaaaanacagnngtgacctgataaaacacctctgtctcttcnatttgcctattgtttcttgccaagatgtgatacagcagctcaaagaatgcttgccaagtcactaatagtctttgctctctctagttcagtgactttccgatactgtgtaacattcagggcactatgtgaacttgtaagtgtgaccatactgcatgttttatggtgacctggtccagtactgcctttgttaaagcatctgtcatcagtaagagatgataagttttttgcacaacagtgaaaaccccacctttaagcatatgattacgcttaataaatattttattaaaaggaaaattaaagacctaaaagggaagaagttagactgttctagttctggtactgttgaggcactgatgaggataaatgatcatgcagaggtctcttcataattgaccccaa

SEQ ID NO: 32060 - DNA, 476 bp, Homo sapiens
  misc_feature (1)...(476): n = A,T,C or G
ggatggacgcggccnnnnnaattgagnaactgagttctctacgaagngcggnggaattcccgagctgcacgagctgctgagccggaagctggcccagtgtggggtgatgtttgacttcttggactgtgtggccgacctcaaggggaaggaggtgaagcgggcagccctcaacgagctggtggagtgtgtggggagcacccggggtgtcctcatcgagcccgtctacccagacatcatccgcatggtgagcacctgccacccaggctccgagggccggccgagagggcgtgtgagccccgtttactgtccgcaggacccctgcgtggagaataaccctgtactcatcggcttggcctcagtccacgacttccttccccccgacctgctggtgcccaacacccactgaatgcctacgggcctgccccacgtncacacctttgcttatgcttgcctgagacctggagtgccctgccccc

SEQ ID NO: 32061 - DNA, 492 bp, Homo sapiens
  misc_feature (1)...(492): n = A,T,C or G
ggagggcccnccccctaatgatcgtgcgtcatggcaggnnnccctctggngctgatgttcttgtgggaagagggaggttccaccgcacccctgccctcaactttaagactgttgccgttttagtgtggagataagggtgccattacattaccatgtattttctatctatattttttattgggcattttccctaggttggagagtcagcactcgttttgaatgtgtttaaaatgcattaaaatggaagatttctgcaggcagttgaatggcactccagatggggaattgctgtaaccctcttactgtaacatgtcatctcctgcgtcgtgatggggagagggtaatgttacttcacaaaggacatgtcagatccttcttcatggacttttttagttactgtgttttctctcaaacttggtttcgaatctcctgggagtgagggagaaacagggagctgaatcctcccccaagctgttccaggccagaggactn

SEQ ID NO: 32062 - DNA, 263 bp, Homo sapiens
  misc_feature (1)...(263): n = A,T,C or G
gcgtnccnctttggaaaaccttttaaactctccgcannggcnggaanncgnccactttgcctctgcaatgcctttttatttttagcaatatggctctttgcacaaagttttggctggaaatcatgttcgtgttttcagagtttacagcgtcaattgtactgaaaaccacttccagagtctaaagcagctcagatgttatctctgggggaattagtgttcccctcatttagcaacctccataccacaaggtctctgtctgtagt

SEQ ID NO: 32063 - DNA, 491 bp, Homo sapiens
  misc_feature (1)...(491): n = A,T,C or G
gggcaggggnnnnnnaatcgagaccaatcgagcaccactaggccatgcggnggaattcccacccccgcaacttccaggaggctgtggggtgccatggttaaactggggctgtgctacaaagcaccacaaagctggtggcttagaacaacaggagcatattctcccgccgtctaaaagcagaagtgccagaacaaagtgctggccgcattgggctcttctgaaagctccctcggccctcccggctcgtggtgggggctgtggccgcatcctcctatggcctccttcatcattggccttctctccccctcttcgtctcctcttcccatagggaccctcatctgggattttagcttgagcatctgctttgtctcctcttcccatagggaccctcatccgggaccttgagcatctgctaccacctgtttcgaaatgaggtcccattcccggtaccaggagtgaggacttcagcttgtcttttaggggatgcagtt

SEQ ID NO: 32064 - DNA, 471 bp, Homo sapiens
  misc_feature (1)...(471): n = A,T,C or G
ggtggcagaggcccncncactgagnccagttttgccagcaaggncgcggaanngngggngagacgggaggaaggtagtcacgggctcaaggctggaggctggcgggctatgtctgagtggagcgcctgcttacagacgttcgggagaacttctgccggaaccccgacggctcagaggcgccctggtgcttcacactgcggcccggcatgcgcgcggccttttgctaccagatccggcgttgtacagacgacgtgcggccccaggactgctaccacggcgcaggggagcagtaccgcggcacggtcagcaagacccgcaagggtgtccagtgccagcgctggtccgctgagacgccgcacaagccacagttcacgtttacctccgaaccgcatgcacaactggaggagaacttctgccggaacccagatggggatagccatgggccctggtgctacacgatggacccaagga

SEQ ID NO: 32065 - DNA, 473 bp, Homo sapiens
  misc_feature (1)...(473): n = A,T,C or G
tgagggcacggtcctnnnccctggagccctcgatcctcgnanaancnccnnnanctacggacaagaatgtcaacttgccggtagatgactttaatgagctattggtaaggtactcgttgacagagagccagctagcgctagtccgggacatccgacgacggggcaaaaacaaggtggcagcccagaactgccgcatgaggaagctggaaaccattgtgcagctggagcgggagctggagcggctgaccaatgaacgggagcggcttctcatggcccgcggggaggcagaccggaccctggaggtcatgcgccaacagctgacagagctgtaccgtgacattttccagcaccttcgggatgaatcaggcaacagctactctcctgaagagtacgcgctgcaacaggctgccgatgggaccatcttccttgtgccccgggggaccaagatggaggccacagactgagctggccca

SEQ ID NO: 32066 - DNA, 415 bp, Homo sapiens
gctcatgaacatgatgatgatgagtgacgagaaccaccgtgacatctacgtcagcaccgtggccgtgccaccgccaggccgctgtgctgcttgccaggatgccagccgagcccacccaggagacccgaatgcacagtgcctacggcatggcttcatgctgcacaccaagtaccaggtggtctaccccttccccaccttccagcccgccttccagctcaagaaggaccaggtggtgctgctcaacaccagctactccctggtggcctgcgccgtctccgtccactcggcaggtgacaggagtttctgccaaatcctgtatgaccacagcacctgccccctggcgcctgccagcccccctgagccccagagcccagagctgccccctgccctccccagcttctgccctgaggcggcc

SEQ ID NO: 32067 - DNA, 481 bp, Homo sapiens
  misc_feature (1)...(481): n = A,T,C or G
aggagggcccggggccnnnncaattgagaaaactgagatcnctcggaagngcggnggaattcggatgctgacaaatatgagaatgatccagaattagaaaagatccgaagagagaggaactactcctggatggacatcataaccatatgcaaagataaactaccaaattatgaagaaaagattaagatgttctacgaggagcatttgcacttggacgatgagatccgctacatcctggatggcagtgggtacttcgatgtgagggacaaggaggaccagtggatccggatcttcatggagaagggagacatggtgacgctccccgcggggatctatcaccgcttcacggtggacgagaaggtgggagtgctgtgctttctccccaggcccggcctgtgtggtggccctggccgtggcatctctgccgctgaactgcgcggcttccgcagactccaagcgcggtcgctgggctcgggactcc

SEQ ID NO: 32068 - DNA, 476 bp, Homo sapiens
  misc_feature (1)...(476): n = A,T,C or G
tggcgggccgggnttctnnncccaggagaactgaggacntncgaggaanccccaccatcaagntcttcaggaatggagacacggcttcccccaaggaatatacagctggcagagaggctgatgacatcgtgaactggctgaagaagcgcacgggcccggctgccaccaccctgcctgacggcgcagctgcagagtccttggtggagtccagcgaggtggctgtcatcggcttcttcaaggacgtggagtcggactctgccaagcagtttttgcaggcagcagaggccatcgatgacataccatttgggatcacttccaacagtgacgtgttctccaaataccagctcgacaaagatggggttgtcctctttaagaagtttgatgaaggccggaacaactttgaaggggaggtcaccaaagagaacctgctggactttatcaaacacaaccagctgccccttgtcatcgagttcacn

SEQ ID NO: 32069 - DNA, 478 bp, Homo sapiens
  misc_feature (1)...(478): n = A,T,C or G
aggtggcacggggccgnnccctgagnngctgggagctncggaagngncgnggaattcgaagaggcgagaacgacccccggaccgaccaaagcccgcgcgccgctgcatcccgcgtccagcacctacgtcccgctgccgtcgccgccgccaccatgcccaagagaaaggctgaaggggatgctaagggagataaagcaaaggtgaaggacgaaccacagagaagatccgcgaggttgtctgctaaacctgctcctccaaagccagagcccaagcctaaaaaggcccctgcaaagaagggagagaaggtacccaaagggaaaaagggaaaagctgatgctggcaaggaggggaataaccctgcagaaaatggagatgccaaaacagaccaggcacagaaagctgaaggtgctggagatgccaagtgaagtgtgtgcatttttgataactgtgtacttctggtgactgtacagtttgaaat

SEQ ID NO: 32070 - DNA, 482 bp, Homo sapiens
  misc_feature (1)...(482): n = A,T,C or G
agggtgggcagagtgcctnnnncccatggannaatgncatcatcggaagngcggnggaattcaaacctagtaattttttgttgatctcctataaactcatgttttatgtaataattaatagtatgtttaattttaaagatcatttagaattaacatcaggtatattttgtaaatttagttaacaaatacataaattttaaaattattcttcctctcaaacataggggtgatagcaaacctgtgataaaggcaatacaaaatattagtaaagtcacccaaagagtcaggcactgggtattgtggaaataaaactatataaacttagaattttttaaaaatatgacttttttaccttttacaaaacattctcttgctgaaatatgtgaagggtatattcagtagccaagagttgcatgactacttcacaccagttcatgatacaacaggtatacaggttttcttttataaccaactacaactaa

SEQ ID NO: 32071 - DNA, 413 bp, Homo sapiens
  misc_feature (1)...(413): n = A,T,C or G
gagagttacaggttggacatgatgcacactatggggccccagcgacgtgtctggttgagctcagggaatatggttcttagccagtttcttggtgatatccagtggcacttgtaatggcgtcttcattcagttcatgcagggcaaaggcttactgataaacttgagtctgccctcgtatgagggtgtatacctggcctccctctgaggctggtgactcctccctgctggggccccacaggtgaggcagaacagctagagggcctccccgcctgcccgccttggctggctagcttgcctctcctgtgcgtatgggaacacctagcacgtgctggatgggctgcctctgactcagaggcatggccggatttggcaactcanaaccaccttgcctcagctgatcagagtttctgtgg

SEQ ID NO: 32072 - DNA, 468 bp, Homo sapiens
  misc_feature (1)...(468): n = A,T,C or G
aggtggccgggttctnnannaaggggccaagctacnctcgagaanccanggggcgaggaagttcctcattgcttttaacatcaacctgctcggcacaaaggagcaagcccaccgcatcgcgctcaacctgcgggagcggggccgcgggaaggaccaagtgaccccgttcactgaccccatggagccccacccagcccctcgggaaagggttagaggctgacagcctcaggcggggaggtcggtggtggatggggcaccggccggacagggttcggcctcccacctgcagaccggcccagcctccgcgtacacaccgtgcggggaccgcgcaggtcggcaggtcacgggcggagtgaagctggggagctctggcctcctggggattttccagggaacgaggcaggacttccctttgtaacatgtggcagcatttccatactgctgggaaacagcgacttccggagtacc

SEQ ID NO: 32073 - DNA, 479 bp, Homo sapiens
  misc_feature (1)...(479): n = A,T,C or G
aggagggccgaggccgccnncattgagancctgcntatcatacggaanngcgnggaattcagcccttcaagtgcactgagctatgtgactcggatggtctttcacacggcacatttggacatttccagaactaccatgagatggtttagacgggaattcatgcaaatgaggggtcaaaaatggtatagtgaccccgtccacgtcctccaagctcacgaccttggagccccgtggagctggactgaggaggaggctgcacagcgggagagcagctggtccagaccagccctgcagcccccactcagccggcagccagatggccccgcaaggcctccagggatggcccctagccacaggccctggctgaggtctctgggtcggtcagtgacatgtaggtaggaagcactgaaaatagtgttcccagagcactttgcaactccctgggtaagagggacgacacctctggtttttcaatacca

SEQ ID NO: 32074 - DNA, 476 bp, Homo sapiens
  misc_feature (1)...(476): n = A,T,C or G
nggggtcagcggccngnncactgagaaactgagatcnntcgacanngcgnggaattcctggtaagtttggaagaagtaggctcctcctgtgggtggttttggtcacccgaccccatggtggtcacagctcccagtgaggtatattttctcatctggaaagtgcccctccagcaaagccaggcaggaaaaggaacaggggattgattgagttacctgacttgtcagaagtccagtccctctcactggccgcagtgtgcctgggtgttctctccaggggcagagagccgagccagctggggaaaagaggtgtaggcattagcttaaggcaggaagcccaaggttcctgtgacccgtggggcggccctccatctactgtccacctgtgacccgtgggccagccctccatctaccgtccatgcaggtagactctgtggagctcttgtaccttggtggcagggctgagcagttgtaataan

SEQ ID NO: 32075 - DNA, 475 bp, Homo sapiens
  misc_feature (1)...(475): n = A,T,C or G
tgatggccggggtnctnnanccagcnanactgagaacntgcgnggaanccctctcccgtgtccctccttcctttgaaccctgcccctattcccacgggacaggctggacccagagactctggacccggggcctccccttgagtagagacccgccctctgactgatggacgccgctgacctggggtcagacccgtgggctggacccctgcccaccccgcaggaaccctgaggcctaggggagctgttgagccttcagtgtctgcatgtgggaagtgggctccttcacctacctcacagggctgttgtgaggggcgctgtgatgcggttccaaagcacagggcttggcgcaccccactgtgctctcaataaatgtgtttcctgtcttannnnnnnnnnnnnnnnnntnnnnnnnnntnnnnnnnnnnnnnnnnnnnnnnnnnnnnnnnnnnnnnnnnnnntnnnnnnnttttttttt

SEQ ID NO: 32076 - DNA, 414 bp, Homo sapiens
cccagactcagagagaacccaccatggtgctgtctcctgccgacaagaccaacgtcaaggccgcctggggtaaggtcggcgcgcacgctggcgagtatggtgcggaggccctggagaggatgttcctgtccttccccaccaccaagacctacttcccgcacttcgacctgagccacggctctgcccaggttaagggccacggcaagaaggtggccgacgcgctgaccaacgccgtggcgcacgtggacgacatgcccaacgcgctgtccgccctgagcgacctgcacgcgcacaagcttcgggtggacccggtcaacttcaagctcctaagccactgcctgctggtgaccctggccgcccacctccccgccgagttcacccctgcggtgcacgcctccctggacaagttcctgg

SEQ ID NO: 32077 - DNA, 483 bp, Homo sapiens
  misc_feature (1)...(483): n = A,T,C or G
cgcacaagagnccnngnnnnnngnnncctgagaccttaggcagngtcgaggacattgggctttacggcattggctgctgggacccccaaaaccatgaggactgaggtgggatgggggctttgggatcaggcagctgggtgatttctcctgactctttctcttccccgtctcagctgtcccctaccaccaccggtcacagatgtgagccttgagttgcagcagctgcgggaagaacggaaccgcctggatgcagaactgcagctgagtgcccgcctcatccagcaggaggggaggcagagcggcagcagctgagcaaggtggcccagcagctggagcaggagctgcagcagacccaggagtccctggctagcttggggctgcagctggaggtagcacgccagtgccagcaggagagcacagaggaggctgccagtctgcggcaggagctgacccagcagcaggaactctacgggcaaggtgtcg

SEQ ID NO: 32078 - DNA, 414 bp, Homo sapiens
cgaggacgagatctcagaggtcgaggtcggggtaccccacgaggaggaaggaagggtttacttcccactcctgacgagttccctcgctttgaaggagggcggaagccagattcctgggatggaaacagagagcctgggccaggtcatgaacattttcgtgatactccccgccctgatcatccccctcacgacggtcattccccagccagcagagaacgctcctcttctctccaaggcatggacatggcatccctacctccccgaaagcgcccctggcatgatggcccaggcacttctgagcacagagagatggaggccccaggaggcccttctgaagaccgaggaggcaaaggccgagggggcccaggacctgctcagagagtgcccaaatctgggcgttccagctccttagaa

SEQ ID NO: 32079 - DNA, 220 bp, Homo sapiens
  misc_feature (1)...(220): n = A,T,C or G
tgggccattgncttctccgtccgccacactcacacatctaagggtgcagccgccccagttttagggtccagactgagtgaccatgggactctgggctcccacattatggagttttcttacttgttttgagtctttttaccgtctacactcaaaagaccctaccatcttagcgtgactccttgtgacttgactttgactttgtttctgacctccatttctg

SEQ ID NO: 32080 - DNA, 265 bp, Homo sapiens
ggtggcacattatccagcacacggtaacgctatctatcacacgggcttttgggcacttaccagaccagcctgctggcctgccactcttcacagtgcaaattccccacaagcgcctgcgccagccccctccctgctacctcacagcctgggatggctccaacttcttgccccttcggaccaagtcctgtggccatgaagtcgtctcctgcctcgatgtcagtgaatccggcaccttcctaggccttggcacagacactggctctgt

SEQ ID NO: 32081 - DNA, 498 bp, Homo sapiens
  misc_feature (1)...(498): n = A,T,C or G
atttgatttgcccacagtccgngnggnggaattcgtgttaaacactcttgcacgtgtgacatcattgagtcctaaagaccactctgctcagtgcatgccattgtttccttcagttacagaggagggaaccagagcccagaacatttagcctttgcctaaagtcactgggccaggaagtggtagaggtggggttcagcaggatttgcctgggaaccccaatattgaccacagtgccctgcctgccctgcacggatacctggctgtgagttgtcctggcctctggcaccaccggtctgtctgggttcctatgtccctatgtcccacctgcagaatgtgacatgcagctctttgggccctggggtgaaatcgtgagcccctcgctgagtccagccacgagtaatgcagggggctgccggctcttcattaatgtggctccgcacgcacggattgccatccatgccctggccaccaacatgggcgctgggaccgagggagcca

SEQ ID NO: 32082 - DNA, 499 bp, Homo sapiens
  misc_feature (1)...(499): n = A,T,C or G
nttcgattagcatncgngnggngcaattcttgaaatgtctcactgaactccagttttaaaatagattcattgcttcaacacagcaagcccaatgcacccagctaagactggcttgaccgacagcctggcctttggtggggggcttcctggggcctggggaaagctggccaccttcaacagctggtacctcttcaacagtgtggcctttcaaaatgcatactccaccccgagaacatgccccacagctcaccacctatggatgccatggctctgggcagctttcaaagcaggttcctgtggtctcctcagctgtttgagggggtaacagcaaatcagcctccattttaaaatgaaaacaccagcctccagatgtacggcctgctgggtgatgctagccgctggtccccaggcacggtgcactatctccacctcctgcagcctccctgttgtttctagactcttgcacctggtgagtgcaaggataggtgacccacgggct

SEQ ID NO: 32083 - DNA, 502 bp, Homo sapiens
  misc_feature (1)...(502): n = A,T,C or G
aattgactcgaccacagtccgngcggnggaattcagcagcagaactgggtgactgggaaaacaaggtttatagagcatgggtggcgtggttgtgctaaccattggagtccttgagccaggcctggctcacctgcagactggaaaagcgtaaaagccagggggaggggcggcgctggcccataaaagacatggactgctgctttgaagggccatagtgctactggaccccccctgctcagctgggggttgtggggaggaagggactggtcctcctggatgcacatgctctgtaggggtggggctgtctgccatcttggctggcgctggaggcctgagaagtggcgatgtgacgctgggctggccctgcccccatggtgtcataggacggaggccaggtcgggtgtccagcctgggcccctgcagctgtggatgccgctgagctcctgcaataatgaccgtggagatggtcacccctcgtgtaaaattactagtgcttcttgcg

SEQ ID NO: 32084 - DNA, 501 bp, Homo sapiens
  misc_feature (1)...(501): n = A,T,C or G
gtggagaanannnnnnnactcgagattcgtattgcgtgtggcggaattcgcccacatcaccctcatttcctcctcgcagtagccctgcaccgtggccagaaacccatccacaggcaggcagtggctggggtccgggtgccctgggctgttgggctctgcttcctccctctgctcccccatgtctccctgagttctcccacctttgctcatttgtaaaatgggcaggtcaatcttcccaccccaccgtgtgggctgccccaaccccaaatgtgcccagggaggggggggaacccaaggcacaggccccgcccctgcccccaagcagcactgggctactggctcgcagaagcacctttggttctgcaggtcatgcccctccctgcagggaagggaaagctggtggtagaggctgggcacagactgacgtccagaagaagtcccttggccctgctagggtggcaccagacttctctggtcccacaggacagccagtggcctccn

SEQ ID NO: 32085 - DNA, 501 bp, Homo sapiens
  misc_feature (1)...(501): n = A,T,C or G
nctcgattacagtncgtgtggtggaattcttacaccggaatcgggccaagctactcagccagcgaccgcgcagagccgaggccctcgcctgggggcagattgactgctcgaatttggatcacgggtgtgaaggaggatggagggaccatgcacggggctgcccagtgtggagagggggttgaaagatgcgcaggacgcatcactgcgagccataaggttgcagacaaatggcattcgtcacggaattccctgggtggttcgcccgagcctggaacgccagcccctggaccgtgggtgggtttctgccatccttgcctgcccgcctccccgttgtcctggactgcgaccggaacggcggccacgcatgcgcagtgtgcggagagggtccacaacctctgtcgcagggcaaagccaagttgagcaaggaggatgttgaaataatacntaatcgtcacatgtctggctggntatcccttcttaggnnatttgnnatttgggaan

SEQ ID NO: 32086 - DNA, 461 bp, Homo sapiens
  misc_feature (1)...(461): n = A,T,C or G
gggcaggtatgataccctgacaccncgngaanncggnncagaaggcggggccgactggttggggtgaggggaaggtcgccgctctcttttttgcgccctttactctagcacaatagaggcggggtgagggcgaggctcacacacagccttcggccatcgggcgaccccccacctctaggcgctgcggtcctgaaatcgccccctggtggtggcctcaccaccccgtgcaccctccacatgcttatagcccgtcctctcctccgctgtaaccctaggacccccctgacttgcctactgctggggacgtgcaaacctgtcctggcgttgcggggttgggggaccctctcggagggccttctggcctgtcctctaacctggacctcactccctgtgctcctgccacccgcttctgctctcggcctatggtgtggagggaaagctaccctatgtggcgactggag

SEQ ID NO: 32087 - DNA, 457 bp, Homo sapiens
  misc_feature (1)...(457): n = A,T,C or G
agattaanaatttggtagcatacccatgtggtggaattcctagaaggcgaggcgccgcgggaccatggcggcggcggcggacgagcggagtccagaggacggagaagacgaggaagaggaggtagtaagtgctacgccaaaagcctgcaccgcagtggcggtgatgcctgtgctggctgtgtgtggggaagggagttggggagctgcgggccggagggaggccccgctgctcctcaccggcttcttgctcctgggcgcgaggagccgggcagcttgggaccttagccctaatcgtcaccccgtacttgggatgggaagtaccgggaagttaccgtaggtagcgtagtttcctcttgctgaaaacagggtccggttttcacaaatgtgggaaatttggcttcttttgctaattgctccctcttgcccgctcgcgtgctagcatgttaacccctctttt

SEQ ID NO: 32088 - DNA, 548 bp, Homo sapiens
  misc_feature (1)...(548): n = A,T,C or G
aaggggaagcaggccnnnnnnncccttgaaatcgatccacactccgagtggngcaattcgggatttccccggagtgctggccagactcggggttcgtaggggaagctcctggcaactgttacccaacgactcccaggcttgcagcaagccctgggccacggctttcacggcccgctggggactgggggtcttctctacccgatgaacgcagccgcgctggccactcgcctggcctctgatgttcttgccagggaccgggtgcaccccctggaggactaggtagctccagaagtggtctgagctgttctctgctgtggctaagaggatctgctctggtgtcaagccgacctgggttcagtcgcacatccgcttctcatccgccatcgcccatctgagcctccgtctattcacctgtagatacagggagaatcatgggacccacttcctgcagttgatggtctctagatgcggtgtggtcatgcctggtaagtacttatcactatgccgggcgcggtggctcacgccctgtatcccagcactttgagagg

SEQ ID NO: 32089 - DNA, 496 bp, Homo sapiens
  misc_feature (1)...(496): n = A,T,C or G
gccaggtggccnccaattatnacccatagaggagcgtnggaancnccnattngaaaggggcagacggccatgttcgtgaacggcgcttcccttggtgcacctgtggccgccatgtttgagcgaggaccccgtggcaggccaggaccgtttctccggtgctatcccagagcatggcgcatccactcattcactcaagctgccatgtggaattgcaggagaccctggagggagcagaaaaccaggctcggccgaagccacctccacaccacggtttcctgggttccccaaaaccaggcttggccgaagccacctccacaccacagcttcccgggttcgctgtgtctgcttctgttcttattcctgattagctgtgcccccacccggccaggtcagggcacagtgagactccccatggtggcaggcgtgtgaagtctgtgcaggcttgtacgtggctggccccccacctgaactgtacgcccctggaaggcagggtccg

SEQ ID NO: 32090 - DNA, 498 bp, Homo sapiens
  misc_feature (1)...(498): n = A,T,C or G
aattgactcgcaccactatccgnngggnggaattcgtaatattttactgtgattttactttgtgttgatctaaaagttagcaatcttgagcatcctttcaaatgcttataggctatttatgtaacttcttcggagagatgtcagttcaattatttgtctgtttcttactcaagttactcactttttgttgagttttagacattgtttatatattgtgaaaattaactcctatcaaatatgtgattttcaaatatttcacccatttcttaggtgacattttcaccccactaaatttttcctttgatgtgcagaaactctgaagtttgatgtagtcccatttctctattatttgttccttatgcatttgatttcagagctaagaaaatgacatcaaattcttggtcttttgtaacaagaaattagtgccaagtccaatgtcatattttcccccatatacttatctaggaagtttggtatatttttatgttcaagtatttn

SEQ ID NO: 32091 - DNA, 529 bp, Homo sapiens
  misc_feature (1)...(529): n = A,T,C or G
ngaggattctnnnnnggggnnnnnngnnngntttcgaccaccatncagngccttgagaaaccatactcctgggcgaagtctctggaatcctccaagcggcctccctgctcattctgcttctgctgctgatcaaggcagttcagctctacctgcacaggcagtggctgctcaaagccctccagcagatcccgtgccctccctcccactggctcttcgggcacatccaggagctccaataggaccaggagctacaacggattcagaaatgggtggagacattcccaagtgcctgtcctcattggctatggggaggcaaagttcgtgtccagctctatgaccctgactatatgaaggtgattctggggagatcagacccgaaatcccatggttcctacagattcctggctccatggattgggtacggcttgctcctgttgaatgggcagacatggttccagcatcgacggatgctgaccccagccttccactatgacatcctgaagccctatgtggngctcatggcagactn

SEQ ID NO: 32092 - DNA, 554 bp, Homo sapiens
  misc_feature (1)...(554): n = A,T,C or G
aaggggnnnagccngnntnnnnnnnncaattggatcatcgntccagcgtggnggaattcggtcctcacagacccacacacgccctacgaggaggagcagcggcagtcagtgcagtctgaccagggctacatctccaggagctccccgcagccccccgagggactcacggaaatggaggaagaggaggaagaggagcaggacccagggaagccggccctgccactctctcccgaggacctggagagcctgaggagcctccagcggcagctgcttttccgccagctgcagaagaactcgggctgggacacgatggggtcagagtcagaggggcccagtgcatgagggcggctccccagggaccgcccagatcccatctttgagagaggagtgtgtgtgcacgtattcatctgtgtgtacatgtctgcatgtgtatatgttcgtgtgtgaaatgtaggctttaaaatgtaaatgtctggattttaatcccaggcatccctcctaacttttctttgtgcagcggtctggttatcgtctatccccaggggaatccacac

SEQ ID NO: 32093 - DNA, 482 bp, Homo sapiens
  misc_feature (1)...(482): n = A,T,C or G
ngaatcgagtccantgtccatgtggttgtattcctgcggngcccacatcatagtggatggaaatggcccttgtcatgcagtagtagatactgttaccattcaaggtatatgtataaccttaggcaagttactttcttcatctgtaagtgggcacattcctgcctcacggggtttatctggtgaggaaagatttgtattatctttggcatgaactcagttgcttgaaaaatgaagcccatagaagaagctaagccagggtgtctgtcttcagagcagcaccttgccgcttgccagtacagcagtgccctcacctctggggctgagctgtttgattcatgctgtgtgccctgggaggcagcctatctccatctcttgtagccttgtcatggccacccctttttccacgctacagcagaaggttcaggaagcttgaaatcagcccacacaagcccaggcccaacctctcttccattggctgctgg

SEQ ID NO: 32094 - DNA, 543 bp, Homo sapiens
  misc_feature (1)...(543): n = A,T,C or G
aggggtnagcagccncnnnnnaaactgagatcgtncagcatgcgcaattcccggcttgncagccgatgcggngctgtgcgtgcagctccccacagcggcccgctggtgtcctggcgcaggtggttcggcgcctcaacagacaccgtgtatgacgtggtggtgtcgggtggaggcctggtgggcgctgccatggcctgtgccttgggatatgatattcactttcatgacaagaaaatcctgttgctcgaagcaggtccaaagaaagtactggagaaattgtcagaaacttacagcaacagggtcagctccatttcccctggctctgcaacgcttctcagtagttttggtgcctgggaccatatctgcaacatgagatacagagcctttcggcgaatgcaggtgtgggacgcctgctcagaggccctgataatgtttgataaggataatttagatgacatgggctatatcgtggagaatgatgtcatcatgcatgctctcactaagcagttggaggctgtgtctgaccgagtgacggttctctan

SEQ ID NO: 32095 - DNA, 480 bp, Homo sapiens
  misc_feature (1)...(480): n = A,T,C or G
nggctcgagatccctagtcagtgtggtggaattcctgtggtacccagagccttgaggggagaaagaggagaagtggggaccctgtgactgtctttgcagagtgctgccctgcccaggaggtacatgctgcgggagcgggagggggccccagagcctgcatcctgcgtgaaggagactccagacccctggcagagcctggacccctttgactccttggagtctaagcccttcaagaaaggtaggccttactctgtgccccctgtgtggaggaggctctgggacagaagcgcaagaggaagggcgctgccaagctgcaggacttccaccagtggtacctggctgcctatgcagaccatgccgacagcaggcggcttcggcgaaagggtccgtcctttgcagacatggaggtactgtactgtacacacgtgaaggagcagatggaaactctccggaagctgcagaggagggaggtggctgagc

SEQ ID NO: 32096 - DNA, 470 bp, Homo sapiens
  misc_feature (1)...(470): n = A,T,C or G
nttgagnccccnttaagatnaccctaggacagngcggnggaannctgctggcccgcttcgtggtgggcagccacgtcagacaccaccccatcaacaaggaggttgaggggctggccaatggcagcgctgctgagcccgccatgcccaacacgtatggcgtggagcccctgccccaggaggtcctgaagaagtacatcatctacgccaaggagagggtccacccgaagctcaaccagatggaccaggacaaggtggccaagatgtacagtgacctgaggaaagaatctatggcgacaggcagcatccccattacggtgcggcacatcgagtccatgatccgcatggcggaggcccacgcgcgcatccatctgcgggactatgtgatcgaagacgacgtcaacatggccatccgcgtgatgctggagagcttcatagacacacagaagttcagcgtcatgcgcagcatgcgc

SEQ ID NO: 32097 - DNA, 462 bp, Homo sapiens
  misc_feature (1)...(462): n = A,T,C or G
natcgagaccactatcgagcgcggcggaattccccggctcgagcggacccaatgttgagcttccaccgtcgcatcagaccatgcggtgtttgcttttctctgtctgcgttaattcgctgaggatgatggcccgcagctgcatccgttgctgcagaggatgtgattttgcgcttttctatgcttgggcccactgtctttaacatcaagtttgtgtttcttatcacagctctgggtgctttacccagcagcctcccccatgcccactccgcagcctggacgctgctgccggggcctccagcccagcagcacagcactcgcctgtggaccttttcaaatatggctggtgtggagctgtgcccagggccccagccagcgggtcctgctgcccctgttgggaggacgccgcctgtcctctctgctttcacaacaacctcttccttcgggtctggctgtggcgtcacn

SEQ ID NO: 32098 - DNA, 464 bp, Homo sapiens
  misc_feature (1)...(464): n = A,T,C or G
natgagaccctatctttagtctagcaagngcggnggaannccccaggctccaggagcgtgcgaagaaacaggaccagagagggaaggttacctgaaagttacagaataattttttagagctgagcaagaatgcgagcctgctacggcagagacgagagatctttctgctgtctatactcttggaaagcacatcctaagatctttgcagattatcctgtggaaggaaaatgcctaaagtcaaaagaagccggaaagcacccccagatggctgggagttgattgagccaacactggatgaattagatcaaaagatgagagaagctgaaacagaaccgcatgagggaaagaggaaagtggaatctctgtggcccatcttcaggatccaccaccagaaaacccgctacatcttcgacctcttttacaagcggaaagccatcagcagagaactctatgaatattgtatg

SEQ ID NO: 32099 - DNA, 473 bp, Homo sapiens
  misc_feature (1)...(473): n = A,T,C or G
ggctgtggnnnttttgatgaccacatagagagccgtggaanncccagcccagcagcctgagccagcagtcaggatggggtggggacactccgtctctcttgagaccccactcagagaatggggctgacactgtaggagaaatataagcaggactcctgctggctgctcccctcctgcatgaggcatgttagagggactgggaccgccagcccccagctcccatgccgggcctcggcccagtctcagctcctgtttgggagggggggcagaggggcaggggggcagaagttgagtctgggagctggggcagggcacaggctctagggtccagctgtcctcctctcccctcccctgctggccactcctgctgccgtctccacagctctggaatgatgaagtggacaaggccgagcaggagctccgcgtggcccagacagagtttgaccggcaagcagaagtgacccgtctcttgc

SEQ ID NO: 32100 - DNA, 480 bp, Homo sapiens
  misc_feature (1)...(480): n = A,T,C or G
cggccagtcgnnnaatcgagaccactacctagngtcctcccacagngcggnggaantcttgatggcgtgatgtggcacagaaagttctccgctcccagacatgggtccctcggctttctgcctcggaagcgcagcagcaggcatcgtgggaaggtgaagagcttccctaaggatgacccgtccaagccggtccacctcacagccttcctgggatacaaggctggcatgactcacatcgtgcgggaagtcgacaggccgggatccaaggtgaacaagaaggaggtggtggaggctgtgaccattgtagagacaccacccatggtggttgtgggcattgtgggctacgtggaaacccctcgaggcctccggaccttcaagactgtctttgctgagcacatcagtgatgaatgcaagaggcgtttctataagaattggcataaatctaagaagaaggcctttaccaagtactgcaagaaatgg

SEQ ID NO: 32101 - DNA, 467 bp, Homo sapiens
  misc_feature (1)...(467): n = A,T,C or G
nattgagaccttgagaacngtcgnggaantcccctcccacctcagcctcctgagtagctgggactacagctgtgttctactatgcctggctaattatgtagaaatagggtctccccatcttgcccagcctggtcttggactcctgggctcgagcgatcctcctggctcagcctccaaaagtgctgggattacaggtgcgagccattgcgtccgactatgcttgattgtccaaggatctgatttctaggatttgtggggccagtctctctccattgcctccgtcctgctgtctcttgcttctacagggatctggacaactctcctctgtccccaccttcaccaaggaccaaaagcagaacgcatactcgggcactcaagaagttaagtgaggtgaacaagcgcctccaggatctccgttcctgtctgagccccaagccacctcagggtcaagagcaacagggccaaga

SEQ ID NO: 32102 - DNA, 472 bp, Homo sapiens
  misc_feature (1)...(472): n = A,T,C or G
attgagncctttgagacactcggccagngcggnggaattcgccaagtgtaacctgctggcagaaaagcaatatggcttttgtaaggcaacactcagtgagaagcttggtggggcagaggttgcagtgacctgcacggtgttccaaacacagcccgtgacctcacagccccaaccagaaggtgccaatgaagcagtccccacccccgtggtggacccagatgcacctccgtcccctccacttggcgcacctggactccctccagctggctcacccccagactcccatgtgttactggcagctcctccaggacaccagttgcaccgggcgcactacgacctgcgccacaccttcatgggtgtggtctcattggggtcaccctcaggagaagtgtcgcacccccggaaaacacgcacagtggtgcagcctaatgttggtgctgctgctgggccagtggttcctccatgtccgggg

SEQ ID NO: 32103 - DNA, 473 bp, Homo sapiens
  misc_feature (1)...(473): n = A,T,C or G
nattgaaaccttttgagaacactctgccgngtggtggaattcctaggctgggtgtggagctgcagcgtatccacaggccccaggatgcaggccctggtgctactcctctgcattggagccctcctcgggcacagcagctgccagaaccctgccagccccccggaggagggctccccagaccccgacagcacaggggcgctggtggaggaggaggatcctttcttcaaagtccccgtgaacaagctggcagcggctgtctccaacttcggctatgacctgtaccgggtgcgatccagcatgagccccacgaccaacgtgctcctgtctcctctcagtgtggccacggccctctcggccctctcgctgggagcggagcagcgaacagaatccatcattcaccgggctctctactatgacttgatcagcagcccagacatccatggtacctataaggagctccttgacacggtcac

SEQ ID NO: 32104 - DNA, 470 bp, Homo sapiens
  misc_feature (1)...(470): n = A,T,C or G
nttgagcctttgagacactcggcagngcggnggaattcttctccatcacgcagttccggcacataggcaggctgctcatggtgcacgggcggaacagctacaagaggtcggcggcactcggccagttcgtcatgcacaggggccttatcatctccaccatgcaggctgtgttttcctcagtcttctacttcgcatccgtccctttgtatcagggcttcctcatggaggggtatgccaccatatacaccatgttcccagtgttccccttagtgctggaccaggacgtgaagccagagatggcgatgctctacccggagctgtacaaggacctcaccaagggaagatccttgtccttcaaaaccttcctcatctgggttttaataagtatttaccaaggcggcatcctcatgtatggggccctggtgctcttcgagtctgagttcgtccacgtggtggccatctccttcacn

SEQ ID NO: 32105 - DNA, 472 bp, Homo sapiens
attgaaaccctgcagacactagtcagtgtggtggaattccgagaagaagttcttttgtaccattctctaactccgtgtgtgatgaaaacgcctccttttctgaccttcaaagtcccctgtagagaccatgcatgctctaagccttagggagtgagaccaacacccatccctgcccagccaacagtggccggggcttgtcttatgtttccatctgttttcttcgtggcattcaatttcatttttttccttttcattttcatgttattttcattattggcaaagaaaatcaaaatgtttatagccaaataacaaatgtgccatgtaaaagtaagtctggacttaagagtttaaaatttttaaacatcagtttccaagtttatatcatattaatacatttcagtggataatttatttaaaaaaaaaaactatgcctaaatatcccttatttgtaatattcagtatcaaattagag

SEQ ID NO: 32106 - DNA, 469 bp, Homo sapiens
  misc_feature (1)...(469): n = A,T,C or G
natgagaccatgagaacngtcgnggaantcaactgcgatgatccagaaactgaggaagcagctctggtggctatagactacatcaatcaaaaccttccttggggatacaaacacaccttgaaccagattgatgaagtaaaggtgtggcctcagcagccctccggagagctgtttgagattgaaatagacaccctggaaaccacctgccatgtgctggaccccacccctgtggcaagatgcagcgtgaggcagctgaaggagcatgctgtcgaaggagactgtgatttccagctgttgaaactagatggcaagttttccgtggtatacgcaaaatgtgattccagtccagactcatccgaggacgtgcgcaaggtgtgccaagactgccccctgctggccccgctgaacgacaccagggtggtgcacgccgcgaaagctgccctggccgccttcaacgctcagaacaacg

SEQ ID NO: 32107 - DNA, 470 bp, Homo sapiens
  misc_feature (1)...(470): n = A,T,C or G
attgagnncatgatgaccctcggcagngcggggaattccacgtggagaacctacccccgcacatcatccgcctggtgtacaaggaggtgacgacactgaccgcagacccacccgatggcatcaaggtctttcccaacgaggaggacctcaccgacctccaggtcaccatcgagggccctgaggggaccccatatgctggaggtctgttccgcatgaaactcctgctggggaaggacttccctgcctccccacccaagggctacttcctgaccaagatcttccacccgaacgtgggcgccaatggcgagatctgcgtcaacgtgctcaagagggactggacggctgagctgggcatccgacacgtactgctgaccatcaagtgcctgctgatccaccctaaccccgagtctgcactcaacgaggaggcgggccgcctgctcttggagaactacgaggagtatgcagctcgg

SEQ ID NO: 32108 - DNA, 468 bp, Homo sapiens
  misc_feature (1)...(468): n = A,T,C or G
nctgagacctgagaccgtcggggaanccggnggcagcttttttatcagctgtccccaaaagaggcccttctcccagtcgccacggaccaaagctcctcctgggagctccagcctgtctgttcaatgtttgccttgcgccttttcctggggaggccacccccggcaccatctcaggcctcagaaggacgacctcactgaaacagcccttaggttgggaaagaagcaagccctccgcgccccgtccaagtctctcaactgggcacgagcacacacagacgcccaggccctgtccctgcgccagaatggccgctcgcgtttccaggcacgatgcccctttccatgagtgcacagagccctgggctgagctgggggccgagctccacgctctctgagcagctctgagcggcacgccaaagaaggtctttcagatgggctctgggatgtggaaccatggcgtccagccctacg

SEQ ID NO: 32109 - DNA, 493 bp, Homo sapiens
  misc_feature (1)...(493): n = A,T,C or G
ngaggntcnnnnnnttactgaaatcgctcagcgtggtgcaattcccgccgtgcgccacggctccaatccctatatgagtgagcagtagaatcacataggaataaaaagccatagagaacagcgaggcctggggctgctcttgcaggcacttcttccaccccaaccctcccctcctccctgagggtgtggaggggccctgggccagggctggcaggactttcccctgggaagggtttcccttccccacctgggctctgggcagcctagcttgcagacagttcatgacctgggggcctggctcacacagggcaggctggagattgggagggaggtaaacgtggtaagcgggctctggggaccagggaggtttaggaaaaggggagcttgcaccccactgggatgcgcaggcaccgcttcctttccttctgtgctggcatggagttcctgctgactaaggtcacagtctctggggttatggtgatcctcgcatgat

SEQ ID NO: 32110 - DNA, 476 bp, Homo sapiens
  misc_feature (1)...(476): n = A,T,C or G
nattgaaaaccatgagatcactcggccagngcggnggaattctggaaagagtctcgcacactgtgtgatcatcgtttgagcccaaagtgctaaaatacaggtgtaggtgtttgagaagcgctgtagttgattatggacgaaatgcctaatttaaggagcagaggcggagtggaaaatgaaaaaagcttcaccgcagtggagacttgttaacagccctggggagaaaggggcttaacagagtctggaaatcgtgaaagagcttgaccgatgaaatgggcctggctgtcgtatcggtaatttggtgaatgttgcttaagatcagcctggaaaggtagttagtcagatccgaagtgacatatttgcactgccaaaggaggctctggaggttaaagtatgtgttttaatttcgttgttgaggccatataatgcagagttgacggaccgaccttatgagtcaccttggagcggagtagtgg

SEQ ID NO: 32111 - DNA, 532 bp, Homo sapiens
  misc_feature (1)...(532): n = A,T,C or G
cgagcggannannnagaagcctcgatcaccntccgagngttcgaatcaccgctccgagaggngcaattccgctcatactacatgttccagcgcagcgcagatggctccccagccctgaaacagatcgaaatcaacaccatctctgccagctttgggggcctggcctcccggaccccagctgtgcaccgacatgttctcagtgtcctgagtaagaccaaagaagctggcaagatcctctctaataatcccagcaagggactggccctgggaattgccaaagcctgggagctctacggctcacccaatgctctggtgctactgattgctcaagagaaggaaagaaacatatttgaccagcgtgccatagagaatgagctactggccaggaacatccatgtgatccgacgaacatttgaagatatctctgaaaaggggtctctggaccaagaccgaaggctgtttgtggatggccaggaaattgctgtggtttacttccgggatggctacatgcctcgtcagtacagtctacagg

SEQ ID NO: 32112 - DNA, 524 bp, Homo sapiens
  misc_feature (1)...(524): n = A,T,C or G
gagaganannnagaaatttgacaccattagngggtcgattcacaatccaagtggtgcaattcgaggttgtgtccaccatggcctggactcctctcctcctcctgttcctctctcactgcacaggttccctctcgcaggctgtgctgactcagccgtcttccctctctgcatctcctggagcatcagccagtctcacctgcaccttacgcagtggcatcaatgttggtacctacaggatatactggtaccagcagaagccagggagtcctccccagtatctcctgaggtacaaatcagactcagataagcagcagggctctggagtccccagccgcttctctggatccaaagatgcttcggccaatgcagggattttactcatctctgggctccagtctgaggatgaggctgactattactgtatgatttggcacagcagcgcttatgtgttcggcggagggaccaagctgaccgtcctaggtcagcccaaggctgccccctcggtcactctgttcccgccctcn

SEQ ID NO: 32113 - DNA, 524 bp, Homo sapiens
  misc_feature (1)...(524): n = A,T,C or G
tgtgcggggnnnnaggggnctcgancatcctccgtgtgttggaattcctatagannagannaagatagaaaatgtgtgcaaaacccacaaaactataaagaatagtcaagcagtttgaaaagaaccaaatggaagttctaaaaggaaagttttaatttagttcaaattttagttgaattttaatttcaactaaattaaaaacttagtatgcatgtttaacagaagattataaataaccaaagcgagacttcatgagctaaaagataaatatgaatacagtatacagaatgctgcctggaaagacatagatttggaaaacctggaaaaagggttaagagacataaaggctagaataggaaaatccaacatgagcctaattagagtgccagaaggagaagagatggaatggagcagaggaaatatttgaagagataatggctatgaaatttctaaactaatgaaagtcacataattgagaaattcatataaatttatataattgagaacctcatgcagaaaaaaat

SEQ ID NO: 32114 - DNA, 529 bp, Homo sapiens
  misc_feature (1)...(529): n = A,T,C or G
tgtgcggggnnnnagaaaccttgatcccattcgngnggtcgaaccactatccgtgtggtggaattccacccagctcgagggaggggggccggaagcttctggaagttggctgcccctaagcaggggccactctagtccacaaggccaagttgggagaggcagacgaggggactctgcggctcaagtcacgggccaggagcccgcagctgccgggctggaaaggtcagagccggctctgcgtctggctgcgccggcaagaagccacaattacgcaggcaaaagagcccggggattagccccagcacctgggaccctgaatggtgagaaggcacctagggggtgttggaacacattctgagttcagagcctggtcagggagaaaaaaccaaacggagatcaggaaggggaaggggccttcgagggctttcccatcccaacttcccaggatgcctgaccccagagctcccggatttgatccacgcctcgtgacacacacaacccctgggaggaaggagcccaggccccttgg

SEQ ID NO: 32115 - DNA, 483 bp, Homo sapiens
  misc_feature (1)...(483): n = A,T,C or G
tggggttcnnnnnaatcgaganccaatcgagangcgtagcaagngnggnggaataccccggccgccgctggtcttcgctggacaccatgaatcacactgtccaaaccttcttctctcctgtcaacagcggccagccccccgactatgagatgctcaaggaggagcacgaggtggctgtgctgggggcgccccacaaccctgctcccccgacgtccaccgtgatccacatccgcagcgagacctccgtgcccgaccatgtcgtctggtccctgttcaacaccctcttcatgaacccctgctgcctgggcttcatagcattcgcctactccgtgaaggtgcgtatggccccagggaatgctcagagggtgccgctgagcctggagctccacctgcccacatgctgcctggggtggggacttgtgtgtccctgtgactgtgagtttgtgtgcacctctgtcccgtgtgtgcccacgtcagtggctt

SEQ ID NO: 32116 - DNA, 477 bp, Homo sapiens
  misc_feature (1)...(477): n = A,T,C or G
aggcggnnnaactgatgatatcctggcggggcaattaaccaacctccttccttccactaaaataattgtgcaaactggtgtccttccaatctttttgatacctatataaaagtttatttccatataaatattccacttcagctttctaaaaaacttaatataatatagagatatttctatatcaatacatataaatttaatttagcaatggcaaaaagttagaattcatctaaagatttctcagtaaaggcaagcccaaatacactatgaaatgtccattataggtagctattgagaaaaagataaattggatagtgtggtgtcctaccatgaggagattacaaagacattgttgagtagaaaaggcaggttgcagaactggacacaggacaaggagtacctttcaaacattatatggccaagcacggggggctatgccttgaatcccagcactttgggaggccgaggtgggccgan

SEQ ID NO: 32117 - DNA, 465 bp, Homo sapiens
  misc_feature (1)...(465): n = A,T,C or G
aacgagagcccattgaagncctgtggaanncagaacccggactggagggggccatggggcgccggaccctggccctgccctgggtgctgctgaccctgcgtgtcactgcagggaccccggaggtgtgagtacaagttcggatggaggccaccgagctctcgtccttcaccatccgttgtgggttcctggagtctggctccatctccctggtgactgtgagcagggggggccccgatggtgctggggggaccacgctggctgtgttgcacccggaacttggcatccagcaatgggcccctgctcgccaggcccgctgggaaacccagagcagcatctctctcatcctggaaggctctggggccagcagcccctgcgccaacaccaccttttgctgcaagtttgcgtccttccctgagggctcctgggaggcctgtgggagcctcccgcccagctcagacccaggtg

SEQ ID NO: 32118 - DNA, 486 bp, Homo sapiens
  misc_feature (1)...(486): n = A,T,C or G
gcagccccattgagaccctanatagatggccgtaaggccacactggactgttccatgagcaagcaaacttgtaatgtgcaaagtcactaagatgagggggttgtttttacaatggctggcttgcctaatacactcggccttccccagtgtcctgaaagtctaaaggagttagccaacctttgtccaaggcatgtctcatcctactccagactgcgttccttctgtgcagactggtaaaacaatgctcctcaggcagatactgcttggtgataagatgggcccttgtgaaatgagaagaggaagtgcctttccagctgatgcagccctatgccagaccacatggcctgttacaaggaatgctaaggctgcctggatctcagctcccacttttcttctttgctaagtaccctgataaagtcaacccagtgcagaagtattttggtgttcctgtaaccaccagcatggccatgctggtgtgtaccagct

SEQ ID NO: 32119 - DNA, 488 bp, Homo sapiens
  misc_feature (1)...(488): n = A,T,C or G
ggttcgagacccttggnannngnnattgtagatcactatcagtgtggtggaattcggagctctcagaggctaagaaggtggagaccggagaagctgtgaggttgtgagtaaccccgtgggtctaagcgtgttggctgtgaggaacaaagctagggaataatctgctgggaagcgcgaggcatcacttccctaactgtaggagctcaaactcctgtgttcttccagtagacctgggagcgaagagaagcaagacattgctgtggaggcgaagtctccgtattaagatcttgctggttttttaagttttcttggcacatactagggcaaattcagactcttgtcgtgatacaagggtcgttggcgtgattttgctgcgactagagcaatttacgttcttgcaaatctgtcgcaaatttttgcaaatgtctgggctgctgatgctctgactcagcttctacagcagtggttcgcaattggctgcatatcag

SEQ ID NO: 32120 - DNA, 489 bp, Homo sapiens
  misc_feature (1)...(489): n = A,T,C or G
tgagtcccaggggnccnaaatgagacccatcgagnacactagaccangnggnggaattctatagaatgaacagtccctccccactctggctctgtgtgtgtgtgtgtgtgtgtgcgtgtctgtttatgtgcttgtgcgcactcacgtgcatgtgtgtatggtataaaagcctgttacattcaaacctcacccaagtcctgagcagtaaattctatgattccatttctccagcagagaaccctggaaagtaaacaatcttgctttctgtcacagcggaacccactggaagcaacagcctgacgctctcttttagatgccgncaaccttaaatgatgaaattcagaaaatatgatgaagtatattagatatatgattaagagtttattagatcccaaagctgggaataaccggatacccagggaacacagactacagaaaaatggggtcaatgctcccaagttagaagttaaggtcttgcttacataggtn

SEQ ID NO: 32121 - DNA, 485 bp, Homo sapiens
  misc_feature (1)...(485): n = A,T,C or G
ggagcgtnnnnnaaactgttaccttagtcatcggcgaggngcaattcctttcttttctttctttctttctttctttctttttctttctttctttctctctttctgtttctttctttccttctttttctagtttcctaatgtggatgattagggtattgatttgagatatgctttttaaacacacatcctctaagtactgctaagtacatctcattcgttttggtaagttttaaaaattcatctgaaactagtttctaatttcctttgcctgatccaataaaagctggtgggcccctttgcaggggcatgttgttgccagtgtttgaggtttgctccaaccccaggagggctcttagctgtctcttattctgattatctgntaaacgtctaacaggggaatctcagagcctactgtggctcgggaggctgcccgattcatgaatcanatanacaaacatttaataggtctgtcatttcacctggtg

SEQ ID NO: 32122 - DNA, 495 bp, Homo sapiens
  misc_feature (1)...(495): n = A,T,C or G
agtttttccaggaccnnnnnnnattgagaccctagcagngcttgaaatccctcccatctctatcttaaaattaaaattaaaaaaataataatcccacaaggttggtggtatctcctgaaattctcctgtggtggggtcttctttccaaagagactgacagtcggtgtcccgtcagcttggtgaggaggtggggcagagccatctaaggataaaatgaaagctgccagcctgtgactaacagacttgcctgagactgtcgtgggaatattttttaaagttctacaactgaactccagtaagatcacagactgtttgctgggctcgggtccagcacgggaggggctgtgttggctggaagctgggcagcgccgcgctaacgtggggcttgtgttcctctcgcgtaagggaattggagaagcagagggaaagcgccgccaccgatgtgctgcagaagaagcaagaggcggagtccgctgtgagtgcttgcccaccgtn

SEQ ID NO: 32123 - DNA, 530 bp, Homo sapiens
  misc_feature (1)...(530): n = A,T,C or G
ggatattnnnnnnnggggnnnnnngnnngnatcgaccaccntncagnggttgaaacactatccgtgtnggggaattccagacatactcatattcaaaagtaaacaaaataacatttgaaagccgaatttttgtttgtactgttttctcctttagcaagaataatagaaaatgactataaataggagattgtataatatagtataatagtcttttgagcagttacctattttgtagaaattttttaaggtcttgggattttatttttctttacaaggaatattttgggttactttaggtgcagaaaagactgactcattttatcattcttctggtgggctggagttatatggagaaccaagacatactacgtatcgctcaagatcagatctggactatattaggtcccctttaccatttcagaataggtaagaatatgagaaaacctgcctggaattgttaaatgtattaatatttaacagagataaatggacatttttagggctttgacttctttgcattgagatagaca

SEQ ID NO: 32124 - DNA, 517 bp, Homo sapiens
  misc_feature (1)...(517): n = A,T,C or G
ggtttatannnacggggnnnnnnnnttcgaacacattcangcctcgaaaccnctccggaggacgcacnanaacctgctacagttcattgctgccgagaagcgaggctccaacctcgaagtagagctgtggctcatcacggccttccatgacaagggctccctcacggattacctcaaggggaacatcatcacatggaacgaactgtgtcatgtagcagagacgatgtcacgaggcctctcatacctgcatgaggatgtgccctggtgccgtggcgagggccacaagccgtctattgcccacagggactttaaaagtaagaatgtattgctgaagagcgacctcacagccgtgctggctgactttggcttggctgttcgatttgagccagggaaacctccaggggacacccacggacaggtaggcacgagacggtacatggctcctgaggtgctcgagggagccatcaacttccagagagatgccttcctgcgcattgacatgtatgccatggngttg

SEQ ID NO: 32125 - DNA, 464 bp, Homo sapiens
  misc_feature (1)...(464): n = A,T,C or G
aggccnnnnnnnnnnaaacttgattctatagtcagcgtcgtggaattccggggcttgtggcacggtgagagtgtggccgtcaagatcttctcctcgagggatgaacagtcctggttccgggagactgagatctataacacagtgttgctcagacacgacaacatcctaggcttcatcgcctcagacatgacctcccgcaactcgagcacgcagctgtggctcatcacgcactaccacgagcacggctccctctacgactttctgcagagacagacgctggagccccatctggctctgaggctagctgtgtccgcggcatgcggcctggcgcacctgcacgtggagatcttcggtacacagggcaaaccagccattgcccaccgcgacttcaagagccgcaatgtgctggtcaagagcaacctgcagtgttgcatcgccgacctgggcctggctgtgatgcactc

SEQ ID NO: 32126 - DNA, 495 bp, Homo sapiens
  misc_feature (1)...(495): n = A,T,C or G
gggccgnggggncccgcctaatgacccctagntatcntcgnaagngcggnggaattccgggtccacgcgtgtgatcgtccgtgcgtctagcctttgcccacgcagctttcagtcatggcctccggtaacgcgcgcatcggaaagccagcccctgacttcaaggccacagcggtggttgatggcgccttcaaagaggtgaagctgtcggactacaaagggaagtacgtggtcctctttttctaccctctggacttcacttttgtgtgccccaccgagatcatcgcgttcagcaaccgtgcagaggacttccgcaagctgggctgtgaagtgctgggcgtctcggtggactctcagttcacccacctggcttggatcaacaccccccggaaagagggaggcttgggccccctgaacatccccctgcttgctgacgtgaccagacgcttgtctgaggattacggcgtgctgaaaacagatgagggcattgcctacagg

SEQ ID NO: 32127 - DNA, 503 bp, Homo sapiens
  misc_feature (1)...(503): n = A,T,C or G
actcgactagcactncgtgtggnggaattcgctgctgctgctgctgctgccgctgctgctgcacgaatcgtcgcagcccccagccttgcgcgtcgtcgctacctcctcggacagatgaaaaagagaaattcgaacccacagtcttcagggatacacttgtccaggggcttaatgaggctggtgatgaccttgaagctgtagccaaatttctggactctacaggctcaagattagattatcgtcgctatgcagacacactcttcgatatcctggtggctggcagtatgcttgcccctggaggaacgcgcatagatgatggtgacaagaccaagatgaccaaccactgtgtggtttcagcaaatgaagatcatgaaaccatccgaaactatgctcaggtcttcaataaactcatcaggagatataagtatttggagaaggcatttgaagatgagatgaaaagcttctcctcttccttaagccttttccgaaacagagcagacaan

SEQ ID NO: 32128 - DNA, 489 bp, Homo sapiens
  misc_feature (1)...(489): n = A,T,C or G
tgatggccnaggggncccnattcgagaccacattgaagagcggtggaattcgnctagtataactaagtataacttcacccaggtgaagacagacctgggtttaaatctcagctcttccacttattgtgtgatggtaggcaaggcactcaacctctctaagcctcattttccttgtctataagatggaacaagtaataacacgaatcatctcttaggactgatgtgaagattaactaaaagattgtctgtgaagggcctagtgcagtgtttggcacatggtagacacccagtaaataatggcaggagggttgggtgtggtgactcacgcctgtagtcccagcactttgggaggccaagatgagtggatcacttgaagttaggagttcaagaccagcctggtcaacatgacgaaaccccatctgtactaaaaatacaaaaattagccaggcatggtagcgagcgcctgtaatcccaggtacttgggaggct

SEQ ID NO: 32129 - DNA, 488 bp, Homo sapiens
  misc_feature (1)...(488): n = A,T,C or G
aggcgttntnnnaactgatagcgtcgcagtggngcaattcatgatttgaattgngcaaacgatgactgagaacaggcttggaaaaggttttctggggaggaggaggctggaggccaggacactgtttgttgtggaactaggagctctttgagacgagactccaagtagtaatcccagaccccaccttgctcatcccaacctgttccggtctccccatcagggacctccaggtgcatggattggtgctgcccctcatgctgcccagcttctactcagagctcttcacgctctacctgctgcttcatgagcgggaggacagcttctacagccagggcattgccaacttgagcctctttcctgatacccaactgctcgagttcctggatgtgcagaagcacttgtggcccctcaaggacctcacgctgacgagcaatcagaggtactccctggtcagggacaagtgtttcctgtcagccaccgagtgcctg

SEQ ID NO: 32130 - DNA, 479 bp, Homo sapiens
  misc_feature (1)...(479): n = A,T,C or G
gcggggtnnnnnnnntttcgtagtctctagtccgtgtggtggaattcctcatttggcctgtccggtgggaacgggctgctggctgcatttggtcctcaggggattgtgcagcaaatggctcaggtctcccagcaccctgtgcaggtctcttcccagacaccacaatgaccctcaggttttgttcttccaggttgatccaatgctcaccccagaagagcgtcacctgaacaagatgcagaaccatggctatgagaaccccacctacaaatacctggagcagatgcagatttaggtggcagggagcgcggcagccctggcggagggatgcaggtgggccggaagatcccacgattccgatcgactgccaagcagcagccgctgccaggggctgcgtctgacatcctgacctcctggactgtaggactatataaagtactactgtagaactgcaatttccattcttttaaatgggtgaaaaa

SEQ ID NO: 32131 - DNA, 502 bp, Homo sapiens
  misc_feature (1)...(502): n = A,T,C or G
ngggaaccttgatcctatccatgtgttggaattcctgttattctcaccctggtgcttgttaaagtcttgggagataataagcctgttggattgtgcgggtcccagatgtggatgcggattagccttctcctgagtgcctactgtgtgcctggcactgccatgtatgatttcatttacttttcagacttccctccagagtagctattactgctccatgttatggacaagaaaactggggctcagagaggggaagtgaccagctcaaggccacccagcaggacagtgacagagcttggctcacatgggaacccaggtttcctggctgtagaggaaggagaagttactgacgtgtgtgagctccatgctccacagtttgcagggggcggtcacccatcttttccccagtccctgcagcacggngcttgttgtcctgacactccagctgtgacctctgcgacagcatgcccttgtctgcctgtgtcctgctgcatccccgcactta

SEQ ID NO: 32132 - DNA, 480 bp, Homo sapiens
  misc_feature (1)...(480): n = A,T,C or G
agggagcgcggggnccnnatacggagatcagggtacnttcggaaaannctngnaanatnnnggccagaaaacgcttcgcggcctagggctcacttggcgctgagaacgtgggtcctttcgtgtgatcgtccgngcgtctagggggttgcccacgcagctttcagggatggcctccggtaacgcgcgcatcggaaagccagcccctgacttcaaggccacagcggtggttgatggcgccttcaaagaggtgaagctgtcggactacaaagggatagacgtggtcctctttttctaccctctggacttcacttttgtgtgccccaccgagatcatcgcgttcagcaaccgtgcagaggactttcgcaagctgggctgtgaagtgctgggcgtctcggaggactctcaggtcacccacctggcttggatcaacacccccccgaaagagggaggcttgtgccccctgaaacatcccctgcttgg

SEQ ID NO: 32133 - DNA, 473 bp, Homo sapiens
  misc_feature (1)...(473): n = A,T,C or G
agagggcggnnnncnnnancctgcnangctgcgtacngtcgnggaanccttngagcgcgcgcgccgccgccgttgccgccgggctgagagaagagcttgcggggtttttggttgatggccccgactgaagggctggaggcggtgtatgccgctgttcttgctgtcgctcccgacacctccgtccgcttctggtcatgagaggagacagaggcctgaagcaaagacatctgggtcagagaaaaagtatttaagggccatgcaagccaatcgtagccaactgcacagtcctccaggaactggaagcagtgaggatgcctcaacccctcagtgtgtccacacaagattgacaggagagggttcttgccctcattctggagatgttcatatccagataaactccatacctaaagaatgtgcagaaaatgcaagctccagaaatataaggtcaggtgtccatagctgtgcccatggat

SEQ ID NO: 32134 - DNA, 473 bp, Homo sapiens
  misc_feature (1)...(473): n = A,T,C or G
gggggcccccnncccnnaactgagacctgaggacgntcggggaantccccacggcccttcaggatgaaagctgcggtgctgaccttggccgtgctcttcctgacggggagccaggctcggcatttctggcagcaagatgaacccccccagagcccctgggatcgagtgaaggacctggccactgtgtacgtggatgtgctcaaagacagcggcagagactatgtgtcccagtttgaaggctccgccttgggaaaacagctaaacctaaagctccttgacaactgggacagcgtgacctccaccttcagcaagctgcgcgaacagctcggccctgtgacccaggagttctgggataacctggaaaaggagacagagggcctgaggcaggagatgagcaaggatctggaggaggtgaaggccaaggtgcagccctacctggacgacttccaaaagaagtggcaggaggagatgga

SEQ ID NO: 32135 - DNA, 471 bp, Homo sapiens
  misc_feature (1)...(471): n = A,T,C or G
nccggagggncgcccnnaaactgaatcctgaggaacngtcgnggaancccaagacgtaccagcttcagggtagtatggaaagatccctggtctcgcagtcagaagacccgagttcaagatgtgggatctctgaacatgggccttcagttctttcttccgagagctgtgctgatggccaagtaagatgagggctatgaaaagcctctgtagactgcaaaatgagcatgggagaggctgtcattattctggaattgggagacagatttacagagggcctgaacacaggattgaaggtggtgaatttccattcggctgcctgggcgtctgcatgtataaaaagcaaacctaagtggtttttttctcctccaagtgaagatgaaagtgttaaaaatagcaaggaggtgaaagtgttcaaaatagcaaagtggcctgtctcctcttctcctaagcagactgtccaaacagacgccc

SEQ ID NO: 32136 - DNA, 472 bp, Homo sapiens
  misc_feature (1)...(472): n = A,T,C or G
ggagagccnnnccccnnaaactgagaacatgagacggtcgggaancctctaacttnctggcggtcattttaaataataaattgtaaagtatgaaatgagtgctgtagttgcctgcatacaaggtcctcatcacctctcgcctgggagggagacgttttctttctttgttgagcgagctcaaagtgtgaggcggagaaaacctatgggttgggggcggctggagaagggatccacggaaacccaagcgccacatcatgcgtgtctgactgcccacggaagaactagaagcagttcaccagtggattttctggggaacgattcatggaacacagcgtctggcgtccagctttgtgggtgagggcatggcggnggatccggtggccctgccctgcctccggtgccggtggatgggggagggactggcctctgactgcggggttgcaccatggcggcggtcggtgtgcccttggct

SEQ ID NO: 32137 - DNA, 499 bp, Homo sapiens
  misc_feature (1)...(499): n = A,T,C or G
catcgagccccaattatcaccgtccgcgnggngcaanncgccgggaagcccaaagaccccaccttcatacctgctccaattcaggccaagacatcctctgtggatgataaggccctacaggaccagctggtgctagtcgctgcaaaacttgacaccgaagacaagttgagggccgcaatggtcgggatgctggccaacttcttgggcttccgtatatatggcatgcacagtgagctatggggcgtggtccatggggccaccgtcctctccccaacggctgtctttggcaccctggcctctctctatctgggagccttggaccacacagctgacaggctacaggcaatcctgggtgttccttggaaggacaagaactgcacctcccggctggatgcgcacaaagtcctgtctgccctgcaggctgtacagggcctgctagtggcccaaggcagggctgatagccaagcccagctgctgctgtccatggtggtgggcgtgt

SEQ ID NO: 32138 - DNA, 503 bp, Homo sapiens
  misc_feature (1)...(503): n = A,T,C or G
naattgaaccccaatcgatgcactgctccgcgnggngcaattccttctcactttgaattagtttgaattaatttacaaactgcaatatattttaaaggagcttattgtagaaaataagttgataaaaaaataaggatatatctttagggatttgtctttagggacttgttaccaagcatgtctattttccctcctgcagcttctccaaacaggctggtgtacagggagcaacaccggagctggtgcacgctggggtttgtgcagagcatcgctctcacgctgcaggtgtgcggcgccctcagctccctgcagtggatcacgctgctcatgaaggtcgtggaagggcacgcacccttcactgccacctcgctgcagaggcaggtaatgtgctgccaggcaaaaccagttccctgagagaggcctccatgtactgaagttccctgccctcagagtcaggggcctttattcantaacgagtgcagaaagggtctagaagtgacagg

SEQ ID NO: 32139 - DNA, 494 bp, Homo sapiens
  misc_feature (1)...(494): n = A,T,C or G
nattgaggcctaattatgccctccgaangnccanncnctnctcggcttgcaatggaccccaactgctgctgcgccgctggtgtctcctgcacctgcgctggttcctgcaagtgcaaagagtgcaaatgcacctcctgcaagaagagctgctgctcctgctgccccgtgggctgtagcaagtgtgcccagggctgtgattgcaaaggggcgtcagagaagtgcagctgctgcgactgatgccaggacaacctttctcccagatgtaaacagagagacatgtacaaacctggattttttttttataccaccttgacccatttgctacattccttttcctgtgaaatatgtgagtgataattaaacactttagacctgaaaaaaaaaaaaaggaaaaaaaaattcttgaaaaaagactacatgtctnnnnnnntctaaaaaaggccccccccaggaaagagggccccataaaaccccaaatagttctttttttgttt

SEQ ID NO: 32140 - DNA, 481 bp, Homo sapiens
  misc_feature (1)...(481): n = A,T,C or G
cgcgcgcatcgagatccatagaagagcggtggaattcctcagacagaaaggctggatgggaaggaagtcacatcctaaaagtccaggagggggccaggcgcagtggctcacgcctgtagtcccagcactttgggagaccggggtgggcggatcacctgaggtcaggagtttgagaccagcctggccaacatggtggaaccctgtttctactaaatatacaaaaaaaaaaaaaaaatattgggatggggtttcgggggcctggggggccacttgctcggggggttggggcggaaaatttgttggacccagaaancnnnnnntnnnnnnncncaaaattcnnccnntnnattccattcttcnataaaaancaaaactccttcttaaaattaaaccaatcccagggggcactttatttctttttttcattcatntaagggggccggattatgttttaagaggttgatccccttcggtggggtgg

SEQ ID NO: 32141 - DNA, 502 bp, Homo sapiens
  misc_feature (1)...(502): n = A,T,C or G
natttgagnncccaattgatgcaccgctccgagnggngcaattcctgnggactgggcggcggctcaaaggtcaaggggctgctccaagggcaccgccgtgggaactgcgcagccggggcccctggacgccctcctcttctctgagccactcaatcccctctactaaatcggctttgggagcaaggtccagctgtctgccgaggcgaggagccgccacacacgtaatctccctgcagggagctgagctggggcagtggctgttcctctgtccttgggaattggcagtggcccccccggggaggggtttgttaagctgtcaggtttggcccctgacttaattcgtagcagggcaggctgccgtcttttggctttgaagggtccgtttgctgtacctccagggtgaattctgtggtcagctcacaccatgtcactcggcttttttcgcatggcggngaccagtagtgctgtctacctggctgacaaatgattagctgtgttctct

SEQ ID NO: 32142 - DNA, 494 bp, Homo sapiens
  misc_feature (1)...(494): n = A,T,C or G
natcgagcccgatcgatggctctacgccggcnctagtgacttcttgaaactgcatcttcacccttgtttcttaaacaaaactctctatttgatatcagcatgagtctgagattcttccattcccgaatccagagaggaacttcgtccttccagaagagatcattcaggaggtccgagaaggtgaggctcgggaaaggttgggcttgcgattcagaaaaggccagaccctggccaagggcagggaggtgagggtgaggaccccgggcctccagggaggtgtgagggtccagcgcagaccccgccctacctgtgcttgggtggtcttggaacctccgggattggagaggactttgtttgagagcagtggctggacggaagctgaggcctgtgtgggcagcaagcgtcggagcagtccctggcctgaccatcccccagcgtcggccaccaccgtgggttttcggtgagcgtcagctgtctcctccacaggaaaagtg

SEQ ID NO: 32143 - DNA, 484 bp, Homo sapiens
  misc_feature (1)...(484): n = A,T,C or G
agcngntnnntttgaatgagaccatatgcangncgggaattcctacgatgaaatcctggagggcctgaatttcaacctcacggagattccggaggctcagatccatgaaggcttccaggaactcctccgtaccctcaaccagccagacagccagctccagctgaccaccggcaatggcctgttcctcagcgagggcctgaagctagtggataagtttttggaggatgttaaaaagttgtaccactcagaagccttcactgtcaacttcggggacaccgaagaggccaagaaacagatcaacgattacgtggagaagggtactcaagggaaaattgtggatttggtcaaggagcttgacagagacacagtttttgctctggtgaattacatcttctttaaaggcaaatgggagagaccctttgaagtcaaggacaccgaggaagaggacttccacgtggaccaggtgaccaccgtgaaggtgccn

SEQ ID NO: 32144 - DNA, 525 bp, Homo sapiens
  misc_feature (1)...(525): n = A,T,C or G
ggggagggnccgggcgggnccnggnaattgaacnccaactgagcaccgctccgngnggngcaantcgncatcaatcgggcacagatcattaatgacgccttcaacctggccagtgcccataaggtccctgtcactctggcgctgaacaacaccctcttcctgattgaagagagacagtacatgccctgggaggccgccctgagcagcctgagctacttcaagctcatgtttgaccgctccgaggtctatggccccatgaagaactacctgaagaagcaggtcacacccctcttcattcacttcagaaataataccaacaactggagggagatcccagaaaacctgatggaccagtacagcgaggttaatgccatcagcaccgcctgctccaacggagttccagagtgtgaggagatggtctctggccttttcaagcagtggatggagaaccccaataataacccgatccaccccaacctggcggccaccgtctactgcaacgctatcgcccagggcggngaggag

SEQ ID NO: 32145 - DNA, 488 bp, Homo sapiens
  misc_feature (1)...(488): n = A,T,C or G
tggcaggggnnnnnnnnnttttgagtccctattcagtgtggtgtagttcctcgtcgcagcacgagcaggacttatacgacttcaaggcaatcaacatccggcgcaaactggtgtcgctggagaagtaccgcggatcggtgtccctggtggtgaatgtggtcagcgagtgcggcttcacagaccatcactaccgatccctgcagcagctgcagcgagacctgggcccccaccacttcaacgtgctcgccttcccctgcaaccagtttggccaacaggagcctgacagcaacaaggagattgagagctttgcccgccgcacctacagtgtctcattccccatgtttagcaagattgcagtcaccggtactggtgcccatcctgccttcaagtacctggcccagacttctgggaaggagcccacctggaacttctggaagtacctagtagccccagatggaaaggtggtaggggcttgggacccaactgtg

SEQ ID NO: 32146 - DNA, 495 bp, Homo sapiens
  misc_feature (1)...(495): n = A,T,C or G
nattgagcacgatcgaagggctgtattccgctggagctgggagggaagagtccctgctacgtggacaagaactgtgacctggacgtggcctgccgacgcatcgcctgggggaaattcatgaacagtggccagacctgcgtggcccctgactacatcctctgtgacccctcgatccagaaccaaattgtggagaagctcaagaagtcactgaaagagttctacggggaagatgctaagaaatcccgggactatggaagaatcattagtgcccggcacttccagagggtgatgggcctgattgagggccagaaggtggcttatgggggcaccgaggatgccgccactcgctacatagcccccaccatcctcacggacgtggacccccagtccccggtgatgcaagaggagatcttcgggcctgtgctgcccatcgtgtgcgtgcgcagcctggaggaggccatccagttcatcaaccagcgtgagaagcccctggcc

SEQ ID NO: 32147 - DNA, 494 bp, Homo sapiens
  misc_feature (1)...(494): n = A,T,C or G
ccgccggccccnnnnaanagtttgattcccctngnannnncntttganaacactatccatgtgctggaattcgccagcgccctgcacactagcaccatgcccatcacggttcagctctcggccgccgcggttaagaaccccggcgtatggctcaacaccacgcaggccctgtgcaaagccttcatggtgaccgacgaggacatcaggaagcaggaagagctggtgcagcaggtgcggaagcggctggaggaggcgctgatggccgacatgctggcgcacgtggaggagctggcccgtgacggggaggcgccgctggacaaggcctgcgctgaggacgacgacgaggaagacgaggaggaggaggaggaggagcccgacccggacccggagatggagcacgtctagggcagaggccctgccgagagcccgtgctgcctgctggagccgcctgcagacgcggtcctcggccccacgtgaaccaggctcggcggcga

SEQ ID NO: 32148 - DNA, 486 bp, Homo sapiens
  misc_feature (1)...(486): n = A,T,C or G
agcgcctcggacccttgaagaccgctggaattctgcgcagntgcctttccgtcaattcctgtcctgggcgtacgtcaagatggcggcgtctgtattaaacaccgtgctgaggcggcttcctatgctatctctcttgcgaggttctcacagagttcaggttcccctccagactctttgcaccaaagctccctctgaggaagattctttgtcctcagttcccatttctccttataaggatgagccctggaaatatctggaatcagaagaataccacgagcgatatggttctcgccccgtctgggctgactaccgccgcaaccacaagggtggtgtacccccacagcggactcggaagacatgtattcggcggaataaagctggtgggaatccctgccccatctgtcgagatcacaagttgcatgttgactttaggaacgtgaagctcttggagcaatttgtctgcgcccacacgggtatcatcttctt

SEQ ID NO: 32149 - DNA, 479 bp, Homo sapiens
  misc_feature (1)...(479): n = A,T,C or G
aggctacacannnagtttgataccctctcagnggcggtgattacctgaggacccccacggaccttcaagatgaaagctgcggtgctgaccttggccgtgctcttcctgacggggagccattctcggcatttctggcagcaagatgaacccccccagagcccctgggatcgagtgaaggacctggccactgtgtacgtggatgtgctcaaagacagcggcagagactatgtgtcccagtttgaaggctccgccttgggaaaacagctaaacctaaagctccttgacaactgggacagcgtgacctccaccttcaacaagctgcgcgaacagctcggccctgtgacccaggagttctgggataacctggaaaaggagacagagggcctgaggcaagagatgagcaaggatctggaggaggtgaaggccaaggtgcaaccctacctggacgacttccagaagaagtggcaggaggagatgga

SEQ ID NO: 32150 - DNA, 493 bp, Homo sapiens
  misc_feature (1)...(493): n = A,T,C or G
natcgagcacgatcgagnggcgcaattcaggaactggagcagcacactgcatgactcaggcgaccagcctgacatctcaaagtggtacgtaaatggggtgaattattttactgacctgtggaatgtgatggacacgctggggcttttttacttcatagcaggaattgtatttcggctccactcttctaataaaagctctttgtattctggacgagtcattttctgtctggactacattattttcactctaagattgatccacatttttactgtaagcagaaacttaggacccaagattataatgctgcagaggatgctgatcgatgtgttcttcttcctgttcctctttgcggngtggatggtggcctttggcgtggccaggcaagggatccttatgcagaatgagcagcgctggaggtggatattccgttcggtcatctacgagccctacctggccatgttcggccaggtgcccagtgacgtggatggtacc

SEQ ID NO: 32151 - DNA, 501 bp, Homo sapiens
  misc_feature (1)...(501): n = A,T,C or G
natggagncccaccgtagcagtcatccgagnggngcaanncggncctcacagacccacacacgccctacgaggaggagcagcggcagtcagtgcagtctgaccagggctacatctccaggagctccccgcagccccccgagggactcacggaaatggaggaagaggaggaagaggagcaggacccagggaagccggccctgccactctctcccgaggacctggagagcctgaggagcctccagcggcagctgcttttccgccagctgcagaagaactcgggctgggacacgatggggtcagagtcagaggggcccagtgcatgagggcggctccccagggaccgcccagatcccagctttgagagaggagtgtgtgtgcacgtattcatctgtgtgtacatgtctgcatgtgtatatgttcgtgtgtgaaatgtaggctttaaaatgtaaatgtctggattttaatcccaggcatccctcctaacttttctttgtgcagcg

SEQ ID NO: 32152 - DNA, 492 bp, Homo sapiens
  misc_feature (1)...(492): n = A,T,C or G
tggcggaaaanannaagttgataccatttgcangngcngttgagntacactatccagtgtggtggaattcgcagccgatcacgtccagacagcttgttttgacattttaagtctggtgtttcttgccttgaaccaaaatttgaaattagacttaggaaacaactcagaattgctgtgccttccgactgggtggttctactctgggcagatgggtgaatgccaaaagaacaggtcctggcatgaggatgctggctctgaatttaaaatatacattggatcatgggccatgaagctgttcactgtgtagaaacagcccagtgttctgtaccctctgcctcagccgtgcccggcagcaacattgcctccatcgctcagagacacccgcttctccagggccaggcagggtagcatgtggggagatggagaaaggcctgaagccctgaacaatgggaaagatggccagctggggttagtgaggttcccaaaaaggct

SEQ ID NO: 32153 - DNA, 482 bp, Homo sapiens
  misc_feature (1)...(482): n = A,T,C or G
gtggggggnnnnnnnttttggtccctatccatgtggtttagttcgcgataagctggaccgcattctggccgttatccaaggctcccatcagaaggccctggtgatgtactccaacctcgacctgaagacccaggaggcctatgagatggccgtgagaggcctgatccggcccatgaacaagtccccgatgctgataactggcatccgatgcctctactttgcacctccggaattcctcttagaggtgcagtgcatgcatgagacgcanaaagagctgcggaagttggttcatgaaatcggcctggaactaaagaccactgctgtctgcacccaagtgcggcgcacgcgcgacggcttcttcacgctagacagtgccctcctgaggacccagtgggacctaaccaacatccaggatgctatccgggctgctacccctcaggtagctgcagagctggagaagagcttgagcccggngctggaca

SEQ ID NO: 32154 - DNA, 487 bp, Homo sapiens
  misc_feature (1)...(487): n = A,T,C or G
cggccggnnnaaactggaactgncaggctactgcangagcnggaattcctgtgccctgcgacgctgcgctgatgaccagccgccatcaatcctggacccccccagaccaggtgcagtttgagaagtgtggcaagagggtggatcggctggatcagcgttgttccaagctgcgcgtggctgggggccatccgggcaactcaccctggacagtcagcttgcggaattggcagggccagcatttctgcggggggtctctagtgaaggagcagtggatactgactgcccggcagtgcttctcctcctgccatatgcctctcacgggctatgaggtatggctgggcaccctgttccagaacccacaacatggagagccaggcctacagcgggtcccagtagccaagatgctgtgtgggccctcaggctctcagcttgtcctgctcaagctggagagatctgtgaccctgaaccagcgtgtggccctgatctg

SEQ ID NO: 32155 - DNA, 489 bp, Homo sapiens
  misc_feature (1)...(489): n = A,T,C or G
gaggggaananaannatttgatacccttnnannnnntttgtagtccctagtcagtgtggtggaattcacgccagccgttcacgcgttcggtcctccttggctgactcaccgccctcgccgccgcaccatggacgcccccaggcaggtggtcaactttgggcctggtcccgccaagctgccgcactcagtgttgttagagatacaaaaggaattattagactacaaaggagttggcattagtgttcttgaaatgagtcacaggtcatcagattttgccaagattattaacaatacagagaatcttgtgcgggaattgctagctgttccagacaactataaggtgatttttctgcaaggaggtgggtgcggccagttcagtgctgtccccttaaacctcattggcttgaaagcaggaaggtgtgctgactatgtggtgacaggagcttggtcagctaaggccgcagaagaagccaagaagtttgggactaa

SEQ ID NO: 32156 - DNA, 465 bp, Homo sapiens
  misc_feature (1)...(465): n = A,T,C or G
agccnnntnnnnnanccatggagtctatgaagagncgcggaattcatgaaaaacctaaaaatgcccaaataaacattcgcttacatattatatatcttgggcttctttttatgacagttcattcagggacccagtcagtaaacaggtagttaacttcgtgtaaccaagcaagggttttgtttatcttttttaaagtagaaaaaagtgaggctcaaactctctctttctccttgtcataactattggtttacagtctttatttgtttaaaagtaaagcacattgtatgtatttatttggcaatacatgaggccattaaaaccctgagcctaaggtaccacagttagtctcatttgcctcttgtcctgtgaactccacttagaatgtcattgaacttgggcagacataattctagtgtctgttccaaacgcactgtgtcacagaagctagaattaccattagaggcg

SEQ ID NO: 32157 - DNA, 467 bp, Homo sapiens
  misc_feature (1)...(467): n = A,T,C or G
aggccnnnnnnnnnnannccaggggtcctcacgccagctcgnggaattcgctctcttctgctgggttctctgcctggataaaagattctacggctgaacagaatcgttcaaaaaccacggtcttggccaggcgcagtggctcacacctaaaatcccagcactttgggaggccgaagtgggcggatcacgaggtcctggacattggcgagtgcctgacagtgccggacgagttctcaaagcaagagaagctgacgggcatgtggtggaaacagctggtggccggcgcagtggcaggtgccgtgtcacggacaggcacggcccctctggaccgcctcaaggtcttcatgcaggtccatgcctcagagaccaaccggctgaacatccttggggggcttcgaagcatggtccttgagggaggcatgcgctccctgtggcgcggcaatggtattaatgtactcaagattgcc

SEQ ID NO: 32158 - DNA, 465 bp, Homo sapiens
  misc_feature (1)...(465): n = A,T,C or G
agccnnntnnnnnnanccatggagactagtaagagccncgaantccgcaatggctagatgaagtgaagcaggccctggccccttctgctcacaggggctctctggtcatcatgcaggggcttttggctatgggagccaagatagcctccagcccttctgtggacaaggcccgggctgagctgcaagaactactgaccattgcagagcgctgggaagaaaaggctcatttctgcctggaggccaggcagaagcatccaccagccacattggaagccataattcgtgagacagaaaacatccctgttcacctgcctaacatccaggctctcaaagaagctctgactaaggcacaagctcggattgctgatgtggatgagatccaaaatggtgaccactacccctgtctagatgacttggagggcctggtggctgtgggccgcgacctgcctgtgatgctggaagagn

SEQ ID NO: 32159 - DNA, 488 bp, Homo sapiens
  misc_feature (1)...(488): n = A,T,C or G
gggcagggannnnnnaaannctcgagtccctantcagtgtggtgtaattcccctctcgggcaccagcccagatgatgtccaacctgggcccagtgtgggtcctccaagtaaggacaaggacaaagtgctgcccagcttctggatcccgtcgctgacgcccgaagccaaggccaccaagctggagaagccgtcccgcacggtgacctgccccatgtcagggaagcccctgcgcatgtcggacctgacgcccgtgcacttcacaccgctagacagctccgtggaccgcgtggggctcatcacccgcagcgagcgctacgtgtgtgccgtgacccgcgacagcctgagcaacgccaccccctgcgctgtgctgcggccctctggggctgtggtcaccctcgaatgcgtggagaagctgattcggaaggacatggtggaccctgtgactggagacaaactcacagaccgcgacatcatcgtgctgcagcggg

SEQ ID NO: 32160 - DNA, 467 bp, Homo sapiens
  misc_feature (1)...(467): n = A,T,C or G
aggccnnnnnnnnnnnccccaaagtacatacgccancncgnggaattccgagaagctcatcaacatgacctactgtcccaagacgaaggtgttgtgcttgtggcgtagaaatggctctgagacccagctcaacaagttctatactaaaaagtgtcgggagctgtactactgtgtgaaggacagcatggagcgcgctgccgcccgacagcaaagcatcaaacccggacctgaattgggtggcgagttccctgtgcaggacctgaagactggtgagggtggcctgctgcaagtgaccctggaagggatcaacctcaaattcatgcacaatcaggttttcatagagctgaatcacattaaaaagtgcaatacagttcgaggcgtctttgtcctggaggaatttgctcctgaaattaaagaagtggtgagccacaagtacaagacaccaatggcccacgaaatctgctact

SEQ ID NO: 32161 - DNA, 415 bp, Homo sapiens
gaccgctgctctcctatgaggtgtgacatcatcatcatctctggccggaaagaaaagtgtgaggctgccatggaagctctggaagcattggttcctgccccattgaggagagggccctttgaccttaccgtacgttattgggcaaaaggacgtgggatccgcaagatgatggatgagtttgaggtgaacatacatgtcccggcacctgagctgcagcctgacatcatcgccatcacgggcctagctgcttatttggaccgggccagggctggactgctggagcgtgtgaaggagctacaggccgatcaagaagaccgagctttaaggagttttaagctgagtgtcactgtagaccccaaataccatcccaagattatcgggagaaagggggcagtaattacccaaatacggatgg

SEQ ID NO: 32162 - DNA, 465 bp, Homo sapiens
  misc_feature (1)...(465): n = A,T,C or G
ggcgcggnnnnnnnnnccctggggtctatacgccagctcgnggaattcgaacgcgggtccacgcgtgtgatcgtccgtgcgtctagcctttgcccacgcagctttcagtcatggcctccggtaacgcgcgcatcggaaagccagcccctgacttcaaggccacagcggtggttgatggcgccttcaaagaggtgaagctgtcggactacaaagggaagtacgtggtcctctttttctaccctctggacttcacttttgtgtgccccaccgagatcatcgcgttcagcaaccgtgcagaggacttccgcaagctgggctgtgaagtgctgggcgtctcggtggactctcagttcacccacctggcttggtatgagcaggggccaaagagggaggttgcagctaagctcacaccctcaggtcctagcagtgtggcttcgtggccattgctcaacctctggaacctgc

SEQ ID NO: 32163 - DNA, 465 bp, Homo sapiens
  misc_feature (1)...(465): n = A,T,C or G
aggcggntnnntnncaaactagantcctgtcagtgtcgcggaattcgacccctgcccaccccgcaggaaccctgaggcctaggggacaggctggacccagagactctggacccggggcctccccttgagtagagacccgccctctgactgatggacgccgctgacctggggtcagacccgtgggctggacccctgcccaccccgcaggaaccctgaggcctaggggagctgttgagccttcagtgtctgcatgtgggaagtgggctccttcacctacctcacagggctgttgtgaggggcgctgtgatgcggttccaaagcacagggcttggcgcaccccactgtgctctcaataaatgtgtttcctgtcttancnnannaaaaaaaaaaaaaaaaaaaaaaaaaaaaaaaaaaaagggcccctttaaatttaaggggccctttaaaccccgtttaaaccccttg

SEQ ID NO: 32164 - DNA, 454 bp, Homo sapiens
  misc_feature (1)...(454): n = A,T,C or G
atttgattgcgtacctaggccangnggnggaattctggagcggctggtgacggaggtccccgaggagtattacgagcgcttttccccgcttgcccgctcactttgctcacagctcctctgcatggaccctgccgaacgcctggggtgtcgagggggcagtgcccgcgaggtgaaggagcaccccctctttaagaagctgaacttcaagcggctgggagctggcatgctggagccgccgttcaagcctgacccccaggccatttactgcaaggatgttctggacattgaacagctctctacggtcaagggcgtggagctggagcctaccgaccatgacttctaccaaaagtttggcacaggcagtgtgcccatccccttgcagaacgagatggtggagaccgagtgcttacaagagctgaatgtctttgggctggatggctcagttcccccagac

SEQ ID NO: 32165 - DNA, 476 bp, Homo sapiens
  misc_feature (1)...(476): n = A,T,C or G
gccccaatgagaccctatgcatttganggcattcgattcattttttagattcaaataatttctctaaagcaggtagaaaacatttagtgagtttcaaatgtaatgttatgtgaaattcttatttttgttgaaagattaaataatgaagagaccattattgttgttccttctgagccttctctgattttaaaataggtgtaacgtagagatcaggagcgaaactaacatagtgaaggttgtggccccatagttcagcttgtgaaactttcacgtcgttgtgttggcttcagatcttcggaagggagaattgcccatccaaatacaaatgaggcccctcccatcccctccccactcctggtcccacagtctccttcacagcatttgaactgcagggaatgttagagttaccctaagacgacccgtcactaagatgtaaaaatcttttttttttttttgaaacggagtctcgtttttgn

SEQ ID NO: 32166 - DNA, 468 bp, Homo sapiens
  misc_feature (1)...(468): n = A,T,C or G
aggcccccnnnnnnnaacactgaagtctntacgccagcgccgnggaatttgtggtccactgcagcgcaggtgtagggcgtacaggtacctttgtcgtcattgatgccatgctggacatgatgcatacagaacggaaggtggacgtgtatggctttgtgagccggatccgggcacagcgctgccagatggtgcaaaccgatatgcagtatgtcttcatataccaagcccttctggagcattatctctatggagatacagaactggaagtgacctctctagaaacccacctgcagaaaatttacaacaaaatcccagggaccagcaacaatggattagaggaggagtttaagaagttaacatcaatcaaaatccagaatgacaagatgcggactggaaaccttccagccaacatgaagaagaaccgtgttttacagatcattccatatgaattcaacagagtgatcattc

SEQ ID NO: 32167 - DNA, 460 bp, Homo sapiens
  misc_feature (1)...(460): n = A,T,C or G
tgccgnttnnnnnnncctggggactggcaaaagcncgaannnataatgncagcattctctaggttgactacaaaaatggctctacaactgagtaggttaaggttaagcctttgttgtgtgaaaagactgtgactttacattccgcgggtcaataaatatcccattgcccttgagattatttcctcatttacagatttactacacagtttacacatatgtccactatacagtttttcacatatagcggctcttatgtcaaatccttcaagctagttctttgaggaatattctgatttgcactaatatgttctacagtaaagtgcaagctaagaatctagatacaaaataaaaaagatggaaactctcaccactactttttgaaagggattaatgatagcagcaagtaagaaaaatactagctatgtttcaagaatttaaatattctacaatcattaattgg

SEQ ID NO: 32168 - DNA, 467 bp, Homo sapiens
  misc_feature (1)...(467): n = A,T,C or G
tcccccttttttnnanccagggatcctactgaagngncgcggaattcattggcaagcactcccgcaccaggtacgagcgaaacattgaaaagatatccatgttggaaaagatctacatccaccccaggtacaactggcgggagaacctggaccgggacattgccctgatgaagctgaagaagcctgttgccttcagtgactacattcaccctgtgtgtctgcccgacagggagacggcagccagcttgctccaggctggatacaaggggcgggtgacaggctggggcaacctgaaggagacgtggacagccaacgttggtaaggggcagcccagtgtcctgcaggtggtgaacctgcccattgtggagcggccggtctgcaaggactccacccggatccgcatcactgacaacatgttctgtgctgtctttttttcaagtcgtctatgttagctgtggaggaggagg

SEQ ID NO: 32169 - DNA, 470 bp, Homo sapiens
  misc_feature (1)...(470): n = A,T,C or G
aggcgcggnnnnnnnnaaaccatggagtccataccgcagcgncgnggaattcctacgagccagacgacggactcacagcacagcagctcttcaactgcggagacggcctcacctacaatgactttctcattctccctgggtacatcgacttcactgcagaccagggggacctgacttctgctctgaccaagaaaatcactcttaagaccccactggtttcctctcccatggacacaggcacagaggctgggatggccatagcaatggcgcttacaggcggtattggcttcatccaccacaactgtacacctgaattccaggccaatgaagttcggaaagtgaagaaatatgaacagggattcatcacagagcctgtggtgctcagccccaaagatcgcgtgcgggatgtttttgaggccaaagcccggcatggtttctgcggtattccaatcacagacacaggccggatg

SEQ ID NO: 32170 - DNA, 465 bp, Homo sapiens
  misc_feature (1)...(465): n = A,T,C or G
aggccgntnnnnnnannttaggtgtcctctaagaggcgcgaattcgctgcatcctgctgggcggactcttcatctacgatgtcttctgggtatttggcaccaatgtgatggtgacagtggccaagtccttcgaggcaccaataaaattggtgtttccccaggatctgctggagaaaggcctcgaagcaaacaactttgccatgctgggacttggagatgtcgtcattccagggatcttcattgccttgctgctgcgctttgacatcagcttgaagaagaatacccacacctacttctacaccagctttgcagcctacatcttcggcctgggccttaccatcttcatcatgcacatcttcaagcatgctcagcctgccctcctatacctggtccccgcctgcatcggttttcctgtcctggtggcgctggccaagggagaagtgacagagatgttcagttatgagg

SEQ ID NO: 32171 - DNA, 455 bp, Homo sapiens
  misc_feature (1)...(455): n = A,T,C or G
ntttgattgcgtacctaggncangnggnggaactcaaggctgctgactctgctcatccaacagctagctccctcgctcgcctgctctctttctctatgttcccacgccagctcctgcccctggaaccagagatgacaggcccggggcagtgaatcttacattcaggaactctagggctcccggtcccacccacccacttgccttctgaggcctcagcggggaggggcaagcaggggtcctccccacaggcacagatgaagccactagcttcagcctagaaacccggagaacggaacagactgcggagggaggaaccaatctgcagcgcagccacccccaaggctggatccttaagtgaaggaccaagccaggcctcagggtgactgtgatcaggactgaggggtgcgcaaggaggcccaagtatggattccagacctcgtagccccacgatctgg

SEQ ID NO: 32172 - DNA, 461 bp, Homo sapiens
  misc_feature (1)...(461): n = A,T,C or G
agccgcttntnnangctgggngctcgcagagncgcgaannntgccaggaggagcgcgcgggcacagggtgccgctgaccgaggcgtgcaaagactccagtattggaggcatgatgaagactctgctgctgtttgtggggctgctgctgacctgggagagtgggcaggtcctgggggaccagacggtctcagacaatgagctccaggaaatgtccaatcagggaagtaagtacgtcaataaggaaattcaaaatgctgtcaacggggtgaaacagataaagactctcatagaaaaaacaaacgaagagcgcaagacactgctcagcaacctagaagaagccaagaagaagaaagaggatgccctaaatgagaccagggaatcagagacaaagctgaaggagctcccaggagtgtgcaatgagaccatgatggccctctgggaagagtgtaagccctgcctga

SEQ ID NO: 32173 - DNA, 461 bp, Homo sapiens
  misc_feature (1)...(461): n = A,T,C or G
aggccggnnnnnnnancctaaagtcatgcgaagcgcgggaattggaagtgacatcgtctttaaaccctgcgtggcaatccctgacgcaccgccgtgatgcccagggaagacagggcgacctggaagtccaactacttccttaagatcatccaactattggatgattatccgaaatgtttcattgtgggagcagacaatgtgggctccaagcagatgcagcagatccgcatgtcccttcgcgggaaggctgtggtgctgatgggcaagaacaccatgatgcgcaaggccatccgagggcacctggaaaacaacccagctctggagaaactgctgcctcatatccgggggaatgtgggctttgtgttcaccaaggaggacctcactgagatcagggacatgttgctggccaataaggtgccagctgctgcccgtgctggtgccattgccccatgtgaagtcac

SEQ ID NO: 32174 - DNA, 464 bp, Homo sapiens
  misc_feature (1)...(464): n = A,T,C or G
ggccggntnnnnnnanncctgggggctaagcagaggcgcgaanntggaagaaggcggaaggggaggacgtgggatggtggcggagctggctgcagcagagctaccaagcagtcaaagagaagtcctctgaagccttggagtttatgaagcgggacctgacggagtttacccaggtggtgcagcatgacacggcctgtaccatcgcagccacggccagcgtggtcaaggagaagctggctacggaaggctcctcaggagcaacagagaagatgaagaaagggttatctgacttcctaggggtgatctcagacacctttgccccttcgccagacaaaaccatcgactgcgatgtcatcaccctgatgggcacaccgtctggcacagctgagccctatgatggcaccaaggctcgcctctatagcctgcagtcggacccagcaacctactggtatgaaccagatggg

SEQ ID NO: 32175 - DNA, 466 bp, Homo sapiens
  misc_feature (1)...(466): n = A,T,C or G
ggcccccntnnnnnnnaacgtgagtcatcacgccagcgtcgnggaatttcatctacctcatcaaaaagagagagttttaccgtgacaagaagtacgaggaagtgaggtcagttccgcttccaggccggcggcccgagggcagccctgtggagcacccccgtggcttcgagcctttgccctgatgtgatattgatggctggggtgggaggcaggggctggagggcccggggaggagaagtgttctgagtacatgctctacagaaccggattcggcctcggcagcagtgggaggagagggcgctgtgggccacagggcgggagacggagttcacaggctccgcctgattctggacaagtcccaggcctccccgggcctcggtttctctatctgggagatgagagagttggtttaccaatcgagtggtgtctgcagcacttctgttttgggattcttggacttggtggn

SEQ ID NO: 32176 - DNA, 464 bp, Homo sapiens
  misc_feature (1)...(464): n = A,T,C or G
aggccggntnnnnnnnnnccagggggacatcacgacagcgccgaggaattccgcgagcacgccggggacatcttcaccgaaggcatggagagcctacccgccgcctgccctggcgagggcgacgccggcccaccgtccgggacccactcaacaccactctgaactcccaccggtccagcctctccttgctattactggcagacggcgttccttccctgcaacgtccacgcttttgtgtgtttcaacagcgccgtttctaccgctgggaatgccctttcccaccgtccccgggctctttgcagtccctcctggggtgtttatggtcccctgtacttgtcctccacatttatttgtttaacaaatatttaatggtttagtagcaaatgttttaggtgctggagatgctgcaatgctggcctcgttctggggagatgagcaaacacatagaacaactagggaaaggc

SEQ ID NO: 32177 - DNA, 465 bp, Homo sapiens
  misc_feature (1)...(465): n = A,T,C or G
agccgnntnnnnnanccatggagtccatgcagagngcgcgaantccgcgcgggcacagggtgccgctgaccgaggcgtgcaaagactccagaattggaggcatgatgaagactctgctgctgtttgtggggctgctgctgacctgggagagtgggcaggtcctgggggaccagacggtctcagacaatgagctccaggaaatgtccaatcagggaagtaagtacgtcaataaggaaattcaaaatgctgtcaacggggtgaaacagataaagactctcatagaaaaaacaaacgaagagcgcaagacactgctcagcaacctagaagaagccaagaagaagaaagaggatgccctaaatgagaccagggaatcagagacaaagctgaaggagctcccaggagtgtgcaatgagaccatgatggccctctgggaagagtgtaagccctgcctgaaacagacctgcn

SEQ ID NO: 32178 - DNA, 472 bp, Homo sapiens
  misc_feature (1)...(472): n = A,T,C or G
ntttgaatgagtccntaggacangccgnggaantcccctgggtgtgtgactgccgggcacgcccactctgggcctggctgcagaagttccgcggctcctcctccgaggtgccctgcagcctcccgcaacgcctggctggccgtgacctcaaacgcctagctgccaatgacctgcagggctgcgctgtggccaccggcccttaccatcccatctggaccggcagggccaccgatgaggagccgctggggcttcccaagtgctgccagccagatgccgctgacaaggcctcagtactggagcctggaagaccagcttcggcaggcaatgcgctgaagggacgcgtgccgcccggtgacagcccgccgggcaacggctctggcccacggcacatcaatgactcaccctttgggactctgcctggctctgctgagcccccgctcactgcagtgcggcccgagggctccgagccacn

SEQ ID NO: 32179 - DNA, 496 bp, Homo sapiens
  misc_feature (1)...(496): n = A,T,C or G
aattgaatcgcaccacagtccgngnggtggaattcggagtaccaggccaaggtgagtggtggggatggcctgtccccgagaaccaggccagggggcgcctggagctcagcctgggctcacatgcgccctctctctctccctccacctgtcttccccacaccctgcccccaccctgtgatggcctgtgtcttgctaaaggagaacgactttgacaggctggtgctacagtacgctcccagcgcctgaggctggcccagagctgtcaggaccatgaagccaggacagaggccaggagccagccctgcagccctccccacccggcatccacctgcatcccctctgggggcaggagcccacccccagcacccccatctgttaataaatatctcaactccagggtgttccacctgtnnnnnnnnnnnttnnnnnnnnnnnnnnnnaannnnnnanaaaaaagggcccccgtgctttaagggggccggttaaacccccctgg

SEQ ID NO: 32180 - DNA, 474 bp, Homo sapiens
  misc_feature (1)...(474): n = A,T,C or G
nattgatagacgtncgctaggacangccgnggaattcgcaaaacaatagagtgaaattttgctggataccccacccctgagcctgaggtgtgctctcttgtgaaagagctgttcgggctggacgtggtgattcttgcctgtaatcccagcacttagggaggctgaggcaggattgctttagcccagttgttcaagcccatttgggcaacacaatgaaaccccgtctgtacaaaaaattaaattagccagtcatagcggtgcacacctgtagcccagctacttggtaggctgaggtgggaggatcacttaagtccaggagtttgaggctgcggtgagctatcatcatgccgctgccctccagcctgggcaacagagcaagaccctgcctaaaaaaaaacaaaaacaaagcctgtactatagtagtgcccacctggaagttccttcttgccagaataagaaatacagaagaggggc

SEQ ID NO: 32181 - DNA, 473 bp, Homo sapiens
  misc_feature (1)...(473): n = A,T,C or G
natcgatagacctacgctagngacgngcaattcttcctggccagctgttgggaactgctcctctgccctgagatggctgggccgctactactgcttccagggtaaccaattcctgcgcttcgaccctgtcaggggagaggtgcctcccaggtacccgcgggatgtccgagactacttcatgccctgccctggcagaggccatggacacaggaatgggactggccatgggaacagtacccaccatggccctgagtatatgcgctgtaacccacatctagtcttgtctgcactgacgtctgacaaccatggtgccacctatgccttcagtgggacccactactggcgtctggacaccagccgggatggctggcatagctggcccattgctcatcagtggccccagggtccttcagcagtggatgctgccttttcctgggaagaaaaactctatctggtccagggcacccaggtat

SEQ ID NO: 32182 - DNA, 486 bp, Homo sapiens
  misc_feature (1)...(486): n = A,T,C or G
gggcggcnnnnnnnncccctagagcgctcgtagngcgngcaattctcaggatggcctaattagtaaagatgaaacgatggcttacttcctgagagctaaatcccaactacactgtaaaatgggaccaggatttatccataattttcaggagatgacctatctgaagccaaccttctgcgaacactgtgcgggatttctctggggcataatcaagcaaggatacaaatgcacagactgtggagccaattgtcacaaacagtgcaaagacctcctggttctggcctgcaggagatttgcccgggcgccctccttgagcagtggtcatgggtcactgactggaagcccctcgctgcccccagcgcaggatgaggtgtttgagttccctggagtcactgctggacacagggatttagacagcagagccatcacactggttacaggctcttctcgcaagatctctgtgaggctacagagggccaccaccan

SEQ ID NO: 32183 - DNA, 513 bp, Homo sapiens
  misc_feature (1)...(513): n = A,T,C or G
gggccccccccnncatcggtcatcgatgagcgtggtggaattccagagctcagaanaaaggtacatccagccacccagtgttatattctgcctcgccggagtgggtgttcccgggggcacttgccgaccagccccttgcgtccccaggtttgcagctctcccctgggccactaaccatcctggcccgggctgcctgtctgacctccgtgcctagtcgtggctctccatcttgtctcctccccgtgtccccaatgtcttcagtggggggccccctcttgggtcccctcctctgccatcacctgaagacccccacgccaaacactgaatgtcacctgtgcctgccgcctcggtccaccttgcggcccgtgtttgactcaactcaactcctttaacgctaatatttccggcaaaatcccatgcttgggttttgtctttaaccttgtaacgcttgcaatcccaataaagcattaaaagtcannnnnnannnnnnnaannnaaaaaaaaaaaaaaacg

SEQ ID NO: 32184 - DNA, 514 bp, Homo sapiens
  misc_feature (1)...(514): n = A,T,C or G
aggcccnnnnncccatagacatcgatccacactccgagtggngcaattcccaagcagaatgtcaacgctgccatggtcttcgaattcctctataagatgtgtgacgtgatggctgcctactttggcaagatcagcgaggaaaacatcaagaacaattttgtgctcatatatgagctgctggatgagattctagactttggctacccacagaattccgagacaggcgcgctgaaaaccttcatcacgcagcagggcatcaagagtcagcatcagacaaaagaagagcagtcacagatcaccagccaggtaactgggcagattggctggcggcgagagggtatcaagtatcgtcggaatgagctcttcctggatgtgctggagagtgtgaacctgctcatgtccccacaagggcaggtgctgagtgcccatgtgttgggccgggtggtgatgaagagctacctgagtggcatgcctgaatgcaagtttgggatgaatgacaagattgttattgaaa

SEQ ID NO: 32185 - DNA, 478 bp, Homo sapiens
  misc_feature (1)...(478): n = A,T,C or G
tggaggaggggnnnccnnnnaaactgagaccttgaggancnngtcgnggaanccgagcagcagtgctaaaggagcccggcggaggcagcggtgggtttgggactgaggcgctggatctgtggtcgcggctggggacgtgcgcccgcgccaccatcttcggctgaagaggcaattgcttttggatcgttccatttacaatggcgcagagaactggactcgaggatccagagaggtatctctttgtggacagggctgtcatctacaaccctgccactcaagctgattggacagctaaaaagctagtgtggattccatcagaacgccatggttttgaggcagctagtatcaaagaagaacggggagatgaagttatggtggagttggcagagaatggaaagaaagcaatggtcaacaaagatgatattcagaagatgaacccaccttagttttccaaggtggaggatatggcagaattgac

SEQ ID NO: 32186 - DNA, 268 bp, Homo sapiens
  misc_feature (1)...(268): n = A,T,C or G
agacngnccacgacccctacaccacttttgtcacgatgctgccacacaaggactgacgctatgccctctatgatgcaacctatgagaccaatgagagcaacaatgaggatctggggtttatcttctgggcccccgagtctgcgccccttaagagcaaaatgatttatgccagctccaggacgccatcaagactaagctgacagggatcaagcatgaattgcaagcaaactgctactatgaagtcaaggaccgctgcaccctggcaaaa

SEQ ID NO: 32187 - DNA, 466 bp, Homo sapiens
  misc_feature (1)...(466): n = A,T,C or G
gccgggtccnnnnnnaatcgaganacctgagacatacgacgngcggnggaattccatcatgagttgcttggagttcctctgggaacggcctactctccttgtgctgggtaggtggatgtccctgcgtttgtgcccagattacatttcccgagcaactgggtgtccagctgggcaaccctaaccctcagccccacgccctgcagggaatgagggctcaggtctatcccaggaggtgcaggcctcctgccagcttctcctcaccatcctgccccggcgccagctgcctcctggacttgagtccttgaacgtctctgtggctgcaggtgagtctactcccctttccctttcctctatccctctaatcacgcaggtgggatttgatgccctctaatcccatttgctggctgtttgtgtgcctcagttgctttatgtacaaaatggggaaattacatcccgttgatgagat

SEQ ID NO: 32188 - DNA, 496 bp, Homo sapiens
  misc_feature (1)...(496): n = A,T,C or G
ggtggccaaaaaatttgaaactgactgcctacgccangngcnggaattcactagtttccgttccatgaaggagtacaaattggagtatgtaaagacaaaagacatacgtaagtggataatttgggtttgaactaagttctctgcgactctcaaagccatacttcccccatgttgccacaaaaagtatttgtttcatgttgccatgtatctcttacttcaaatatgaagcaggaatgtgatctaaagcataagaacatagcaatagatagacccatgtacatgatttcgtaaaactttagaaaggccagtcctacatggtttgtccatatttggacggtgtgtggaaggcacaaatgaaagcatcactggctattctgaaccccaggtttgtggaagtgagtgtaaaggcccagcagtgagccccaatctcacctgcccatcaaagttcagaaacgacaatcagaataggccgcacttggcgcttccctgtagacan

SEQ ID NO: 32189 - DNA, 461 bp, Homo sapiens
  misc_feature (1)...(461): n = A,T,C or G
aggcggtnnnnnnaactgaaactgcagacgtgcggnggaactcgtagacactctgacaagctggccaaagtcacttccccaagatctgccagacctgcatggtcaagcctcttatgggggtgtttctatctctttctttctctttctgtttcctggcctcagagcttcctggggaccaagatttaccaattcacccactcccttgaagttgtggaggaggtgaaagaaagggacccacctgctagtcgcccctcagagcatgatgggaggtgtgccagaaagtcccccctcgccccaaagttgctcaccgactcacctgcgcaagtgcctgggattctaccgtaattgctttgtgcctttgggcacggccctccttcttttcctaacatgcaccttgctcccaatggtgcttggagggggaagagatcccaggaggtgcagtggagggggcaagctttgct

SEQ ID NO: 32190 - DNA, 478 bp, Homo sapiens
  misc_feature (1)...(478): n = A,T,C or G
cttttgatgagcactacgttcgagcgcactcggacagngcggcggaanncggggagcttgctaacgacaaaacccgccaggccggtgcgggagttgcggagcatcctctgcggtcctcgccgagaccggggcgcggatgagccggtccttggcgcggtcgcgacagacctgtcctcgcacctggatggcagcaggggcgccggggtcctctcgacgccagagagaaatctcatcatctgtgcagccttcttaaagcaaactaggagcagaggcaggattatccgtgacctttgaagaccagaactatactgaaatttaaaatgttcttcgggggagaagggagcttgacttacactttgggaatcacaggcactgagcccgtatatacttcaactcaagaagactgcattaattcttgctgttcaacaaaaaacatatcaggcctgctcagggtgtaaccttggccacatcagtgtcg

SEQ ID NO: 32191 - DNA, 512 bp, Homo sapiens
  misc_feature (1)...(512): n = A,T,C or G
tggggccccnnnnnaatagatcttctgtcagcgtggaggaattcgagctttccggctccacctcttcaggttgaagacctcaatgccaagtggcagcgctacaacgccagcagggacgaatacgtgagggggctccatgcgcagctcagggggctgcagatcccccacgagcccgagctgatgaggaaggagatctcccggctcaacagacagttggaagagaaaataaatgactgtgccgaagtgaagcaggagctggcggcctccaggacggcccgggatgctgcgttggagcgggtgcagatgctggaacagcaggtgtctgtccctcgggctccggacggcactgaccagatgtctgctggccggtggtggccgaaatcatgggacaggctgggctgaaggcttggtggcactgagtgggcagtggtcactgtgggggtgggagaagcctggtggggcgcttcctccttccttgagcagaaatgtgtgtctcgcctctcttcagattc

SEQ ID NO: 32192 - DNA, 469 bp, Homo sapiens
  misc_feature (1)...(469): n = A,T,C or G
aggggccggnntngnttttnaaaagtaagactatcgtacgngcggncaattcggtgtcatggatcatctccaggctggtggtgcttatatttggcaccctttaccctgcgtattattcctacaaggctgtgaaatcaaaggacattaaggaatatgtcaaatggatgatgtactggattatatttgcacttttcaccacagcagagacattcacagacatcttcctttgttggtttccattctattatgaactaaaaatagcatttgtagcctggctgctgtctccctacacaaaaggctccagcctcctgtacaggaagtttgtacatcccacactatcttcaaaagaaaaggaaatcgatgattgtctggtccaagcaaaagaccgaagttacgatgcccttgtgcacttcgggaagcggggcttgaacgtggccgccacagcggctgtgatggctgcttccaaggg

SEQ ID NO: 32193 - DNA, 464 bp, Homo sapiens
  misc_feature (1)...(464): n = A,T,C or G
agggccccngnccnnnccttcagacatcgctagaccngcggnggaattcccggcagctgcgcggggtcagcaaggaggaggtgatccggctgaagcagaagaggcggaccctgaaaaaccgcggctatgcccagtcctgccgcttcaagagggtgcagcagagacacgtcctggagtcggagaagaaccagctgctgcagcaagtcgaccacctcaagcaggagatctccaggctggtgcgcgagagggacgcgtacaaggagaaatacgagaagttggtgagcagcggcttccgagaaaacggctcgagcagcgacaacccgtcctctcccgagtttttcataactgagcccactcgcaagttggagccatcagtgggatacgccacattttggaagccccagcatcgtgtacttaccagtgtgttcacaaaatgaaatttgtgtgagagctgtacattaaaa

SEQ ID NO: 32194 - DNA, 430 bp, Homo sapiens
gttgaatctgtgctgcccgtgtccaggtgctgggcttccggaccgacacggatcccccatccccgcccgcggtcgccttgtcatgctgcccaaagtggagacggaagccctgggactggctcgatcgcatggggaacagggccagatgccggaaaacatgcaagtgtctcaatttaaaatggtgaattactcctatgatgaagatctggaagagctttgtcccgtgtgtggagataaagtgtctgggtaccattatgggctcctcacctgtgaaagctgcaagggattttttaagcgaacagtccaaaataataaaaggtacacatgtatagaaaaccagaactgccaaattgacaaaacacagagaaagcgttgtccttactgtcgttttcaaaaatgtctaagtgttggaatgaagctagaagctgta

SEQ ID NO: 32195 - DNA, 551 bp, Homo sapiens
  misc_feature (1)...(551): n = A,T,C or G
aagannatngagagcccnnnnnncccattgaatttcgatccgcagtccagcgtggngcaattcgcaggcgatgtccagaaagaatgcgtgcttttaaaaggccgccaggagggctggtgccgggactccacgacagacgagcagctattcaggtggtgatagggaagcacaaaacaaggagaggggctctggactctgggcatcaggcagccagggcaggaggctggggcctcaaggagctgtttcagtctagatactgggaatgttgaccagtgcttcagggctgtgggcctcaactcctccccaccctgcccaccctcaggtgtgagctgtcagtggagaagtccacagtgctgcagtctgagctggaatcctgtaaggagctgcaggagctggagcctgagaataaatggtgcctgcttaccatcatcctgctgatgcgggcactggaccccctgctgtatgagaaggagaccctgcagtacttccagaccctcaaggccgtggaccccatgcgggcaacgtatctggatgacctgcgcagcaagttt

SEQ ID NO: 32196 - DNA, 468 bp, Homo sapiens
  misc_feature (1)...(468): n = A,T,C or G
agggccngnntgnnttnnnccctgangactcntcgttagngcggnggaattcgggagagcagaggtggttggattctggtgaaaccccatacaagttccccgcagcccttcccgtctgtgcctttccccgttggcgggcgtttcatggagtgggaaggggcagagccatgagagtgagctttctggctcactgaggagggtactgttggccccatagagagaagatgggatttcccagatgctctggaaaacctgtcacctttaaaatctcaggattaatcctagtttctggtctccgctccttgtacatcatctcattttgattcagggcagtttaatgggtggtatcgtgtctattctataggtgcgcagactgaggcttagagaaaggtttagagcttcggttctagagtcagatgggacttaagtcccagctctacctcttaattgctgtgaccttgagcaagn

SEQ ID NO: 32197 - DNA, 552 bp, Homo sapiens
  misc_feature (1)...(552): n = A,T,C or G
aagannnaanacgngncntnnnnnnnncacttgaccatcgatccgcgtggngcaattccggngaccggctgttttggtctctctgggtgtagcctgctcctcttacaggtcatgcacgcagcctgtttgctctgacaccaacttcctaccctctcagcctcaaagtaactcacctttcccccttctcctcaccccctcttaggcttccaggttaaggttctccgagaagacagcagagctgctttccgcctctttgagaccaagatcacccaagtcctgcacttcagtatgaagcaaaccggagaggcgggcagggctggggggagacagggaggctgaggtgtggccgaggacctgaccatctggaagtgtgaaaatccccttgggctgtcagaagccttgggcttggccataaatagggaggcagtggcacctctccatgggggtggcgaacgtggaatgagaggatctacacagagtccccagcctgggctcaccctgcaccttctcttcccctctgaccacttttgcgcacgtcatccccgcagccaa

SEQ ID NO: 32198 - DNA, 515 bp, Homo sapiens
  misc_feature (1)...(515): n = A,T,C or G
agagccnnncccccctttagaaaatcgaccaccgtcncgagaggngcaattccagatttgtttgcttttctaaaaaaaattctggttggcctaagactgtcagatctgctgagctcatcattgcttctcctgcggactggctgataaaggggccttcctaggagtaagagatgcgagagctctgctgtttcctttgagttcacttgtgctcccgttactaatgttgccaacctacagattctttgcaaccatatttttaaagctacatatacattttttccaaattaatttagttaacactgaataatgaaatccttaaatccacttatccgggtgcacacaaaatatagtaagtggcaacatgctgaagatgaatgagtatgtgagggtgggtggcctatctcaccaacctcataacgtgtggctttgacatttggagtacgtgatggtgccagcatcatcgatctggattttaactaaaaatatatatacacatacatatgtatgtatgtatg

SEQ ID NO: 32199 - DNA, 463 bp, Homo sapiens
  misc_feature (1)...(463): n = A,T,C or G
tggggcccnggnnnnnnattgatgacatcataggacangcggtggaattcggagagggatttgaggcggggacctcatgactcttccaccgattgaaggagcgtgtgtcatgaccctctttctcttccagggctatatatccagcctgctcaccctggcaggctttgctacagctatggctgctgttgtcctctgcgtgaatagcttcatctggcaaactgaaccctttttatacatcgacactgtgtgtgatcgctcagaccctgtcttccctaccactgggtacagatggatgcggcgaagtcaagagaaccaatggcagaaggaggagtgtagagcttacatgcagatgctgaggaagttgttcacagcaatccgtgccctgttcctggctgtctgtgtcttgaaggtcattgtgtccttggtttccttgggagtaggtcttcgaaacttgtgtggccag

SEQ ID NO: 32200 - DNA, 546 bp, Homo sapiens
  misc_feature (1)...(546): n = A,T,C or G
agcgnnagagcgnccnnnnncctttgaaatcgtccactatccacgtggngcaattcatacaaccacaatctattgattttataaaaagtgctcatcttatatgtgatctgatcctgttgttcttcaaagcgttttttaaactcaaaaaacatcaaaatgaatatatacagccataaaatcatgtcctttacagcaacatggatgcagctggaggccgttatcctaatgaataaatgcagacacagaaaaccaaatactgcatgttctcacttataagtgggagccaatcgctgggtgcacacagacataaagatgggaaaaatacacactggggacttcaaaagggaggaaggaggaagggaagcaaggattgaaaaactacctgtcaagtactgtgttcactcttggggtgatgggttcaattgaagcctaaacttcagcatcatgcagtatatccctgtaactaacctgcacatgtaccccctgaatctaacagttttaaaaagctaatataattttatctctgggtattggtattatgggtaa

SEQ ID NO: 32201 - DNA, 257 bp, Homo sapiens
  misc_feature (1)...(257): n = A,T,C or G
ccccaccgaaatcatcgcgttcagcaaccgngcaaaggacttccgcaagctgggctgtgaagtgctgggcgtcttggtggactctcagttcacccacctggcttggatcaacaccccccggaaagagggaggcttgggccccctgaacatccccctgcttgctgacgtgaccagacgcttgtctgaagattacggcgtgctgaaaacagatgagggcattgcctacaggggcctctttatcattgatggcaagggtg

SEQ ID NO: 32202 - DNA, 551 bp, Homo sapiens
  misc_feature (1)...(551): n = A,T,C or G
agagnatgagcagcctnnnnnnnncattgaaattcgatccgctgntccgcgtggngcaattcggaggaagatgagaaggacaaaggaaaactgaagcccaacctaggcaacggggcagacctgcccaattaccgctggacccagaccctgtcggagctggacctggcggtccctttctgtgtgaacttccggctgaaagggaaggacatggtggtggacatccagcggcggcacctccgggtggggctcaaggggcagccagcgatcattgatggggagctctacaatgaagtgaaggtggaggagagctcgtggctcattgaggacggcaaggtggtgactgtgcatctggagaagatcaataagatggagtggtggagccgcttggtgtccagtgaccctgagatcaacaccaagaagattaaccctgagaattccaagctgtcagacctggacagtgagactcgcagcatggtggaaaagatgatgtatgaccagcgacagaagtccatggggctgccaacttcagacgaacagaagaaacaggagan

SEQ ID NO: 32203 - DNA, 500 bp, Homo sapiens
  misc_feature (1)...(500): n = A,T,C or G
gtggagnnnnnnnnnnnncctcgatattcgtgtgccgtgtgcnggaannccccatcttcctgctggtgggcctgtcccaggtatgcttgtcatccatggctgcgggcatggtcaccttcctgcccaagttcctggagcgccagttttccatcacagcctcctacgccaacctgctcatcggctgcctctccttcccttcggtcatcgtgggcatcgtggtgggtggcgtcctggtcaagcggctccacctgggccctgtgggatgcggtgccctttgcctgctggggatgctgctgtgcctcttcttcagcctgccgctcttctttatcggctgctccagccaccagattgcgggcatcacacaccagaccagtgcccaccctgggctggagctgtttccaagctgcatggaggcctgctcctgcccattggacggctttaaccctgtctgcgaccccagcactcgtgtggaatacatcacaccctgccacgcaggctgc

SEQ ID NO: 32204 - DNA, 450 bp, Homo sapiens
  misc_feature (1)...(450): n = A,T,C or G
natcatagtacatcgtccagngcggnggaattcacaaagggtctacagccaagtcccagctttgtgactagtgaccatgaagttacttagcttttctgagccatgggtttctcatctgtgaagtgggcctagcaggtagagtatttgcccaggcggtcaggagattaattcctacagagtgcctgcttctgagcctgcatgtagcagacaagactcacagctgggagggagtggtggcagtgaaaggtggacggtctggggccacttccttgcccttcccgtctctaatcagtgcatcccccaccccaagccctgtactggttcaactatgagctggtgaagagctggctcaatgggctcaggccgaaggaccagacttctgtgggcatgagctttgtggctggtggcatctcatggacggtggctgcagtgctgactctaccctttgac

SEQ ID NO: 32205 - DNA, 542 bp, Homo sapiens
  misc_feature (1)...(542): n = A,T,C or G
aggggnatagcagnccnnnnnnnctttgacatcgtccgcgttgngcaattcacgggaaacaatttaacaatttgtttgtgctttttctactgtttctgcgtctgacagccctccctgggtgtggctccgtccatgaagcctttgctggtttgtgtgtgcaggagatggggtcggagggcacggcttggcagaagatgtcgatttcacccgtggcgtacgagctgtgggccctgtggtgccaggtctgaccttggggaacacacaccccagctcggcctcggtggccctggcagtttctccccttcctcggggcttttctgttctgggcccctcctttccggaagcgagccccggagcacgtggagggagtggccgcggagcctgaggctgggaccttgggtggttctggctttttcccagggcctctccctgcagtgagagtcctgtgtcctctgcatcctgagtgtgtcctaaatcctgagggtggggtgagggcacaccccgcacttcntggtgtgtgtgtgtgtgtgtgagttatgaga

SEQ ID NO: 32206 - DNA, 472 bp, Homo sapiens
  misc_feature (1)...(472): n = A,T,C or G
agccccgcnttcgcagaccctagtcatagaggagcaattcctttcttgaaaccctctgacctctgagatttgctcccctctcaggccaagacttcttactcttcacagaccggcttcttcctgctgcccctgaaaccatgatgttacccagggttccagcctcagctctccttctgctcatggccttccctctcctgggtgatgccaagcacccccagggctttgacacccagctgtctggggattcttccccctctcctccacactgtccctccagcctggactccaatcaatggcagcctgccagacacctccgtctgggtattccacaccacgttcaaaatgcaattcttccctcggagactcactcttccccctgtctccaactcatcttccaaggtcccccaggcctgaagcagatgcatctcagacctcctccccacctcacccagttggtcaccgaggtctgcta

SEQ ID NO: 32207 - DNA, 453 bp, Homo sapiens
  misc_feature (1)...(453): n = A,T,C or G
tattgagnnactgagtacgctcggaggnaacccagattttacagagcgcacctcaaacgtacaagtcagtaggactccttatttggcgtgacccgacctggccgcggagcctgcatttcctcgcagcctgtcagtgccctccagccccgcgaccatgtggccacaatccacgcttctccggatcgcggtgcgccggaaccacggaggatgatgccagttacttgctttaccttttcagggctggctcctgatccactttgggggaggagaacatgagtagataatttcagggtgcagcccaatctgccagacttaaaaaaaccatcttgtgtctttggaggtgctgcttaatatcaaacatgcggtgccatgaagggaccctttgggggttgaataggagttaacccctgcgctctctttgcaactgtctctcttctcagagtggtgggggaa

SEQ ID NO: 32208 - DNA, 552 bp, Homo sapiens
  misc_feature (1)...(552): n = A,T,C or G
aggtgaagagcagccccnnnnnnnnttttgaaaatcgatccnctgntcagagtggtgcaattccttcagccgcctccttgacagtcttcggcaggaagggttcctcacagatgacttggtgagccaagaggagaatggtcagcaacagaagtacttgggggtgtgccggctcccagggccagggcggcggcaccggcgcctggacatcatcgtggtgccctatagcgagtttgcctgtgccctgctctacttcaccggctctgcacacttcaaccgctccatgcgagccctggccaaaaccaagggcatgagtctgtcagaacatgccctcagcactgctgtggtccggaacacccatggctgcaaggtggggcctggccgagtgctgcccactcccactgagaaggatgtcttcaggctcttaggcctcccctaccgagaacctgctgagcgggactggtgacccatggctgggggtgctgaggagagccgagttggactggctacccctcctggccacccagtactccctccagcctcagctggctgaac

SEQ ID NO: 32209 - DNA, 533 bp, Homo sapiens
  misc_feature (1)...(533): n = A,T,C or G
ggantatacnnaagganagannnnnnnaggggnnnnnnnngtttcgaaccactgtatcgagaggccgtattcggccatcgcggacgtcaccctcctgagtggattccacgccctgcgtgctgacctggagaagctgacctccctctctgaccgttacgtgagtcactttgagaccgaggggccccacgtcctgctgtattttgactcggtccccacctcccgggagtgcgtgggctttgaggctgtgcaggaagtgccggtggggctggtgcagccggccagcgcaaccctgtacgactactacaaccccgagcgcagatgttctgtgttttacggggcaccaagtaagagcagactcttggccaccttgtgttctgctgaagtctgccagtgtgctgaggggaagtgccctcgccagcgtcgcgccctggagcggggtctgcaggacgaggatggctacaggatgaagtttgcctgctactacccccgtgtggagtacggcttccaggttaaggttctccgagaagacagcn

SEQ ID NO: 32210 - DNA, 487 bp, Homo sapiens
  misc_feature (1)...(487): n = A,T,C or G
aggtcccggggnnnnnaatggagaccattgtagacactaggcagtggcgcggaattccccgcctctcccgtcagggcccaagtccctgttttctgagcccgggctgcctgggctgttggcactcacagacctggagcccctgggtgggtggtggggaggggcgctggcccagccggcctctctggcctcccacccgatgctgctttcccctgtggggatctcaggggctgtttgaggatatattttcactttgtgattatttcactttagatgctgatgatttgtttttgtatttttaatgggggtagcagctggactacccacgttctcacacccaccgtccgccctgctcctccctggctgccctggccctgaggtgtgggggctgcagcatgttgctgaggagtgaggaatagttgagccccaagtcctgaagaggcgggccagccaggcgggctcaaggaaagggggtcccagtgggaggggt

SEQ ID NO: 32211 - DNA, 454 bp, Homo sapiens
  misc_feature (1)...(454): n = A,T,C or G
agggccgnnnnnaaattgactgactncnctggaagngncgnggaattctgaccgctcagcctgaagagcagagaatgccatgggtgggactgtgggggtcggatcgtggggttgttggcagagggcaaccctgggccccacaccgtgtggacaggcagacaccagattgtccaggagcaggagctgctgggactgcgctggccccggacctagtgggccttctcctggctgctgagatgtcgtctgtgactggcctggctggagggggagtgttgacaacccaaagctgttctccagtctggggagggagaggcagggtccccaatgtccgagctgcatctggacgctgctcttaaaggacctcctggggcaggggagcggtagggtctggactgggcagatgctgtatgacctccctgagcacccgtgactgccccatgctttcccctttgtg

SEQ ID NO: 32212 - DNA, 491 bp, Homo sapiens
  misc_feature (1)...(491): n = A,T,C or G
agagtnnaggnnnnnnnnnaatcgaagaccattggacagtccggnggaattccaacagccatcaggagtgtttcttgaatgccccaggtgtggaggacttggtctgtgaccacctagaaccccagagctgaacaggaagccgtccctgcagcaacaagagggctggaagggggagctgcaggccaccctcggctctcccactgctggggcggtgatgttcgggtgacatgtttgaaaaatactcttaaagataccaactgttcccttatatggctaatggtttgtgcagccaccagcgatggcggcccctattagagaccaggtttgttaaaacaccaaatattgctgtccacactagacattaaccggcttcagaaaagatggacaccttttcccacgctgtttcgcttcttaactttggtccagctntagccaccacacagcgtgtgagggactgctgctgcggagtcagcctcgtttgtccctccgcc

SEQ ID NO: 32213 - DNA, 493 bp, Homo sapiens
  misc_feature (1)...(493): n = A,T,C or G
agcgtnnnagggagagcnngnaatcgaagacccctagagagtcagtnggaattccgncactctgctggacttccgccctcggcagtttgtgctggtggatggggagctcaaagtgacggacctggatgacgcacgtgtggaggagacgccgtgtgcaggcagcaccgactgcatactcgagtttccggccaggaacttcaccctgccctgctcagcccagggctggtgcgagggcatgaacgagaagcggaacctctataatgcctacaggtttttcttcacatacctcctgcctcacagtgccccgccttcactgcgtcctctgctggacagcatcgtcaacgccacaggagagctcgcctggggggtggacgagaccctggcccagctggagaaggtgctgcacctgtaccggagcgggcagtatctgcagaactccacggcaagcagcagtaccgagtaccagtgtatcccagacagcaccatcccccag

SEQ ID NO: 32214 - DNA, 502 bp, Homo sapiens
  misc_feature (1)...(502): n = A,T,C or G
ggagggnccnnagggcccccaatgagacctnccagnntgctacagtanagngcggnggaantccttcctgggcatgtttttgtatgaatatgcaagaaggcatcctgattactctgacgtgctgctgctgagacttgccaagacatatgaaaccactctagagaagtgctgtgccgctgcagatcctcatgaatgctatgccaaagtgttcgatgaatttaaacctcttgtggaagagcctcagaatttaatcaaacaaaattgtgagctttttgagcagcttggagagtacaaattccagaatgcgctattagttcgttacaccaagaaagtaccccaagtgtcaactccaactcttgtagaggtctcaagaaacctaggaaaagtgggcagcaaatgttgtaaacatcctgaagcaaaaagaatgccctgtgcagaagactatctatccgtggtcctgaaccagttatgtgtgttgcatgagaaaacgccagtaagtgaa

SEQ ID NO: 32215 - DNA, 455 bp, Homo sapiens
  misc_feature (1)...(455): n = A,T,C or G
ggggcctnnnnnnnaactgactgagtncntatgacgnnggnggaattctgcgggagcagctacccaggcttccctggagtcggccccacggatcatgcggctggtggccgaatgcagccgctccagggcccgggcaggcgagctgtggctgccgcatgggacagtggccactcctgtgttcatgccagtgggcacgcaggccaccatgaagggcatcacgaccgaacagctggacgctctgggttgccgcatctgcctgggcaatacctaccatctgggtctaaggccgggacccgagctgatccagaaagccaacggtctccacggcttcatgaattggcctcataatctgctaacggacagcggcggtttccagatggtgtcgctggtgtctctgtccgaggtgacggaggagggcgtncgcttccgctccccctacgacggcaatgagaccc

SEQ ID NO: 32216 - DNA, 495 bp, Homo sapiens
  misc_feature (1)...(495): n = A,T,C or G
gacgccggcnnnaaactggaactttaggctacgcagngacgnggaattccagcatcaagttcgtttggacatccggcaaggcctcttaccaaatgaggcgccagataacttaataagctcaaaagaaaaaaacatttaaaaagaaagaaaaaaaaaaaaaaaaaaaaaaccccaccttttctttttttttttaccaaaaggggttaacggacccggagggggggcggtggggggggggaacccccccaaaaaaaaaaaaaaaaaaaaaaaaaaaaaaaaaaaaaaaaaaaaattaaaaaaaaaaaaaaaaatttttttcacccccctggtttcaaattcccaaaagttgaaaaagggtttaaaaatttcttttacgcgccctggtgtccgggggcccccggggagaacggggcccccacccaaattccccaagagggggcctccccgggtcccggggcccccccaaagcccccgagggcctttttgaaaaaggcc

SEQ ID NO: 32217 - DNA, 490 bp, Homo sapiens
  misc_feature (1)...(490): n = A,T,C or G
cgccttctnnccatgaganctaagtgctattgtgcaggaactcgaggggccatgcagccccgggtactccttgttgttgccctcctggcgctcctggcctctgcccgagcttcagaggccgaggatgcctcccttctcagcttcatgcagggctacatgaagcacgccaccaagaccgccaaggatgcactgagcagcgtgcaggagtcccaggtggcccagcaggccaggggctgggtgaccgatggcttcagttccctgaaagactactggagcaccgttaaggacaagttctctgagttctgggatttggaccctgaggtcagaccaacttcagccgtggctgcctgagacctcaataccccaagtccacctgcctatccatcctgcgagctccttgggtcctgcaatctccagggctgcccctgtaggttgcttaaaagggacagtattctcagtgctctcctaccccacctcatgcctggccccc

SEQ ID NO: 32218 - DNA, 456 bp, Homo sapiens
  misc_feature (1)...(456): n = A,T,C or G
aggggcggnnnnnaattgactgcgtncataggccgngnggnggaattccaggtcctgtggaacatcttgaagcccctcatcagtcacaagtttgggaagaaagtcatctatttcaactacctgagtgagctccacgaacaccttaaatacgaccagctggtcatccctcccgaagttttgcggtacgatgagaagctccagagcctgcacgagggccggacgccgcctcccaccaagacaccaccgccgcgggccccgctgcccacacagcagtttggcgtcagtctgcaatacctcaaagacaaaaatcaaggcgaactcatcccccctgtgctgaggttcacagtgacgtacctgagagagaaaggcctgcgcaccgagggcctgttccggagatccgccagcgtgcagaccgtccgcgagatccagaggctctacaaccaagggaagcccgtg

SEQ ID NO: 32219 - DNA, 454 bp, Homo sapiens
  misc_feature (1)...(454): n = A,T,C or G
agccgcttttnnnccagatagcactgcatgtgncgnggcanncgctgtcttatgagactcttcagatattttccatgccttctctgattgccatcttcccttcccatttgattttcttcagcgggaagagaggcagagcacttgtcctccccttggggagaatcctcaccagaagagctccgctttgggagtctgacctacagtgatccccgtgagcgagaacgcgaccagcatgataaaaataaaaggctcctggaccccgccaatacccagcaatttgatgactttaagaaatgctatggggaaatcctctaccgctggggtctgagagagaagcgagctgaagtgttgaagtttgtctactgtcctcctgaccctcacaaagggatcgagttcggcgtgtactgcaaccactgccggagtgaggtacgtggcacgcactgtgccatctgca

SEQ ID NO: 32220 - DNA, 457 bp, Homo sapiens
  misc_feature (1)...(457): n = A,T,C or G
agccgttttnnnnnaacggtcagcactgcatttgncgnggcattcctactgggctccatcctgagctccatggagaagccacccagcctcggtgaccaggagactcggcgcaaggcccgagaacaggccgcccgcctgaagaaactacccgagcacgagaaacaacagagcgtggagtttcgtaaaaggatggagaaggaggtgtcagatttcattcaagacagtgggcagatcaagaaaaagtttcagccaatgaacaagatcgagaggagcatactacatgatgtggtggaagtggctggcctgacatccttctcctttggggaagatgatgactgtcgctatgtcatgatcttcaaaaaggagtttgcaccctcagatgaagagctagactcttaccgtcgtggagaggaatgggacccccataaagctgaagagaagcggaagctgaaggagc

SEQ ID NO: 32221 - DNA, 489 bp, Homo sapiens
  misc_feature (1)...(489): n = A,T,C or G
gggtnnagggggnnnnnntttcgagacccatagatagtcctgnggaattcgctctgcccagtggggctgggagcagttggaagttacttgcaccccatacctgaaagaaaccctcaactccatctggaatgtggaggaccatatcaatcccaagttgccaaacatcagcctggatgtgctacagcccagttttcctgagatcttgctggaatcccacatggtcatgatccgggggaacagtggcctcaaacccaaggacaatgagttcacgtccaaaccctggcactggcctatcaactatcagggcctacgcttctcaggggtcaatgacacagatttccgagtctatctgcttggcaacccggtggtttggtggctgaatctgttgagcatcgccctctacctcctctcagggagcatcattgctgtagccatgcagagaggggcacggctgccagcggaggttgcagggttgtcccaggtcctgct

SEQ ID NO: 32222 - DNA, 480 bp, Homo sapiens
  misc_feature (1)...(480): n = A,T,C or G
agggtgccgggtgctnnnttacgtgacttagtgtactcctcgggaaagccgnggaacacgcggggacatggccgtgacgctctgcagcgtcagtgctgctggcgggtgcaagaaactggtggcgacactgcctgagcccgctgctgttgccaaggtgacgaggcataaagccgcggtggatcggtgcgtgggggcgcggagtgggtggtgaagggagaacgaagctcgagcggaaagacaggaccgcgaccgcttgtcaggggattcggcttccagtcccccttccagagggcgtccttctgcagccaggcctctgtcttcccccgcccccacacgagtctcacttcatcaccatgctggagtgcagtggcactatctgagatcactgcaatctccgcctctcggattcaagcgattctcgtgcctcagcctcccgagtagtagctgggagtacaggcatgtgccaccatgcccagctan

SEQ ID NO: 32223 - DNA, 477 bp, Homo sapiens
  misc_feature (1)...(477): n = A,T,C or G
agggtgccggntcctnncccctgaaaaaatgggtacctcggcagngcgnggaattcgaaggtgctgagcaccgaggagatggagctgtacgagctggcgcaggcggtgggcggcgctatcgaccccgacgtgttcaagatcctggtggacctgctgaagctgaacgtggcccccctcgccgtcttccagatgctcaagtccatgtgtgccgggcagaggctagcgagcgagccccaggaccctgcggccgtgtctctgcccacgtcgagcgtgcccgagacccgagggagaaacaaaggcagcgctgccctcgggggagcattggccctggcggaacgcagcagccgcgaaggatccagccagaggatgccacgccagcccagcgctaccaggctgtccaaggggggcgggcctgggaagagccctacacggggcaccaccttaggagtgggcagagacttgctgcatctttgtccc

SEQ ID NO: 32224 - DNA, 499 bp, Homo sapiens
  misc_feature (1)...(499): n = A,T,C or G
aggatcacaaaaaatttgaaaactgagtccntacgcaagngcnggaattcggncgggcatgtgccctgagcatcgaagagtcatgcaggcctggagataaagtccctccttttaaaccaaacgctggggaagaatctgtcatgaatcttgacaaattgagatttgctgatggaagcataagaacatcggaactgcgactcagcatgcagaagtcaatgcaaaatcatgctgccgtgttccgtgtgggaagcgtgttgcaagaaggttgtgggaaaatcagcaagctctatggagacctaaagcacctgaagacgttcgaccggggaatggtctggaacacggacctggtggagaccctggagctgcagaacctgatgctgtgtgcgctgcagaccatctacggagcagaggcacggaaggagtcacggggcgcgcatgccagggaagactacaaggtgcggattgatgagtacgattactccaagcccatccaggggcg

SEQ ID NO: 32225 - DNA, 519 bp, Homo sapiens
  misc_feature (1)...(519): n = A,T,C or G
agaaaggggnnnnnnnaagannctcgaccccagtccagtgtgggttagtactcgctccacccatcctcagcatcctaacttgagggggcaggagagggctttgcttttataatccggattaaatttcccttccctgggcacaagtgcctcatgagggcccggggctgctggttgggagggaaagcatccccgtttttgcagtgaggaggccggccgagggctggggttccacttatacccttggcagaatggctgttgaggggcaggcgctgcccagtgcccacgtctggaaagctaattcccgggtggacgctgaacatacctgctgagagactctgtcccctggtttccaggacagttgtcacaagctgagtggggggggactcccaggacttgagggacccagtcccaccccaaactgctccccctcccccaaattccctttctcctcctgctctttctccccgctgtgcctcccccagttacccacagaagtgcctgcctctccagcgctcacan

SEQ ID NO: 32226 - DNA, 487 bp, Homo sapiens
  misc_feature (1)...(487): n = A,T,C or G
gggcgtnnntnnccacgactcgacagcntgnggcaattccnctgccaagcctacgtgaaccaaggcgagaacctggagaccgaccagtggccgcagaagctgatcatgcagctgatccctcagcagctgctgaccaccctgggccccctgttccggaactcccagttggcacagttccacttcaccaacagagactgcgactcgctcaaggggctctgccgcatcatgggcaacggcttcggcggcctgcatcttgttcccccacatctccccctgtgaggtgcgcgtgctcatgctcctgtactcgtccaagaagaagatcttcatgggcctcatcccctacgaccagagcggcttcgtcagtgccatcccgcaggtcatcaccacccgcaagcaggcagtgggacctggtggtgtcaactcaggcccagtccagatcgtcaacaacaagtttctggcatggagtggtgtcatggagtggcangan

SEQ ID NO: 32227 - DNA, 494 bp, Homo sapiens
  misc_feature (1)...(494): n = A,T,C or G
natcgatcccctgtctcgagngttggaattcgtcaccctggctggagtgcagtggcaccatcacggcttatggcagccttgacctcccaggctcagaccatcctcccacctcagcttcttgagtagctgggactacagacgtgtgccaccatccccagctaattctttgtatttttttgtaggaacggggtttctccatgttgcccaggctgatctcgaactcctggattcaagtgattccccctgcctcagtttcccaaagtgctgggattacattacaagtgtgagccaccgtgccggcctgtgcccttaatttgaaaaacagttcccttaagtaatatcatgtgagcatggaatatcgttgaatgagacatcatcacgtcgatgtcttttttattgcttatcacgggttgatggtggggagaaaggtgccctctactaggcacaatggcacaactgccaagaggccatgtnccctaaacaccagcttactg

SEQ ID NO: 32228 - DNA, 497 bp, Homo sapiens
  misc_feature (1)...(497): n = A,T,C or G
nccagaggccnaggttnccccccttggtaccattagatgagcgtccgancnncccctnctaggaagtagttcaatgaaaaacctacaaatgcccaaataaacattcgcttacatattatatatcttgggcttctttttatgacagttcattcagggacccagtcagtaaacaggtagttaacttcgtgtaaccaagcaagggttttgtttatcttttttaaagtagaaaaaagggaggctcaaactctctctttctccttgtcataactattggtttacagtctttatttgtttaaaagtaaagcacattgtatgtatttatttggcaatacatgaggccattaagaccctgagcctaaggtaccacaggtagtctcatttgcctcttggcctgtgaactccacttagaaagtcattgaacttgggcagacataattctagtgtctgttccaaacgcactgtgtcacagaagctagaattaccattagaggcacaaa

SEQ ID NO: 32229 - DNA, 495 bp, Homo sapiens
  misc_feature (1)...(495): n = A,T,C or G
agggccccggcnncccctctattagctncagtgagtcntcgnaagngcgnggaanncgaaagcctaattctccttgggtctgggaaccaggcttgtggtccttctgtgtctgttttccagcacagccagtttcaacgacctcttcctgaccttgtatgactgggtttgggggctatcattgtagtgagtggcggccctgggactgatagcaaggacagtggtgagctcagttcactcccactgggcccaacaacactggacacccggccactgcagtcttctgccctgctggacagcagcagcagcagcagcagcagcagcagcagcagcagcaacagtaacagcagcagttcgtccggacccaacccttctacctcctttgagcccatcaaggcagaccccacaggtgttttggaactccccaaagagctgtcagaaatctttgatcccacacgaggtaggctgctgcattcctccctgatgctagggagaagg

SEQ ID NO: 32230 - DNA, 542 bp, Homo sapiens
  misc_feature (1)...(542): n = A,T,C or G
ggcacggagaannaatggggcgnnttcgacngngctncagnannagncgaggaannnctcaacatctactgtgtcccgctcaaagggctgactacanccagccacttctgtcggagcctgtgtctcgggacctggatccgcctctgtgcaatgacatccgagcccttgtggtgtctcggagggagaagactgggatgtccctataatgcnncatcactanagaanngctggatgctggcaactcacgttggcgactctattgaagaagctgcacaaggggaaatctggctcatagnggaaccgagagcanaaggcgagcatgtgcgcaggattctgcctcccgaagaagggagtgacctccatccttccagtgttgcgggaaggagtcctgactggcagccctgagcagaaggaggaggcagccaaagccttaggcttggtaatccgcctgacctcggctgacgccctgaggccctccgtggtcagcatcactggccctctgatccgcatcctgggggacaggttcagctggaatgtgaagg

SEQ ID NO: 32231 - DNA, 510 bp, Homo sapiens
  misc_feature (1)...(510): n = A,T,C or G
gggaananttttgaaaccccttnnnnnaatcgaaccacctatcagngnggnggaattcggcgacagcagcgtgtccagggcggctgtggaggtgttcgggaagctgaaggacctaaactgccccttcctcgagggtctgtatatcacagagccaaagacaattcaggaactgctgtgcagcccctcagagtaccgcttggagatcctagagtggatgtgtacccgggtctggccctcactgcaggacaggttcagctcactgaaaggggtcccaacagaggtgaagatccaagaaatgacgaagctgggccacgagctgatgctgtgtgcgccagatgaccaggagctcctcaagggctgtgcctgcgcccagaagcagctacacttcatggaccagttgctcgataccatccggagcctgaccattgggtgctccagttgctcgagggagaagaacgagggctttgctggggagctcttctctagcccccacctgcagatngctctgaa

SEQ ID NO: 32232 - DNA, 491 bp, Homo sapiens
  misc_feature (1)...(491): n = A,T,C or G
cggggcnaggggnnnnnaattgaaaccctatcgtagaccctagtccatgtggtggaattcgcgtccgcacgccggcggggcgaggcggcccggccctgcgcgtcaggcctgagacctgggaggaagctggagaaaagatgccctctgaatctttgtgtttggctgcccgggctcgcctcgactccaaatggttgaaaacagatatacagatggagtcttgctctgttgcccaggctggagtgcagtggtgccatcttggctcactgcaagctctgcctcctgggttcatgccattgtcctgcctcagcctcctgagtagctggaactatagacgtccaccatcatacctggtgaatttttgtatttttagtagagacggggttttaccatgttagccaagatggtctccatcttctgacctcgtgatccacccacctcggcctcttagagtgcttgggattacaggcgtaagccaccactcccggccgatt

SEQ ID NO: 32233 - DNA, 471 bp, Homo sapiens
  misc_feature (1)...(471): n = A,T,C or G
ctcgatacccctcattgatgcacactaggcagngcgnggaantccgagggctgggattactggcataagccaccgcgcccggccaggttacacttgattttaacttgctacttggactactctgaaagtcctgtgtaatgattctgaacatatatttcagaatatgacacattaattcatgcataataatatatagtttgaattatgaacttacctttcatgaagtcagagatgcctctgacattcctgcatttatccattcagatggaagcttgatataaaagattataaaacttttaacaggcttaacttcttctaatttgaaatgcatgcactacctctttgtagcttctaaatgaactggcccaaaaccagtcagattttacagttggatggtaggtttctttactgaactatgaaaacagcagtgccaatggggaaaatgtgattgctgcattaagaaaaaataan

SEQ ID NO: 32234 - DNA, 476 bp, Homo sapiens
  misc_feature (1)...(476): n = A,T,C or G
gggcctccaatcgagaccataggtagagcgccgtaattcgnctcttttctgtccccacccagaccataagcactggggaagcacatctgtcttcctcgctgcagcctctggtgcctgtgtgtctgcgtgctgacaccgggcatggccaacgaacatgttgtcttgtcacggtgcacggtggctcctttgcccgtgcggccttctcagcagctgctgcttctcctctaggactgaccgcaagtctcagagcgcgccggctggtgttttgtcgccctcaggagtgtggccgaggcccaggtgtgggtttcccgtgcccgccgtgacctggcagtgagggtctgtgcttctgtcagtgccgttggcctgagacatgtctgtcctggagaccagcacgtgtgggtgccgactctcagagagccccttgctcacagcaccaaaccccttgctgtgtttttattattaagaaatagaaaaca

SEQ ID NO: 32235 - DNA, 511 bp, Homo sapiens
  misc_feature (1)...(511): n = A,T,C or G
gcccggangattgatnncccctnnnnnnatcgatncactatccagagnggnggaattcccacctgatcgccagacctcagggttttccggagctgaagaacgacacattcctgcgagcagcctggggagaggaaacagactacactcccgtttggtgcatgcgccaggcaggccgttacttaccagagtttatggaaacccgggctgcccaggactttttcagcacgtgtcgctctcctgaggcctgctgtgaactgactctgtaggtgaggggtccacataagagggaaagagttatgccttctgtctgccacctagcaacctgtgtgctgtttgctacagacactgcgtcgctttcctctggatgctgccatcattttctccgacatccttgttgtaccccatgcactgtgcatggaggtgaccatggtacctggcaaaggacccagctttccagagtcattaagagaagagcaggacctaaaacgcctactggatccagaaatggtag

SEQ ID NO: 32236 - DNA, 490 bp, Homo sapiens
  misc_feature (1)...(490): n = A,T,C or G
tgtggcnaggggnnnnnactgagaccatatcgagtgccgtggaatactctggttgttaagggcacaaacttgatcatccaggaaacacggcaaaaactcggaataccccagaagagcctgtcttgctctgaggagttcaaggaactgatggacctgccgacgtgtggagccaggaacttaaaacaacatttagccaaagccacagcttcagggattatggggagcccaaaaccagccatcaagtccatctcggcctcagcactcttgaagcaacagaagcagcggatgttggagatgaggagaaggaaatcagaagaaatacagaagcgatttctgcagagctcaagtgaagttgagagcccagctgtgccatcttcatcaagacagccccctgctcagcctccacggacaggatccgagttccccaggctggagggagccccggccacaatgacgcccaagctggggcgaggtgtcttggaaggagatg

SEQ ID NO: 32237 - DNA, 493 bp, Homo sapiens
  misc_feature (1)...(493): n = A,T,C or G
gggtgcaaggaggggnnaatcgagnccntatcgagancactaaacagtgtggtggaattcggccagaaggctatcctggaaaggcccagccttcaggagcctatcggtgatacaggacgcagggctccgaggtgtgacctgacttggagctggagtgaggcatgtgttacagagtcaggaagggctgccccagcccagaggaaagggacaggaagaaggaggcagcgggacactctgagggccacccctactgagtcactgagagaagctctctagacagagataggcagggggcccctgaaagaggagcaagccctgagctgcccaggacagagagcagaatggtggggccatggtgggcccaggattcccctgctggattccccagtgcttaactcttcctcccttctccacagcttcctaaccaagcgaagccggcaggtctgtgctgaccccagtgaggagtgggtccagaaatatgtcagcgacctgg

SEQ ID NO: 32238 - DNA, 493 bp, Homo sapiens
  misc_feature (1)...(493): n = A,T,C or G
agggccccggggccccaactaggccaactgatagtcntcgcaaggccgnggaannnagggccaaggcattaagactgaccttccacagtacatcattgggctgctgggcctgtccaaggaccccctggaggagatggggccactgagtcaccttgaagaagaacagcccccagcacctgagtccccagaggtgagtagcagaggctgggggacccccgctcatcttgttctttccagagtggaccacgcacccgcagaaagggctgggtttgccgaggtcttgcatgtagcttaattagcatcggtgactttggaggcaaggtgacggcacgtgggactgccctgccttggaagtcgggtgggggcagtgctggaggggcactggacaggtgagttttgcaggacgtgtaagaatttcccaggaggagggcacagctgtgagcaaaaaagtacagaaagtcacaagctgagttggagaagtttggacagggga

SEQ ID NO: 32239 - DNA, 490 bp, Homo sapiens
  misc_feature (1)...(490): n = A,T,C or G
aggcgcnnagggggnnnnnnattgagaccatattgagtgcactagaacacgcggggaattcatagcttagagaaaccttcaggagactgctatcatggcagagaagcccaagctccactacttcaatgcacggggcagaatggagtccacccggcggctcctggctgcagctggagtagagtttgaagagaaatttataaaatctgcagaagatttggacaagttaagaaatgatggatatttgatgttccagcaagtgccaatggttgagattgatgggatgaagctggtgcagaccacagccattctcaactacattgccagcacatacaacctctatgggaaagacataaaggagagagccctgattgatatgtatatagaaggtatagcagatttgggtgaaatgatcctccttctgcccgtatgttcacctgaggcaaaagatgccgagctcgccttgatgaaagagaaaataaaagatcgctac

SEQ ID NO: 32240 - DNA, 492 bp, Homo sapiens
  misc_feature (1)...(492): n = A,T,C or G
aggggcnaggggnnnnntttgaaaccctatcgtagtccatagtcagtgtggtggaattcatcaaagcgccactgccctgcacttcctgggccgcgtggccaacccgctgagcacagcatgaggccagggccccagaacacagtgcctggcaaggcctctgcccctggcctttgaggcaaaggccagcagcagataacaaccccggacaaatcagcgatgtgtcacccccagtctcccaccttttcttctaatgagtcgactttgagctggaaagcagccgtttctccttggtctaagtgtgctgcatggagtgagcagtagaagcctgcagcggcacaaatgcacctcccagtttgctgggtttattttagagaatgggggtggggaggcaagaaccagtgtttagcgcgggactactgttccaaaaagaattccaaccgaccagcttgtttgtgaaacaaaaaagtgttcccttttcaagttgagaacaaa

SEQ ID NO: 32241 - DNA, 467 bp, Homo sapiens
  misc_feature (1)...(467): n = A,T,C or G
ttctgatggcgtgcatcnngcgnggcattcctcccacgccttcttcaggtagccgtgagtccctggtgggcatggggacatgttgagggaggcctgacgcaccatcaggacgtgatgggaacagtgggctcaggcggtgagatttgggggagtatccaggcaggtgagccacaggggagggtgaagtaagaaagaggttggtcatcactgatttgactcgggataacctagaggtacacacggcagtggcccttgtcacagggaggatgaggagtggccctcagtgcattaccacagggcactgctctgggctcggcaggagggaggccatggtggcctctgggctgggaaatactgtttcactgtttgctcactgctgcaggaaggctgtggggacctggagcggccgtttttggagacaggcctggcaggacctcctggagggctatgtgtgggggtgggagctg

SEQ ID NO: 32242 - DNA, 472 bp, Homo sapiens
  misc_feature (1)...(472): n = A,T,C or G
nctggactggntncctaggacangccgnggaattcgccttccgcgacatagaggaggtgagccaggggctgctcagcctgctgggcgccaaccgcgcggaggcgcagcagcgacggctgctggggcgccacgagcaggtggtggagcggctgctggaaacgcaagacggtgccgagaagcagctgcgagagatcctcaccatggagaaggaagtggcccagagccttctcaatgcgaaggagcaggtgcaccagggaggcgtggagctgcagcagctggaagctgggcttcaggaggctggggaggaggacacccgtctgaaggccagcctccttcagctcaccagagagctggaagagctcaaggagattgaggcggatctggagcgacaggagaaggaggtcgacgaggacacgacagtcacaatcccctcgggcgtgtacgtggctcaactttaccaccaagttagtan

SEQ ID NO: 32243 - DNA, 491 bp, Homo sapiens
  misc_feature (1)...(491): n = A,T,C or G
gaggccgnggnnccccccagttaccttcagatggcgtccgaanncccaaggncagaccaaggttgctgatctcagtcccactgtcttcagccagctgaagctgtggggctgggctggcagcctttattgtcatcttgcttcaccatttttttttctctctcttttcattctattttaagtttagaccaaaaaaatacagagtcatcccctacccccacccctctagagaccctccagctaaaaacagagcctgagttcagggacccaagtggtgagcggcggcttttgggggtgagggagcttgggtagatgaggctcctggctgagccctccctgtggtgatcccagcctaagatggcccctcttccctcctggtgggagacagaggactggaccctgggtctcaggttccagcaagtcaggctagggacctggggggaggagacccatggacttcacccatactcagtgagggggctcctgccgtcctg

SEQ ID NO: 32244 - DNA, 473 bp, Homo sapiens
  misc_feature (1)...(473): n = A,T,C or G
ntctgatgtgacctncnatgggacgnngcanncgnggagcccaggcagtaacacttgcttgcccactgctcacgtctgatgggtgcccccattcctcacaggctatggaccactacccatttgcgaggccccgctagcagacccccaccatacatgctctgaaaataagagtctttaaaaagcgtttttctgtgagacatcatctctgaacttgaacatgttcattacggcaagattgtaatcctgctgtattcctcgccctctgtattctatccctttaaaaactagatatttaaacattttatcctaatgcgtttcatcagaacactttgcactttatcttactaaaaagctgtgagagctctccgagactgaaggggacctacagcgccagctatatgactgcggcaatgacaaagatgactctatacagtgaacctgaacaactcttatttctaacggaatccagtcag

SEQ ID NO: 32245 - DNA, 471 bp, Homo sapiens
  misc_feature (1)...(471): n = A,T,C or G
nactgatagcgtgcgctaggcanngcgnggaattcggaaggtactatgcctggatgtgcacgtaggccggatttatgcttctctctacccagacatctcagtggagtaaagagtaacagagcagcattgctgccaacatgtctcgcctcccgccacagggcgttttttctcctatctcagaacaaacgtacaatcaggttttatactgagacattcagttcccaggggcaggcagaagacagaggcctttctcttatctcaacggcaaggggccttcctcttttactaatcctcctcagcacagacccttcacgggtgtcaggctgagggacggtcaggtctttcccatcccaccaggccatatttcaggctatcacgtggggagaaaccttggacaatacctggctttccagggcagagatccctgcggctttctgcagtgcattgtgcccctggtttatcgagaatgga

SEQ ID NO: 32246 - DNA, 474 bp, Homo sapiens
  misc_feature (1)...(474): n = A,T,C or G
ttttgattgcantacgaagngccgnggaantcctttgttgttcgttcgtgcgggcgtgtgttcttcggtcgcggtcggtggcggctcggcggagcaattggacgcgctggtgaagaaagacaagggggtggtcttcctcaaggggacgccggagcacccccagtgcggcttcagctacgccgtggtgcacatcctgcggctgcacggcgtgcgagattacgcggcctacaacgtgctggacgacccggagctccgacaaggcattaaagactattccaactggcccaccatcccgcacgtgtacctcaatggcgagtttgtagggggctgtgacattcttctgcagatgcaccagaatggggacttggtggaagaactgaaaaagctggggatccactccgcccttttagatgaaaagaaagaccaacactcccagtgatggcggccatgtgctcgctgaacatagaggaagcg

SEQ ID NO: 32247 - DNA, 502 bp, Homo sapiens
  misc_feature (1)...(502): n = A,T,C or G
agggcccgnagggncccccccctggggnnaccctagngagnctncgcaagngcggnggaantcctggctgcaattatgtcacaagtccctgccgtccccacccctgtcccactgcaccaagccctttaagacccatgactcacaggctgggcgtggtggctcatgcctgtaatcccagcactttgggaggtcgaggcgggcagatcaccttaggtcgggagtccaagaccagcctggccgacatggtgaaaccccatctctactaaaaatacaaaaattagccgtgtgtggcgcgcgcctgtggtcccagctactcgggaggctgcgtcacgagactcgcgtgaacctggggggcagaggttgcagtgagctccacttcattccagcctgagaaacagagtgagactctatctcataaaaaaaaaaaaaaaaaaagatgtaaaaaaagagggccttttcttcctttaaaaccagactccaagatgcatgtttgtgcgtgcca

SEQ ID NO: 32248 - DNA, 488 bp, Homo sapiens
  misc_feature (1)...(488): n = A,T,C or G
agggccaggggnnnnnntttgagaccctattgagagccgtggacagaggagagagaacagagggaagacagtgaggggcggtgtggggactaccaccctgagggagaggcaccaaggctccttgatgcanagggtctcatggtgaccgggggccggagggcagaggccaaggagactgagccagaaagcctggaacatgtcaggggccaggaggagcagccaacacaccaggcccctgcagaagctgcgccggagtcagtcggggaagccgagacggctgaggccatgggcagtgccataggaggtgctgccaacagctggagcgaggccccgctccccgggtccctcctagacgtctctgtcccaaggagtcgcgtgcacctctcgagaagctcctcacagcgtcgctcccggccctcttttcgtcggactccggcctgggagcagcaggaggagcccccagcccccaaccctcctgaggaggagct

SEQ ID NO: 32249 - DNA, 457 bp, Homo sapiens
  misc_feature (1)...(457): n = A,T,C or G
nactgataaccctgggcagngncgnggaattccacctgaggataaactttaacaagaaacgcccccagaagaagaggaaaaagtctatctacccaaagacgcatccgtggatgttcacagcagaactgaccacaacagccacaaactagcagcatcctgagtgtccttccgtagaccgaaggaccaacacgcacgggacgcgacccagccatggaaaggagccaggctcagacccaggcctcagcacaggtgcaccgtgaggatgtcccacccagtgagagacgccagacacgaaaggacacacaaggcaggtggctcacgccagtaaccctggcactttgggaggcggaggtgggtgggtcacttgaggtcaggagttcgagacaagcctgggcaatatggtgaaacctcgtctctactaaaaatacaaaaattaggccaggtgcagtggctcacg

SEQ ID NO: 32250 - DNA, 483 bp, Homo sapiens
ggttttggtccctagtcagtgtggtggaagttaccagtaacatgatctctagactgggacggtggggttcctgccggctgtattcgggccttggactggactgagaagctacggtggagaccatccatggaaaagaacccccctgatgatacgggccccgtgcacgtgcctttggggcatattgtggccaatgagaaatggcgcgggtcacagctggcgcaggagatgcaagggaaaattaagctcattttcgaggatggcttgacaccagacttttatctgtcgaacagatgctgcattctttatgtcaccgaagctgatttggtggcaggaaatggctacagaaagaggcttgttcgggttagaaattccaataatcttaaaggaattgtagtcgttgaaaaaacccggatgagtgaacaatacttcccagccctacagaagtttactgtgctggaccttggaatggtgctgcttccagtg

SEQ ID NO: 32251 - DNA, 490 bp, Homo sapiens
  misc_feature (1)...(490): n = A,T,C or G
ggtctgagtccctagtccangnggtggagatcactataccgtgtggtggaatacctgcctggccatcctgctggagcaccgcgaccacatcatgcgcaatgggctggattataatgagctggccatgcactttgaccgccttgtgcgaaaacaccacctggggcgcgtcctgcgccgggctagggctctctttgctgattacctgcagtcagaggtgtgggactcaaaggagggggctgaggccacagccgcatcttgatcaggctttctcaagccctccatcggccccaccagatctccattctttgccatgagggccaacacatgagaccccacctccctccctgcctgccagccctagacttgttggagcatagagcccttcctccccaggcctaagtatgtggagctctgctttggcactgccccgcagaggccacgcctatttattctgtttctgttgttttgtttttaacaactatactttgcn

SEQ ID NO: 32252 - DNA, 460 bp, Homo sapiens
  misc_feature (1)...(460): n = A,T,C or G
nacctgagnaccctgtantcctncgnaagngcggnggaattcggaagaatcgcgaagggcggagttttggaggctggagttttgtaagatgattaacaatggcctcctccaacagccctctgccttgatgttgctcccctgccgcccagttcttacttctgtggcccttaatgccaactttgtgtcctggaagagtcgtaccaagtacaccattacaccagtgaagatgaggaagtctgggggccgagaccacacaggccgaatccgggtgcatggtattggcgggggccacaagcaacgttatcgaatgattgactttctgcgtttccggcctgaggagaccaagtcaggaccctttgaggagaaggttatccaagtccgctatgatccctgtaagtcaacagacatatctctggttgctgggggcagccggaaacgctggatcatcgccacagaaaac

SEQ ID NO: 32253 - DNA, 499 bp, Homo sapiens
  misc_feature (1)...(499): n = A,T,C or G
nttttgatcagcagtncagtgtggtggaattcganaaacaatggtgtgttgtttgaaaaccagctgcttcaaattggacttaagtctgaatttcggcagaatttaggtcggatgtttatcttttatggtaataagacctccacgcagttcctaaactttaccccaacactaatctgttcagacgaccttcagcctaacctgaacctgcagaccaagcccgtggacccgaccgtggaggggggcgcgcaggtgcagcaggtggtcaacatagagtgcgtgtccgacttcacggaggcgccagtcctcaacattcagttcaggtatgggggcaccttccagaacgtgtctgtgcagctgcccatcactctcaacaaattcttccagccgacagaaatggcttctcaggatttctttcaacgttggaagcagttgagcaatccacagcaggaagtgcagaacatcttcaaagcaaagcacccaatggacacagaagtcacca

SEQ ID NO: 32254 - DNA, 477 bp, Homo sapiens
  misc_feature (1)...(477): n = A,T,C or G
nttgattcctatncgngggttgatatcctagtaacgtggtggaactcctactgtgacatgtactttcatgtggaacttataggctatcctccaccaagaagttcttctcacatcaagattggtgataaagtgcgggtcaaagcctctgtcaccacaccaaaatacaaatggggatctgtgactcatcagagtgtgggggttgtgaaaggtgtgatggatgtcacatgtttcctatcaatggattcagattcaaatgcagaaactgtgatgactttgatttttgtgaaacgtgtttcaagaccaaaaaacacaataccaggcatacatttggcagaataaatgaaccaggcttcagcagaagaaacacttcctataaatctcgcccaaacaggaaaggacaaagatgcatgcataagtaaaaatatgacaggtcacaatcacgccggggtggtcctggggcgaggcccaagttccctg

SEQ ID NO: 32255 - DNA, 494 bp, Homo sapiens
  misc_feature (1)...(494): n = A,T,C or G
cgccccccagnngngnnnnattgagnccctcctcgatgagcactagtccagngtcgnggaattccctgggggccttcaaaaatcaaaaatccacccccaggccatgccctggacccactgcaccaggacaagaaatccaccccaggcctctccccagacccactgcaccaggacaagaaatccacccccaggccacgccccagacccactgccctaggatgtgggggtgggaaccaggtggtgctttgtaaagacgtgcaggtggtaaccccaggcccccacgctcggaaccctggccacaggatcatccaggtgtctgtgatttgcttcctcggtttcctttgtgagtggaaaataagtgttgcgtttgactagggtttaagagcagcaggcagcccctcagctcagcaggcagccccctcagctcagcaggcagcccaggtctcctgtttgacttctagggaccatgctggcgggaatgagaaactggtcaa

SEQ ID NO: 32256 - DNA, 488 bp, Homo sapiens
  misc_feature (1)...(488): n = A,T,C or G
cgccccccccgaaaaccnnnatcgagaccccattgagngccgtcggaaacacccaaggcccgagacccttcatccagggagacctcagcccccagcagaggaggagctttgcagcgggattcccttcgacgccttcaccgacctcaagaacgggtccctctttgccttccgagggcagtactgctatgaactggacgaaaaggcagtgaggcctgggtaccccaagctcatccgagatgtctggggcatcgagggccccatcgatgccgccttcacccgcatcaactgtcaggggaagacctacctcttcaagggtagtcagtactggcgctttgaggatggtgtactggaccctgattacccccgaaatatctctgacggcttcgatggcatcccggacaacgtggatgcagccttggccctccctgcccatagctacagtggccgggagcgggtctacttcttcaaggggaaacagtactgcgagt

SEQ ID NO: 32257 - DNA, 495 bp, Homo sapiens
  misc_feature (1)...(495): n = A,T,C or G
cgcccccccccgnngnnncnnattgagnccctactgatgtctctagtcagnngcgnggaattccctgagatcagttcaagaccagcctgaccaacatggtgaaaccctgtctctactaaaaatacaaaaattagccaggtgtggtgacgcctgtaatcccagctactcaggagactgaggcaggagaatcgcttgaacccgggaggcagatgttgcagtgagccgagatcatgccactgcactccagcctgggcgacagagcgagacaccgtctcaaaaaaaaaaaaaaatcccagggaccaacccagggcctcgccacataaacagagacaaaacgcagttttggttttaaacatcctcacccctcaccaggggcccagtttcccatccacccacgtgacccgcaggtgtttgaaaatgcacaaattgtccaaatgggaccacaagaagatcttaaagacacaaagaacattctacatagtttgtcaaatccag

SEQ ID NO: 32258 - DNA, 476 bp, Homo sapiens
ttttgagatccctagtccgtgtggtgtattccataggccacagaggcagccaagtgtaacctgctggcagaaaagcaatatggcttttgtaaggcaacactcagtgagaagcttggtggggcagaggttgcagtgacctgcacggtgttccaaacacagcccgtgacctcacagccccaaccagaaggtgccaatgaagcagtccccacccccgtggtggacccagatgcacccccgtcccctccacttggcgcacctggactccctccagctggctcacccccagactcccatgtgttactggcagctcctccaggacaccagttgcaccgggcgcactacgacctgcgccacaccttcatgggtgtggtctcattggggtcaccctcaggagaagtgtcgcacccccggaaaacacgcacagtggtgcagcctaatgttggtgctgctgctgggccagtggttcctccatgtcc

SEQ ID NO: 32259 - DNA, 433 bp, Homo sapiens
  misc_feature (1)...(433): n = A,T,C or G
ggccggaagtgtccccagctccctacagacgctgtagccatcactgcctctccagggaccctcctctcctgcccaggacagacccagccagaaccactgctaggatgggccgcacccaggggtctggcctccagggacctagagaatgggagggagaacggggccccaggagacccggccgccaccccacccgctacccttgggtgccacagggctgtgctgttgccaacagtaaacctgctcttactgtcaaaaaaaaaaaaaaaaaaagaaaaaaaaaaaaaaaaaaaaaaaaaaaaaaaaaaaaaaaaaaaaattngggggggcccctttttttaaaagggcccaaaaaaaccccgataaaccccttggggggttttttttttagcccactttttttttttttgcccccccccgtggtttttattggaag

SEQ ID NO: 32260 - DNA, 418 bp, Homo sapiens
gattcagagaccatggagcccagaaacccaatcagtgtaacaagtgtgcattgagtagacatggagacatgagaatctccacttctctttttctcctcttgctaaaatgctcacaattgcaggtaacacctgctgctactccacccatccaggacctaaatctgcagctccaaattctaaatctaggtctagaaattaaaaaacaaaacaaaacaaaagtttcatttgagaaatgcaagtctttttttttttaggggagggtttgggggaatgaagttttgctctgtcacagcctgaagtgcactggcgtaatcttgattcactgcaccctcttcctcccaggttaaggctgttctcctgcctcaccctcccgaggggcttgaattacagccttgtgccatcacaccatgctaatttt

SEQ ID NO: 32261 - DNA, 505 bp, Homo sapiens
  misc_feature (1)...(505): n = A,T,C or G
gggggnaattcgaccactgtccagngngttggaattccagctgaccatggaagcgaatgggttgggacctcagggttttccggagctgaagaatgacacattcctgcgagcagcctggggagaggaaacagactacactcccgtttggtgcatgcgccaggcaggccgttacttaccagagtttagggaaacccgggctgcccaggactttttcagcacgtgtcgctctcctgaggcctgctgtgaactgactctgcagccactgcgtcgcttccctctggatgctgccatcattttctccgacatccttgttgtaccccaggcactgggcatggaggtgaccatggtacctggcaaaggacccagcttcccagagccattaagagaagagcaggacctagaacgcctacgggatccagaagtggtagcctctgagctaggctatgtgttccaagccatcacccttacccgacaacgactggctggacgtgtgccgctgattggn

SEQ ID NO: 32262 - DNA, 512 bp, Homo sapiens
  misc_feature (1)...(512): n = A,T,C or G
agggccccnnnncatagacatcagtccgcgtggnggaattcccagatcacgctggaggagatcacgcagatggctgaaggcgtgaaggctgagccctttgaaaaccactcagccctggagatcgcggagcagctgaccctgctagatcacctcgtcttcaagaagattccttatgaggagttcttcggacaaggatggatgaaactggaaaagaatgaaaggaccccttatatcatgaaaaccactaagcacttcaatgacatcagtaacttgattgcttcagaaatcatccgcaatgaggacatcaacgccagggtgagcgccatcgagaagtgggtggccgtagctgacatatgccgctgcctccacaactacaatgccgtactggagatcacctcgtccatgaaccgcagtgcaatcttccggctcaaaaagacgtggctcaaagtctctaagcaggtgcgggcaggaggctggcaccactgcctccctggggctggattggggctagg

SEQ ID NO: 32263 - DNA, 504 bp, Homo sapiens
  misc_feature (1)...(504): n = A,T,C or G
gaccattgatcaccagtccgtgtggtgcaattcctccgatgaggaaactgaggctcacagaggttaaatgacttgccaaaggtccacagcaggtaaaaggtagagttggggtttgagtcaagatctgaccttggctgggcacagtagctcacacctgtaatctatcactttgggaggctgaggtgggcggatcacctgaggtcaggagttcaagaccagcctggccaacatggtgaaaccccatctctactaacaatacaaaaaaaattagccaggtgcagtggcatgtgcccataatcccagctactagggaggcccgtaatctcctgaggcaggagaatcacttgaactcangaggtggaggttgtggtgagctgagattgcaccacggcactccagctcaggggtgacagggcaaaactctgtctcaagaaaaaaaataaaatctgatcttgaaggtcctgcttataaccaccttactgcctctgagatggaaggggactt

SEQ ID NO: 32264 - DNA, 514 bp, Homo sapiens
  misc_feature (1)...(514): n = A,T,C or G
agaacattgaccaccgtccagngngctgctagatccactcttcagagtggtgcgaattcgaggctgcggctgcaacgcaacgccatcacgcacctgccgctctccatgtttgcctccctgggtaatctgacctttctgagcttgcagtggaacatgcttcgggtcctgcctgccggcctctttgcccacaccccatgcctggctggcctgtctctgacccataaccagctggagactgtcgctgagggcacctttgcccacctgtccaacctgcgttccctcatgctctcatacaatgccattacccacctcccagctggcatcttcagagacctggaggagttggtcaaactctacctgggcagcaacaaccttacggcgctgcacccagccctcttccagaacctgtccaagctggagctgctcagcctctccaagaccagctgaccacacttccggagggcatcttcgacaccaactacaacctgttcaacctggccctgcacggtaaccn

SEQ ID NO: 32265 - DNA, 462 bp, Homo sapiens
  misc_feature (1)...(462): n = A,T,C or G
cttcgattgcccttcgtccagngcggnggaattcggagactggattgtgggaggaggtagatctggcctcggaagtggccttagaggtggtgcggacagcacagcctggcgtgtggttggaggctcaggccccggtggccctggtggctcagcctgagcccctgccggccacagctggtgtgaagagggagagcgtgggcatggaggtggcagtgctgactgatgacccgctgcccgttgtggaccagcagcaggtgctggcccgtctgcagctgttggagcagcaggttgtgggtggagagcaggccaagaacaaggacctgaaggagaagcacaagcggcgcaagcgctacgcagacgagcgcaggaagcagctggtggctgccctgcagaactcggatgaggacagcggngactgggtgctgcttaacgtctacgactccatccaggaggaagtgcggg

SEQ ID NO: 32266 - DNA, 489 bp, Homo sapiens
  misc_feature (1)...(489): n = A,T,C or G
gtgttataaggggngnnnaattgaaaccctatcgtagaccctagtcagtgtggtggaattcccagcctcagtcggacgggcgcggagacgcttctggaaggaacgccgcgatggctgcgcagggagagccccaggtccagttcaaacttgtattggttggtgatggtggtactggaaaaacgaccttcgtgaaacgtcatttgactggtgaatttgagaagaagtatgtagccaccttgggtgttgaggttcatcccctagtgttccacaccaacagaggacctattaagttcaatgtatgggacacagccggccaggagaaattcggtggactgagagatggctattatatccaagcccagtgtgccatcataatgtttgatgtaacatcgagagttacttacaagaatgtgcctaactggcatagagatctggtacgagtgtgtgaaaacatccccattgtgttgtgtggcaacaaagtggatatta

SEQ ID NO: 32267 - DNA, 455 bp, Homo sapiens
cccggctcgagcggagggggacctgggccaagggcttggccagcatcctgctggcaactccaaggccctgggtgggcttctggaatgagcatgctactgaatcaccaaaggcacgccccacctctctgaagatcttcctatccttttctgggggaatggggtcgatgagagcaacctcctagggttgttgtgagaattaaatgagataaaagaggcctcaggcaggatctggcatagaggaggtgatcagcaaatgtttgttgaaaaggtttgacaggtcagtcccttcccacccctcttgcttgtcttacttgtcttatttattctccaacagcactccaggcagcccttgtccacgggctctccttgcatagccaagcttcttgaaaggcctgtctacacttgctgtcttccttcctcacctccaatttcctcttcaacccactgcttcctga

SEQ ID NO: 32268 - DNA, 280 bp, Homo sapiens
atccgacggggacttccttgtgcgagacagcgtcaccaaccccgggcagtatgtcctcaccggcatgcacgccgggcagcccaagcacctgctgctcacggaccccgacggcgtggtacggacgaaggacgtgctgtttgagagcatcagccacctgatcgaccaccacctgctgaacggggcactcatcgtggccgccgagagtgagctgcacctgcgtggcgtggtctcacgggagccctgagccaggtgaccgttctcagacctggctccttgctgg

SEQ ID NO: 32269 - DNA, 471 bp, Homo sapiens
  misc_feature (1)...(471): n = A,T,C or G
nttcgatagacatcgctagngacgngcaattccgacggggacagcgagggcacacctgtcaacaagctcctcaagatctactccaagcaggccgaactgatgagcagtctcattgagtactgcatcgaactgagccaggcggcggagcccgcaggcccccaggacagtgcgactggctcgccctcggaccccagctcctcactggctcctgttcagcgccccaagctgcggaggcagggcagtgtggtgtccagccggatccagcatctctccaccatcgactacgtggaggacggcaaggggatcaggcgagtgaagccgaagcgcaccacatccttcttcagccggcagctgtccttgggccaggggagctacaccgtggtgcagcccggcgacagcctggagcagggctgaggacgctgcacccggcaggaggagggcgactgggggccctggcccggcactgtcctt

SEQ ID NO: 32270 - DNA, 535 bp, Homo sapiens
  misc_feature (1)...(535): n = A,T,C or G
ggtttcataantgggcatnnnnnnnaggggggggnnnggttttgaaaaccctaatcgatcaccatngcgagnnggcgaantcgaatgtgccagactctgaggcacccagggggtcagcctttccctctggatggtccccctgtgccacaccgcagcctgcgcctggccagcttcccgtccctgcgagcacagcctgcgcctggccagcttcccgtccctgctgcgaccccattactaggtcatcgtctcatgccagagaactcgcaggaatcgcatgcaatgtttaacgagaggcagaatgtgggcaccaggtgtgaagcagtccccggctgtggacgggagactccaggctgcgccaggcagggcgccttcccctggaccttgaagggcacccgatgtcctggggccgtgaggggcggggtgcttatccatgtgacaggattcttccagtagcaacagggagggcccagcaaaacccgcagtttgtttcgggccacgttccaacaagtgactcggcggcgtctcccacctgccn

SEQ ID NO: 32271 - DNA, 471 bp, Homo sapiens
  misc_feature (1)...(471): n = A,T,C or G
tttgacatgacctccntaggacangccgnggaanncggagtgaaggcctcgttgagagaaggtctcattcggtgttttgggaagagagtcgtgtgggcccaggtatcgtagcggcgacacgagagagacgggcggtgtgacagccttccactacctgcacgagtgtattggtctgtctgctatcagctatgccgctgcccgttgcgctgcagacccgcttggccaagagaggcatcctcaaacatctggagcctgaaccagaggaagagatcattgccgaggactatgacgatgatcctgtggactacgaggccaccaggttggagggcctaccaccaagctggtacaaggtgttcgacccttcctgcgggctcccttactactggaatgcagacacagaccttgtatcctggctctccccacatgaccccaactccgtggttaccaaatcggccaagaagctcagaagcg

SEQ ID NO: 32272 - DNA, 487 bp, Homo sapiens
  misc_feature (1)...(487): n = A,T,C or G
agtcggtnnnnnnacccaggcttgcancgcaatggnccaannnctntttggagacgtggccttaaatatacacagagtcttcgtgagagccctcaggagcctgggctcataggagcagattgccaaatgggacccactctgcaaaaacatccagatcatcgcaacgtatgcacagacagagttgggacatggtgagctaggactgctgcgtgtggtgtttaggttgtgcactgcaaaactccagagggcccatttacatctaggtagtcataggttcatatgctccgagggacatatgtttaataagaaaacattccagcagctggcagtcaagggtcctgaggaaggggtgccaccttctaatttgcacgtattgtatgagcctccaatggggcaagtcattccttctggaaacatcagcagccaccccttctcatggactggctataggggactgtgtgtcccacacacagcccacagatgaaag

SEQ ID NO: 32273 - DNA, 534 bp, Homo sapiens
  misc_feature (1)...(534): n = A,T,C or G
gaggcgcggannaannnanagaacctggatnacccctccgagnnnngctcgatccactgctccgagtggtgcaattccagactcagagagaacccaccatggtgctgtctcctgccgacaagaccaacgtcaaggccgcctggggtaaggtcggcgcgcacgctggcgagtatggtgcggaggccctggagaggatgttcctgtccttccccaccaccaagacctacttcccgcacttcgacctgagccacggctctgcccaggttaagggccacggcaagaaggtggccgacgcgctgaccaacgccgtggcgcacgtggacgacatgcccaacgcgctgtccgccctgagcgacctgcacgcgcacaagcttcgggtggacccggtcaacttcaagctcctaagccactgcctgctggtgaccctggccgcccacctccccgccgagttcacccctgcggtgcacgcctccctggacaagttcctggcttctgtgagcaccgtgctgacctccaaataccgttaagctggag

SEQ ID NO: 32274 - DNA, 478 bp, Homo sapiens
  misc_feature (1)...(478): n = A,T,C or G
natttgagcccctaggccaggncttgagaaccgtgctctgcctacggaaggggcttaatgcatgtgcctgcccctcccccagctgtttttaatgaaactgaaaaaatatacttgatcccggcaggactgtgatacagagccctagcctgcccagccagccccaagatctcaggagctttagggagaagacttggtggggctggagcacaccttgggcctcagtggtttctgtgtccctgtggtgccagtgcttctgggcagtgcaggcggctgccaggcccagccctgacttccactctggctcagcaacctggttatttatgtggggccgtgcaggcatgggcccactgcctgtccatcctgtttctcttatttattgaaactcaccattgccctatccttgtgtctccacccccttccatgtgttgaataataaaaggtgggaaagtgctaaaaaaaaaaaaaaaaaaaaaaaaan

SEQ ID NO: 32275 - DNA, 468 bp, Homo sapiens
  misc_feature (1)...(468): n = A,T,C or G
agtggttggaacgatgactactgaaaaactngganangncgnggaantctgngcatccacgcttgacgcgtgccatcacaccaaattctcaggtgtgctgtcacgctttacgcgtgccatcacaccgaattgggagcatgtgtgcattcacacttgacgcgtgccatcacaccgaattctcagcaaatctcagaggtaggctttgttatcaccccattttagaaagaaggaaactaaggctcagagaagttaaacctactgcacaagactgctcagttcctgagaaggcagaataggaggagaggcaggggggtgctgagtgccacccaagctgggcctctgctgccaggtgacccagggctgtgagaagctcagctcactgtccagcctgggagggtcggtgacttggttttgcactcatttttccattccattgccttcatgccaaaaaacaatgtgaagtcatgc

SEQ ID NO: 32276 - DNA, 480 bp, Homo sapiens
  misc_feature (1)...(480): n = A,T,C or G
nattgagagccctggaannttcctagaacctacgacanngcgnggaantctggagcggaggcaggctggccgctcggcacagccatctgctggctgctgttccggaggctgtctgcctggaggagccctgacagtcacggggcctgcatggcaatgagcaggtgaaaccgcaggcctgccctatttagctgtactctggtgatttgtctttctaattctattgaaataatcatcaggatttgtttctgattaattaactaaccttttggtaaaaagattagataacgaaattgctgcctattcagagataatgagatttttattactctgtcaaaggaaaaaagtacatttatgtgtcaccagccgctgtgtcaagaggaaaaaaaaaaagagagatttcagtctttgtcgaatgtgtatattcctcaacagacaaagggtgtgcttaattctgtaggaactcccccacctcgtttgacg

SEQ ID NO: 32277 - DNA, 492 bp, Homo sapiens
  misc_feature (1)...(492): n = A,T,C or G
aattgagaccctgagtacgtctgccggatgccgaaggaatgtacataccctttactctcttccaccatcaggcagcaagaccagcccctcctcctcagtctttcaacatgaagacaacgaggatgaagacttctatgataatccacttccacttattaaatgctttctcttatgatattcttaatgacattttattttcccaagcttagtttattgtaagaatacagtataaatacacatacaaagtacgtgttaactgattttttaatgttaccagtaaggcttccagttaacagtaggctatttattagttaagtttggagggagcctgaagttatacaagctctgactgcgtgaggggttggctctccaaccctcacattgttcaaggctcaactgcacctctcctacctatcctcccccaccctctgatgtaggagggataaatataaaaacacttagaaattccttgaaaccanngaaaatgccact

SEQ ID NO: 32278 - DNA, 485 bp, Homo sapiens
  misc_feature (1)...(485): n = A,T,C or G
cgtagtgccaatcgaaaaccntnattgatgaccctaggccanngcgnggaattcccggctgcacgctctgcttggcctcgccatgccggtggacctcagcaagtggtccgggcccttgagcctgcaagaagtggacgagcagccgcagcacccgctgcatgtcacctacgccggggcggcggtggacgagctgggcaaagtgctgacgcccacccaggttaagaatagacccaccagcatttcgtgggatggtcttgattcagggaagctctacaccttggtcctgacagacccggatgctcccagcaggaaggatcccaaatacagagaatggcatcatttcctggtggtcaacatgaagggcaatgacatcagcagtggcacagtcctctccgattatgtgggctcggggcctcccaagggcacaggcctccaccgctatgtctggctggtttacgagcaggacaggccgctaaagtgtgacg

SEQ ID NO: 32279 - DNA, 455 bp, Homo sapiens
  misc_feature (1)...(455): n = A,T,C or G
atttgttcgcgatcactagnccagngnggtggaattcagagaacttcaatgccaaatatgtctccctgcatgtcaggaagagtaaccgggccgccctgcacctctattccaacaccctcaactttcagtcgggggtgggccggctgtggggaagaggctgtggaccccagcactgccaggatacctccacattcactcggcggctgatggttgaaaagccggcatggagacagcacctgcctgctgaaacgtgctccatgtgttgtgatggaggagctctggcccatgatggctgaggctggcgaagggcacacgggctgtttagtaatgtttgggaatagagaggtgtgggtccctggcgtgagcagatgctgaggagcaggactcaagcatgaccaagcacctagaagaatccaagagagagcagaatcaaggagaatgcacattcaggaagg

SEQ ID NO: 32280 - DNA, 475 bp, Homo sapiens
  misc_feature (1)...(475): n = A,T,C or G
tttgatagccctggcagngcttgaaacccttgaggatcgcccgagcctggaagatcgaggttgcagtgaaccatgattgcaccactgcactccagcctggacaacagagcaagaccctgtcttaaaaaaagaagaaagaaatgtggagggtttcttactcgtcagctgtagcctttgctgataagatgcccttgtgtctctgcagtgtgtgatccagtctcgggtgacaagtgggacggcgaaggctcgatgtacgtcccggaggacctccttcccgtctacaaagaaaaagtggtgccgcttgcagacattatcacgcccaaccagtttgaggccgagttactgagtggccggaagatccacagccaggaggaagccttgcgggtgatggacatgctgcactctatgggccccgacaccgtggtcatcaccagctccgacctgccctccccgcagggcagcaactacctgattn

SEQ ID NO: 32281 - DNA, 485 bp, Homo sapiens
  misc_feature (1)...(485): n = A,T,C or G
gattgatagcantgcgaaannttgttatnaacataggacanngccnggaattccagatagcggggggtccatgctgcaggatgagaacaaatacgctgatgactcactacttcgtgttacattcccttgccagctgcagatggaccctgggacggaccttgattgggcgtgccaggcgtcactgccgctggccttgaataaataagtgatgcccctggaccaggatgacgtgcctcgtggagtggtcttgcccttattccgatctacacagagccttcccactgtggacacctcggcccaggcggcccctcagacctacgccgaatatgccatctcacagcctctggaaggggctggggccacgtgccccacagggtcagagcccctggcaggagagacgcccaaccaggccctgaaaccgcgggcaaaatccaacagcatcattgtgagccctcggcagaggggcaatcccgtactgaagttcg

SEQ ID NO: 32282 - DNA, 474 bp, Homo sapiens
  misc_feature (1)...(474): n = A,T,C or G
ntggtggctnaaatcgtatcgactctcatctgcgtggaattccttggaccacacagctgacaggctacaggcaatcctgggtgttccttggaaggacaagaactgcacctcccggctggatgcgcacaaggtcctgtctgccctgcaggctgtacagggcctgctagtggcccagggcagggctgatagccaggcccagctgctgctgtccatggtggtgggcgtgttcacagccccaggcctgcacctgaagcagccgtttgtgcagggcctggctctctatacccctgtggtcctcccacgctctctggacttcacagaactggatgttgctgctgagaagattgacaggttcatgcaggctgtgacaggatggaagactggctgctccctgacgggagccagtgtggacagcaccctggctttcaacacctacgtccacttccaagggaagatgaagggcttctccctgct

SEQ ID NO: 32283 - DNA, 470 bp, Homo sapiens
  misc_feature (1)...(470): n = A,T,C or G
agcggctnaccccgattcngcctctgtgcgtggcattcggccaatttctaaaaagactgaggcctccttcaaggttgaacagatttctagagccttgtttttgctgtgacaagtccctagtccctgttcacaactctgaaaccaagaaacctgagaaccaagagaactgaaatgaagcccgttggtctcagcctggcttgagccaacatgaggctctctgctgccttttgttttcttaggttttgctgagaaacgggagtgcgttctgtgtcggtgtttgtgacgccctgagaccctgcttggcctagctaaagtccagaaggcctgggccccacagggcttggatgagggctcatgggcctgtacttcaggaggcctgagaggcccggtcagtcccatgaggctactcggcttggcccgcaggtcctccgaggcacagggcagagggacaccccagggacccatcagac

SEQ ID NO: 32284 - DNA, 474 bp, Homo sapiens
  misc_feature (1)...(474): n = A,T,C or G
agggggctnacccgggaacttaggcaacgacnggcanncancanggccggcccatccccgagtggaagcgccaggtgatggtgcgcaagatgcagctgaagatgcaggaggaggaggagcanaggcggagaggaggaggaggaggaggcccggctggccagcatgcccgcctggaggcgggacctcctgcggaagaagctggaagaagagagggagcagaagcggaaagaggaggagcgacagaagcaggaggagctgcggcgggagaaggaacagtcagagaagctgcggacgctgggctacgatgagagcaagctggcgccctggcagcgacaggtcatcctgaagaagggggacatcgctaagtactagaggccgcagactcctgtccgcagcctcgcagctccgtggggccctccgccccagccccagccagccaggccctggtggaaaggctgggagccgcacagccct

SEQ ID NO: 32285 - DNA, 453 bp, Homo sapiens
  misc_feature (1)...(453): n = A,T,C or G
gcggctgnnnnnaacggatagcacatctatgacgnggcannncntgaggtcaggagttcgagaccagcctggtcagcatggcggagccccatctctactaaaaatgcagaaggttggccagatgtggtggcacatgcctgtgggcccagctgctcgggaggctgaggcaggagaatcgcttgaacgtgggaggtggaggttgtagtgagccgggattgctccgctgcactccagcctgggtgacagagcaggactccagcttaaaaaaaaaaaaaaaaaaaaaaaggggggacttttccttttttccaaaaaaattccctggggccccttttaaaaaaacttggggtctacctcctccttttcctttttaggcaactaccgttttgatttctgaaactataaattggtttttcccattctaaaaccccatataagggaatcaaaccgttgtgg

SEQ ID NO: 32286 - DNA, 452 bp, Homo sapiens
  misc_feature (1)...(452): n = A,T,C or G
nactgagncctgagancntgcgnggnaacctgcagtccccggcagtgagctatggactttcttccccctcacaaggctgggggcctcctgctctcgtccctggccctccctgcacagggcaaagccagtctgggctctggcacacagagttcatgtttgcgccctctccctgcccctcaccccanagggtgaggaggaatgaggggcattggtggttaggccggttggctgtcttgaacagctggagggaagatgcaggggtgggaagcggccaggcagaaagagctccaggctcttgtgtcgcccacccagccctcccatactcactcctgacagctttcctgcactgcagcttcctgctcctctgactctagtgggaacaggccccagctcagcctccggcagggaggtcacccctccacttcagcttgccctgacctccgctcgcaaan

SEQ ID NO: 32287 - DNA, 485 bp, Homo sapiens
  misc_feature (1)...(485): n = A,T,C or G
ngctcgagtccatagtcagtgtggttgagttacctagaccatgctgctgctgccgcagtcctgccagctgtccgacaatgtcgtcccacctagtcgagccgccgccgcctctgcacaacaacaacaacaactgcgaggaaaatgagcagtctctgcccccgccggccggcctcaacagttcctgggtggagctacccatgaacagcagcaatggcaatgataatggcaatgggaaaaatggggggctggaacacgtaccatcctcatcctccatccacaatggagacatggagaagattcttttggatgcacaacatgaatcaggactgagtagttcctgaggcagctctcactgtgacagcccttcgccacaagaagatgggcagatcatgtttgatgtggaaatgcacaccagcagggaccatagctctcagtcagaagaagaagttgtagaaggagagaaggaagtcgaggctttgaagaan

SEQ ID NO: 32288 - DNA, 464 bp, Homo sapiens
  misc_feature (1)...(464): n = A,T,C or G
agccgttgnntnnnaacatacagctgtgcgtatgtcgnggaattcgcagaacagcaaagatagcatgcctgagccagcgaaatccgctcccgccccgaagaagggctccaagaaggccgtgaccaaggcgcagaagaaggacggcaagaagcgcaagcgcagccgcaaggagagctactccgtatacgtgtacaaggtgctgaaacaggtccaccccgacaccggcatctcctctaaagccatggggatcatgaattcctttgtcaacgacatcttcgagcgcatcgccggcgaggcttcccgcctggcgcattacaacaagcgctcgaccatcacctccagggagatccagacggccgtgcgcctgctgcttcccggggagctggccaagcacgctgtgtcagagggcaccaaggccgttaccaagtacaccagctccaagtaaacttgtccctgcaactgcc

SEQ ID NO: 32289 - DNA, 493 bp, Homo sapiens
  misc_feature (1)...(493): n = A,T,C or G
tggagggccggggnnnnccttgaaattgatccactatccgtgtggttgaattccttgtttgccagagaacctctcctgtggccatgcctgaacctctcctgggactgtccgtggtcttcacattggtgcttggacacccgtccttcgggaggggaggaaaagcggccggtaaaatggagacagtcggtggcgtgtgtttgccgattggactggcattggtatagacagataccaatcactgcacagacatttccaggggcccttccccagccatgtttagtggcactgacctcaggcagctgggcccccgggacagcaaccaggggactgccctggccctggatggcagccgggaccggctcacaagcttctgtttggagcagttctgttggcagccccccgcctccagtggagatgtgacacgactctttcttgcctgccaaacgttctctgattctttggatcatcgatcctaacacagcaaaggcggtan

SEQ ID NO: 32290 - DNA, 512 bp, Homo sapiens
  misc_feature (1)...(512): n = A,T,C or G
gggatgtcccnnnnnnaggcgggccaattgannnccnttaatagatgaccctaggccagagnggaggaattcggttactgcagcggcagcaacagcaggtcctactatcgcctccctctagtctctgcttctctggatccctgaggagggcagaaggaagaaaacagcccaaagatgagagtgattcgcgtgggtacccgcaagagccagcttgctcgcatacagacggacagtgtggtggcaacattgaaagcctcgtaccctggcctgcagtttgaaatcattgctatgtccaccacaggggacaagattcttgatactgcactctctaagattggagagaaaagcctgtttaccaaggagcttgaacatgccctggagaagaatgaagtggacctggttgttcactccttgaaggacctgcccactgtgcttcctcctggcttcaccatcggagccatctgcaagcgggaaaaccctcatgatgctgttgtctttcacccaaaatttgg

SEQ ID NO: 32291 - DNA, 489 bp, Homo sapiens
  misc_feature (1)...(489): n = A,T,C or G
ggccgccctttgaganccntatttagagnggcggaattcccttgatagtttctacccctgaatgcacctccacacaaaattgtgcaggccttcccagggaccctagcctacggggaatctcggggcaaggagaggtgcaggtgctctgggcagtaccacaggtgtccctgtaccctcaggtcatcaggcccaaatacagtgaggagccagccactcagagccacttgaggggctccaaatgccccattttctcatgccccagggcctttgaacaaaccattccttctgcttgcatgcctcttccaggctcagctgaattgcatgatacagtgacagtggaaggagtggaggaggatccaacatcacagatactttaacagtgaatatgttaaatctaatacatcataagagagtcccgggtgtgaaggaagagtgctccttgctgctggtgctgtcccatctgctccctgcggagccccttgcagcccg

SEQ ID NO: 32292 - DNA, 496 bp, Homo sapiens
  misc_feature (1)...(496): n = A,T,C or G
agccgcgccattgatnnccnttaatagaaganccctangccagngnggnggaattcgctcgaaaggccttcaactgcaaatactgcaacaaggaatacctcagcctgggtgccctcaagatgcacatccgaagccacacgctgccctgcgtctgcggaacctgcgggaaggccttctctaggccctggctgctacaaggccatgtccggacccacactggcgagaagcccttctcctgtccccactgcagccgtgccttcgctgaccgctccaacctgcgggcccacctccagacccactcagatgtcaagaagtaccagtgccaggcgtgtgctcggaccttctcccgaatgtccctgctccacaagcaccaagagtccggctgctcaagatgtccccgctgaccctcgaggctccctcttcctctccatacctgcccctgcctgacagccttccccagctccagcaggaaggaccccacatccttctcactgcc

SEQ ID NO: 32293 - DNA, 485 bp, Homo sapiens
  misc_feature (1)...(485): n = A,T,C or G
ccttagaacnccccctagatgatcactacgccagngncgnggaattcctcgttacaaaagaatcactgaccccaagtagtcgagtctagtctactgacctgtaaggctggcccaggccctgcaccgtctgaaggaaagcacctttctgggcaagcatcctgcctcccatcccattgcacctccccacccttcccccggcagacgagaccagccaccggcttacccaaatggcagcgggagcctaagacccagccgcaggcctgcagttctggcagaaggtggctggtcaggaactctagacacggctcctgggactggagagggcggcctcaggaacagcatgagtgggtgcagtccccactcagagcctgcatgtcccagcagcccagagaccatttaagatctctcctgtgccggtgcgaagggtaatcttctggaaccagagaggggctggcaggtggtcagctgcccttatagctagaggt

SEQ ID NO: 32294 - DNA, 501 bp, Homo sapiens
  misc_feature (1)...(501): n = A,T,C or G
aggaagtccccaggnagccccccnatagatncccactgatgaccctcgccangncgnggaattcccaacgacctgacctccgtccacctgggcgtgaaattcagctgccgcttcacccttcgggaggtccaggagcgttggtacgccctgctctacgatcctgtcatctccaagttggcctgtcaggccatgaggcagctgcacccagaggctattgcagccatccagagcaaggccctgtttagcaaggctgaggagcagctgctgagcaaagtgggatcgaccagccagcccaccttggagaccttccaggacctgctgcacagacaccctgatgccttctacctggcccgtaccgcgaaggccctgcaggcccactggcagctcatgaagcagtattacctgctggaggaccagacagtgcagccgctgcccaaaggggaccaagtgctgaacttctctgatgcagaggacctgattgatgacagtaagctcaaggac

SEQ ID NO: 32295 - DNA, 463 bp, Homo sapiens
  misc_feature (1)...(463): n = A,T,C or G
ggcggnttnnnnnnnccaagggtactntcagagtgcgcgaattcgtcatcagagggatcagcagctccagggaaggcctggctgccccgcttctaaatgccactccccctcccatcagcgttcgtgctgtcagccttgcagccttctcctactcattccagctccaatacccagcggctgccagaccgagtgaccggcggcttctcagtgaatggacagctcattggcaacaaggccaggagccctgggcagcatgacggcacgtacttcgggcggctgggaatcgcaaaccctgccacggactttcagttggaagtgactcctcagaacattacgctgaaccccggctttggtgggcctgtgttttcctggagggaccaagctgtgctgcggcaggacggggtggtggtgaccatcaacaagaagaggaacctggtggtgtctgtggacgacggtggcacct

SEQ ID NO: 32296 - DNA, 503 bp, Homo sapiens
  misc_feature (1)...(503): n = A,T,C or G
ggggatnnnccagggaggcccccnnttagaaacccactgatgaccctaggcagngtcgnggaattcgactagaggacttgctggggctcacaggccattatgaatgtgccttttgggtgaggggagtgaaaagggcccttatggaaacaagaagcaaagggtcagtgatgtggcctcagggtcttacgaggcctgcctcccatctgcctccctggctagaggctgtgcatagagagttgctgttttttcaagtgcgggtgattggatgggtggtgacagtggagttcagccgggtttaggagagagtggctggaatccagggttgtcagagagctctcccacacacatctcggcagaggtcccacctggcaggctggctgtgctggcggggcaggtgagagagcatgcggatgcagcagggatttgtccgtttcctgggcagatgcttcctgtgccttgccccacatgcagtgctgtaagagaagagctggcctccgtccagg

SEQ ID NO: 32297 - DNA, 449 bp, Homo sapiens
  misc_feature (1)...(449): n = A,T,C or G
nactgaattctgtccagaggcncgaannncgagngagcacctcatccaggccacctcggaggagaatcagatcccctcgcacttgcctgcctgcccgtcgctccggcacgtcgccagcctgcggggcagcgccatcatcgagctcttccacagcagcattgctgaggttgaaaacgaggagctgaggcacctcatgtggtcctcggtggtgttctaccacaccccagggctggaggtgactgcctgcgtgctgctctccaccaaggctgtgtactttgtgctccacgacggcctccgccgctacttctcagagccactgcaggatttctggcatcagaaaaacaccgactacaacaacagccctttccacatctcccagtgcttcgtgctaaagcttagtgacctgcagtcagtcaatgtggggcttttcgaccagcatttccggctgg

SEQ ID NO: 32298 - DNA, 253 bp, Homo sapiens
aagaatcaccaagtccagcagctgaaagaccaggttttatccttaagtcacgagatagaagagtgccgctccgagttggaggtgctgcaacagaggcgggagcgggagaaccgggaaggcgcaaacctcctctccatgctcaaggccgacgtcaacctgtcccacagcgaaagggggaatttggaagtgaaaaaaaaactgctttgcatgaaaaagaggagacacttctgcttcagaatgcacaggcacagct

SEQ ID NO: 32299 - DNA, 449 bp, Homo sapiens
  misc_feature (1)...(449): n = A,T,C or G
aaactaatgactntccgaagcgccangaattttaggagctgccggcaagatcacaagccagtcatggatgaccagcgcgaccttattttcaacaatgagcaactgcccatgctgggccggcgccctggggccccggagagcaagtgcacccgcggagccctgtacacaggcttttccatcctggcgactctgctcctcgctggccaggccaccaccgactacttcctgtaccagcagcagggccggctggacaaactgacagtcacctcccagaacctgcagctggagaacctgcgcatgaagcttaccaagcctcccaagcctgtgagcaagatgcgcatggccaccccgctgctgatgcaggcgctgcccatgggagccctgccccaggggcccatgcggaatgccaccaagtatggcgccatgacacacgaccatgtgacgctccg

SEQ ID NO: 32300 - DNA, 453 bp, Homo sapiens
  misc_feature (1)...(453): n = A,T,C or G
gccntnnnnncctagagtctatgaggcgcgaatcacccctgccaccccgcaggaaccctgaggcctaggggacaggctggacccagagactctggacccggggcctccccttgagtagagacccgccctctgactgatggacgccgctgacctggggtcagacccgtgggctggacccctgcccaccccgcaggaaccctgaggcctaggggagctgttgagccttcagtgtctgcatgtgggaagtgggctccttcacctacctcacagggctgttgtgaggggcgctgtgatgcggttccaaagcacagggcttggcgcaccccactgtgctctcaataaatgtgtttcctgtcttaacananaaaaaaaaaaaaaaaaaaaaaaaaaaaaaaaaanngggggcccctttaaataaagggggcccttaaaaccccggttaaaccctcgggt

SEQ ID NO: 32301 - DNA, 470 bp, Homo sapiens
  misc_feature (1)...(470): n = A,T,C or G
aggccccgnnnnnnnnaaacattgagtactataggccagcgccgnggaattccgcctgcgcagctacgaccgcagcaggaaagcgccgccggccaggcccagctgtggccggacagggactggaagagaggacgcggtcgagtaggtgtgcaccagccctggcaacgagagcgtctaccccgaactctgctggccttgaggttttaaaacatgaatcctacactcatccttgctgccttttgcctgggaattgcctcagctactctaacatttgatcacagtttacaggcacagtggaccaagtggaaggcgatgcacaacagattatacggcatgaatgaagaaggatggaggagagcagtgtgggagaagaacatgaagatgattgaactgcacaatcaggaatacagggaagggaaacacagcttcacaatggccatgaacgcctttggagacatgaccagtgaagn

SEQ ID NO: 32302 - DNA, 464 bp, Homo sapiens
  misc_feature (1)...(464): n = A,T,C or G
agccnntnnnnnnnaaacttgagtcctntcagagngcgcgaantcggcctgtccaggctgtgatctggaggaagcgggtactctctgcttagcccagggccttccacgctcctgggggctgcggggacagatccaagaacatgggccctggggccatggtgtccgattcaacccacgcttcctccctgttgacaccgggcaacttgctgagccgctccgtgcctcagtttcctcgtctgtaaagtgggattcatagtagctccttcccgactgggctgtctggggattggtgagtgatgccgtggggcaggatcatgatttacggggtgcctgtatgttctcccagagacgggaagggccctgaggggtgactcctcaccagatagcggggtctcccagggactaagcaggtgggagggatgggcgctgccctactgtgcagagccttggcgggatcccttgan

SEQ ID NO: 32303 - DNA, 476 bp, Homo sapiens
  misc_feature (1)...(476): n = A,T,C or G
ggggngatcggagaccactgggnagnatcgtagacattagtccagtgcggtggaattcagctggggctaagcagctgtcgcacggtcagatcatgggctccaccaagcactggggcgaatggctcctgaacttgaaggtggctccagccggcgtctttggtgtggcctttctagccagagtcgccctggttttctatggcgtcttccaggaccggaccctgcacgtgaggtatacggacatcgactaccaggtcttcaccgacgccgcgcgcttcgtcacggaggggcgctcgccttacctgagagccacgtaccgttacaccccgctgctgggttggctcctcactcccaacatctacctcagcgagctctttggaaagtttctcttcatcagctgcgacctcctcaccgctttcctcttataccgcctgctgctgctgaaggggctggggcgccgccaggcttgtggctactgt

SEQ ID NO: 32304 - DNA, 485 bp, Homo sapiens
  misc_feature (1)...(485): n = A,T,C or G
ttggaaatcgatngcacnnttttgagntcactaggaagngcggggaattcgatatgtccttgttgtgccagctgtggggcctgtacgagtcaatccaggactacaaacacctgtgccaagacctgagcttctgccaggacctgtcatcctccctccattcggacagctcctacccaccggatgcgggcctgtctgacgacgaggagcctcccgatgccagcctgcctcctgacccgccaccccttactgtgccccagacgcacaatgcccgtgaccagtggctgcaggatgccttccacatcagcctctgaagggctggggggcagggggcatgcacccatgcaaaaggctcagaaactccccctccggcaagccctcagacttcggagcctgcgccttcccccctaccgcctcacctcacaggagggccaggcatgtattcctcagaggcgaaactgccaaactctttctcctgtcttgagtgg

SEQ ID NO: 32305 - DNA, 546 bp, Homo sapiens
  misc_feature (1)...(546): n = A,T,C or G
aaggggnagcagnncnnnnnnnncattgaacctcgatnctctgtgggaattccctccgggagcatctgcaggctctgcttctgcccggctgctggcttgctctccctggtggctctccagcggccagcttcctcacccacccggcactccgctttgctctgtctcctgaggtgggcctgaccaacctccccttctctgcctcagtccctgggctccagggctcagctccacagccctctgcctagcaggctggttctccctgccaagcccatacctgtggtcacctggccctcctgtggtctgagtaccactcccctgccccaggagccactcccactccagctgcctgtttccagcaggttcccagtgcccccgacaagcccctgctggtgtctccatctcctgccaagcatcctccagtgcctcctcctgtgggcctggcctcagggctatggacagactcctgtcccatcccagagacccctcgtgatcgttccctgggcacgtggccgtggcccggctgngtcggctgaagaactgcngatg

SEQ ID NO: 32306 - DNA, 515 bp, Homo sapiens
  misc_feature (1)...(515): n = A,T,C or G
ggggcccncnnccncatagacatcgatccacantccgagtggtggaattctgaagaataagcacggctgtgacatctgtcgctgtaagaaatgtccagagctctcatgcagtaagatctgccccttgggtttccagcaggacagtcacggctgtcttatctgcaagtgcagagaggcctctgcttcagctgggccacccatcctgtcgggcacttgtctcaccgtggatggtcatcatcataaaaatgaggagagctggcacgatgggtgccgggaatgctactgtctcaatggacgggaaatgtgtgccctgatcacctgcccggtgcctgcctgtggcaaccccaccattcaccctggacagtgctgcccatcatgtgcagatgactttgtggtgcagaagccagagctcagtactccctccatttgccacgcccctggaggagaatactttgtggaaggagaaacgtggaacattgactcctgtactcagtgcacctgccacagcggacggg

SEQ ID NO: 32307 - DNA, 474 bp, Homo sapiens
  misc_feature (1)...(474): n = A,T,C or G
atttgaaagcctggccangcgttgaaaaccctttgatctacctaatgtgttgcatggagatggttaatttgtgtgtttattttacaaacagagacattaaacctgacaatgtccttttggacgtgaatggtcatatccgcctggctgactttggatcatgtttgaagatgaatgatgatggcactgtaggtatttttgttggagattttccatttggttttgggtttggcatatagtcagaagggaagttttcaatttgaggtacaattaagaaaccaagtatattaattcagaaaatgaatccattttggagatagttgaaattttctgtttggggagttttgtttcccaaataaaaattaagttggaaagcatctttattgctttttatgtttacaaaagtaatatgtgtgccttccagaatgggagttgtcaggtttcctcaatcccaaggtggctaaaagcatgccagcg

SEQ ID NO: 32308 - DNA, 485 bp, Homo sapiens
  misc_feature (1)...(485): n = A,T,C or G
ggattgggacngccttcgaannatcacgttattcttggacangcggnggaannccttnctctgggggtccgtacttccctgctatgcccaacttgaggaaagacacacctatcgtgatgccagtcacgcggccatggagagatgacatgctggacgtggagaccgaggcctacatccactgcgttagtgccgtccttaagctggcgcagagcgagtaccagctgctgggcgacatcatgcccgagcaccaccagaagaagaccttcgactccctgatacaggatgccctggatgggctgatgcttgaaggggagaacatcgtgtctgctgcccggaaggccattgtgcgacacgacttctccacggtgctcaccgtcttccccatcctgcgacacctgaagcagaccaagcctgagtttgaccaggtgctccagggcacggctgccagcacaaagaacaagctgcctggcctcatcacatccatg

SEQ ID NO: 32309 - DNA, 481 bp, Homo sapiens
  misc_feature (1)...(481): n = A,T,C or G
tttgatnagccttcgaannattcgtagactactcggaagngccgnggaannnctttttaaaagcattattctgcctgttgggtggagaatatactgtaggtgggcaaagattgaaggaaactagtgggttcaggagctcgagctagaagtggtgagaagggtttggatttggggtctatgctgaaggtagagccgacaagatttgctaggattggatgtgtagggtgaggaagtggggacagcaagaatgactggaggggtaagtggactctcaccagctgtgtctcgtgaaggggcgtggctgggctatgagctatgctcctgagcacagacggctgttctctttcaaggttacaagcctgatgaagggaaacgaggggatgcctgtgaaggtgacagtgggggaccctttgtcatgaaggtaagcttctctaaagcccaaggcctggtgaacacatcttctggggggggggagaaactt

SEQ ID NO: 32310 - DNA, 498 bp, Homo sapiens
  misc_feature (1)...(498): n = A,T,C or G
nttggagncccatcgatcactgtccgngnggnggaattcggctgtgtcctggggaagggctaagggagtggaacagaggttatcgtggggtattttgtggttcttcagctcaattgtggaaagggaaagcaagttgggttagaaagaatagagtgaggtacagttaggagaaacttccaggtcttgagacgagtaagagttagggaaatcaaggaagaggcacctaactggcctcttgggaggggtgctcaggctgagtgaccaggaagctggcaggaagttgccttccaggggaggatgctggtaggggcgggtaatctggcagtttcagcttcctgttgttgctacccttgggaacctggcaatgttgcccttggccaaggcccagcttgagctgtggcagcctgctccccaagccaaagaataagttaaaggtaaagggtgggctgggtgcggtggctcatgcctgtaatcccagcactttgggcacctaaggcn

SEQ ID NO: 32311 - DNA, 504 bp, Homo sapiens
  misc_feature (1)...(504): n = A,T,C or G
cgctctttcaagcncannagnnnattgacngcctcggnnnnnttttgaaatcctcgcacagngcggnggaantccccagcgcagctggagtgggggacgggtaggctcgtcccaaaggcgcggcgctgaggtttgtgaacgcgtggaggggcgcttggggtctgggggaggcgtcgcccgggtaagcctgtctgctgcggctctgcttcccttagactggagagctgtggacttcgtctaggcgcccgctaagttcgcatgtcctagcacctctgggtctatgtggggccacaccgtggggaggaaacagcacgcgacgtttgtagaatgcttggctgtgatacaaagcggtttcaaataattaacttatttgttcccatcacatgtcacttttaaaaaattataagaactacccgttattgacatctttctgtgtgccaaggactttatgtgctttgcgtcatttaattttgaaaacaggtatcttccgccatagataactag

SEQ ID NO: 32312 - DNA, 461 bp, Homo sapiens
  misc_feature (1)...(461): n = A,T,C or G
nttgattgaccttcgtccangcggnggaattcctcacagctgactgtggagaccggagatgcccacatcattggcaggattgagagctactcatgtaagatggcaggagacgacaaacacatgttcaagcagttctgccaggagggccagccccacgtgctggaggcactttctccaccccagacttcaggactgagccccagcagactcagcaaaagccaaggcggtgaggaggagggccccctcagtgacaagtgcagccgcaagaccctcttctacctgattgccacgctcaatgagtccttcaggcctgactatgacttcagcacagcccgcagccatgagttcagccgggagcccagccttagctgggtggtgaatgcagtcaactgcagtctgttctcagctgtgcgggaggacttcaaggatctgaaaccacagctgtggaacgcggtggacan

SEQ ID NO: 32313 - DNA, 443 bp, Homo sapiens
caggaagtggaggttgtagtgaaccgagatcgtgccactgcactccagcctgggtgacagagtgagactctatccaaaaaaataaaaataaagagaatgaatgaagctgagtgaagtaactgttgcaggacttcctctcccctcaccgtggatgggatggggatggtggggaggggtttatgtatatgacggtgcagaaaacccccccctggtaaattgccccaccacaggatccatttgggctggggtcctctctgactcagcttatccctgtcacaccacctccccagagaaaggccacgcctacctgctgcaggagctgaaagcattgctgacgaccccaccacgtgccctggagctgtaagacgggggtgggggccatctgcccgtagaggtgtcccgacagaagtaggcgggctggcactatggtcccattattgaca

SEQ ID NO: 32314 - DNA, 501 bp, Homo sapiens
  misc_feature (1)...(501): n = A,T,C or G
gaagttttnntntntagattgaaaaggtggnagnggactgatgtcctcgtcaccgcgtcgaagaatagaagaagttcctgaccatcttcaacctgacccacattatcgctgagaagaggattgacaaagagagacttgttgaaatgctccgtgcggtgaagcagaaggcactgtcagcagcagtggccgactccttgacaaactctccgagggacagtcctgccgtctccctgagtgaaccagccacgcagcaagcctctctggatgtggagaagccggttggtgttgctgctttcttgtctgacatcccaaaggccgcggagcctgggaagctggaacaggtccggccccaggagctgtcgagagtccaggagctatctcctgccagcggggagaaggccaggctgagcgaggcccctggaggcaaaaagagtctgagcatgcttcactatatccggggcgctgcacccaaggacattcctgtgccgctgtaccacagaa

SEQ ID NO: 32315 - DNA, 500 bp, Homo sapiens
  misc_feature (1)...(500): n = A,T,C or G
gaggtnnntnntnnnggtttgagaccgtatccatggatggaattccatccgataatgggctggggtgagaaagccattgagatccgctctgtggagacgggccacctcgacggggtcttcatgcacaaacgagctcagaggctcaagttcctgtgtgagcggaatgacaaggtgttttttgcctcagtccgctctgggggcagcagccaagtttacttcatgactctgaaccgtaactgcatcatgaactggtgacggggccctgggctggggctgtcccacactggacccagctctccccctgcagccaggcttcccgggccgcccctctttcccctccctgggcttttgcttttactggtttgatttcactggagcctgctgggaacgtgacctctgacccctgatgctttcgtgatcacgtgaccatcctcttccccaacatgtcctcttcccaaaactgtgcctgtccccagcttctggggagggacacagcttcc

SEQ ID NO: 32316 - DNA, 502 bp, Homo sapiens
  misc_feature (1)...(502): n = A,T,C or G
naattgaggnccaacttgagtagcactccgagnggngcaanncgagcggngaccatggccaggctggcgttgtctcctgtgcccagccactggatggtggcgttgctgctgctgctctcagctgagccagtaccagcagccagatcggaggaccggtaccggaatcccaaaggtagtgcttgttcgcggatctggcagagcccacgtttcatagccaggaaacggggcttcacggtgaaaatgcactgctacatgaacagcgcctccggcaatgtgagctggctctggaagcaggagatggacgagaatccccagcagctgaagctggaaaagggccgcatggaagagtcccagaacgaatctctcgccaccctcaccatccaaggcatccggtttgaggacaatggcatctacttctgtcagcagaagtgcaacaacacctcggaggtctaccagggctgcggcacagagctgcgagtcatgggattcagcaccttggccn

SEQ ID NO: 32317 - DNA, 496 bp, Homo sapiens
  misc_feature (1)...(496): n = A,T,C or G
natcgagccctgatcgagagccgctacncgagagacagagagagagagcccaagactgtgttggaactggagatgttttcctgcttccttgttacagtggtcatgcgatgatttggctccattactaacggcccaattatttgaccttggcctcagagacaggtgtgtggtggactggaaagaacatggtggattttggcagggtccccactttagttgttcctgaacttgggcaaattactgcacctcccgcactctttcttatgttactagaaaagtgcaggcgcccatgcccaccctactggacggatgggaagatgaagtgaaaaatgcccccacctgttgtaagctgggagccctgggaaagcacaccccacctttacagatcacagggaccttattctgagagcctcacctcaccaaggggggcctcaggcctgcccctgcccatgaggcccaaagagtgggggttggggagggatcacagggtgaggcg

SEQ ID NO: 32318 - DNA, 498 bp, Homo sapiens
  misc_feature (1)...(498): n = A,T,C or G
catcgagcacctactgacagcgtccgcgnggngcaanncgangaggaagacaaaatgccgccctacgacgagcagacgcaggccttcatcgatgctgtccaggaggttcgcaacaagttcgaggaggccgaccggtcgctgaaggacatggaggagtccatcaggaacctggagcaagagatttcttttgactttggccccaacggggagattgcttacctgtacagccagtgctacgagctcaccaccaacgaatacgtctaccgcctctgccccttcaagcttgtctcgcagaaacccaaactcgggggctctcccaccagccttggcacctggggctcatggattggccccgaccacgacaagttcagtgccatgaagtatgagcaaggcacgggctgctggcagggccccaaccgctccaccaccgtgcgcctcctgtgcgggaaagagaccatggtgaccagcaccacagagcccagtcgctgcgagtacctt

SEQ ID NO: 32319 - DNA, 505 bp, Homo sapiens
  misc_feature (1)...(505): n = A,T,C or G
gtagttcntntnntnnngcctggagtccctagtccgngtgctggaattccttcgtcacacagcccagtgttccagattcgaggcctcccaatgctcagtgactctttgccacctgcaccagatagaatcagtcctctcctaaaaggtctttccttcttcctttctctagctgggaacaggtgctcatgtccccagtccttgtctggtcttcctgtctccccactccttctcttgtgagtctgtcctcctcaaagaaattgtccaagcatctttgctcactcctgtctcccctttccctctccctcccagacccaagtggtgacaccagctctcccctggcctgagacagatctgaagccctggaatgtttcttcactccctcatctattcttatcctccaccgcccctcacttgctgccccaggtattccaggacaatcctatttacctgccattttatccttttcttctttttgagacagagtctcactctgtcacccaggctn

SEQ ID NO: 32320 - DNA, 474 bp, Homo sapiens
  misc_feature (1)...(474): n = A,T,C or G
agaggacgcggccnnnnnaactgaaggcctgggatcctcgnaangncgtggaantttggccttctcgccaggtactgacaacaccagcaactcgagagctgggattttcaaggtggaggaagaaaatcaaaaccaccctggtccctggggtgaggaaagaacaggaggggaggaggaggagtgtgctctgcacttgccttgctccaggatggggtggcagcagaggaatgtcacaggtcagcagcctaggcctccagctataaatagtccggagggcccgagaggctcccgcccgtccagcagggctgtcagcttcctgtgtggcagcacctggcacactggctctggccagcattatgctaaaaccctgttactctccaatgaaccagggaggcgggctcctctctgcgcctatcccttgagaattctgtcttaccagtgaagggtggggctgcccagatcaggcagcaggag

SEQ ID NO: 32321 - DNA, 503 bp, Homo sapiens
  misc_feature (1)...(503): n = A,T,C or G
tggggtccnnaaggggccccaactgagaccccattgaggtnctcncgcacagngcggnggaanncgcacttgggagaagcgccgggacgccgagtatggcgccagcccggagcaggttgcatacaatggcgatgaccactcataaggaggcctggtggagaaccacgtggacagcaccatgaacatgttgggcgggggaggcagtgctggccggaagcccctcaagtcgggtatgaaggagctggccgtgttccgggagaaggtcactgagcagcaccggcagatgggcaagggtggcaagcatcaccttggcctggaggagcccaagaagctgcgaccaccccctgccaggactccctgccaacaggaactggaccaggtcctggagcggatctccaccatgcgccttccggatgagcggggccctctggagcacctctactccctgcacatccccaactgtgacaagcatggcctgtacaacctcaaacagtgcaagatgt

SEQ ID NO: 32322 - DNA, 494 bp, Homo sapiens
  misc_feature (1)...(494): n = A,T,C or G
natcgagcactgttcgagnggcggaattcgagggagcccttacaggtcgccttcgtcagacgtcagaatgattccttgcagagccgcgctgacctttgcccgatgtctgatccggagaaaaatcgtgaccctggacagtctagaagacaccaaattatgccgctgcttatccaccatggacctcattgccctgggcgttggaagcacccttggggccggggtttatgtcctcgctggggaggtggccaaggcagactcgggccccagcatcgtggtgtccttcctcattgctgccctggcttcagtgatggctggcctctgctatgccgaatttggggcccgtgttcccaagacggggtctgcatatttgtacacctacgtgactgtcggagagctgtgggccttcatcactggctggaatctcattttatcgtatgtgataggtacatcaagtgttgcaagagcctggagtggcacctttgatgaacttctta

SEQ ID NO: 32323 - DNA, 487 bp, Homo sapiens
  misc_feature (1)...(487): n = A,T,C or G
gcgccttntnnncccaagtttcgaaagctatgtgcaggaactcgaggggtgggtatggaggtcatctggtatgtggcatcagcaggccgagcagcggtcgctcttttcagccagcccagccccggtgccagggctgcggcgcagtatgtctttcagggagccatcctgctcactcagcagcttgttgatctcattctgcttgtattcaggtgagaggcggtggccgaagcccgagcccttgcgggaaggtggattggagcggcgctgggctcggcgggcacaggcccggatgatgaggtacaccacctcggccacattgaggatgatgcagatgccagaggcagctagcatgaagacggtgaagacggttttctcggtggggcgggacacgaagcagtccactgtgttggggcaggggtagacgtcgcacttgaccagccgcaccatggcatagccagggtagagcagataaaagacatacatgaag

SEQ ID NO: 32324 - DNA, 495 bp, Homo sapiens
  misc_feature (1)...(495): n = A,T,C or G
tggtncccnnaagggncccccctagtnaccccctagnagnctgaggaannncncnnaananngnngagnnatggcaggagcccttgaaggcgacatcttcattggtcccaaagctgaggagcaccgagggctgctttcaatccgctatgccatggagcatggcatcgtcaaggattggaacgacatggaacgcatttggcaatatgtgtattctaaggaccacctgcagactttctcagaggagcatcctgtgctcctgactgaggcgcctttaaacccacgaaaaaaccgggaacgagctgccgaagttttcttcgagaccttcaatgtgcccgctcttttcatctccatgcaagctgtactcagcctttactctacaggcaggaccacaggggcggtgctggattctggggatggagtcacccatgctgagcccatctatgagggctttgccatgccccactccatcatgcgcatcgacatcgcgggccgggg

SEQ ID NO: 32325 - DNA, 473 bp, Homo sapiens
  misc_feature (1)...(473): n = A,T,C or G
ggaggcggnnnnnnccctgagaaaatagnacgctcggaagagccgtggaattctgaagctgttgcttttgatgactgtggcttcaccttcctgtggccatacctgccatcctggttctcagccacaagaatctttgaattgatgcctcctggtctcccagctggtgtggaactcaacctccatggcccttccactcacttctagcgctccctttgttcctcttgcccacatattcccatctctgtccagggactgaccacagcccatgagcagttcaaggccaccctccctgatgccgacaaggagcgcctggccatcctgggcatccacaatgaggtgtccaagattgtccagatttaccacgtcaatatggcgggcaccaacccctacacaaccatcacgcctcaggagatcaatggcaaatgggaccacgtgagttgaagggcatgggccgagccattgtaagtttcata

SEQ ID NO: 32326 - DNA, 242 bp, Homo sapiens
  misc_feature (1)...(242): n = A,T,C or G
aggaccngtgccatggccagcctggctccacagccatcaacggacagagccagacacatgacgaggagatgaccggcgaatagccctgctgcccggggctcttgagggggtctcatggcagcagcatacaaggtggcagcggataaccctgccttgttctgtcatccagggctcctttgctgccccgttctgtcacccaaggctcctagggggacaaggctctctcccgagggtgaggaatt

SEQ ID NO: 32327 - DNA, 373 bp, Homo sapiens
  misc_feature (1)...(373): n = A,T,C or G
ctcctgtataggaggctggaaaccccacccagattctctggtccaagaaggactccagcgggggtgactcatgtgcttctgaggaggaaccaacctttgaccccggctatgaacctgactgggctgtaatcaacactgtgcggccacagctctgccactcagagcccacgagaggtgcagagcccatctgcccccagggctgctgggccttctcattgagtctgggggagctaaagttcatccgtcggtccaagccaggcctcaactgggcctacctggatatggagacccaggctggaggtaccctgcccgcactgcactancgccgaggnggcacgcgcgccctgctgcgcgacctcaaccgctacctgcg

SEQ ID NO: 32328 - DNA, 456 bp, Homo sapiens
  misc_feature (1)...(456): n = A,T,C or G
taagagntccgtagatcctncgnaagngcggnggaattcattcttactcctttatcttgttgcaatgcctgatccagctaagtccgctcccgccccgaagaagggctccaagaaggcggtgaccaaggcgcagaagaaggatggcaagaagcgtaaacgcagccgcaaggagagctactccgtatacgtttacaaggtgctgaagcaagtccaccccgacaccggcatctcctccaaagccatggggatcatgaattcctttgtcaacgatatcttcgagcgcatcgccggcgaggcttcccgcctggctcattacaacaagcgttcgaccatcacctccagggagatccagacagccgtgcgcctgctgctgcctggggaactggccaagcacgccgtgttcgagggcactaaggccgtcaccaagtacaccagctccaaataaatggacgcatg

SEQ ID NO: 32329 - DNA, 501 bp, Homo sapiens
  misc_feature (1)...(501): n = A,T,C or G
tggnnnaaggcagggtaaggggnnnaatcgaanactcaatcactgtggcggaattcgacatcaaccagcattgagaaaattgtgtttcacagggttatcaaagataaaggacagcatgcatgttacactcatgctttgcaagtacctacaggcggggatttctgtgcaccagaatcaaaacattttcaaagacactcttggctgctggctgtgtctcatctgagcctctcaaatctcaggacccagaatgtgggcaaaccacaggctttgtcatctgacagcaaagcgggtgtttgataggaaatcagcttcagctctccagagatggggaagaaacagttccacaagccgaacaaaccagactgggcactgctgctgcaggcaggcctggcatgagaatggactgtgggggtcggggcctccctcagcggggcggtggctgagctgattctgccagggctcttctctgagacgcgtgcatgctcacagcgatgggtggtg

SEQ ID NO: 32330 - DNA, 464 bp, Homo sapiens
  misc_feature (1)...(464): n = A,T,C or G
nttcgtagacctcgtaggcccgtgtggnggaattccgcttaaaccccggaggtggaggttgcagtgagccaagatcgcacatcgcacttcagcccaggcgacagagcaagactctcaatcataatcaatcagtaaagctgatgaaaataaaaaagcctgcaaattaatgtaggcacccaggtctccttaaatttagaatcctttcctcaaaagtctccgttgatacagaaacacttttgaagccagatgtgaagcaccagttgacccgcaggtgggggtgccaactggtaggctgtagggttagctctggcctctggcagccagccagttgtctcctaagaaaatactgtggcgtgaatgcaaaatgtgattcatcacttggctcctaatttcttttgattttgtcccctaaagcaaggtccgtggtcctgtcagtggaagcccggatagcatgaatgcctctn

SEQ ID NO: 32331 - DNA, 460 bp, Homo sapiens
  misc_feature (1)...(460): n = A,T,C or G
nttgagaactgagaccctaggcagagtggnggaattactgggagggcattgaccagcctcttccacctggcgttactgtgacctcctggctgggcataccctggaaacctggtgacaaggaggcctgtgcacatcccaactctcgattttgtgccccggctcgccagagccccatcatggacccagcctgggaggccccagagggtgtccccattgacgccatcatctttggtggccgcacacccaaaggggtacccctggcatacgaggccttcaactggcgacatggggtgtttgtgggcagcgccatgcgctctgagtccactgctgcagcagaacacaaagggaagatcatcatgcacgacccatttgccatgcggaccttttttggctacaacttcgggcactacctggaacactggctgagcatggaagggcgcatgggggcccagctgccccg

SEQ ID NO: 32332 - DNA, 490 bp, Homo sapiens
  misc_feature (1)...(490): n = A,T,C or G
ggggggcggnggccnnnaattgagnccccncgagaccatagtccatgtggtggaattcccctgggctgttctgcttggccgtgctggctgccagcagcttctccaaggcacgggaggaagaaattacccctgtggtctccattgcctacaaagtcctggaagttttccccaaaggccgctgggtgctcataacctgctgtgcaccccagccaccaccgcccatcacctattccctctgtggaaccaagaacatcaaggtggccaagaaggtggtgaagacccacgagccggcctccttcaacctcaacgtcacactcaagtccagtccagacctgctcacctacttctgccgggcgtcctccacctcaggtgcccatgtggacagtgccaggctacagatgcactgggaggtgtggtccagacagaggggcaggccccagggtggagatgatctgccaggcgtcctcgggcagcccacctatcaccaacn

SEQ ID NO: 32333 - DNA, 460 bp, Homo sapiens
  misc_feature (1)...(460): n = A,T,C or G
ntcgaagactctagtccatgtggtggaattcgggagggatcggcctctgagggctgcttccacccatctcaccagtggctgcaggctccaggcgccactttccttgagtctatgttctttccaagcatcctgcagctccagaagctctggagccgccagcactgagagaagcgatggagctgcatgcagggaaactttgttgacagcggtgtctggatggaccagcagagggcactctcacccacggggaaaatcgtgcgcccggcctcgtccaccgccagaagacgccgctacacaatggagtctcgctctgtcgaccaggctggagtgcaatggtgcgatctcggctcactgcaatctctgcctcccggtgagaggtgaagccagctggacttcctgggtctagtggggacttggagaacttttctgtctagctaaagatttgtaaatgcaccaatca

SEQ ID NO: 32334 - DNA, 468 bp, Homo sapiens
  misc_feature (1)...(468): n = A,T,C or G
ntcgagaccctagacagccgtnggaattcccctgggctgttctgcttggccgtgctggctgccagcagcttctccaaggcacgggaggaagaaattacccctgtggtctccattgcctacaaagtcctggaagttttccccaaaggccgctgggtgctcataacctgctgtgcaccccagccaccaccgtccatcacctattccctctgtggaaccaagaacatcaaggtggccaagaaggtggtgaagacccacgagccggcctccttcaacctcaacgtcacactcaagtccagtccagacctgctcacctacttctgccgggcgtcctccacctcaagtgcccatgtggacagtgccaggctacagatgcactgggaggtgtggaccagacagaggggcatgccccagggtggagatgatctgccaggcgttctcgggcagcccacctatcaccaacagcctgat

SEQ ID NO: 32335 - DNA, 511 bp, Homo sapiens
  misc_feature (1)...(511): n = A,T,C or G
agagaggannntnnnnnnnttttgagtccctagtcagtgtggtggaattcgaccacgtccaggcacagatccttccgtttagagaagactcactagatagtgttttatttttaaagaagattaacacgtgctggcaggaccactgcagacaaatgatcatgatcagaagcatcttcctgttcttggaccgcacctatgtgctgcagaactccacgctgccctccatctgggatatgggattagaactgtttagaacccatattattagtgataaaatggttcagagtaaaaccattgatggaatcctactgctgatcgagcgcgagaggagcggcgaggccgtggaccggagcctgttgcggagcctcctgggcatgctgtctgacctgcaggtgtataaagattcatttgaactgaaatttttggaagagactaattgcttatatgctgccgaaggccaaaggttaatgcaggaaagagaggttccagaatatcttaaccatcgtagtan

SEQ ID NO: 32336 - DNA, 500 bp, Homo sapiens
  misc_feature (1)...(500): n = A,T,C or G
ggaantnnnnnnnncccgagacccatatnagnggatggagtncctctccaggncagggagaggaaccccaaccccagtgcaccgcgggagctcaaggaacagcaggattccccgggcatcaaggacttcctccagagcctgaaaggcttcccccgcggagacaagcttttcggccctgacttaaaacttgtgccccccatggaggaggattacccccagtttggcagccccaagtgaggggccgtggctgtggcatccagagtccctgcctggaccagcctctccactcatgtgactctttccaacctgctttgtggcactggggcaggggccgggggcagtctgagagaggccattctttcccaacacctcttggggagtttagggtgggggggggcgcggctgggaggagggcaggcatcggggagccgggagcctgaccctcatctttttccaaacaggctcagagggtgtcctgcaccggggcctgggcaggaggg

SEQ ID NO: 32337 - DNA, 240 bp, Homo sapiens
ccctgagcccctgggctctagacccaggcagccaaacctcattccctgggcggcagcaggacggagggctgccccctacctggtcctgacggccctgctgatcttcactggggccttcctactgggctacgtcgccttccgagggtcctgccaggcgtgccgagactctgtgttgctggtcagtgaggatgttaactatgagcctgacctggatttccaccagggcagactctactggag

SEQ ID NO: 32338 - DNA, 459 bp, Homo sapiens
  misc_feature (1)...(459): n = A,T,C or G
natcgagacctctagcnctgtggnggaattcctgcagggcagggaaggcattgccgactagataaccgtgtgagcttggactgagcgttggtggttcttcccaaaggaaaggaatttctcccggcctgccaggtctctgggccttcagcgcgggtcctggtgctgcggccacaccaccctggggtgctcattgacagagctgccataatgaacttgaaaggacgggaatcacgagggaagctggggctcccctgcccacaggagaggatccccgttcttcaagcttctctgctcagtgtctactaacgaccgacatttgctaatgtaaataatagtaaattattgagaattctaattcttttacacagtctgtttttaatctattttaattaaataaaatctatgactcttttnnaaaaaaaaaaaaaaaaaaaaaaaaaaaaaaaaaaaaaaaaaaaa

SEQ ID NO: 32339 - DNA, 508 bp, Homo sapiens
  misc_feature (1)...(508): n = A,T,C or G
tggggtntnnnnnngggatttgagaacctattnagngngactgatgtccatacgaagaccctttcttgcccacagtttcgagaggcccgtgccatgagaccgcctggtgtgagcaaggcgacctgtgctgctgcccgaaggtttggccgccgcgggacacctgtttccttcccgcagagtctgcgtccgcacagcatacccagctcggacctcctaggacagagactcagcgaacccttgctgggaaccgctgagctgaagttcttggaaggctcccacccaggtgccccgttggaaagcagatatttcccggacccagcgcggcctcaaccagggcaggaaagagtggttatttatgtacttaaagtttcattaaagttaaaatcggaaagttctggggctgctaaatgaattgggggagggaacacctgactctccttagccactgtcccacctccatccacacacagaccaccccccttcactttcccttctgtcctgggtgagt

SEQ ID NO: 32340 - DNA, 501 bp, Homo sapiens
  misc_feature (1)...(501): n = A,T,C or G
natagaacttctgtccagcgtggnggaattcggccaagcaggcagatactgcctgacccgttcccgggagcgtgtctgggtttgggggcgggagacaggctgagccgcctgggcggcctggcctgtacggggcgggggaggccatggcctcggctgagttgcaggggaagtaccagaagctggctcaggagtactcgaagcttcgggctcagaatcaggttctgaaaaaggtgttgtggatgaacaagcaaattctgcagctttaaaggagcaactgaaaatgaaggatcagtcattgagaaaactacaacaggaaacggacagtttgacatttcgaaatctgcagcttgccaagagggtagaactacttcaagatgaactatctctaagtgaaccacgaggcaagaaaaacaagataagtggagaatcttcttctcagttgagtcaagagcagaagagtgtctttgatgaagatctgcaaaagaagatagaagagaatga

SEQ ID NO: 32341 - DNA, 463 bp, Homo sapiens
  misc_feature (1)...(463): n = A,T,C or G
natcgaagattactaggcccgtgnggnggaattcacccgctcgagccgggttcgtgctggggccccacgaagatcagctcgccggcaactacaggtgccgctaccgctcctgggtgccccacaccttcgaatcggagctcagcgaccctgtggagctcctggtggcagaaagctgatgcagccgcgggcccagggtgctgttggtgtcctcagaagtgccggggattctggactggctccctcccctcctgttgcagcacaaggccggggtctctggggggctggagaagcctccctcattcctcccaggaattaataaatgtgaagagagctctgtttaaaaaaaaaaaaaaaaaaaaaaaaggcgcccgtttaatttaaagggcccctttaaaccccgttgaaaaccccggatgggcctttttagtggccaccctttgggtgtttcccccccccccgccct

SEQ ID NO: 32342 - DNA, 506 bp, Homo sapiens
  misc_feature (1)...(506): n = A,T,C or G
ggggtnnnnnnnnnnggatcgagtagcctgtcagngtgctggagatccatctggacccagcatggggtgcaccgggtacacttaacgtgtctctataagccaagttgcttcaggaccttcaccactggcctctagaatggtccagaggggctggctgggtccctttgtcagactcctgccggcagctgccctgggggacatgtgtgcccatctggcatcctccagcccgtgcagtccgctcttcactgttccacggcctcccagtgcctcccagcattggacccatctccccctgcagtttgaggccagagaggtgagtggacctgacaagtgccagagtaaccgtgtagacagagcagtgtagacagcgctcagccccagccccaggtgtggacctcatgctggtgatggctcccctgggtggcctgccagcacagccagtgccatcagggagctgaaggggctgtcccccacctaactccagctcccccttcacgttgtcaccc

SEQ ID NO: 32343 - DNA, 510 bp, Homo sapiens
  misc_feature (1)...(510): n = A,T,C or G
gggggggnnnnnnnnggtttgagaagcntntnanngngtgtgagtccctagtccatgtggtggaattcgctgaactgtgcatcttgcccgttcaagacatcatgtgctttggtccagaaatgaggtagcaaatgcaaggcacgaatcacaggcatccccagatgaggcagtgtgctcctagagggcagcttcctgcccagccatcatccttgtgttcccctgcactcagctcgtagcaggtgctccagtgtctgcttggatgcaccccaggctgggacggctcagtaagaagggtctgggctctctccctgccctgtcccatgcccttgtcctcccagagttacacagcttatggcaggctgggaacttgctgcctcttcatggggcttcctggtgtctgattactgaccctcgcctgtgtcctcccaccactgccacctgtccagagtgaggcagcagctccccacacagatgcaggaggtggactctcttctgatgaagaggagggga

SEQ ID NO: 32344 - DNA, 510 bp, Homo sapiens
  misc_feature (1)...(510): n = A,T,C or G
aggccnnnnnnntttgaaatagatccccgtccgagtggtgcaattcggtcctcacagacccacacacgccctacgaggaggagcagcggcagtcagtgcagtctgaccagggctacatctccaggagctccccgcagccccccgagggactcacggaaatggaggaagaggaggaagaggagcaggacccagggaagccggccctgccactctctcccgaggacctggagagcctgaggagcctccagcggcagctgcttttccgccagctgcagaagaactcgggctgggacacgatggggtcagagtcagaggggcccagtgcatgagggcggctccccagggaccgcccagatcccagctttgagagaggagtgtgtgtgcacgtattcatctgtgtgtacatgtctgcatgtgtatatgttcgtgtgtgaaatgtaagctttaaaatgtaaatgtctggattttaatcccaggcatccctcctaacttttctttgtgcagcggtct

SEQ ID NO: 32345 - DNA, 498 bp, Homo sapiens
  misc_feature (1)...(498): n = A,T,C or G
agtccggagaannttggggggacttgaaagngtnagnannnncangnaannncnggggagaagtattgcccctctgcgntggtgtctttttaccctgtgaaacgcctgtcttccatcccgagaggaaagagaacgatgacgggttgtgttctggtggaagatttatcagctactacaaaacagaggtttgaaaacctattttgcagctctcaaatttcaatttagatgacttgactttgagggcccagtgtagatgtgagggctgagtagagaaagcccgcagccccctctccccaggagcttacccctgcctcggggctccctttttgtctctcttgctgtgttatgaaaggagagcatctgggaatactcaaaggctggcttctgcctgtgtgtcccaccccatctcaaggtggctagtgctgctgagggactccggcctgaggaaggaagcgcccgtggcctggggcagagccgtgcagttgcatggctttcctg

SEQ ID NO: 32346 - DNA, 508 bp, Homo sapiens
  misc_feature (1)...(508): n = A,T,C or G
aggcccccnnnnntttggacatcgtccagcgtggggaattcgcaactcagagggtcagtttttctccagcatgactctctgggggctagcgatgaagacgctgcagaatgaaaacgagttagaccagtgatgtaccgcgcttctccacggtagaggcgtgttctcagtttagcaggctggtgttaaggctgtaggaggacccagtttccccatgacagtgccttctaactagccagagaataggtagcttccctcctgatgatggctcataatctgaagcatcttgagctgggggtgtgagggggagggcctgctggctcaccgtgaggcagccgcgggagggagcgctgacgtcacagaagcgaaggcttgatgctgtctcagcagcctcagctgtgggggggaagcgcgtgtgcatcgtgtcaactactgtacatgttggtcatgtgaaaggaattatatatgtatagtattacaagtatttttgcatttttacaagattgaaatt

SEQ ID NO: 32347 - DNA, 516 bp, Homo sapiens
  misc_feature (1)...(516): n = A,T,C or G
tgttttcttttacggggtntnttnnnnagccaggggnggggnnaattgatatccatccacgtggncgaanncgctaaattcaacctcaggggaactgatgcatccagaagactctgtggtttcctcaaaagtcttggggtgcactatgtatttgacacgacgatagctgcggattgtagtatcctggagagtcaaaaagaattcgtgcgtcgctatcgccagcacagtgaggaggaacgcaccctgcccatgctgacctctgcctgtcctggctgggtccgatacgccgagcgggtgctgggacgccccatcactgcccacctctgcaccgccaagtccccccaccaggtcatgggctctttggtgaaggattattccgccagacagcagaacctgtctccagagaagatcttccacgtcattgtggccccttgctatgacaagaagctggaggctcttcatgaaagccttccccctgctttgcatggctcttggggcgctgactgcgtgttaaca

SEQ ID NO: 32348 - DNA, 510 bp, Homo sapiens
  misc_feature (1)...(510): n = A,T,C or G
aggcccnnnnnnnttagacatcgatccccantccgagtggtgcaattcctgcagcctcgacctcctgaactcaagcaatcctcccacctcagctccctgagtagctggaaccacagtggcacaccaccatgcccggctaatttaaaacaatttttttgtagagatgaggtctcactatgttgcctaggctagtcttgagctcctgggctcaagggattctcccaccttggcctctgaagtgctgggatttcgggcatgagccaccaagtccagactatagcaacttttaaaaactaaaagcagaaaaacttttctgatcttatgtaaaggccataaaattaattggcatataaagaaattggagttaactgcagataatatttatctttgtggtttatatttatttcaataaaacttcttattattaagtacctacaaaacagaatatggcagaattatatacttttttctattgtcttatcagcctgagggcacagaataccaaatcan

SEQ ID NO: 32349 - DNA, 464 bp, Homo sapiens
  misc_feature (1)...(464): n = A,T,C or G
aggggcccggnncnnnnaattcagacgtcataggacgngcgtggaattcagaaaggaaggaaggaaggaaggaaggaagactcaagcatgaaagaaagatcatatcagattagatagaagcatagatggccctttcaagcatagctagatgtggatggcagtggagaattaaaataagtaattgacagatggggcaacaaagccaagacttcacaaaaaatttaaaaataagagaaattggctgggtgcggtggctcacgcctgtaatcccatcactttggaaggccgaggtgggcggatcatgaggtcatgagatagagaccatcctggctaacatggtgaaaccctgtctactaaaaatacaaaaaaattagctgggcatggtggcaggcgcctgtactcccagctactcaggaggctgaggcaggagaatggcgtgaacccgggaggtggagcttgccgtg

SEQ ID NO: 32350 - DNA, 244 bp, Homo sapiens
  misc_feature (1)...(244): n = A,T,C or G
aacggcgggagtacctggaccagcttaatgccctgcgccgcgagaagcagaagctcgtggagaagatcatggaccaataccgcgtgctggagcctgtgcccctgccccggaccaagaagggcagctggctggcagacaaggtgaagaggctgatgcggccccggcgggaggggggcccccctggngggctgcncctgggggccgacggggctggcaacaccgaaagcctggcgggccccccaga

SEQ ID NO: 32351 - DNA, 467 bp, Homo sapiens
  misc_feature (1)...(467): n = A,T,C or G
natgatagcgctcgtcagngcgngcaattcgccgtgcacggcccaggagtgcctagcctcggtgctgaagcctaccaacgagacgctcaacttctggacgcacttcatcccgctgctgctgttcctgagcaagttctgccgtctgttcttcctgagcggcggcgacgtgcccttccaccacccgtggctgctaccgttgtggtgctacgcgtcgggagtgctgctgaccttcgccatgagctgcacggcgcacgtgttcagctgcctgtcgctgcgtctgcgcgccgccttcttctacctggactacgcgtccatcagctactacggcttcggcagcacggtggcctactactactacctgttgccaggcctcagcttgctggatgccagagtcatgactccatacttgcagcagcgcctgggctggcacgtggactgcacgcgccttatcgccgcctaccgcgccc

SEQ ID NO: 32352 - DNA, 454 bp, Homo sapiens
  misc_feature (1)...(454): n = A,T,C or G
naattgtagtacatcagtccagngcggcggaattcagcagatggagggacagatccaggacgaggtcgcggagcagaaccccctttcgcttaagtgaaaaagatcgaatggagctgttagaaatagcaaaaaccaatgcagcgaaagctctaggaacaaccaacattgacttgccagctagtctcagaactgttccttcagccaaagaaacaagccgtggaataggtgtatcaagtaatggtgcaaagcctgaagtaagtattctaggtttgtcggaacaaaactttcagaaagccaactgtcaaatctgattagccacttatatcttagactatactttttgggaagtctagagatgtatataatgtgctaaattcaaagtagcaaatctgaagataggcaatgtcaaacccatgaaaatgggagattaatgagctttatttggccgtgcatg

SEQ ID NO: 32353 - DNA, 472 bp, Homo sapiens
  misc_feature (1)...(472): n = A,T,C or G
ggggactcgagaccactaggncagaactgatgaccctcggacaggcgctggatttaattcgccagtcggcccccttccgtaaacaaaccagcctgaatgggttttatcaggataacggtggcgatgccgacttgctgcgcctgaatctgtcgctcgattcacagctttatccgcaaatttccggacataagagccgttttgccattcgttttatgccgctggacactgaaaacggacaggtaccggaacgtctggatttcgaactggcctgttgctaaggagtaaaaatgtcagaaactattacggtgaattgcccaacctgcgggaaaacggtggtgtggggtgaaatcagcccgtttcggccattttgctccaaacgttgtcagctgatcgacctcggagaatgggctgctgaagaaaaacgaatccccagcagtggcgatctttccgaaagcgatgactggagcgaaga

SEQ ID NO: 32354 - DNA, 511 bp, Homo sapiens
  misc_feature (1)...(511): n = A,T,C or G
agggccnnnnnnnccattgactttcgatccacantccgtgtggtggaattcgtcaagtgtgagtactcggcgcacaaagagggcgtcctcaaagaggagatactgctagcctgcgaaggtggcactggcacctgtgtgcgcgtgacggtgcaggcccgcgtcatgggtgagagcgtgaggctcctggttggaggagggatgcacaagctcgactgcgagggtttctgtcctcctcagggaaccaaggctgaacaagggatccttgcccggctcaggggttctcaacctccttggcaggtccctacctccagctgatccctgagggaaggggaggggtccccttagtgggccgcatgggtggggccgggggccagcatggcactgacttgcaccctgccttgcagaccggcaccacggcacgcccatgctgctggatggtgtcaagtgtgtgggcgccgagctggaatacgactcaaagcacagcgactggcacggctttgactgaggcccg

SEQ ID NO: 32355 - DNA, 464 bp, Homo sapiens
  misc_feature (1)...(464): n = A,T,C or G
atgccnnnttnnnnnaaaactaagagtctactcagagtgcgcgaattcggaactttggggtgcagccaggacccggtaggcctgagcctcaactcttcagaaaatagtgtttttaatattcctcttcagaaaatagtgtttttaatattccgagctagagctcttcttcctacgtttgtagtcagcacactgggaaaccgggccagcgtggggctccctgccttctggactcctgaaggtcgtggatggatggaaggcacacagcccgtgccggctgatgggacgagggtcaggcatcctgtctgtggccttctggggcaccgattctaccaggccctccagctgcgtggtctccgcagaccaggctctgtgtgggctagaggaatgtcgcccattactcctcaggcctggccctcgggcctccgtgatgggagccccccaggaggggtcagatgctggaaggg

SEQ ID NO: 32356 - DNA, 494 bp, Homo sapiens
  misc_feature (1)...(494): n = A,T,C or G
agtacggagaanccaggaccattgcagnanctncngaangcgangaancgnctcagaaaaagcacagagttgatgagacgcgtccgtcgcttccagattgctcagtacaagtgcctggtgatcaagtatgccaaagacactcgctacagcagcagcttctgcacacatgaccggaacaccatggaagcgctgcccgcctgcctgctccgagacgtggcccaggaggccctgggcgtggctgtcataggcatcgacgaggggcagtttttccctgacatcgtggagttctgcgaggccatggccaacgccgggaagaccgtaattgtggctgcactggatgggaccttccagaggaagccatttggggccatcctgaacctggtgccgctggccgagagcgtggtgaagctgacggcggtgtgcatggagtgcttccgggaagccgcctataccaagaggctcggcacagagaaggaggtcgaggtgattggngg

SEQ ID NO: 32357 - DNA, 497 bp, Homo sapiens
  misc_feature (1)...(497): n = A,T,C or G
ttttaagcaggccaaggggnnnattgaaattgatccactattccgagtggtggaattcatcgcttcggagccaggtgggcctgggggggcgtcgcagtctctctgtgcctcagttgcttccaggatgcgggacccttggctgcaggggttgcttccgccactagagggcgcgccggtcccgctcctggtggcccactgtggctgcccgggcgacagtacgcccagggcctgtgttccatagccatctactctcttgagcctttggacttctctccaagcccctgtgggaggcggacagcagtgaccacctccccttcttttggactgcgacctccttccctcctgggagagccctgtgacctgcatgctactcttaactgttctattcaagactgaatagaagtatttcagtcttgcagaggaggaaatgctcacagctccgaggtgcggctgtggtcgagaaccgggtgctgggccgggcgcgggggctcacgcct

SEQ ID NO: 32358 - DNA, 454 bp, Homo sapiens
  misc_feature (1)...(454): n = A,T,C or G
caaaagtcagctaccttagncaangcggtggaattcctgcctcccagggcttccggctcagggtttgcagaaaccagttttctctcgtgaaatgtcacagtgttaaacacaagtggtgcaagtcagcagtaggaggtccacacagaaatgtgggtcagagcaggaacttgaggcagtgcttcctgatgcaggctggatccacttccaggaatgtaagtaggaaagaagatagttgattgtggtgaactgttgggatatgcagatagctcggagtccttgtgcacaaaaagctggaaactgtgtgtccattgtccattgcagtgagattccatcataggcatcgtctcatcgatgtcatagagtcttcaagttagaagttcagaactctccagcaaaaggcaggggagtcttggcatttttcctcacgggttctcagtggtgaactgtttttagg

SEQ ID NO: 32359 - DNA, 450 bp, Homo sapiens
  misc_feature (1)...(450): n = A,T,C or G
agccgntnnnnaaatgactgcatgcatatgtcgnggcattctgaccgctcagcctgaagagcagagaatgccatgggtgggactgtgggggtcggatcgtggggttgttggcagagggcaaccctgggccccacaccgtgtggacaggcagacaccagattgtccaggagcaggagctgctgggactgcgctggccccggacctagtgggccttctcctggctgctgagatgtcgtctgtgactggcctggctggagggggagtgttgacaacccaaagctgttctccagtctggggagggagaggcagggtccccaatgtccgagctgcatctggacgctgctcttaaaggacctcctggggcaggggagcggtagggtctggactgggcagatgctgtatgacctccctgagcacccgtgactgccccatgctttcccctttgtgctc

SEQ ID NO: 32360 - DNA, 452 bp, Homo sapiens
  misc_feature (1)...(452): n = A,T,C or G
nactgagacctgaggacagtgcgnggaactcctcctgcggaagcagtgacctctgacccctggtgaccttcgctttgagtgccttttgaacgctggtcccgcgggacttggttttctcaagctctgtctgtccaaagacgctccggtcgaggtcccgcctgccctgggtggatacttgaaccccagacgcccctctgtgctgctgtgtccggaggcggccttcccatctgcctgcccacccggagctctttccgccggcgcagggtcccaagcccacctcccgccctcagtcctgcggtgtgcgtctgggcacgtcctgcacacacaatgcaagtcctggcctccgcgcccgcccgcccacgcgagccgtacccgccgccaactctgttatttatggtgtgaccccctggaggtgccctcggcccaccggggctatttattgtttaatttat

SEQ ID NO: 32361 - DNA, 481 bp, Homo sapiens
  misc_feature (1)...(481): n = A,T,C or G
aatcgagaccctatccagnggcggtagatncacatatatcacacagccatactgatcagacgtttgcactgtgattcttctttcctagtttcagcacccatttggactttcacaatcagagatggcagcggtaaaggcatcaacatcgaaagctaccaggccttggtattctcatccggtatatgcaagatactggcaacattatcatcaagcaatggcttggatgcaaagccatcacaatgcctacaggaaggccgtggaatcctgtttcaatcttccatggtacttaccttctgcgcttcttccccaaagctcttacgataatgaggctgcgtatcctcagtccttctatgaccatcatgtggcctggcaggactacccctgcagttcttcacatttcagaagatctgggcagcatccacgttacagcagtaggatccagggcatccacaaagngaccaagctttgtcaaagagaagaa

SEQ ID NO: 32362 - DNA, 495 bp, Homo sapiens
  misc_feature (1)...(495): n = A,T,C or G
ngattgaaacccctnggaannngcnnatcgagaacactagtcagtgtggtggaattccaaagccaaagggtgtgggaaacgagtaagagaggagacaaaccacagaggcagggatggtagataacagaagcgagaacagacggggaccgagaacaggatggggaaggcaggagacttgagcgagggatggccgtggctccggctgccctcactctcttccctccccacacaggtctgagcagcgtctcctcgccctcggagctgtcggatggcaccttttccgtcacgtcagcctattctagtgccccagatggcagtcccccccctgcacctctgccagcctctgagatgactatggaggacatggccccaggccagctttcctctggtgtcccagaagcccccctactcctcatggactatgaggctaccaactccaaggggcccctctcctcccttcctgccctcccaccagcttcagatgatggggctgct

SEQ ID NO: 32363 - DNA, 482 bp, Homo sapiens
gaatgaacccttgccagggcggtagacgacccattcagctactcagggaggccagactgcgctgatgctgggagtcagccacgacagggaggacatggttcaagcgctgcttagctgccaggcagatgtcaatctgcaggaccatgatggatcctcggccctcatgctggcctgtcaccatggcaacgtggacctggtgcggctgctcctggcacacccagcctgcgacagcagcctgactgacaaggctggccgcacagctttgtccatcgctctgaagtcacccacccatatggaaattgctgggcttctgagagcccacgcggagcagggcaggtccctggggctgtaggggctgcagaagaactggccgtggggaacaaaagccttcttctctggactcctccctcgcccttgaagagggcagaggtcacaggccagagagccacccttctagagaagaaactatgtcaaatatgcac

SEQ ID NO: 32364 - DNA, 494 bp, Homo sapiens
  misc_feature (1)...(494): n = A,T,C or G
ngatcgatnnccnctnnnnnnnnccnatcgtagaccctagtcagtgtggtggaattcaatcaaaaacccacttgtcagttcagtaaaataatttggtcaaacaacagtctattgcattgatttataaatagttgtcagttcacatagcaatttaatcaagtaatcattaattagttaccccctatatataaatatatgtaatcaatttcttcaaatagcttgcttacatgataatcaattagccaaccatgagtcatttagaatagtgataaatagaatacacagaatagtgatgaaattcaatttaaaaaatcacgttagcctccaaaccatttaattcaaatgaacccatcaactggatgccaactctggcgaatgtaggacctctgagtggctgtataattgttaattcaaatgaaattcatttaaacagttgacaaactgtcattcaacaattagctccaggaaataacagttatttcatcataaaacag

SEQ ID NO: 32365 - DNA, 467 bp, Homo sapiens
  misc_feature (1)...(467): n = A,T,C or G
aggagcgnnnnnnnaactgatacctgagaacctcgnggaanncgaagangcttcaagcacagaggcagcaggaggttacaaagttgtgagaaaagctgaggtggcaggcagcaaggttgtccctgcactaccagagagtggccagtcagagcctgggccacctgaagtggaaggcggaacaaaggctacggggaactgcttttatgtcagcatgccatcaggacccccggactcaagcaccgaccactcagaggcacccatgagcccccctcagcctgacagcctccctgcagggcagacagagcctcagcctcagctgcagggaggcaacgatgatccaagacgccccagccgctctcctccaggcctggccctcagggacgtgggcatgatcttccgtaccattgagcagctcactctcaagctcaacaggctcaaggatatggagctggcccacagagagctgn

SEQ ID NO: 32366 - DNA, 484 bp, Homo sapiens
  misc_feature (1)...(484): n = A,T,C or G
naaccgataccctangagnggcggatgtactacatccttccttgcggatacaaacacaccttgaaccagattgatgaagtaaaggtgtgtcctcagcagccctccggagagctgtttgagattgaaatagacaccctggaaaccacctgccatgtgctggaccccacccctgtggcaagatgcagcgtgaggcagctgaaggagcatgctgtcgaaggagactgtgatttccagctgttgaaactagatggcaagttttccgtggtatacgcaaaatgtgattccagtccagactcagccgaggacgtgcgcaaggtgtgccaagactgccccctgctggccccgctgaacgacaccagggtggtgcacgccgcgaaagctgccctggccgccttcaacgctcagaacaacggctccaattttcagctggaggaaatttcccgggctcagcttgtgcccctcccaccttctacctatgtggagg

SEQ ID NO: 32367 - DNA, 489 bp, Homo sapiens
  misc_feature (1)...(489): n = A,T,C or G
natcgaacccctcgnannnncnnatcgagaccctagtccangtcgnggaattcacatatgtgtgtggggagggtgtatatggagaaggagctccaagaaaggatcagaacggttaccactgccacctgatgtttcctgcaggggctgcactgtgtctctggctgaggtcacactgacacctggtggtcactggtcactcgcagtcttaaatctagtagggccgaaagtactagaaggaggttgtccagagaggtctgccctcaaaatgctcctgaaagatgcttgcttatgcttttctttaaaaattatttctggggaagggcggggagtggtcacaggatcttatattctctttatttttacttaatttgcatgttatttttagaactcccctttttaagggtcacattttgcctcagaaaaccctgtctgaatgtctcctgtttgtcggtcaggactgactctgccttttctttccttttccatgtg

SEQ ID NO: 32368 - DNA, 504 bp, Homo sapiens
  misc_feature (1)...(504): n = A,T,C or G
tgaagaaagggaaaaaannnnnttcgaagtccctagtcagtgtggtggagttccaatacatcaacaggatccgagtggaaaatcccaactccctgttggagcagagtgtggccttgctgaacctctgggtcatccgtgaaggccaaaacgcaaacatggagaatctgtacacagccctgcagagcattgaccgtggcgagatcgtgaacatgctggagggttccggccgacagagccgcaacttgaagccagacaggcggcacaccgaccgcgactactcgctgtcaccctcccagatgaatggaggaaggtcagaggtcagaagagaagctgccaggttctaagaggcaggatgacgcgacaggtgcagggcaggactcaaagaatgaagtgtctcttgtttcaggccatcagagggggcaagcccgaatcacacattcccccaccgtgagtcaggtgacggagaggagtcaggacagactgcaggactgggatgcagacggn

SEQ ID NO: 32369 - DNA, 478 bp, Homo sapiens
  misc_feature (1)...(478): n = A,T,C or G
aactgaaacatcgnagngttcagtaccctacgactagcaccattttaagtccctgtcacctcttccgactctttctgagtgccttctgtggggactccggctgtgctgggagaaatacttgaacttgcctcttttacctgctgcttctccaaaaatctgcctgggttttgttccctatttttctctcctgtcctccctcaccccctccttcatatgaaaggtgccatggaagaggctacagggccaaacgctgagccacctgcccttttttctgcctcctttagtaaaactccgagtgaactggtcttcctttttggtttttacttaactgtttcaaagccaagacctcacacacacaaaaaatgcacaaacaatgcaatcaacagaaaagctgtaaatgcgtgtacagttggcatggtagtatacaaaaagattgtagtggatttaatttttaagacattttgcctttaagttattg

SEQ ID NO: 32370 - DNA, 512 bp, Homo sapiens
  misc_feature (1)...(512): n = A,T,C or G
gaatccgttcaccttccgagaggntcatgaacaccctcccgagaggngcgaanacatcccactacagatagcatgtctggatctaagtaagaaataaaggctccatgagttaccaagaacttttggagacccttggtgggcctgtatatagtcagcctgaattggcccgagtcacaggccaagaaccactgctggggacctcttggcagctccactcctgacccaccaaacccactttgcttcccctgtacagacacaccccaaggaggccagcacggtgaggtactggttgatctgcagcatggcggcgtccagcagtgtgaggatgttacgcacgctctgcagccgggcctccaggtgctgccgctcatggccctccagagctcgtagctcctctggggtcagcccagctaagcccgcatggggcacaggcattggggggaaggcaaagggtggaggcaggggcatacccatccagggaggagggaaggggaaaccatgggcaaggccag

SEQ ID NO: 32371 - DNA, 487 bp, Homo sapiens
  misc_feature (1)...(487): n = A,T,C or G
ngttgagtccatatcagngggtggtagtccactatccgtgtggtggaattcgtgacagataagcctgtggatgaggctctacgggaagcaatgcccaaggtcgcaaagtatgcggggggcaccaatgacaagggaattgggatggggatgacagtccctatttcctttgctgtgttccccaatgaagatggctctctgcagaagaaattaaaagtctggttccggattccaaaccaatttcaaagcgacccaccagctcccagtgacaaaagcgttaagattgaggaacgggaaggcatcactgtctattccatgcagtttggtggttatgccaaggaagcagactacgtagcacaagccacccgtctgcgtgctgccctggagggcacagccacctaccggggggacatctacttctgcacgggttatgaccctcccatgaagccctacggacggcgcaatgagatctggctgttgaagacatgag

SEQ ID NO: 32372 - DNA, 473 bp, Homo sapiens
  misc_feature (1)...(473): n = A,T,C or G
agatgtcagcggcccnnnccctgagaaactgggatcntcggaagngcgnggaattcgagcctcgaacccgcgtccctgggggctgggccccaggcgcacggggctggaggcaggccttcgtgccttcgtgccttcgtgccttcccgcggtggccaggcctctgctgcagccgctggttgcaggcagagttttggggacctggcccttctcccactgggctcccccatcctgggccaaggccagaactttagtgctaggggaagatgaaatgtgcagttttgaaatgttgggtttccagagagagtcatgctggaggagaaggaagtaggccagaagtccagggctgcactgtggtgtgagggtggctttgtctaagatgcctgctcagcatgatcaccagagggtgtgggcaggtccctggagccgggggcgggggggggggggaaaaaaccggcccgttggcccttattggg

SEQ ID NO: 32373 - DNA, 464 bp, Homo sapiens
  misc_feature (1)...(464): n = A,T,C or G
natcggagaactcgagnaccactaggcagtgtggtggaattccttatgccgttggtatacagggcaggaaagagaggaataaagggagagagcagtgtggaaaccacggtggttttgctttgttcttactaggttttggtgccaccttccctgcctgcgcttgtgccccctctcctccttggcactggcggcctccttgcctcccttccaccagtgctgccatcccgtgcctgtcgtgttggttcttcacacgtgctctgttctcggggttgttccattcatgccttcttggagggtgagggtggcttgggaaccgacccagtgatcatgcctactttcttctttgtatctccctccttcccagcccacccgggcagcagactctgatggaaggaaggtgccgtaggtgggcttttagaaactaacgggactggttttcaaagcagttatcttgggaaactgtt

SEQ ID NO: 32374 - DNA, 469 bp, Homo sapiens
  misc_feature (1)...(469): n = A,T,C or G
aggacgcccngnnnnnnnattgctgacntctttagtccgngcggtggaattcggagtgcccgtcggcgtcttggtcctcctgtccctgctgcaggggctggggcctccggagctgctgcgggctcccctcaggctctgcttcgtgacccgtgacccatgacccacagtgctggcctcctgtggggccactatagcagccaccagaagccgcgaggccctcagggaagcccaaggcctgcagaagcctcctggcctggctgtgtcttccccacccagctctcccctgcgcccctgtctttgtaaattgacccttctggagtggggggcggcgggcagggctgcttttcttagtctgatgccaagcaaggccttttctgaataaattcatttgactttgaaaaaaaaaaaaaaaaaaaaaaaaaaaaaaaaaaaaaaaaaaaaaaaaaaaaaaaaaaagaaaaaagaaaaa

SEQ ID NO: 32375 - DNA, 244 bp, Homo sapiens
  misc_feature (1)...(244): n = A,T,C or G
ctancacgntctggaaaataaaaataactctgggttaaggtttaagctgctgctgctccttctccagcctccgactggngggctgcatatctttccttcagcaaagcaggactaattgtgtgtcccggagtcaccttcctcaggttgcgggcctcaacccctccgaacctgtcttccttgacagcgacatggggtgtgaattatcaggttacactgtgacgtgcctgatgagcctgacacatag

SEQ ID NO: 32376 - DNA, 456 bp, Homo sapiens
  misc_feature (1)...(456): n = A,T,C or G
aggggcggnnnnnnaattgacatcgagcactcgacanngcgggaattccatcgggcacagatcattaatgacgccttcaacctggccagtgcccataaggtccctgtcactctggcgctgaacaacaccctcttcctgattgaagagagacagtacatgccctgggaggccgccctgagcagcctgagctacttcaagctcatgtttgaccgctccgaggtctatggccccatgaagaactacctgaagaagcaggtcacacccctcttcattcacttcagaaataataccaacaactggagggagatcccagaaaacctgatggaccagtacagcgaggttaatgccatcagcaccgcctgctccaacggagttccagagtgtgaggagatggtctctggccttttcaagcagtggatggagaaccccaataataacccgatccaccccaacctg

SEQ ID NO: 32377 - DNA, 472 bp, Homo sapiens
  misc_feature (1)...(472): n = A,T,C or G
agggcccgcngnnttnntaacttaagacatcgtcagngcggggaattcgggaaggtgaggagtttgatgtggacctggctgggatggaagtggctgtgggaggatggggcagaggcctctggttgcacaggcaccaggctggcattcgaggccagagcctgggatggaggtgtagaccatgggtgggggcagggggagtccaggcagcttctgagaggccagaccttgcagggtcaattatgggccctgaggtgggggccctgaggagggcctctccagtgattgtgatccagagccaggcaggggcgtttctgtcttccaacaccacctgccagcagttcagggatcctgggtttagggggaggtacccagcatcgcctcacaccctgtctctccccccagagactgctcatctatgattacttctatgccttcctgcggcgggagtactacctcacacatggcctctacn

SEQ ID NO: 32378 - DNA, 491 bp, Homo sapiens
  misc_feature (1)...(491): n = A,T,C or G
agtagcgtggcancctgggtgaccctggggngctnagcananncangnnangagggcgactgtggaaagccatgaatccagcctcattctcccacctatcaaggtcatggtggccttgggtgaggaagagctgtccatcaggatgagtgaccgaggtgggggtgttcccttgaggaagattgaccgactcttcagctacatgtactccacagcacccaccccccagcctggcaccgggggaacgccgctggttggctttggttatgggctccccatttcccgcctctacgccaagtacttccagggagacctgcagctcttctccatggaaggctttgggaccgatgctgtcatctatctcaaggccctgtccacggactcggtggagcgcctgcctgtctacaacaagtcagcctggcgccactaccagaccatccaggaggccggcgactggtgtgtgcccagcacggagcccaagacacgttcacgta

SEQ ID NO: 32379 - DNA, 460 bp, Homo sapiens
  misc_feature (1)...(460): n = A,T,C or G
atcgagaatcgttggcctgtgcnggaattcggcgtcctcgtggaagtgacatcgtctttaaaccctgcgtggcaatccctgacgcaccgccgtgatgcccagggaagacagggcgacctggaagtccaactacttccttaagatcatccaactattggatgattatccgaaatgtttcattgtgggagcagacaatgtgggctccaagcagatgcagcagatccgcatgtcccttcgcgggaaggctgtggtgctgatgggcaagaacaccatgatgcgcaaggccatccgagggcacctggaaaacaacccagctctggagaaactgctgcctcatatccgggggaatgtgggctttgtgttcaccaaggaggacctcactgagatcagggacatgttgctggccaataaggtgccagctgctgcccgtgctggtgccattgccccatgtgaagtcact

SEQ ID NO: 32380 - DNA, 454 bp, Homo sapiens
  misc_feature (1)...(454): n = A,T,C or G
naagtagacntcgctaggcccngcggtggaattcggctctggaacttatgaggaaagagttggaggacgccttgactcaggaggccaacgtggggaaaaagactgtcatttggaaggagaaagtggaaatgcagaggcagcgcttcagattggagtttgagaagcatcgtggctttctggcccaggaggagcaacggcagctgaggcggctggaggcggaggagcgagcgacgctgcanagactgcgggagagcaagagccggctggtccagcagagcaaggccctgaaggagctggcggatgagctgcaggagaggtgccagcgcccggccctgggtctgctggagggtgtgagaggagtcctgagcagaagtaaggctgtcacaaggctggaagcagagaacatccccatggaactgaagacagcatgctgcatccctgggaggagggagcn

SEQ ID NO: 32381 - DNA, 478 bp, Homo sapiens
  misc_feature (1)...(478): n = A,T,C or G
tactgagtccctagtcagtgtggtggtattcccaacccggcttacccggccatcctgggaaaaatggccccatgggaccccctgggatgccaggggtgcccggccccatggtcatacctggagagccaggtgaggagggcagatacaagcagaaattccagtcagtgttcacggtcactcggcagacccaccatccccctgcacccaacagcctgatcagattcaacgcggtcctcaccaacccgcagggagattatgacacgagcactggcaagttcacctgcaaagtgcccggcctctactactttgtctaccacgcgtcgcatacaggcaacctgtgcgtgctgctgtaccgtaacggcgtcaaagtggtcaccttctgtggccacacgttcaaaaccaatcaggtcaactcgggcggtgtgctgctgatgttgcangtgggcgaggaggtgtggctggctgtcaatgactacta

SEQ ID NO: 32382 - DNA, 485 bp, Homo sapiens
ggctgcagttaggggatctgaggcagctccactgcccatccaggggtcaagagatgagcctggcaccagagccatgcagacatggttcaaacccggctctaccactttctggttgtgtagcgtgactggccccctccctgagccgcagagtcatttgtgaagcaggaatcacggaaaggattccataccacatgcgtaaatggtgctgtgcacaggacctggagccggagtggggtacgcatgccccgtcagcgggagctgctgttctgttcctgtgcttgttgctggaattcacggcaaagtgggtgggctggcaggtcacagtggctgcacccggtctgcagcacagtgcctggggtgagggctgaggaggaagggaggagatgcttggcctccctggcttctccaagtctacccggagaagaaaggacagtcagaggggcccacgcctcccccacacccctggagggagagctggactctgg

SEQ ID NO: 32383 - DNA, 488 bp, Homo sapiens
  misc_feature (1)...(488): n = A,T,C or G
ngggactgatatccntatgnnnnnnnnctgagnacactagtcagtgtggtggaattcgattgaattagatctaaaagccacccaggccttggtcctagcacccactcgagaattggctcagcagatacagaaggtggtcatggcactaggagactacatgggcgcctcctgtcatgcctgtatcgggggcaccaacgtgcgtgctgaggtgcagaaactgcagatggaagctccccacatcatcgtgggtacccctggccgtgtgtttgatatgcttaaccggagatacctgtcccccaaatacatcaagatgtttgtactggatgaagctgacgaaatgttaagccgtggattcaaggaccagatctatgacatattccaaaagctcaacagcaacacccaggtagttttgctgtcagccacaatgccttctgatgtgcttgaggtgaccaagaagttcatgagggaccccattcggattcttgtan

SEQ ID NO: 32384 - DNA, 468 bp, Homo sapiens
  misc_feature (1)...(468): n = A,T,C or G
aggacgggtnnnnnncctgagtnactgagaacntncgaggaancgnnacctntgccttgccctttaactcaacccgcttcccagcacagcggctttctttttaaaacctgtttcactgagaagtttgtttttgggtccgctggtgtcactatggcctgggtgagaggccagcactgctgctgccctgaggggaaacgcctgggccgtgtagtggggacgctctgggaatggtggcggacgggcagcgtgggtgggacctggcacttcgtggtggctgagccatccacccagcagcggcctcctgtagcaccatcttgggaaagtcctgggggacgtgtgtgtcgtgctttttaccatcggtttgacttacagtggagtagaacgagccagagttcctgacttgagcaggtggatttgggcccaggccctgttcactcttgcttctcggtgcggactaatgtcagcttg

SEQ ID NO: 32385 - DNA, 476 bp, Homo sapiens
  misc_feature (1)...(476): n = A,T,C or G
aggacggggnnnnnnnaactgatgaaactgcnantcctnggaagngcggnggaannnngagaaagggaaaccctggtgctccagacaaagatcttagtcgggactagccggccaaggatgaagcctcacttcagaaacacagtggagcgaatgtatcgagacacattctcctacaacttttataatagacccatcctttctcgtcggaataccgtctggctgtgctacgaagtgaaaacaaagggtccctcaaggccccgtttggacgcaaagatctttcgaggccaggtgtattcccagcctgagcaccacgcagaaatgtgcttcctctcttggttctgtggcaaccagctgcctgcttacaagtgtttccagatcacctggtttgtatcctggaccccctgcccggactgtgtggcgaagctggccgaattcctgtctgagcaccccaatgtcaccctgaccatctccgccgg

SEQ ID NO: 32386 - DNA, 478 bp, Homo sapiens
  misc_feature (1)...(478): n = A,T,C or G
gttactgagtccctgtccatgtggtggaattccgtgatggcaggttcagtgccttcagcgcagagcgtggatgctctggaatcacccggacccctggccttggagggaccctccagccccaggaatctgctttggagggaaatgtctatttttctaccgggaatattttagagattggggcatgctggctcctcccgccagctgcaaacctgcaccttccgcctgattcccgatccccctgcgtgggccgcattcctggtcccctgcctgcgtccatcgaggggcctggctgtggcctgttttcctttgaccccacacagcgtcattgcgggtcatggggagcccctggtgggagcttgtggagtcggatcacgtacctgtgcagaaaccgcctctgtggctgcatttgaaataaaacccgacccagcagcagccgtgggtcctgctctgaanaanaaaaaaaaaaaaaaaaaaaaaa

SEQ ID NO: 32387 - DNA, 511 bp, Homo sapiens
  misc_feature (1)...(511): n = A,T,C or G
gggaggaattgannncccntnnnnnaatcgatccactattccgagtggncgaattcgatggccgtggggaggggctccggctccttctgcgtgacactgaccgcttctccagccacgttggagggacccttggccagttttaccaggaggtgctctggggatctccagcagcatcagatgacggcagacgcacgctgagggttcagggcaatgaccactctgccaccagagagcgcaggctggattaccaggaggggcccccgggagtggagatttcctgctggtctgtggagctgtagttctgatggaaggagctgtgcccaccctgtacacttggcttccccctgcaactgcagggccgcttctggggcctggaccaccatggggaggaagagtcccactcattacaaataaagaaaggtggtgtgaaaaaaaaaaaaaaaaaaaaaaaaaaaaaaaaaaannnngggggcccttttattttaaggggcccctttaaaccccgtgtatg

SEQ ID NO: 32388 - DNA, 471 bp, Homo sapiens
  misc_feature (1)...(471): n = A,T,C or G
natcgatagcactccgtangacgnggcaattacctgtgactcatggtggtggagaggggacatttctgggaggcctggggaggcagtgggagggtgatgccaagggaagagaaggccagtgctgggccagaggtcaatgccaccggcagctgccagcatccctctccagttatgtgtccccatgccccctccaggccctgggatgtgtgctctatgcctgcttcatcctgggccgcctctgtgttcctgtctttgccaacatgagccgagagcccttcagcacccgtgccctggtgctctctatcctgcatgccacgttgccaggtgagccaactaaggtagggctagagcagctgtgccctggggaaggctaatcagggaaggccttgctagttaccttccctcagtttcaacacgttctccttctgagtctctcctcacatctgtccccttctatcanggccattgcca

SEQ ID NO: 32389 - DNA, 486 bp, Homo sapiens
  misc_feature (1)...(486): n = A,T,C or G
gggactgagtacctcgtaannnccctgagtaacctattaagtngcgtggaattccgcggcggcaagatggcagtgccaatatccaagaagaggaagtttgtcgctgatggcttcttcaaagctgaactgaatgagtttcttactcgggagctggctgaagatggctactctggagttgaggtgcgagttacaccaaccaggacagaaatcattatcttagccaccagaacacagaatgttcttggtgagaagggccggcggattcgggaactgactgctgtagttcagaagaggtttggctttccagagggcagtgtatagctttatgctgaaaaggtggccactagaggtctgtgtgccattgcccaggcagagtctctgcgttacaaactcctaggagggcttgctgtgcggagggcctgctatggtgtgctgcggttcatcatggagagtggggccaaaggctgcgaggttgtggtgtctggg

SEQ ID NO: 32390 - DNA, 465 bp, Homo sapiens
  misc_feature (1)...(465): n = A,T,C or G
aggcggnttnnnnanngatggatngctacgaagagcccgcgaantctatgggctccagagtcactccggaggcgctgcactatgactacgtggatgtggagaccttaaccagcatcgtcagtgctgggcgcaactccttcctatatgcaagatcctgccagaatcagtggcctgagccccgagtctatgatgatgttccttatgaaaagatgcaggacgaggagcccgagcgccccacaggggcccaggtgaagcgtcacgcctcctcctgcagtgagaagtcccatcgtgtggacccgcaggtcaaagtcaaacgccacgcctccagtgccaatcaatacaagtatggcaagaaccgagccgaggaggatgcccggaggtacttggtagaaaaagagaagctggagaaagagaaagagacgattcggacagagctgatagcactgagacaggagaagagggaan

SEQ ID NO: 32391 - DNA, 478 bp, Homo sapiens
gtcctgagatcctatcagtgtgtttgaatatcttctacatccctcccaccctcggtcatatcattgagatcaccgtaccagcaaatctgcaaaccaagcactttgttaatctccagagagagcaaatacagcaatctagagtttagcctttttaaaaatgtgactttaacccgcccacctgtgtcctcccattggcgtggcatttctttggtgtctgctcagaaagaaacagcatgggaccgtgtgattgggtccaggctgggctgtcagggaagcgccctggtgtctccgactcatcaattctcgggtcttttttaaaagccaggctccccaaagcactgtctcgcaattttgaggaggctgttccgacctggaagcgttaaactgctgcatgtcatctggcgtcagctgtgaggctgcgctctgcgtgttgtgcgtttgcaaaatgtattggcgtgactgtaaacacatcgttgaa

SEQ ID NO: 32392 - DNA, 487 bp, Homo sapiens
  misc_feature (1)...(487): n = A,T,C or G
gggctgagtacctgtanannnnccctgattaccctctgaagngncgtggaatttttcctttgcctcaggtgctctttgggtgctttcataatttagggtcagagccgccgattttgtctaggagaccctaatagttctgatggtcaggctgagaattgtgtcctcagggagtgggagctgctgcaggtctgagcaccatgggctccagcaccaggacaggagcctccagccacctccaccttgcagcccctgaaggtagcatatgtggaccctctatatggggtggggagtgacctctgcccagttcctttctgtcccgtggcctttccatctgcaggttgtagaggggaaacagaaggctagaaaggcccttccagctcaggcttttactggttctaaatggattcctgagctggcctccccatccctggacagagcggaagctaccccctgccctgcctctctgacccccatggtatcagcctcg

SEQ ID NO: 32393 - DNA, 467 bp, Homo sapiens
  misc_feature (1)...(467): n = A,T,C or G
ggagggccnnnnncctgagaaactgntatctagtaanngcgnggaantncctaacacccggcttcggaagctggacgagcagcaggagttcagtgccatcatcctggcaacagctggcctgcagcgcatgggctggcacaaccgggtggggcaggtagggcctgcccctatcctctccccagctcatctgcatctcctttctgccttacagtcatccccaatttaggatttttagactttatgattgtgtgaaagcgatatacgttcagtagaaactgtacttagtacccatacagccattctgttttttactttcagtacagtattcattacatgagatattcactttattgtaaaacaggcttggtgtcagatgattttgtccaactataataggctaatcttaagtgttctgagcacatgtaaggtaggctaggtgtattaaatgcattttcagcttggtttcn

SEQ ID NO: 32394 - DNA, 464 bp, Homo sapiens
  misc_feature (1)...(464): n = A,T,C or G
aggacggggnnnnnncctgataactgagaccctcgggaancaaactntgnggccaagccttgctaatgaatgccaggccaacttcatctccatcaagggtcctgagctgctcaccatgtggtttggggagtctgaggccaatgtcagagaaatctttgacaaggcccgccaagctgccccctgtgtgctattctttgatgagctggattcgattgccaaggctcgtggaggtaacattggagatggtggtggggctgctgaccgagtcatcaaccagatcctgacagaaatggatggcatgtccacaaaaaaaaatgtgttcatcattggcgctaccaaccggcctgacatcattgatcctgccatcctcagacctggccgtcttgatcagctcatctacatcccacttcctgatgagaagtcccgtgttgccatcctcaaggctaacctgcgcaagtccccag

SEQ ID NO: 32395 - DNA, 472 bp, Homo sapiens
  misc_feature (1)...(472): n = A,T,C or G
ggaggggccnnnnaactgtaaaactggtangccagcaagngccgnggaannnggaagcgctgcagccttcgagcccggcatccagcattgcagccgccgcggcggcctaagagctcgaaccctttcacacgcgcgcaggaggaggagcggcggcggcagaacaagacgaccctcacttacgtggccgctgtcgccgtgggcatgctgggggcgtcctacgctgccgtacccctttatcggctctattgccagactactggacttggaggatcagcagttgcaggtcatgcctcagacaagattgaaaacatggtgcctgttaaagatcgaatcattaaaattagctttaatgcagatgtgcatgcaagtctccagtggaactttagacctcagcaaacagaaatatatgtggtgccaggagagactgcactggcgttttacagagctaagaatcctactgacaaaccagtaa

SEQ ID NO: 32396 - DNA, 473 bp, Homo sapiens
  misc_feature (1)...(473): n = A,T,C or G
cttcgacattcgatnaacactagtccagngcggtggaattcgcggagcccaggcagtaacacttgcttgcccactgctcacgtctgatgggtgcccccattcctcacaggctatggaccagtacccatctgcagcccagggttggggacccccaccatacatgctctgaaaataagtgtctttaagttgtgtttttctgtgtgacatcatctctgaacttgaacatgttcattacggcaagattgtaatcctgctgtattcctcgccctctgtattctatccctttaaaaactagatatttaaacattttatcctaatgtgtttcatcagaacactttgcacactttcttactaaaacggtatgtgggtggtccgagacagaatggtacctacagtgcaggctatgtttctgtgggaatggaaaagaggactttagaaagtgaacctgaagaactcttatttctaagggaatc

SEQ ID NO: 32397 - DNA, 504 bp, Homo sapiens
  misc_feature (1)...(504): n = A,T,C or G
aattggctcgcacaccatccgngnggnggaattcctggaggagaacttctgccagacccagatggggatagccatgggccctggtgctacacgatggacccaaggaccccattcgactactgtgccctgcgacgctgcgctgatgaccagccgccatcaatcctggacccccccagaccaggtgcagtttgagaagtgtggcaagagggtggatcggctggatcagcgtcgttccaagctgcgcgtggctgggggccatccgggcaactcaccctggacagtcagcttggggaatcggtgaggcacaactgcctgtctcccacagagaggagctgaggttgtgtcctctgtggttatgccactgggggctgggaatctatccctgcccccagaggtcctagccagaagatggcaggtctagcatctgtcccaggagtctgttccctgtcctaattccccactcctctaggcagggccagcatttctgcggggggtctctagtga

SEQ ID NO: 32398 - DNA, 466 bp, Homo sapiens
aggggcttaaacgtaacggatcacctgcgtgacttccggccgaagtggctggctcatttaagatgaggcttctgctgcttctcctagtggcggcgtcttttatggtccggagcgaggcctcggccaatctgggcggcgtgcccagcaagagattaaagatgcagtacgccacggggccgctgctcaagttccagatttgtgtttcctgaggttataggcgggtgtttgaggagtacatgcgggttattagccagcggtacccagacatccgcattgaaggagagaattacctccctcaaccaatatatagacacatagcatctttcctgtcagtcttcaaactagtattaataggcttaataattgttggcaaggatccttttgctttctttggcatgcaagctcctagcatctggcagtggggccaagaaaataaggtttatgcatgtatgatggttttcttctt

SEQ ID NO: 32399 - DNA, 474 bp, Homo sapiens
  misc_feature (1)...(474): n = A,T,C or G
ggagggccnnnnncctgataaactgagantctaggaagnngcgnggaantcagccggaacaagcagtggacctgacattgcccaaggttgaagcaatgaataaaagactgggctccttggtggatgagtttaaggagcttgtttacccaccagattacaatcctgaagggaaagttaccaagagaaaacacgataatgaaggttctggaagcaaaaggcccaaggtggagtattcagaagaggagctgaagacccacatcagcaagggtacgctgggcaagttcactgtgcccatgctgaaagaggcctgccgggcttacgggctgaagagtggtctgaagaagcaggagctgctggaagccctcaccaagcacttccaggactgaccagaggccgcgcgtccagctgcccttccgcagtgtggccaggctgcctggccttgtcctcagccagttaaaatgtgtttctcctgan

SEQ ID NO: 32400 - DNA, 451 bp, Homo sapiens
  misc_feature (1)...(451): n = A,T,C or G
aatcgagaccctgaggacntgcgcgnggaannccgattttatatgggagaagggtgagccctatgtgttgtcccctgattctgttggatggagggtctttctgtgtccaggtcttttaaccccttgttagaaacttccctgacccttgtttcctgacctccagccttctcatgtctcccaggtcctgggtgtacatgtgtgctcgcacacacacccattgccttccatggccctccctgcctaaacctaggctgtcttcattcctgaaaaccaagctgtagaatcccatttatcctctgtttccatgtcaattgaggaagaagatagatggatggatggatgaatagatggataatggatggacggatggatggatggatggatggttggatggatggatgattgatgaatgagtgggtggttgttcccctcttgcatgttaagttaaccg

SEQ ID NO: 32401 - DNA, 572 bp, Homo sapiens
  misc_feature (1)...(572): n = A,T,C or G
tactacgcgttgacacgctacggcattatacgcacagtgaatgcttctaatttcgactcnctactatttcctagggcagnanagacccgncnnnnnnnnttttgaattcgattagcatagcccagngcggnggaannccctgggcagggcgnatcacgcttcccgcaaggacatgctggatgccttgggcataactgccttgatcaacgtctcaaccaattgtgccaaccattttgagggtcactaccagtacaagagcatccctgtggaggacaaccacaaggcagacatcagctcctggttcaacgaggccattgacttcatagactccatcaagaatgctggaggaagggtgtttgtccactgccaggcaggcatttcccggtcagccaccatctgccttgcttaccttatgaggactaatcgagtcaagctggacgaggcctttgagtttgtgaagcagaggcgaagcatcatctctcccaacttcagcttcatgggccagctgctgcagtttgagtcccaggtgctggctccgcactgttcggcagaggctgggagccccgccatgg

SEQ ID NO: 32402 - DNA, 567 bp, Homo sapiens
  misc_feature (1)...(567): n = A,T,C or G
tgggtgcnnnnnnaatttgatagtccctgngannnnannnnncttgagcatcgtccgtgtggngcaattcacaacggctccaattttcagctggaggaaatttcccgggctcagcttgtgcccctcccaccttctacctatgtggagtttacagtgtctggcactgactgtgttgctaaagaggccacagaggcagccaagtgtaacctgctggcagaaaagcaatatggcttttgtaaggcaacactcagtgagaagcttggtggggcagaggttgcagtgacctgcacggtgttccaaacacagcccgtgacctcacagccccaaccagaaggtgccaatgaagcagtccccacccccgtggtggacccagatgcacctccgtcccctccacttggcgcacctggactccctccagctggctcacccccagactcccatgtgttactggcagctcctccaggacaccagttgcaccgggcgcactacgacctgcgccacaccttcatgggtgtggtctcattggngtcaccctcangagaagtgtcgcacccccggaaaacaccn

SEQ ID NO: 32403 - DNA, 461 bp, Homo sapiens
  misc_feature (1)...(461): n = A,T,C or G
gcggctgnntnnccccagctgacaancatctgacgnggcantngaatatttgnggcatcattaatgcataatttcaaagcattttacacattgttaattaaatctcaccatgttctttcaggtagcaaaaagtaagtttatttttgattcagaagtatttgaagaagttagaacaagatgattttattgctaaataataaggaatatctgtggagtaccaaggaatgagatataatgaatttggttagagtatatcaaagtacatattatagtttttgtcttacacttccctgtgggtctgtttaactattgaaaatgtcttcttcaaaatgaaccttaaacatttgcaaacttactctttgctaattattctgccaggcattttttttttttcttcttttttttttgaatcttgctttgttgcccaggctggagggcaggggctcaatctcagctgactg

SEQ ID NO: 32404 - DNA, 546 bp, Homo sapiens
  misc_feature (1)...(546): n = A,T,C or G
nggctgccnnnccatggatctcttcgngnggggaatccatagacaatcctcatcttttgagactgaaatcacactggcgggaatgaagattgtgccagccttctcttatgggcacctagccgccttcaccttcttcctctaccccttagcaggaatagggtgtcctcccttctttcaaagcactttgcttgcattttattttatttttttaagagtccttcatagagctcagtcaggaaggggatggggcaccaagccaagcccccagcattgggagcggccaggccacagctgctgctcccgtagtcctcaggctgtaagcaagagacagcactggcccttggccagcgtcctaccctgcccaactccaaggactgggtatggatcgctgggccctangctcttgcttctggngctattggagggtcagtgtctgtgactgaataaagttccattntgtggaaaannnnnnnnnnnnnnnnnnnnnnnnnnnnnnnnnnnnnnnnnnnnnnnnnnnnnnnnnnnnnnnnnnnccnccnncnnccc

SEQ ID NO: 32405 - DNA, 512 bp, Homo sapiens
  misc_feature (1)...(512): n = A,T,C or G
ggttttttnnnnnnngggggggggagggggcccggggnnnaattgatttgatccactatccagcgnggnggaattcccacaaatgaagacatcaagaaactctagtatgtacacaaggcaaaacacttcagctatcaaaatcatgacattatgtcacttggagcaacacagttgacccgccaaggcagcctcttcctccatagatggatgaacgctgtggccgctgctcctgcctgggccatgccctgatgctgccaacaccactgctcctctatttataagtcttagtagagttgctgacccagcaataactgaacagctgatatgtacctcacactaagccaggcgcttcatatgtatctaacttgaaaaatgctgagctagttaccttaacaccattaacttttacttaaaagtttgtttttcttttttaatcccagtgagctccaaacaagttttaggaggctccccaaaaccagtgaagactttaactaaaagtagaatttcaaagt

SEQ ID NO: 32406 - DNA, 468 bp, Homo sapiens
  misc_feature (1)...(468): n = A,T,C or G
agaaaaaattcgagatccntaggctttgaggngcgtttcgccccttactataaccactcagaccctccaaacatctgctactgagaagaagggggtggagacccgaatgattgacctgcctgtctgcactaacccaccgctcagacgccagagcctcttgtctctggttcacgtggaagtgagtgagttggtgctgggggagaagtatttcccctctgcgttggtgtctttttaccctgtgaaacgcctgccttccatcccgagaggaaagaaaacgatgacaacttgtgttctggtggaagatttagcagctactacaaaacagaggtttgaaaacctattttgcagctctcaaatttcaatttagatgacttgactttgagggcccagtgtagatgtgagggctgagtagagaaagcccgcagccccctctccccaggagcttacccctgcctcggggctcccttn

SEQ ID NO: 32407 - DNA, 470 bp, Homo sapiens
  misc_feature (1)...(470): n = A,T,C or G
gaaaaaaattgataccctnnnttcgtagtccctagtcagtgtggtggaattcgacaaccacctggtgctggtggacctgcggcccaagggcctggatggagctcgggctgagcgggtgctagagcttgtatccatcactgccaacaagaacacctgtcctggagaccgaagtgccatcacaccgggcggcctgcggcttggggccccagccttaacttctcgacagttccgtgaggatgacttccggagagttgtggactttatagatgaaggggtcaacattggcttagaggtgaagagcaagactgccaagctccaggatttcaaatccttcctgcttaaggactcagaaacaagtcagcgtctggccaacctcaggcaacgggtggagcagtttgccagggccttccccatgcctggttttgatgagcattgaaggcacctgggaaatgaggcccacagactcaaag

SEQ ID NO: 32408 - DNA, 485 bp, Homo sapiens
  misc_feature (1)...(485): n = A,T,C or G
acttgaaacccgagagccctacccagngngcnggaattctacagggcagccgcgtgctctaccacttactcagcagccagcaactggagaacatctggtgttcagcgggacggccgcctgctcgtcagctgtcactctgacggcagctactgccagtggcccgtgtccagcgaagcccatcaaccagagcccctccgcagcctcgtgccttacggtcagtgtttcacccgccgggcagggcccacccccagtgcctcctggattcaggtgcaggttgctcaattctgaagcaaactccagggccagagagggtaaaggctttgtccaaagccacacagcagggttcgcctcacccagtttcttggggaacttctcggagcaagattcccaagcacaggtctaccatgtggatgtggcatgagctaaagggatctgtgcctgtggggactgacacttgtctgagagtttgaggatccgttcaagcc

SEQ ID NO: 32409 - DNA, 471 bp, Homo sapiens
  misc_feature (1)...(471): n = A,T,C or G
aaaaaaaatttganaccntnnnttcgtagtacctagtcagtgtggtggaattcggaacgtctgaggttatcaataagctcctagtccagacgccatgggtcatttcacagaggaggacaaggctactatcacaagcctgtggggcaaggtgaatgtggaagatgctggaggagaaaccctgggaaggctcctggttgtctacccatggacccagaggttctttgacagctttggcaacctgtcctctgcctctgccatcatgggcaaccccaaagtcaaggcacatggcaagaaggtgctgacttccttgggagatgccataaagcacctggatgatctcaagggcacctttgcccagctgagtgaactgcactgtgacaagctgcatgtggatcctgagaacttcaagctcctgggaaatgtgctggtgaccgttttggcaatccatttcggcaaagaattcacccctga

SEQ ID NO: 32410 - DNA, 466 bp, Homo sapiens
aaaaaaaattgagaccctagtccttgaggtgcaattcccgtcctgaggatggagtggggtcccatggtgcaggtctctgagcaaggcggaggtgtggaggagaggccggcttggggtggggcctcgcgccctattgccggccggcctcagcccggctctgcctggtgctccctgcagtgccttctccatggccccgccctccccgcgtgtgcgccaggcctggggtccccgggagagcagagcttgcgcctcgggcatagggacgtggggtgcaggcgccaacatcagtggcagcagccagggccgtggtccagtcccactcggggatggagtgggccggcggccaaaccagtcactcggggaggaatgcggaggagcgctcattccattctatttaattgcagggtacaaaattgtgtttgtatatagaataaactgtctgttgacagcgaaaaaaaaaaaaaaa

SEQ ID NO: 32411 - DNA, 477 bp, Homo sapiens
  misc_feature (1)...(477): n = A,T,C or G
tgttccnagcgcccactgaaccccttgatggcgctggaaccccagactngctgacggggtctttggagttaaaggtggaactgaagttagagctgattttcttcctgttacatccagnaagactgggaatggttgggtgccagaggcaggttccagaaggtgggaagagtcctgtctgcatccccagggtcctaaccttgaggaaagcttgctgtccttttgtcctgcttcacactccctttggttaaaggtttcactcagagcccgatggaaaccttcaggaaaaaagggccccaaaccgaggcgaggacactggggaagccttgggtggtttctgtgtggggcggcccctgctctgtgaagcacaggggaataggactccatcgctgtcatcgtcactcatgccctggtgcagacctgcaggaacattgcctgctgtatacagggcaaatgggcactgtgccgggagaagcctgt

SEQ ID NO: 32412 - DNA, 489 bp, Homo sapiens
  misc_feature (1)...(489): n = A,T,C or G
cgccccccccgnaggccnttttgagaccccactgagatcctcggacanngcgnggaanncctcaggggatgctttgtccagcccgcaggcattttatccagcagactttcagaagcatttgttttgtcattcgagccgcctgccctgccatggtacattacgtgagcaggcggctggctgtgctgtgctctgtggagatcacacgtgagattcgacagcactcgcttctgcaggcttctctttcctgggttcttttagatgagagagagccagaagaggcggggctgcggaaggcgctgggaaaatgaatggagtgatggtctttagcagtgtgcccgtgactggagtgttctgagtgctgccagaactctgagtcacagttgcatggacttatgtggcggttaatggtggtgtgggaagcctgcctgggttcctaagggatacttcatganagcattgaggaaaaaaccaggtttcttgcagttaaat

SEQ ID NO: 32413 - DNA, 471 bp, Homo sapiens
  misc_feature (1)...(471): n = A,T,C or G
agaaaaaattagananccnttnnatcgagaacactatccatgtggtggaattcagcagacagtgggttttgctggacacagtggggatgtgatgtccctgtccctggcccccgatggccgcacgtttgtgtcaggcgcctgtgatgcctctatcaagctgtgggacgtgcgggattccatgtgccgacagaccttcatcggccatgaatccgacatcaatgcagtggctttcttccccaacggctacgccttcaccaccggctctgacgacgccacgtgccgcctcttcgacctgcgggccgatcaggagctcctcatgtactcccatgacaacatcatctgtggcatcacctctgttgccttctcgcgcagcggacggctgctgctcgctggctacgacgacttcaactgcaacatctgggatgccatgaagggcgaccgtgcaggagtcctcgctggccacgacaaccg

SEQ ID NO: 32414 - DNA, 262 bp, Homo sapiens
  misc_feature (1)...(262): n = A,T,C or G
gcgtnctcctttgaaacacttagtagtgacctgcaaaccncccgncgnngngggaacaggaacagaggcggctgagccaggaacgggatcgcctagtgggtcttcgttagagactccgcaaggcccagggacagctcgactcacagccagaggaccaacgcgagcggcttctgcagggtgtgcaggagatgagggaacaactggatgtggcccaacgtgcctatgaggacctggagttccagcaactggagcgggagagccg

SEQ ID NO: 32415 - DNA, 469 bp, Homo sapiens
  misc_feature (1)...(469): n = A,T,C or G
ggncaggctttgaaaccctnnnttcgagaccactatcagtgtggtggaattcgccaggctctagtgggccgggctccacaagcgcagcagccgacccccctcctgaggactgtgtgaccaccattgtctccatgggcttctcccgggaccaggccttgaaagcgctgcgggccacgaacaatagtttagaacgggctgtggactggatcttcagtcacattgacgacctggatgctgaagctgccatggacatctcagagggccgctcagctgccgactccatctctgagtctgtgccagtgggacctaaagtccgggatggtcctggaaagtatcagctctttgccttcattagtcacatgggcacctctaccatgtgtggtcactacgtctgccacatcaagaaagaaggcagatgggtgatctacaatgaccagaaagtgtgtgcctccgagaagccgcccaagga

SEQ ID NO: 32416 - DNA, 469 bp, Homo sapiens
  misc_feature (1)...(469): n = A,T,C or G
ggggatcgagaccctaggcagnactgaggaccctagtacaagcggnggaattccgagggagcgaggggacagtggggcagaggccttgaggactggcagagggcagtgagcagggcagagctaggagctcagaagtgagaggtaccttcagccagaggagagggtcctgcgggccaggagttggcacacccagcccactgcctgcctttgtcgataaagctttattggaacacagccccacgcattttctgacaggttgtctatggccgctttcctgatggtgggacagagctggataatgacagactacatagtctgaaagcctgaagtatttactatttggttcttagcagaaaaggttttctcactctgccgttggccttggcagagagattggcttcaatgggacttctgatgggggtcctcaaactatagggaggtgtgtcagcctcctttctttgctccagta

SEQ ID NO: 32417 - DNA, 507 bp, Homo sapiens
  misc_feature (1)...(507): n = A,T,C or G
gggagtgncccccnagacgccccccctgggaccaaatttgntangctacgcaagngcggcggaanttctatgacctcctgcgcatcacgttgggcagaaggggacagtacgttatgctctcggtgtgcctggagcgagccatgaaggttgcgtttggagaatttcacctttggtaccaggtggccctctccatggtggcttgtgggaagtcagcctacgctgtgtccctgctgcgggagtgtgtgaagttgcggccctcggaccccaccgtgcccctgatggccgcgaaggtctgcatcgggtcccttcgctggctagaggaagcagagcactttgccatgatggtgatcagcctcggagaggaagccggggagttcctccccaagggctacctggctctgggtctcacctatagcctgcaggccaccgacgccaccctgaagtccaagcaagatgaattgcaccggaaggcactgcagacgctggagagggctcancagctggcgc

SEQ ID NO: 32418 - DNA, 459 bp, Homo sapiens
  misc_feature (1)...(459): n = A,T,C or G
atcgagacctctagtccctngggnggaattcgagagagagagatgtttggtgggagttggatgagggagcagtagcaggtggggaaagaggttccctctcccctacaatgcttctctcagcaggtttcccccaagaaagagcagctgagtccttgcatcttgtggcagctggtgtgcccagcactgagtctgtaggagctgaagccagcccggacccttctcatgggcagtgcccacctgtgctgaagtcctgcagcggtggcggtgtgaggagctgtgaaattagttgtaactgaaaatgtctgacggtctggataatgaagagaaacccccggctcctccactgaggatgaatagtaacaaccgggattcttcagcactcaaccacagctccaaaccacttcccatggcccctgaagagaagaataagaaagccaggcttcgctctatcttcccagg

SEQ ID NO: 32419 - DNA, 478 bp, Homo sapiens
  misc_feature (1)...(478): n = A,T,C or G
atttgaaaccctcngannctccgatattctcggaagngcggnggaattcggctgggattgcaggcgcccgccaccatgcctggctaatttttttgtatttttagtagagacggggtttcattatgttggccgggctggtctcggattcctgacctcaggtgatccaccggctttggcctccccaaagtgctgggattacaggcgtgagccaccgcacccggccaaagattgcttcttattcaggtttctatcctctgcatagttgctggttcacaataggtgctcaataaatgtctgtccaggtgactgaactgagcctgattctagttttaaatttcatccagctccagaggggtcatcttcaaaaccacgaccgccaataggtgacagtaaggctcaagnttacattccaaacaattctttgtaattgagtttactttttaaatcttcattatagccatncttttgatcccaagag

SEQ ID NO: 32420 - DNA, 494 bp, Homo sapiens
agcctgatcccattcagggggtagacctgcctagtgaccccagcgacacagcccttctcaacctgctcccaatgctggatgccctcaggttcaccgctgatgttcgttccgtgctgagccgaaaccttcaccaacatcggctctggtgacagctgctccccctccacctgagttggggtgggggggaaagggagggcgagcccttgggatgccgtctgatgccctgtccaatgtgaggactgcctgggcagggtctgcccctcccacccctctctgccctgggagccctacactccacttgggagtctggatggacacatgggccaggggctctgaagcagcctcactcttaacttcgtgttcacactccatggaaaccccagactgggacacaggcggaagcctaggagagccgaatcagtgtttgtgaagaggcaggactggccagagtgacagacatacggtgatccaggaggctcaaagagaagccaagt

SEQ ID NO: 32421 - DNA, 509 bp, Homo sapiens
  misc_feature (1)...(509): n = A,T,C or G
agaagtgatcaccttccgaannnncctcgaaccaccactcagagnggngcaattcccggcccaaccatggcgtcctccgcggccggctgcgtggtgatcgttggcagtggagtcattgggctaagctgggccatgctgtttgccagtggaggcttccaggtgaaactctatgacattgagcaacagcagataaggaacgccctggaaaacatcagaaaggagatgaagttgctggagcaggcaggttctctgaaaggctccctgagtgtggaagagcagctgtcactcatcagtggttgtcccaatatccaagaagcagtatagggtgccatgcacattcaggaatgtgttccagaagatctagaactgtagaagaagatttttgctcagttagattccatcattgatgatcgagtgatcttaagcagttccacttcttgtctcatgccttccaagttgattgctggcttggtccacgtgaagcaatgcatcgaggctcatcctgtgan

SEQ ID NO: 32422 - DNA, 497 bp, Homo sapiens
  misc_feature (1)...(497): n = A,T,C or G
nattgagccccactgatgactgtccgngnggngcaattcttagggagctggtgcctgaggccttctccctccagtgtggaaatcctgcccaccagccaaaacctgctgcaaatggggactgccagcccagcctgtgggcgcagctgcctgcacagcggatggagcagctctgtgccttctgtgtggcggggagaggctgtctctatgaggctgctaggatgcttgggccccagccagacagtgcttgcttcctcttctgcctggctccctgacaggtcccccagaagccccagagccctatttgcactgccttaagagagcccgctggccatgcagctacctggcctttcatgcaggagggatctgatctcaggtggctcacagcggaccacatccatccttgggccagagacactagaggaaaactccagctgtggggtatcagagttgacaggaactggcgggctcaggaccgatgtcaggctctagggagtcan

SEQ ID NO: 32423 - DNA, 463 bp, Homo sapiens
  misc_feature (1)...(463): n = A,T,C or G
aggatgcccccnntnnaaaggaagtcancgnccgacgncgaannannaaaacgaaaagcgatgactcatctcctaatcctgtcccttagagggggaaaccaaatgcttgcagttccccaagtgtgtagtgttgatcatgccaaggtgacgaccgtcgttccatcccttgcaaagagaatcaaagtgaattgtatccaaacacagataagaccagagggtgtctgcactgagcagtccaggaaggaggggagctgcagtggctgtcaccgggctgggacacgaggaggaattgccggtgaaatcagatccagtttcaacttgaggaaaattcagccccgggagctgctggtagagcccagaccttgatgctgagtcatctgcacagagaattccgcgacagaaaggccgtgggtagagacgtgaatggaggaagtggagtacatgaaatggttaaatgttggag

SEQ ID NO: 32424 - DNA, 528 bp, Homo sapiens
  misc_feature (1)...(528): n = A,T,C or G
tggtgcgnnnannananagaatttgatcaccntccgagngnngtcgaaccactgctccgagtggcgcaattcctgagactgagtctcgctttgttgcccaggctggagtgcactggtgtgatctcgggtcgctgcaacctccgcctcccgggttcaagcagctctcatgcttcaatctcctgagtagctgggattacgggcgcacaccaccacacctggctgacttttgtatttttagtggagacggggtttcaccatgttggccaggctggtctcgaactcctgacccgaagtgctctgcctgcctcggcctcccaaagtgctgggattacaggcgtgagccactgtgtccgccctgtgttcttattcttgacgttcctcaataaagctgtgcagacaatattgaattttgttcctctattaacttttctgtccctttttagagacaataattccatttattaatctgtgtgtaaaaggaacgtgtgtaaactaatgaccctgctggcatctttgtctttttctctt

SEQ ID NO: 32425 - DNA, 512 bp, Homo sapiens
  misc_feature (1)...(512): n = A,T,C or G
gggaggtnccnnnnagcgccccccccagggangaccttagcntgngccacgcacgngcggcggaanttgtcattagcactgcctggagttgtggagacggccttgagtctcggtgcgagtgtgcgtgagtgtgagccaccttggcaagtgcctgcgcagggcccggccgccctccatctgggccgggtgactgggcgccggctgtgtgcccgaggcctcaccctgccctcgcctagtctggaagctccgaccgacatcacggagcagccttcaagcattccattacgccccatctcgctctgtgcccctccccaccagggcttcagcaggagccctggactcatcatcaataaacactgttacagcgnaaaaaaaaaaaaaaaaaaaaaaaaaaataaaaaaaaaaaaaaaaaaaaaaaatannnnnnnnnntnggatgggggggggcgcagaaaaaggcgccaaacacccccgccagggccccgggggtggcccttttataaccccccccc

SEQ ID NO: 32426 - DNA, 497 bp, Homo sapiens
  misc_feature (1)...(497): n = A,T,C or G
nggagggcccccnatgcccacccagggnaacgtagntggctgcgaangccccgagntaaagngcctgcccacggcacggtctgggtgcgggtgttccctgtgagcccgagttcgcttcaagaggggagcctgcaggtgccggctggtgaggggatgacgcgctgtgggtgggaggaggcaccgcccatctcagcagcaccaggactgcctgggactccctggcaacccagcaccggggaagccgtcagctgctgtgacaataaaacctgccccgtgtctggatataaacccgtacccaccaaggcttcaacaagagccctggactcatcatcaataaacactgttacagcaaaaaaaaaaaatgaggggtgcggatataaagaggctgccaaaacccaaanannnnncttgccggttggttttttggggggcccgtatagggggcgtccccccccctccccgttctttgtggaggagagtgttttttcctcttcctt

SEQ ID NO: 32427 - DNA, 492 bp, Homo sapiens
  misc_feature (1)...(492): n = A,T,C or G
atgccggntnnaaactgggaatgcnagcttccgcacgngcnggaanncgggttggctgcctgaccacagacttcgccatgcagaatgttctgctgcagatggggctgcacgtgctggcggtgaacggcatgctgattcgtgaggcccggagctacatcttgcgctgccatggctgtttcaagacaacgtctgacatgagccgagtgttctgctcacactgtgggaacaagaccctgaagaaagtgtccgtgaccgtcagcgacgacggcaccctgcacatgcacttctcccgcaaccccaaggtgctgaacccccgcggcctccggtactcgcttcccactcccaaagggggcaaatacgccatcaacccccatctcaccgaggatcagcgcttccctcagctgcgactctcccaaaaggccaggcagaaaaccaacgtgttcgcccctgactacatcgccggggtgtcaccctttgtcgagaatgacatcn

SEQ ID NO: 32428 - DNA, 474 bp, Homo sapiens
  misc_feature (1)...(474): n = A,T,C or G
ggggcccgcgggncttttaacttcagacatcgtagtaccngcggtggaattcttcctacagaagcgtccgaggaggacaaaaagacaggcaatagcatccacagcggggagaaaagcaaagaaatgtgtgatccctcaggatgcaagcccacagaagactaagcctcttttccctccccacacccagtcccatcctggagcttaggcccatgggaaggagtgggtagggcccatcttacccagggcttgctgctgcagtgatcgaagggacttcttttatacttctaaattattcataagaatatgcagaccatgatggtaactcggtgcttttccttgtccctaaaaatcctctcagaggagtcatgtgttcaccattccctctttgccgctgaagtcccctctgaaaagatggtgagagtccaggccagcctgtgagttgaaagaagcttgggataagtggccttcatgacc

SEQ ID NO: 32429 - DNA, 516 bp, Homo sapiens
  misc_feature (1)...(516): n = A,T,C or G
tggtgagnnnaaannagaacctgatcacgtccgagagggtagatncgctgcctggcatttcagagacagccatgatcttcgctggcgtggacgtcacgaaggagccgatccctgtcctccccaccgtgcattataacatgggcggcattcccaccaactacaaggggcaggtcctgaggcacgtgaatggccaggatcagattgtgcccggcctgtacgcctgtggggaggccgcctgtgcctcggtacatggtgccaaccgcctcggggcaaactcgctcttggacctggttgtctttggtcgggcatgtgccctgagcatcgaagagtcatgcaggcctggagataaagtccctccaattaaaccaaacgctggggaagaatctgtcatgaatcttgacaaattgagatttgctgatggaagcataagaacatcggaactgcgactcagcatgcagaagtcaatgcaaaatcatgctgccgtgttccgtgtgggaagcgtgttgcaagaaggtt

SEQ ID NO: 32430 - DNA, 490 bp, Homo sapiens
  misc_feature (1)...(490): n = A,T,C or G
cagccttctnnnncccaggttcgacagtcatgtgcaggaacnngggacatgaattactgcggnggcggagagggggatacgggtacaattgacttctagggctatggcctgaggatggggcagaaacttctcggggtgacacgttaaagagaaacaggagtccctgggtagtcaaggaagagggcacatgcgaccttcatggatcgtatcttactctgggcggggccaggaggctgggctggcttgatctcaggcagagctgggcgcttagcatcagtgaggaagttgttaaaaaacgcgacttcctttttcacttcctcaattttctctgcatgcttgttgaagatatgtttgcgcacaaactcaggaccctgggtggagagaggagaggggtcaggacagccacataagggttgcctcgctcccaggcccgagctggaaggattcccagctcccgcctgccagtgcagtaagcagttcccccacccct

SEQ ID NO: 32431 - DNA, 484 bp, Homo sapiens
  misc_feature (1)...(484): n = A,T,C or G
cagccggnnnnaacgggtacgnagctagcgcangncnngaanccgcatccacaggagagtacctgtgagcagatggcacaggccaatgccgggaagcccaacgaccccaccttcatacctgcttcaatgcaggccaagacataccctgtggatgaaaaggccctacaggaccagctggtgctagtcactgcaaaacttgacaccgaatacaagttgagggccgcactgggcggcatgctggccaacttcttgggcttgcgtatatatggcatgcacagcgagctatggggcgtggtccatggggccaccgacctcttcccaacggctgtctttggcaccctggcctctctctatctgggagccttggaccacacagctgacaggctacaggcaatcctggtggttccttggaaggacaagaactgcacctgccggctggatgcgcacaaagtcctgtctgccctgcaggctgtacagggcctgn

SEQ ID NO: 32432 - DNA, 483 bp, Homo sapiens
  misc_feature (1)...(483): n = A,T,C or G
ngcgcttntnnnncccaattcgagagcgtgtcaggaacngnngcttctactgcctactgaaccaggaagtgggagtgatgctgcctctcttctgacctccgctaagaaacagggagatcattacatcctcaatggctccaaggccttcatcagtggtgctggtgagtcagacatctatgtggtcatgtgccgaacaggaggaccaggccccaagggcatctcatgcatagttgttgagaaggggacccctggcctcagctttggcaagaaggagaaaaaggtggggtggaactcccagccaacacgagctgtgatcttcgaagactgtgctgtccctgtggccaacagaattgggagcgaggggcagggcttcctcattgccgtgagaggactgaacggagggaggatcaatattgcttcctgctccctgggggctgcccacgcctctgtcatcctcacccgagaccacctcaatgtccggaa

SEQ ID NO: 32433 - DNA, 491 bp, Homo sapiens
  misc_feature (1)...(491): n = A,T,C or G
gagccggnnnnaaccgggtacgncagctcacgcagngngcnggaanncggaagngacatcgtctttaaaccctgcgtggcaatccctgacgcaccgccgtgatgcccagggaagacagggcgacctggaagtccaactacttccttaagatcatccaactattggatgattatccgaaatgtttcattgtgggagcagacaatgtgggctccaagcagatgcagcagatccgcatgtcccttcgcgggaaggctgtggtgctgatgggcaagaacaccatgatgcgcaaggccatccgagggcacctggaaaacaacccagctctggagaaactgctgcctcatatccgggggaatgtgggctttgtgttcaccaaggaggacctcactgagatcagggacatgttgctggccaataaggtgccagctgctgcccgtgctggtgccattgccccatgtgaagtcactgtgccagcccagaacactggtctc

SEQ ID NO: 32434 - DNA, 490 bp, Homo sapiens
  misc_feature (1)...(490): n = A,T,C or G
gcgcttctnnnccgagtttcgagctgctatgtgcaggaactcangaggtcgcggctcttctccggtggctggaggaatctgtgcaactctctcgaagccatgttcacctaattgggtacagcctgggtgcacacgtgtcaggatttgccggcagttccatcggtggaacgcacaagattgggagaatcacagggctggatgccgcggggcctttgtttgagggaagtgcccccagcaatcgtctttctccagatgatgccagttttgtggatgccattcatacctttacccgggagcacatgggcctgagcgtgggcatcaaacagcccataggacactatgacttctatcccaacgggggctccttccagcctggctgccacttcctagagctctacagacatattgcccagcacggcttcaatgccatcacccagaccataaaatgctcccacgagcgatcggtgcaccttttcatcgactccttgct

SEQ ID NO: 32435 - DNA, 488 bp, Homo sapiens
  misc_feature (1)...(488): n = A,T,C or G
gagccggnnntactgggacgtagcaacgcagnggcnggaannngaaccacacgttacaagctccaggcgagccagccccaccatgggcagaaatgagaggcccccacccaccatggacagaggtgagggggccccctcccggtatcgtccccgagaacgggctcgtgaggagactcaacaccgtgcccaacctatcccgggtgatctgggtcaagacacccaagccgggctaccccagctccgaggagccaagctcaaaggaagttcccagttgcaagcaggagctgcctgagcctgtgtcctcaggtgggaagccacagaagggcaagaggcagggcagtcaggccaagaagagcgaggcaagcccagccccccggcccccagccagcctagaggttcccagtgccaagggccaggtcgctggccccaagcagccaggcagggtcctagagcttcccaaagtaggcagctgtgctgaggctggagag

SEQ ID NO: 32436 - DNA, 470 bp, Homo sapiens
  misc_feature (1)...(470): n = A,T,C or G
cggacggtnnnnnnaactgatatcagtagaacntncgaggaannccagaggataaacaactggaaggagagcaagcacaaagtcatcatggcttcagcgtctgctcgtggaaaccaagataaagatgcccattttccaccaccaagcaagcagagcctgttgttttgtccaaaatcaaaactgcacatccacagagcagagatctcaaagattatgcgagaatgtcaggaagaaagtttctggaagagagctctgcctttttctcttgtaagcatgcttgtcacccagggactagtctaccaaggttatttggcagctaattctagatttggatcattgcccaaagttgcacgtaagtcatagaaataaaaaagcaagccaagtgtggtggctcacatctgtaatcccagcactttgggaggctgaggtgggtagattgcttgagtccaggagttcgagaccagcctggg

SEQ ID NO: 32437 - DNA, 526 bp, Homo sapiens
  misc_feature (1)...(526): n = A,T,C or G
tggcgaggaaacaacaagacctgatacccctcgaannncatagatccacagtccagagnggngcaattcggcatggggagtggtttatgccctgccttcaccctcacggtgaggtgagaccctgggctggggtcctggtcctggccctaggccctagacctcagatgtgtgtctaaacttgaccctcctaccttctttcccttggcccccagccctcctcccaccttcccttctccaagaccacccccctcaggtcccagccttctcccaagagatgggagtgcctttccattccggtaaagattccaggcttctcaggaaggggcacgcaaagaataagatgggttgatgggttgcaagcatcctggctcactctcaccctatgctaaactcaggcgaccgtgctgtgtgacatcatagtcctctactgcatgaagaaaagactctactatcgggagaagaaatataaatatgtggaagattacgagcagggtcttgctagtgagctggaccagtgaggcctacn

SEQ ID NO: 32438 - DNA, 473 bp, Homo sapiens
  misc_feature (1)...(473): n = A,T,C or G
nctgaaccctggccagggcgatgagaccctgagaagnacgcctcgcccctttatctaagacaggctctggtttcatgtgggtggatgacattcagtgtcctaaaacgcatatctccatatggcagtgcctgtctgccccatgggagcgaagaatctccagcccagcagaagagacctggatcacatgtgaagatagaataagagtgcgtggaggagacaccgagtgctctgggagagtggagatctggcacgcaggctcctggggcacagtgtgtgatgactcctgggacctggccgaggcggaagtggtgtgtcagcagctgggctgtggctctgctctggctgccctgagggacgcttcgtttggccagggaactggaaccatctggttggatgacatgcggtgcaaaggaaatgagtcatttctatgggactgtcacgccaaaccctggggacagagtgactgtggacan

SEQ ID NO: 32439 - DNA, 521 bp, Homo sapiens
  misc_feature (1)...(521): n = A,T,C or G
tggtgcggaanananaagacactgacaccgtccgagnggngctggatacgcaatcgctagncatcaanggaaatcccatcaccatcttccaggagcgagatccctccaaaatcaagtggggcgatgctggcgctgagtacgtcgtggagtccactggcgtcttcaccaccatggagaaggctggggctcatttgcaggggggagccaaaagggtcatcatctctgccccctctgctgacgcccccatgttcgtcatgggtgtgaaccatgagaagtatgacaacagcctcaagatcatcagcaatgcctcctgcaccaccaactgcttagcacccctggccaaggtcatccatgacaactttggtatcgtggaaggactcatgaccacagtccatgccatcactgccacccagaagactgtggatggcccctccgggaaactgtggcgtgatggccgcggggctctccagaacatcatccctgcctctactggcgctgccaaggctgtgggcaaggtcatt

SEQ ID NO: 32440 - DNA, 488 bp, Homo sapiens
  misc_feature (1)...(488): n = A,T,C or G
agctgtctnnncccaaagtccgacgtcatcgcagnnncntgnngaggagacngcgatttccagctgttgaaactagatggcaagttttccgcggtatacgcataatgtgattccagtccagactcagccgaggacgtgcgcaaggtgtgccaagactgccccctgctggccccgctgaactgacaccagggtggcgcacgccgagaaagctgccctggccgccttcaacgctcagaacaacggcttcaattttcagctggaggaaatttcccgggctcagcttgtgcccctcccaccttctacctatgtggagtttacagtgtctggcactgactgtgttgctaaagaggccacagaggcagccaagtgtaacctgctggcagaaaagcattatggcttttgtaaggcaacactcagtgagaagcttggtggggcaaaggttgcagtgacctgcacggtgttccaaacacagtccgtgacctcacagg

SEQ ID NO: 32441 - DNA, 527 bp, Homo sapiens
  misc_feature (1)...(527): n = A,T,C or G
aaaaagaaaaaaacaaaggatttgaacacctcagngnnnnatcgatccacctatccgagnggtgcaattccagagacatgaggctgagctggttccgggtcctgacagtactgtccatctgcctgagcgccgtggccacgggcacgggggccgagggcaaaaggaagctgcagatcggggtcaagaagcgggtggaccactgtcccatcaaatcgcgcaaaggggatgtcctgcacatgcactacacggggaagctggaagatgggacagagtttgacagcagcctgccccagaaccagccctttgtcttctcccttggcacaggccaggtcatcaagggctgggaccaggggctgctggggatgtgtgagggggaaaagcgcaagctggtgatcccatccgagctaggtaagaggcccctcctgagggtgcagagcgagtttggggtgtgtgactgggaagggtgaaagctgcttcagcttttcattggtcttcaccgtatccattcattacaatacatgcctcct

SEQ ID NO: 32442 - DNA, 487 bp, Homo sapiens
  misc_feature (1)...(487): n = A,T,C or G
agcctgtnnaaaagaatcgacctgctattgcaggaactcatctnttcgacttcatcacggaaaggggagccctgcaagaggagctggcccgcagcttcttctggcaggtgctggaggccgtgcggcactgccacaactgcggggtgctccaccgcgacatcaaggacgaaaacatccttatcgacctcaatcgcggcgagctcaagctcatcgacttcgggtcgggggcgctgctcaaggacaccgtctacacggacttcgatgggacccgagtgtatagccctccagagtggatccgctaccatcgctaccatggcaggtcggcggcagtctggtccctggggatcctgctgtatgatatggtgtgtggagatattcctttcgagcatgacgaagagatcatcaggggccaggttttcttcaggcagagggtctcttcagaatgtcagcatctcattagatggtgcttggccctgagaccatcaga

SEQ ID NO: 32443 - DNA, 464 bp, Homo sapiens
  misc_feature (1)...(464): n = A,T,C or G
agcgtgtntnaccccggaacttcangcaaggccatgccgtggaattcccagcccactggcttcaggtgctgtggccaacaagctatgccagagtttccagaccttcagcatctgctatgcagagacgggcttgctgggtgcacactttgtctgtgaccgaatgaaaatcgatgacatgatgttcgtcctgcaagggcagtggatgcgcctgtgtaccagtgccacggagagtgaggttgcccggggcaaaaacatcctcagaaatgccctggtatctcatctagatggcactactcctgtgtgtgaggacatcggacgcagcctcctgacctatggccgccgcatccccctggctgaatgggaaagccggattgcggtaacatggacccctgggagaggttctggagtcttggcctggcagacacctgggaggtgtanggttggggcctggcatagcgcagcct

SEQ ID NO: 32444 - DNA, 480 bp, Homo sapiens
  misc_feature (1)...(480): n = A,T,C or G
tttgtagcctgggaanataagtagaacctaggaagnngcgnggaattcacaaatgcggngacctggtgttcgccaagatgaagggctacccacactggccggcccggattgacgagatgcctgaggctgccgtgaaatcaacagccaacaaataccaagtcttttttttcgggacccacgagacggcattcctgggccccaaagacctcttcccttacgaggaatccaaggagaagtttggcaagcccaacaagaggaaagggttcagcgaggggctgtgggagatcgagaacaaccctactgtcaaggcttccggctatcagccctcccccctcctgcacagagccctgcctgcccggccagtgggtttaccccggggctaatccgacagagtcctcccagaaaaagagctgtgtggaagagcctgaaccagagcccgaagctgcagagggtgacggtgataagaaggggaatgcagat

SEQ ID NO: 32445 - DNA, 461 bp, Homo sapiens
  misc_feature (1)...(461): n = A,T,C or G
tgcgttntnacccagctgcaggcgatctgcgnggcattngnnccgtggcttccccctgcgcctccaggccaccgaggtccgtatctgccctgtggaattcaaccccaacttcgtggcgcgtatgatacctaaagtggagtggtctgcgttcctggaggcggccgataacttgcgtctgatccacgtgccgaaagggccggttgagggatatgaggagaatgaggagtttctgaggaccatgcaccacctgctgctggaggtggaagtgatagagggcaccctgcagtgcccggaatctggacgtatgttccccatcagccgcgggatccccaacatgctgctgagtgaagaggaaactgagagttgattgtgccacgcgccagtttttcttgatatgactgtgtatttttgttgatctataccctgtttccgaattctgccgtgtgtattcccaacccttg

SEQ ID NO: 32446 - DNA, 510 bp, Homo sapiens
  misc_feature (1)...(510): n = A,T,C or G
agatttgatncccctcnnnnnnntttcgaaccaccantcagagtggtggaattcgtgctgcgcaacatcaacaccgtgcgcgctatcaacgtggccctcggcgcccccgtggaccgctacttccttatggctaaaagggctgtccggggctggagccgcctggcgggcgccacgtatcggggtgtctacggcaccagcctcctgcgccacgccaaggtcgtctgggagatgctcaagtttgaagtggcgctcaggctggagaccttggccatgcggctgaccgccctcctggctcgtgctctggtccacctgagcctcgtgcccccagcggaggagctctaccagtacctggagacctagggtgcagccgcccagggccagcagggcccttttcaccttgggctgacggaggtggcggggctagaggtgtagacaccccgagccccgtgggcactcgcactggggggctgtgacagcagctgggccaggaggccgtgtaatgaccacaca

SEQ ID NO: 32447 - DNA, 468 bp, Homo sapiens
  misc_feature (1)...(468): n = A,T,C or G
tggctgcntnnaaacggaccgtagagcaaccgtccgnngcgnggaanncggactacacgcagacgctgtccaagcggcccgacatccccaccttcgagagcttgacgttcaaaaacaggacagcgggcctcatcgacacggggtggagcgccatccagatcggcatctacaccaagcacctggagcactggctgcgccacttccccatccgccagatgctcttcgtgagcggcgagcggctcatcagcgacccggccggggagctgggccgcgtgcaagacttcctgggcctcaagaggatcatcacggacaagcacttctacttcaacaagaccaagggcttcccctgcctgaagaaggcggagggcagcagccggccccattgcctgggcaagaccaagggcaggacccatcctgagatcgaccgcgaggtggtgcgcatgctgcgcgagttctaccggcctttcn

SEQ ID NO: 32448 - DNA, 513 bp, Homo sapiens
  misc_feature (1)...(513): n = A,T,C or G
nccttgatcaccactnagngnnnnntttcgatccactantccgtgtggtgcaattcagatgggctttgtcccagtttcatatacaggtcacttggccaaggccacagtccaacctgggttcatccccactgccccgcagagaaaggcaggtcagcgtgtctgcatcccacccaggtgcagaagccatggccggcagccttatgtgggggacagggcaggacactcagcctgtccagagtgcgtatgggcagcccttgcctgggcagtacgggtgaccgagtgcagcagatcgaaagttgcctcggggatgtgcaagatgtggcaggcgaggtgggtggcaggagcccacacctgaggctgttggcatcagccagtccacaggactacaggcagggccaccacctaggctggcctcagcccaccgctccctcctgtctctccccaggccctacatggatgtggtcgtctccctggtcactatcatgttggacacgggcctgccctgttttcgcg

SEQ ID NO: 32449 - DNA, 524 bp, Homo sapiens
  misc_feature (1)...(524): n = A,T,C or G
agagcggggnnananccnaagcaactgaacactntccgagaggngctagaccgtcctctgggcagcatctgtgtgttaggcgaccggagaggtgggttccttatagggaataagaaaactgaaactgacttccaactgcaggcagaaggaagcagtggtcattgctggaggttaaaactgttctgaccgggcgcagtggctcacgcctgtattcccagcactttgggaggctgaggcgagcagatcacgaagtcaggagatcaagaccatcctggccaacaaggtgaaaccccggctctactaaaaatacaaaaattanctgggcgtggtggcgcgcgccggaagtcccagctacttgggaggatgaggcagaagaatcgcttgaacccgggaggcggaggttgcggtgagccgagatcgcgccattgcactccagcctggcgactcagcgatactccgtccccctctccccgccccaagaaaaatctgttcagtggggagcgacaaggaaggagctttcagcc

SEQ ID NO: 32450 - DNA, 464 bp, Homo sapiens
  misc_feature (1)...(464): n = A,T,C or G
agccnnntnnnnnnaaactcaatgactacgaagagccncgaanntaaggaaggcggagggaaccatgcgaggttctgagaattgcggcgagggtcgcctcgagagacggtttctgagcaggaattctgaaatccccaccacttcctccctccgggggatttgatcccctatggccaccgctaacagcatcatcgtgctggatgatgatgacgaagatgaagcagctgctcagccagggccctcccacccactccccaatgcggcctcacctggggcagaagcccctagctcctctgagcctcatggggccagaggaagcagtagttcgggcggcaagaaatgctacaagctggagaatgagaagctgttcgaagagttccttgaactttgtaagatgcagacagcagaccaccctgaggtggtcccattcctctataaccggcagcaacgtgcccactctctgn

SEQ ID NO: 32451 - DNA, 470 bp, Homo sapiens
  misc_feature (1)...(470): n = A,T,C or G
nggacggggnnnnnttaccaagangaatttctatcgcannngncgnggaannnnngaaagancagcagaggcataaggttcgggaagaggttgntaccgtggttaactctgtcaacgaaggcttgaaccaacctacggatgactcgtgctttgacccctacacagtttcccattatgccgttggagatgagtgggaactaatgtctgaatcacgctttaaactgttgtgccagtgcttacgctttggaagtggtcatttcagatgtgattcatctagatggtgccatgacaatggtgtgaactacaagattggagagaagtgggaccgtcagggagaaaatggccagatgatgagctgctcatgtcttgggaacggaaaaggagaattcaagtgtgaccctcatgatgcaacgtgttactatgatgggaagacataccacgtatgagaacagtggcagaaggaatatctc

SEQ ID NO: 32452 - DNA, 470 bp, Homo sapiens
  misc_feature (1)...(470): n = A,T,C or G
nagcgtngntnnaaaccggggacttcancaacggtccgngccgnggaantccgnacaagtaaaggcgctgactgagtgcgtcatctgcacgcatacaagcactgctagcattctggcatatgtttctttcagcttttttctgtgcagatatatattacatttttttctgtgtatatttatatatatatgaaaccagatcagttacacaatttagtatttttttaaccttaatgtagtataagcatttcccccattgtactttgtaaatatgatttttaagaagtcattggtgtctactttgtgatatttgactcaaccagccttgataacaaagagtagttagagacaactgaatttttaaaatgtaaatctgctttatttttggaataaataatacatttacatggctggaaattcaaaggatacaaaaaggcatatactccaggcaaccactatgaccagctgctgat

SEQ ID NO: 32453 - DNA, 467 bp, Homo sapiens
  misc_feature (1)...(467): n = A,T,C or G
agggcggtnnnnnacccaggtaactgatnagctcgaanaancanagggggctcagggggctgggacagagttttccacagactctggaatctcagagttggaagcagtttgcccttaagcatgcatcctctcctccccttccctgcccaggaaccatcgtggccttctatgtcggggcttgcacgagcctcaaacagccctgctttaacagttcaagagtgggccaggctgccagccgcagtaacccaggacacggggctcaagatggtcacagattgagcaggggggaagggacgcttccagagccacatccaccctccatttcagcctgtctccctgtctgcttccctgcagcaccctgacctccctctcgccgtgtaccacgtctctggagagtttgccatgctgtggcatggagcccaggccggggcatttgatctcaaggctgccgtactggaggccatgac

SEQ ID NO: 32454 - DNA, 462 bp, Homo sapiens
  misc_feature (1)...(462): n = A,T,C or G
tggctgctnnnaccgattgcgagctcacgccgngcgnggaattcgaggtttcaggaagcagaaaacaggggtaatggcagccaggagccgaaacatgagcaaggctgtccccaagagcaaggccaagaagagtgtccttctgctgggacgagggatccaggagcttgaggcattgggagcaggcagcagagggcaggtgggcacagtgggcgtgcctttacagggctcccttctcccgccaggcatgggctgcaacgagtgtacgcacccctcctgccagcactcgctgagcatgctgggcatcggccagtgcgtggaatgtgagagcggggtgctggtgctggaccccacctcgggccccaagtggaaggtggcctgcaacaagtgcaacgtggtagcgcactgcttcgagaacgcccaccgcgtgcgggtgtccgccgacacctgcagtgtctgtgaggc

SEQ ID NO: 32455 - DNA, 465 bp, Homo sapiens
  misc_feature (1)...(465): n = A,T,C or G
ntgcgtgntnanccagttagcaagcatgtgccgnggcattcgaaggtcctggtgctgcaattcagatggggctctgctgcgattctatgtgcgagtactccagaaggaactggctgcatccacctctgaagacacgcacccttacaaggaggagctggagacagccttggagcagtgcttctactgcctgtacagcttccccagcaagaagagtaaggccaggtacctggaggaacactcggcccagcaggtggatcttatatgggaggatgcactgttcatgtttgagtattttaagcccaagacccttcctgaatttgacagctataagaccagcaccgtgtctgctgacttggccaacctactgaagagaattgccaccattgtgcctcgcacagagaggccagcccttagcctggacaaagtctctgcctacattgagggaacttcaactgaggtaccctg

SEQ ID NO: 32456 - DNA, 464 bp, Homo sapiens
  misc_feature (1)...(464): n = A,T,C or G
ntggtgctnnacccagttcgagagcatctgtcanggcanntaanaacaggtctctagcctcactctgtgacacaagaagattttctccatnngactttttatttcccctctttnncttgccttgattcatggacagattgagagtgaaatcagaggaagtacattatcttattagncactctcacaaacgattcttggcaacaaggatgacatgcagaaaatcttttgaacaaaaacaaatatagttataaaactatctggactgtcatttctattttgtatcctgttcaaatgtataaaaatgtattaccacagtgagcatccagagctgcaaccagtacatttgggatgtatttgcaaatacagttttttttaaattgttctgttttagaagtgatgagagcctatttacaacagctaaggcaagagactggactgagactttgtgagaaagttttcgaccn

SEQ ID NO: 32457 - DNA, 465 bp, Homo sapiens
  misc_feature (1)...(465): n = A,T,C or G
gcgggnctnnacacggatagaggagcatgtcgcgnggcattcctctccttcttggaaaccagcaaggagaacttcaacaatgtcccggacctggagctcaaccttatccgatccaaaattgttcgtgccttcttcgacaacaggaacctgcgcaagggacccagtggcctggctgatgagatcaatttcgaggacttcctgaccatcatgtcctacttccggcccatcgacaccaccatggacgaggaacaggtggagctgtcccggaaggagaagctgagatgtgcgtgccactgagtccccttgctcacacctggcctggggtgcagcctcccctaagacctcagaacgcaaggcgcctctgcagcaggaggctgggtgtgcattggcttgggggcttggagggcttggggccaccagccctcgtccctgtgaggctggcattgctgtctcccgttcccggca

SEQ ID NO: 32458 - DNA, 464 bp, Homo sapiens
  misc_feature (1)...(464): n = A,T,C or G
tggctgnntnaaacgggaagttgngacaagacangncgnggaannnaaanangngaaagataaaatgttaaaattgataaagctgagtggtatcacagatgtttgttatatttttcatagttttctctatggggctggtatgttataatttaaaaatttcttagaaagataagacttgtgccaagttgtttgcctttactcaaaacaacctttggctaatccgctattagaatgtattatttatcaatggtagccttcatttgctgctgccagtatgcctgccatagcaactcatgcctacaaatttgaatctgcttcttctgatctgttgattagagaaatcgattttgaagctcgtttagaagtatacataacttaacagttttggctgggcgcagtggctcatgcctgtaatcccatcactttgggaggctgaggtggacagattgcctgaggtcaagacn

SEQ ID NO: 32459 - DNA, 466 bp, Homo sapiens
  misc_feature (1)...(466): n = A,T,C or G
ggagggggnnnnnaactgataaactgantatctaggaanngcgggaanctaaactttaaggttctgttttatttattcatgcatttcccaaatagctgctaagcacctgatagccaaatggtcctgtggagagaggccgctgggagtctaatgggagaggcttctcctggccttttctaccatggtaggaatcaaggagcaggagagagccacccttccggagtggtcagaggccccccagacagcacggatccccctcggacactcggtatttggtccccagttgagcgtgtctgaagccgcctggagcagaagcctgctggcaatggttttagcaacacccctgctcccagcctcccctcgcctgcttggaccctcgagggtcctctgggaagggaaggacagggaattccagctgttcctgtggctggctcaccatcggtgactcctctcatcccacctctgg

SEQ ID NO: 32460 - DNA, 498 bp, Homo sapiens
  misc_feature (1)...(498): n = A,T,C or G
agggatgtcncaggnntncccnncaactgataccttagaagacgcgggaanncgcgacttcttggtactgattgtttttcccatgcctcaattggtttcttttagggagctacaaatttacgtgttcactggtgattgatcttttcatccagcacaatggacagaagtctaaggaacgtccttgtggtttcctttgggttcctgcttctctttacagcctatggaggtctgcagagcctgcagagcagcctgtacagcgaggagggcctgggtgtcacagcgctcagcaccctctatggaggcatgctcctgtcctccatgttcctcccaccgctcctcatcgagaggctgggctgcaaggggaccatcatcctctccatgtgtggctacgtggccttctccgtgggcaacttcttcgccagctggtacactttgatccccacctccatactgctgggactcggngccgccccgctgtggtctgcacagtgcacatac

SEQ ID NO: 32461 - DNA, 463 bp, Homo sapiens
  misc_feature (1)...(463): n = A,T,C or G
gcgggctnnnaactgacatagcatcatacgccgnngcgnggaattcaatggctgcaattacaacaagaagtgaaggaagaagactggtgacatctctgaaggatgcagttgaggttgatccaggtttatccgaatatgctacctttctgagccttaaaccttcatctctcaggtgttgattttcttctgatagcttcatcatttctccctgaagtcttttacactcttctgttagtttccttgtttcagtatcatgaagtgaagcactgtgtggttgtggcgtgggcccgtcttgcttagatgcattcagtgggacagctttgctgggttccatgtcattcaatttatcattttcattggggatctccatttggaatccattaattcatgaggttttgcctcattccacacagcttccatatctgaagtgtttagtggagcaaaaattgtaccataaacttgt

SEQ ID NO: 32462 - DNA, 462 bp, Homo sapiens
  misc_feature (1)...(462): n = A,T,C or G
ggacggnnnnnnnaaatgagaactgagaacctcgggaanncgaaacacctntcccattccttttttcttcacagaaattctagctactctgagaggtcattctggcttggtcaaagggttgacatgggaccctgttggtaaatacatagcttctcaagctgatgaccgcagcctaaaggtgtggaggacgctggactggcagttggagaccagcatcaccaagccttttgatgagtgtggaggaacgacccatgtgttgcggctcagctggtcacctgatgggcattacctggtgtctgcccatgccatgaacaactcatgccccactgcccagatcatcgaacgggagggatggaagaccaacatggactttgttgggcaccggaaagctgtgactgtcgtgaaattcaacccaaaaatcttcaaaaagaagcagaagaatgggagttctgcgaagcctaa

SEQ ID NO: 32463 - DNA, 495 bp, Homo sapiens
  misc_feature (1)...(495): n = A,T,C or G
gcggagannnnnnnnncctcgatatcgttctgcgtgtgcnggaattctgacttttattatacttttaccttaacactaagctccagaaaccctatgctattctctgtacactcagtttgctccatgctttggaatctttcctctctctggggttccatctctccttgtgtgccttttaattcctacttcagatttcactttaagtatcatcttccctgggaagttttcccagactctccccactgcctttgctgagctgatcctgtgtgttttgctgctgaattttggtgtatgatcaccctcctttagccatctctctgatggctgtgagctccatgtggtcagtaccattatctggcccatcctgggacccagagaaagcacaaaggagggcgtaacccggtctcaccaaatgcctgttgattgattggacaaaggtgaccgcgagtggttctgggacttggctacgggaaccatgaaggagcgttccctgcc

SEQ ID NO: 32464 - DNA, 498 bp, Homo sapiens
  misc_feature (1)...(498): n = A,T,C or G
gggatgtcccagggtnccccncactgatatccctagaagagcgcnggaanncccgcttcctagngagtcggcggctgatttagaaagaggctcaggctacgccacacaggatccatggaagtggcagagcccagcagccccactgaagaggaggaggaggaagaggagcactcggcagagcctcgggcccgcactcgctccaatcctgaaagggctgaggaccgggcagtaagggcacaggccagtgtgggcagccgcagcgagggtgagggtgaggccgccagtgctgatgatgggagcctcaacacttcaggagccggccctaagtcctggcaggtgcccccgccagcccctgaggtccaaattcggacaccaagggtcaactgtccagagaaagtgattatctgcctggacctgtcagaggaaatgtcactgccaaagctggagtcgttcaacggctccaaaaccaacgccctcaatgtctcccagaagatgatt

SEQ ID NO: 32465 - DNA, 506 bp, Homo sapiens
  misc_feature (1)...(506): n = A,T,C or G
agcagttnccccagcagggccccncctagaaanccnacatgagatccntacgccagagncgcggaattcgttggtatcaggaactgtgagttaatacatagttacaatgtttagaagagtgttcggtgcatagctaatccaatttgttgcattagcatatacaccttctgtttctaacgtgctttggttcctgaggtcagccatcatttggatcaccatcataagcttgaaaagtgtttctgacttcctccagatgggtgctttgtgccaaccacacggagcctgtgaagggtttccttggccgattcctgaggaggaagctcatggaaacagagatcagtgggcgggtgcgcaatatggagctggtaaaaatcattgactggattcccaaggtctggcatcacctcaaccgcttcctggaggctcacagttcctcggacgtcaccatcggcccccggctctttctgtcatgccccatcgatgtggacggctcgagagtgtggttn

SEQ ID NO: 32466 - DNA, 466 bp, Homo sapiens
  misc_feature (1)...(466): n = A,T,C or G
aggccnnnnnnnnnnaaccttgagtctntaagccagcggnggaattcctcagagagaacccaccatggggctgtctcctgccgacaagaccaacgtcaaggccgcctggggtaaggtcggcgcgcacgctggcgagtatggtgcggaggccctggagaggatgttcctgtccttccccaccaccaagacctacttcccgcacttcgacctgagccacggctctgcccaggttaagggccacggcaagaaggtggccgacgcgctgaccaacgccgtggcgcacgtggacgacatgcccaacgcgctgtccgccctgagcgacctgcacgcgcacaagcttcgggtggacccggtcaacttcaagctcctaagccactgcctgctggtgaccctggccgcccacctacccgccgagttcacccctgcggtgcacgcctccctggacaagttcctggcttctgtgagc

SEQ ID NO: 32467 - DNA, 496 bp, Homo sapiens
  misc_feature (1)...(496): n = A,T,C or G
aggatgtcccaggtgnccccccctgatatccctagaagagcctggaanncgnggcgcgcaggaggaagtgcgccgcgcgggacccggaggaccgtatccccagcccactgggctacgcagctattccaatcaagttctctgaaaagcaacaggcttctcactacctctatgtgagagcacacggcgttcgacaaggcaccaagtccacctggcctcagaagaggactctttttgtcctcaatgtgcccccatactgcacagaggagagcctgtcccgcctcctgtccacctgtggcctcatccagtctgtagagttgcaggagaagccggacctggctgagagcccaaaggagtcaaggtcgaagttttttcatcccaagccagttccgggtttccaggtagcctacgtggtgttccagaagccaagtggggtgtcagcggccttggccctgaagggccccctgctggtgtccacagagagccaccctgtgaagag

SEQ ID NO: 32468 - DNA, 469 bp, Homo sapiens
  misc_feature (1)...(469): n = A,T,C or G
agccnnnnnnnnnnnntttgatgagtactntagtccagcgtcgtggaattcgcccaggggggtacatggtatggagtagacatcaacaacgaggacattgctgacaactttgaagctttcgtgtgggagccagctatggtgcggatcaatgcgctgacagcagcctctgaggctgcgtgcctgatcgtgtctgtagatgaaaccatcaagaacccccgctcgactgtggatgctcccacagcagcaggccggggccgtggtcgtggccgcccccactgagaggcaccccacccatcacatggctggctggctgctgggtgcacttaccctccttggcttggttacttcattttacaaggaaggggtagtaattggcccactctcttcttactggaggctatttaaataaaatgtaagacttcaaaaaaaaaaaaaaaaaaaaaccggccgttcgagtttaaagggcccc

SEQ ID NO: 32469 - DNA, 466 bp, Homo sapiens
  misc_feature (1)...(466): n = A,T,C or G
ggccnntnnnnnnnatttaatgtagtctactcagagncgncgaantccaganaactaagcatggcttgatctggaggggcccactgtgaatattaattactttgtttaaaaaaacattcaaagatataatataaaagttgaaaagccttataaaccaccgccagaagtaactgatgagaacaatttgatgtctgcttttcccaggttttaaataatcagttttcattataccaccttttcattttttgaaaagtcacactggcttaaaaacattatttttcattctgctcctttttctttctgtgttttatttttcccatgcactcataccatcccctttgttctgcaacttgttttcatttcacagtcctgcggacactcttgcctataagtgctcactcactcttacttgtctttttgatgacgtgtctgtctccccaccagacctgggagcgtctcgagggcn

SEQ ID NO: 32470 - DNA, 501 bp, Homo sapiens
  misc_feature (1)...(501): n = A,T,C or G
aggcgngnnnaggcccancctgggangaccttagntaggctncgnaagngcggcggaattctgnaagcaaatcagtttctaactcactgtaacgaattatctttcgcacatcacagaggcatctcttttcactgtcgagtttggtttgcttggttacaaaaagggcagctcaaaagctttggttgctattgtgaaagtcagctgaattccttccaccgtgctggggtggggtggggttcacgcaggttctcttttgtcaccaggggtgctgtggattcacaagtaagcaagaggctcctcaggtcaagcctctggctgctccctgaggtcagctgcctagcttctcctcctctgagatagacgggaacaaagtctttgatgtgtgcatttctcaagcttgacaatgatacagctacataaaaacccatgatttcatatagatattccaaaacgtaaaagtaaaccatgcatccacagagacatggaattacagaactggat

SEQ ID NO: 32471 - DNA, 478 bp, Homo sapiens
  misc_feature (1)...(478): n = A,T,C or G
gttctgatagccctcgcanngncttgataaccntctggagagcccgatcaaaaagccccgccccactcgggctgaaggcagtgatgtggcctatgcagacctggatggatccgactgcatcatgctgtctggaaaaacagccaaaggggactatcctctggaggctgtgcgcatgcagcacctgattgcccgtgaggcagaggctgccatctaccacttgcaattatttgaggaactccgccgcctggcgcccattaccagcgaccccacagaagccaccgccgtgggtgccgtggaggcctccttcaagtgctgcagtggggccataatcgtcctcaccaagtctggcaggtctgctcaccaggtggccagataccgcccacgtgcccccatcattgctgtgacccggaatccccagacagcttcgcaggcccacctgtaccgggcatcttccctgggctgtgcaaagacccagccc

SEQ ID NO: 32472 - DNA, 494 bp, Homo sapiens
  misc_feature (1)...(494): n = A,T,C or G
atttggctcgctccacagtccagngnggnggaattcattttctttatcctggtagtagacaaagaatgttgcctatttgacctatgtccagagaaggcagagtgtcagtcacactgggtttctatccagccccagtcctgtccagtgggtaactctcagccccactcctcatcccccaaaggccccagtgacctctatgctgcagaggtgcactgggtgggccctagagctgggctgcagagcaagcaactggctgcatgcctgggcctccctgcgcagttcctcacatgcatgctgtggtcccagcctgacctctccatctggagggggccgcctcgctgggctgttccaaagctggagtcctggtggcagctgctttgccaagtcgcgcagtagccagggcttgcctgcagcccagaacactcagacagggtcaggccttccagggttcacagcacgtcccatgcccctatgtcctggcatctggngaaaan

SEQ ID NO: 32473 - DNA, 494 bp, Homo sapiens
  misc_feature (1)...(494): n = A,T,C or G
ntttcgaatagcagtncagtgtggnggaattcaggccactgggtcaccccttgcacagggcaaggatgcctatgaactagaggtcttattgcgggtaaaggaatcggaaatacagtacctgaaacaggagattagctccctcaaggatgagctgcagacggcactgcgggacaagaagtatgcaagtgacaagtacaaagacatctacacagagctcagcatcgcgaaggctaaggctgactgtgacatcagcaggttgaaggagcagctcaaggctgcaacggaagcactgggggagaagtcccctgacagtgccacggtgtccggatatgatataatgaaatctaaaagcaaccctgacttcttgaagaaagacagatcctgtgtcacccggcaactcagaaacatcaggtccaagagtctgaaggaaggcctgacggtgcaagaacggttgaagctctttgaatccagggacttgaagaaagactaggtgt

SEQ ID NO: 32474 - DNA, 488 bp, Homo sapiens
  misc_feature (1)...(488): n = A,T,C or G
cgggcnccnnaggggnnnnnaatcgaganccntatcgagtgtcgtggaattcgtttttcttgttactagcagctatgttaagccacaccactgccatgttcattcctcaccacatctcaccaaggtggatattcttaggaagcccatttttacatgcggggccctgaggccccaaaaagggttaggaccaaaggcagtggccacctctggctcctccctgagttctgtgtgctctccttacgcattgctgcccttaggctgcctatgccttatcctgtgcccttcctgcatggtgtctgcatgagactggcgtgagggcatgctcaggccatgtctggagtatggataagtgactgaatttgaacaaagtgaaggagtggaggggattggtctgtggagagaggagccgaacttttaagtggatgcacatttcccttcactcgtgttcagttgtgaagagaataagcaaatggttctttttcattgaa

SEQ ID NO: 32475 - DNA, 427 bp, Homo sapiens
  misc_feature (1)...(427): n = A,T,C or G
ccaaggcgagtgacctgagggcaggagctcccccgccccccgccaacggctggacagtgggcaacggaatcccaaaagcagctgttgtctccagagcattccagctgtgcttggatttcgaaccctgctctcctgcctgagcatcgccctggcccagataggggtgcccctgacccccagacatactttactgaatgcttgggtctcagttcctctcagttgcgccctcaggctggaggtgatgggtgtagacgtgggagagccgaggctggtggccatctctggaaccctggggaggattggcgagggagggtggacccaggacctctgggtagggctgcaatggtagtgactcccccagggctgcctcagcccncatctcgctaaagatagccctcttacttcctggggaaaaaccaccccaacc

SEQ ID NO: 32476 - DNA, 489 bp, Homo sapiens
  misc_feature (1)...(489): n = A,T,C or G
tgggctcnnnagggggccnattgaaaccctaatcgagaccactagtcagtgtcgtggaattcgcaaaatagcgggaagatggcggagctgcgcgtgctcgtagctgtcaagagggtcatcgactacgccgtgaagatccgagtgaagcctgacaggaccggtgtggtcacggatggtgtgaagcactccatgaaccccttctgtgagatcgcggtggaggaggctgtgcggctcaaggagaagaagctggtgaaggaggtcatcgccgtcagctgtgggcctgcacagtgccaggagacgattcgtaccgccctggccatgggtgcagaccgaggtatccacgtggaggtgcccccagcagaagcagaacgcttgggtcccctgcaggtggctcgggtcctggccaagctggcacagaacgagaaggtggacctggtgctgctgggcaaacaggccatctatgatgactgtaaccagacagggcacatg

SEQ ID NO: 32477 - DNA, 488 bp, Homo sapiens
  misc_feature (1)...(488): n = A,T,C or G
gagagcatagancccctaganancctatgcagngncgaggaattccttcgccagctggtacactttgatccccacctccatactgctgggactcggggccgccccgctgtggtctgcacagtgcacatacctcacgatcacgggaaacacacatgcagagaaggcgggaaagcgtggcaaagacatggcgaaccagtattttggcatcttcttcctcatattccagtcatccggtgtgtggggcaacttgatctcatcgctggtatttggccagactcccagccaagagacccttccagaagagcagctcacgtcctgtggggccagtgactgcctgatggccaccacaaccaccaacagcacccagaggccctcccagcagctggtctacaccctcctgggcatctacactgggagtggtgtcctggctgtcctgatgatagctgcgttcctccaacccatacgagatgttcagcgggaaagtgaag

SEQ ID NO: 32478 - DNA, 482 bp, Homo sapiens
  misc_feature (1)...(482): n = A,T,C or G
ttaagaaaccctcgcangncnggtaatagaccatcagaagngctccgacctgttccgaagcaccctggagcccgtggagaaagctctgcgcgacgccaagctggacaaggcccagattcacgacctggtcctggtcgggggctccacccgcatccccaaggtgcacaagctgctgcatgacttctttaacgggcgcgacctgaacaagagcatcaaccccgacgaggctgtggcctacggggcggcggtgcaggcggccatcctgatgggggacaagtccgagaacgtgcaggacctgctgctgctggacgtggctcccctgtcgctggggctggagacggccggaggcgtgatgactgccctgatcaagcgcaactccaccatccccaccaagcagacgcagatcttcaccacctactccgacaaccaacccggtgtgctgatccaggtgtacgaaggcgagagggccatgacgaaagaat

SEQ ID NO: 32479 - DNA, 502 bp, Homo sapiens
  misc_feature (1)...(502): n = A,T,C or G
gcnnnnttnnnnngnatcgatnaggtnnnnnnnnttcgagatcactatccatgtggggaattcgaggaggaaggtggcaagatggtgttggaaagcactatggtgtgtgactgtgaagtgctgaccacactcaccccagacactggccgtatcctgtccaagctacatactgtccaacccaagggcaagatcaccttctgcacgggcatccgcgtggcccatctggctctgaagcaccgacaaggcaagaatcacaagatgcgcatcattgcctttgtgggaagcccagtggaggacaatgagaaggatctggtgaaactggctaaacgcctcaagaaggagaaagtaaatgttgacattatcaattttggggaagaggcccttcgtgtatctatggaagagcagcggcagcggcaggaggaggaggcccggcgggcagctgcagcttctgctgctgaggccgggattgctacgactgggactgaaggtgaaagagactcan

SEQ ID NO: 32480 - DNA, 521 bp, Homo sapiens
  misc_feature (1)...(521): n = A,T,C or G
attgacctcgaccactatccagagtggngcaattcgttcaagaaggagactcccaattctcggcttgtgaccgagccagttgaagatgagcagccgtcaacactatcaccaaaaaaaaagcaacggaatggaggcatgcggaactcacccaacacctcgcctaagctgatgaggcatgaccccttgttaattcctggcaatgatcaaattgacaacatggactccaatgtgaagaagtacgactctactgggatgtttcactggtgtgcacccaaggagatagagaaagtcatcctgactcgaagtgaagctgccatgaccgtcctgagtggccatgtcgtggtctgcatctttggcgacgtcagctcagccctgatcggcctccggaacctggtgatgccgctccgtgccagcaactttcattaccatgagctcaagcacattgtgtttgtgggctctattgagtacctcaagcgggaatgggagacgcttcataacttccccaaagtgtccatattgct

SEQ ID NO: 32481 - DNA, 523 bp, Homo sapiens
  misc_feature (1)...(523): n = A,T,C or G
tggaggnnnagggcggccnnnnaattgannnccaactgatcactgtccgngnggngcaattcgtacaagaaggacggagctgacttcgccaagtggcgttgtgtgctgaagattggggaacacaccccctcagccctcgccatcatggaaaatgccaatgttctggcccgttatgccagtatctgccagcagaatggcattgtgcccatcgtggagcctgagatcctccctgatggggaccatgacttgaagcgctgccagtatgtgaccgagaaggtgctggctgctgtctacaaggctctgagtgaccaccacatctacctggaaggcaccttgctgaagcccaacatggtcaccccaggccatgcttgcactcagaagttttctcatgaggagattgccatggcgaccgtcacagcgctgcgccgcacagtgccccccgctgtcactgggatcaccttcctgtctggaggccagagtgaggaggaggcgtccatcaacctcaatgccattaacaagtgcn

SEQ ID NO: 32482 - DNA, 481 bp, Homo sapiens
  misc_feature (1)...(481): n = A,T,C or G
tattgaaaccntangaggncgaatgagaccctaggcagnngcgtggaattccaagaactccagtattatgtgaaagtgatattttaaaaagagtagtaatattaatggccatccctgttttgttcctaatcttgaagggaatgtatctgaagtttcaacttgaaattgttataggctttagtatataatgtataccacgttaagcaattgtcttctattccttttgtgttaattatgagtcctatcaagtgcttttttggcatttgataagtcatttttctcttttactctattaatatggtcagttgatagattttcagatgttgaagtcttgtcgtttgaggataaatgttactcatcattttgcttcgcgttgctttaagttaaggagtcttggaatctattcataagtgaagtggaaccataattttactttcctgtctttatctgcttttggaatcgagattacactagactcata

SEQ ID NO: 32483 - DNA, 494 bp, Homo sapiens
  misc_feature (1)...(494): n = A,T,C or G
aattgactcgcccaccatccgngcggnggaattcccgggctgagcgtgtgtttgatgaatgaaggcagggctgccgtgtgcgtcctccctgccaggtccctccacctccgctctttccaaagggaccgggctacctgctgttgctgtgccacccacaggggaggcaggtgtcagctccacacgcgtggggccttctcgccaggcctgtcccgacacagagggcagtcccgtgaggtggcaagttcccacagtcagcagtgccgctgctgttagaaggtggtggtggactgagatgacatccgcagtcccttccgcatcagggcccccacctcctgtacatccttggggtctcagcccagatgcacttnctcggggctctccctggctctcccgggctccagtctcctggtgcatgtcgttatcagctcccactccacactgtgacaggaccctgagccttgagtcctgcgggtgcctcggccgacctgcgctgn

SEQ ID NO: 32484 - DNA, 493 bp, Homo sapiens
  misc_feature (1)...(493): n = A,T,C or G
nctcgatcacagtccgtgtggtggaattcccggngagctcatgcccaggggtgtggggcctccagggctactatggcccatctgtccgtgaacagaaagggccttgccctccagcttgagctgggtgcctgtggacagaagcaggactttggccaccactggcaccagaaccctcagcaccagctgctaggggtgagggtcgggtgcccccaggtcaaggtggcctgagcctgcccacccaaggacagggacataagaatctggacaatcctgccagcctgaagggagggcagccaccctggagcagcccaagtgctcctgagtccttgccacctcccctctgcccacagggcagaccgcagcagagaccccaggccagcccccggagtctgcaaatgaaaggagctgtgggagcccaggtctgccaaggagctggagtctgcagtgtggactccaccagaggccaatgggaggtgggttcagagctggctga

SEQ ID NO: 32485 - DNA, 498 bp, Homo sapiens
  misc_feature (1)...(498): n = A,T,C or G
agttagtaggagcgccggnnnnnntttttgaagaccttccataggacgngccgnggaattncagttgccttcggttcccggttccgggccgacacccgcgcagggctgagacaggtgtctgcgctccccgcaatgggctgctccagcagcgccctcaacaaggccggcgacagcagcaggttccccagcgtaacttcaaatgagcatttttcaactgcagaagaaagtgagtcctgctttgcccaaccaaagccacatgcactgggaagagaatctactgttgatggcaatgtacaaagggaaagccgtcctcccttacaaaagctcaaggtttcagcagagcctacagctaatggtgttaaacccctccaagaacagcccctggccaaggacgtagcccctggaagggatgccacagaccaatcagggtccacagaaaagactcagcctggagagggactggaggaatctgggccgcctcaaccaggtggcaaagag

SEQ ID NO: 32486 - DNA, 258 bp, Homo sapiens
  misc_feature (1)...(258): n = A,T,C or G
nggncaggatgaatgtggacactgtccttctgagaggagcctgcttagaacccaggctctgatattgatctctagggtgctaacatttgggtcacaaaaaccccactgtggtcatcaaaggaggtgtattgccaactagtcgtgctacaaaagggaattaatatgacgctgtggagggaagaaggcagctgtgggactgggaagtaaggaggggatgagtaaggccatttgagggataattagaaaatgaaccagccg

SEQ ID NO: 32487 - DNA, 486 bp, Homo sapiens
  misc_feature (1)...(486): n = A,T,C or G
nactgatgcctatnagngccctcgagtacctagtccgtgtggtggaattcgtcagtcacacagcccagtgttccagagtccaggcctttctatgctcagtgactcttttccacctgcaccagagagaatcagtcctctcctaggaggtctttccttcttcctttctctagctgggaacaggtgctcatgtccccagtccttgtctggtcttactgtctccccactccttctcttgtgagtctgtcctcctcaaagaaattgtccaagcatctttgctcactcctgtctcccctttccctctccctcccagacccaagtggtgacaccagctctcccctggcctgagacagatctgaagccctggaatgtttcttcactccctcatctattcttatcctccaccgcccctcacttgctgccccaggtattccaggacaatcctatttacctgccattttatcctttacttctttttgagacagagtt

SEQ ID NO: 32488 - DNA, 464 bp, Homo sapiens
  misc_feature (1)...(464): n = A,T,C or G
tcccggttttnnnancccaggggactangaagaggcncgaannccaggaccaaactgttctcaaatccaccttaaggcaacaaaggctggaggagattctccatcttgggcgaagggccactgtcccttcatgctgtcggaactccaggatgggaagagcaagattgtgcagaaggcagccccagaagtccaggaagatgtgaaggctttcaagacagatctgcctagctccctggtctcagtcagcctaaggaagccattttccggtccccaggagcaggagcagatctctgggaaggtcacacacctgattcagaacaatatgcctggaaactatgtcttcagttatgaccagtttttcagggacaagatcatggagaagaaacaggatcacacctaccgtgtgttcaagactgtgaaccgctgggctgatgcatatccctttgcccaacatttctctgagg

SEQ ID NO: 32489 - DNA, 462 bp, Homo sapiens
  misc_feature (1)...(462): n = A,T,C or G
atagataacctnnnttcgagaacactatccatgtggtggaattctgcagtgtttctttttgtttgttttaaataacagttttattgagatataatgacgtatggtaaactgagcatatttaaaacacacaatttaataagttgtggcctgtgtatatacccgtgaaaccacccccaccttcaagatagtgaacatcccccttattcccctgtccccagaagttttcttgtggaacccctccatcccccgctcctctgccatcccctaccccaggtaacaggctggtctactttctgtcactgtgtctgagtttgcagcatttactgtaaacggaatcgcgtctttcattcaacagaagtattttggagtttgtccaggtggttgcgcgtatcaacagtcattgtacacgtgtgccaaagtctgtttatccattgacctgttgatgggttttcagagaaagct

SEQ ID NO: 32490 - DNA, 455 bp, Homo sapiens
  misc_feature (1)...(455): n = A,T,C or G
ntcctgatnntcccgctnacctgcgnggaancccngaggngcggacggtagttgctgggggttccgttctgagctcgcagcttaggagctgtatatcgcggacttagcgttgccgcgtccgaggccggcgcatcagtggctgcagatccggaggccaagagctcaaccacccttcttcggaacagggccggcctgctgctgtgccctcgacgctcggtgcctgtatctactccggggcctaagtcggctccgggggcggcttaagagaaggccgccggcgagatgttcaaaaacacgttccagagcggcttactctccatcctatacagcatcgggagcacgcctctgcaaatctgggacaaaaaggtacggaatggccacatcaaaagaatcactgatcatgacatccattccctggtgctagagattgaagggacaaatgtaagcaccacatg

SEQ ID NO: 32491 - DNA, 533 bp, Homo sapiens
  misc_feature (1)...(533): n = A,T,C or G
cggaaaatgaacnncccagggggnnnnnnnnaattgancaccaatcgatgactgtccgngnggngcaattccgcgggtccacgcgtgtgatcgtccgtgcgtctagcctttgcccacgcagctttcagtcatggcctccggtaacgcgcgcatcggaaagccagcccctgacttcaaggccacagcggtggttgatggcgccttcaaagaggtgaagctgtcggactacaaagggaagtacgtggtcctctttttctaccctctggacttcacttttgtgtgccccaccgagatcatcgcgttcagcaaccgtgcagaggacttccgcaagctgggctgtgaagtgctgggcgtctcggtggactctcagttcacccacctggcttggatcaacaccccccggaaagagggaggcttgggccccctgaacatccccctgcttgctgacgtgaccagacgcttgtctgaggattacggcgtgctgaaaacagatgagggcattgcctacaggggcctctttatcatcgatggcn

SEQ ID NO: 32492 - DNA, 468 bp, Homo sapiens
  misc_feature (1)...(468): n = A,T,C or G
aggaggtnccnnnnttcagaaaaactgggatactggaagngcgnggaannatcttgcctgcttcagcaccaccagccacctcaaatcctgatccagctgtgtctcgtgtcatgaatatgaaaatcgaagaaacaaccatgacaacccaaaccccagcccccatacaggctccctctgccatcctgccactgcctgggcagagtgtggagcggctctgtgtggaccccagacaccgccaggggccagtgaacctgctctcagaccctgagcaaggggttgaggtgactggccagtatgagagggagaaggctgggttctcatggatcgaagtgaccttcaagaaccccctggtatgggttcacgcatcccctgaacacgtggtggtgactcggaaccgaagaagctctgcgtacaagtggaaggagacgctattctcagtgatgcccggcctgaagatgaccatggacn

SEQ ID NO: 32493 - DNA, 453 bp, Homo sapiens
  misc_feature (1)...(453): n = A,T,C or G
nactgaaaacttgggatcntcggaagngcggnggaantnccgcagcagggtcacaagggagatgtccgcccccagtcgtagcctcggacggtttctgagcgttggtgtttggcacgcgccaccctctcttgctttggttccgccatgccgatgtaccaggtaaaaccttatcacgggcgcggcgcgcctctccgtgtggagcttcccacctgcatgtaccggctctctaacgtgcaaggcaggagcggcggcccagcgcccggcgttggccacctacagtctttggtagatgagtggctggatagctacaagcaagaccaggatgcaggatttctggagcttgttaactttttcatctgatcttgtggatgtaaaggactcgggggactatcctctgacagctccaggtctatcctggaagaagatccagggcagcttctgtgagtttgtggg

SEQ ID NO: 32494 - DNA, 560 bp, Homo sapiens
  misc_feature (1)...(560): n = A,T,C or G
acgcgctagtgtcacattacctctgctgacgtcgtaagattttgacactgtcaagatccttgcaatattgtattcctacttgcggcagaggagatgcggnnggnnnnnaatggaaattataggacattcggnnggaaccgccgaggaagggccagcagctgcacagcctgagaaactccttcaagctgcccccgcacatcagcctgcatcgcattgtggacaagatgcacgatagcaacaccggaatccgttcaagccccaacatggagcagggaagcacctataaaaagaccttcctcggctcctccctggtggactggctcatctccaacagcttcacggccagccgtctggaggcggagaccctggcctccatgctcatggaggagaacttcctcaggcctgtgggtgtccgaagcatgggagccattcgctctggggatctggccgagcagttcctggatgactccacagccctgtacacttttgctgagagctacaaaaagaagataagccccaaggaagaaattagcctgagccactgtggagataagtggcac

SEQ ID NO: 32495 - DNA, 415 bp, Homo sapiens
  misc_feature (1)...(415): n = A,T,C or G
ggggacgggatctcaccttgtcacccaggctggagtgcagtggcacaatctcatctcactgcaacctctgtcgcctggcctggagccatcctcccaactcagcccctgaagtagctgagactacaggcatgtgccatcatgcctggctaatttttgtatttttttgtggagacaggttttaccacgttgcccaggctggtcttgaactcctgagctcaagcgattttctgccttggcgtctcaaattgttaggattacaggcgtgagccaccacacccggtcacacttttctaatcaaggaaactgagactagaagagatgaaatgacttgtccaaggacttgtatgtttttcgcaaactctccttcaaccaaagtttctgtgttcctccaaatagccagatttcattcacctgn

SEQ ID NO: 32496 - DNA, 453 bp, Homo sapiens
  misc_feature (1)...(453): n = A,T,C or G
natggaaaaactgagatccctcggaagngcggnggaattcggaggacaccgaaagtaagctgttcactacttacttctttaacttttacttgatttagttctgaaaactcgaatccaaaccctcaagaaaggcctgggcgaggacatgtacagtgggatcaccgactgtgccaggaaactctggattcaggagggaccatctgccttcatgaaaggcgctggctgccgggcactggtcatagcacctctctttgggattgctcaaggggtctattttattgggattggagagcgcatcttaaagtgttttgactagacagagctggaggtcaagtccctgcgcttgccgccctctctctagctgtttcacttaacctanagggggcaagggcaggtggggccactctggcctgcctggtcctctgcgttgtagtgctacctcaatctcgggag

SEQ ID NO: 32497 - DNA, 508 bp, Homo sapiens
  misc_feature (1)...(508): n = A,T,C or G
agagggccnnccccncaattgaaatcgagatgcntaggccagngngcnggaattcgaatgtaggagtcctgctatgttacgtttgtgttatgttattttgttatgttgtgttgtgtgatatattattatgcattatcttgtgttgctatattgtatcatttgacctctgagtcttttttctcatctgcaaaacgggaacaagatcactgccaataccttttcaagctctaacgtcccaagatccctcttctccacctctctctcctcttttaactccaccagtccaccctatggagggcttcccctcttcctgtggttcctgggagggagagatctgaggtggggaactggatgcagagccccactggaaagtcaaagagaaattgctcaatggtcctggctttccctggaactaacagtcatctttgagaaggccaacagggcagcctattctacgctgacttcctaacaatgggactgaattctctgaacttccaatgcagcctat

SEQ ID NO: 32498 - DNA, 452 bp, Homo sapiens
  misc_feature (1)...(452): n = A,T,C or G
ntcctgagnactgagtacactgcgnggaanccccagatgagggaacagcccgatttgcctgggtctgattctccaggctgtcgtggntgtggaatgcaaacgccagcacataatggaaacaggacctgaagacccttccagcatgccagaggaaagttcccccaggcggaccccgcagagcattccctaccaggacctccctcacctggtcaatgcagacggacagtacctcttctgcaggtactggaaacccacaggcacacccaaggccctcatctttgtgtcccatggagccggagagcacagtggccgctatgaagagctggctcggatgctgatggggctggacctgctggtgttcgcccacgaccatgttggccacggacagagcgaaggggagaggatggtagtgtctgacttccacgttttcgtcaaggatgtgttgcagcatg

SEQ ID NO: 32499 - DNA, 507 bp, Homo sapiens
  misc_feature (1)...(507): n = A,T,C or G
aaagggccnnnnnnncaattgagcatcgtgtgcagtgtgcgggaattcgcgacgtgacctgtttgagcctatcctgagcaaactgcggggcctgaaagctgtgctggagcggcaggcctcttaccgcttctactccagttccctgcttgtcatctatgatggcaaggagtgccgggctgagtcctgcctggaccgccggtctgagatgcgtctcaagcacctggacatggtgctccctgaggtggcgtcatcctgtggccccagcaccagccccagcaacaccagccccgaggcgggtccctcctctcagcccaaggtggatgtccgcatgattgactttgcacacagcacattcaagggcttccgggatgaccccaccgtgcatgatgggccagacagaggctacgtgtttggcctggagaacctcatcagcatcatggaacagatgcgggacgagaaccagtangccctgttctgggcccccagaacccctttctctccactgca

SEQ ID NO: 32500 - DNA, 500 bp, Homo sapiens
  misc_feature (1)...(500): n = A,T,C or G
gaggccncncccattgaaactgaatgcatatccanggcnggaattcgtggtggtccccagctcaccctctgttgccccagtctctcttcctcacccctgcctcaggatgcctggctctgagccacccctgctttggcgcaggttctccccggaggtgctgggcctgtgtgcaagcacagcgctggtgtgggtggtgatggaggtgctggccctgctcctgggcctctacctggccaccgtgcgcagtgacctgagcacctttcacctgctggcctacagtggctacaaatacgtgggaatgatcctcagtgtgctcacggggctgctgttcggcagcgatggctactacgtggcgctggcctggacctcatcggcgctcatgtacttcattgtgcgctctttgcggacagcagccctgggccccgacagcatggggggccccgtcccccggcagcgtctccagctctacctgactctgggagctgcagccttccagcccn

SEQ ID NO: 32501 - DNA, 458 bp, Homo sapiens
  misc_feature (1)...(458): n = A,T,C or G
nttcgagactctagtccctgtggtggaattcgcaaaccccgtgtcccggaagctgtcaatgcgcagagaacaagctcccctgccctccccgactccagatgcctcaaccttcaccttggatgtcagaggcatcctttcccctctgtgtgacatcttgggcatgacacagccaagactgagggttagttcatcagtgtcttctgcttttaggcctcagaggacttatcctttttggcaggggaccagacctcctgggtggcctccatcaccactaagtcacttgggcacctggagaaatggcaaaggtcccaaacaggaaaccaagattgggaagtgagggccctacaattagaatcttttggggtctatgattgtctaggtcagcagttcccaaagtgtggtctgaggatccctgtggttccctgagcccttttcagactgtccttttctaactgcaa

SEQ ID NO: 32502 - DNA, 452 bp, Homo sapiens
  misc_feature (1)...(452): n = A,T,C or G
actcgagattcgtagaccgtgtggnggaattcctttatggagaccctgaaagacattgtggagtattacaacgacagtaacgggtctcacgtattgcagggaaggtttggttgtgagatcgagaataacagaagcagcggagcattctggaaatattactatgatggaaaggactacattgaattcaacaaagaaatcccagcctgggtccccttcgacccagcagcccagataaccaagcagaagtgggaggcagaaccagtctacgtgcagcgggccaaggcttacctggaggaggagtgccctgcgactctgcggaaatacctgaaatacagcaaaaatatcctggaccggcaagatcctccctctgtggtggtcaccagccaccaggccccaggagaaaagaagaaactgaagtgcctggcctacgacttctacccagggaaaattgn

SEQ ID NO: 32503 - DNA, 462 bp, Homo sapiens
  misc_feature (1)...(462): n = A,T,C or G
ntctgagactctagtccgtgtggtggaattcctgaccttgcggatggcgtttcaggtggagaaggaaaaggaggcagtgatggtggaggcagccacaggaaagaaggggaagaggccgacgccccaggcgtgatccccgggattgtgggggctgtcgtggtcgccgtggctggagccatctctagcttcattgcttaccagaaaaagaagctatgcttcaaagaaaatgaacaaggggaggtggacatggagagccaccggaatgccaacgcaaagccagctgttcagcgtactcttttagagaaatagaagattgtcggcagaaacagcccaggcgttggcagcagggttagaacagctgcctgaggctcctccctgaaggacacctgcctgagagcagagatggaggccttctgttcacggcggattctttgttttaatcttgcgatgtgctttgcttgt

SEQ ID NO: 32504 - DNA, 464 bp, Homo sapiens
  misc_feature (1)...(464): n = A,T,C or G
ntttgagacccatcgagggcntgaaaaccnncntaagaaagnctcaatggcatataatgctcccgtacaggggtctgctgtaattttttacaacaggtcttgccgtagctgacgggtgggagagcttcccacggagcggtgctggttgagccgctgtgggagcccaactcgtggcaattggagtggccctgaagtgtttgtctcttccccttttctctctctgcacaggagctggagaagtgtgatgccaatcactacatcatactgtttcgtgatgctggctgccagttcagggcgctttactgctactatcctgatactgaggaaatctacaaactcactggcacggggccaaagaacatcaccaagaaaatgatcgacaaactgtataaatacagctcagaccganaacagtttaacttgatcccagccaaaaccatgtctgtcagtgtggacgcactcct

SEQ ID NO: 32505 - DNA, 468 bp, Homo sapiens
  misc_feature (1)...(468): n = A,T,C or G
atcgaaaccctattgtagaccctaggccangncgnggaattcatctctcataaagacatgcaattgggaaggctacacatgaagaccctgttaccagtaatcaagccagaaattcggagttattttccagaaagctggttgtgggaagttcatcttgttcccagaagaaaacagttgcagtttgccctacctgattctctaaccacctgggaaattcaaggcgttggcatttcaaacactggtatatgtgttgctgatactgtcaaggcaaaggtgttcaaagatgtcttcctggaaatgaatataccatattctgttgtacgaggagaacagatccaattgaaaggaactgtttacaactataggacttctgggatgcagagtctcgccctgtcgcccaggctggagtgcaatgggaagatctcgggtcgctgcaagctccgcctgccgggttcgggcgattctcct

SEQ ID NO: 32506 - DNA, 490 bp, Homo sapiens
  misc_feature (1)...(490): n = A,T,C or G
cgggggtccggnnncnnnnntttgagnccctattgtagaccctaggccanngcggggaattcgagcttgtcccctcgaggcaaagagcatacaggcgtgttgggatgactgggttttgctggtcttcaatctgtaacgttggaattgttttcactaccctgcctcttcttcattctgcctgattctccagaggaagaagaggtggataagatgatggaacagaagatgaaggaagaacaggagagaaggaagaaaaaggagatggaagagagaatgtcattagaggagaccaaggaacaaattctgaagttggaggagaagcttttggctctacaggaagagaagcaccagcttttcctgcagctcaagaaagttttacatgaggaagaaaaacggaggcgaaaggaacagagtgacctgaccaccctaacatcagctgcataccagcagagcctgactgttcacacaggaactcatctcctcagcatgg

SEQ ID NO: 32507 - DNA, 482 bp, Homo sapiens
  misc_feature (1)...(482): n = A,T,C or G
gcagttcncggnnnnnnnnnaatcgagaccctttcgaggccgtgaanaccactggngggttgccagcgttgatgtggtggagaatgaagaggccagcgctagcatcattgttaaaatgacagactcgttcactgagcaggctgaccaggtgactgctgaggttggaaagctcttgggtgaagagaaggtggatgcaattctttgcgttgctggaggatgggccgggggcaatgccaaatccaagtctctctttaagaactgtgacctgatgtggaagcagagcatatggacatcaaccatctccagccatctggctaccaagcatctcaaggaaggaggcctcctgaccttggctggcgcaaaggctgccctggatgggactcctggtatgatcgggtacggcatggccaagggtgctgttcaccagctctgccagagcctggctgggaagaacagcggcatgccgcccggtgcagccgcca

SEQ ID NO: 32508 - DNA, 489 bp, Homo sapiens
  misc_feature (1)...(489): n = A,T,C or G
cggcattcagggcngnnnnnaatcgannccctattgtagtcactagtccatgtggtggaattcccctcggcttacttctcttcttctctcggtcccgggagcccccgcccggagagagtcgtggttgctgatcgtggtgcttgagtagagccgtggttggtgacagcatgacgagcgaggtgatagaagacgagaagcaattctattccaaggccaagacctactggaaacaaatcccacccacggtggacggcatgcttggggggtatggccacatctccagcatcgacatcaacagctcccggaagtttctgcagaggtttttgagggaaggcccgaacaagacaggaacgtcctgtgccctggactgtggagctggcattgggaggatcaccaagcggctgctcctgccgctgttcagagaggtggatatggtcgacataacggaggacttcctggttcaagccaagacctacctgggggaggagg

SEQ ID NO: 32509 - DNA, 467 bp, Homo sapiens
  misc_feature (1)...(467): n = A,T,C or G
nggacagnnnnnnnnaaatgatanactgagaacctcgggaaannccagattgagcaatagaaaaaaattcctttcctttgaatgatagctgtgattcaccccaccccattttcttgtttctggtccatccgatgagacggatgctctgatgctctgaggcttctgggaggctgggccctggaggcaacgtgctgcaggcgcactctgtcagagtgaacagcaccgcgagacaggccaggctcgtggctcggaagacaaaccccacacacactcaaggggtcgaaaacaaaccccacacgagggctctcacctccttctcctaggtagtatttattttcagcacctgtttgatgcagtttttaatcctctacctattgcactgttgtgactcgttggccattatttgatttttgtacgaaaaaaagctttgttatagaaatcagcatactatttttttaaatctggag

SEQ ID NO: 32510 - DNA, 468 bp, Homo sapiens
  misc_feature (1)...(468): n = A,T,C or G
nggagcggccngnnncctgaaannccttttngacangcangngncgnggaannnnnnttttattcctcctcctcttccctcatcttccttactccttaaggcctaacttaagtctcacagttgcataaggttactgaattcttctttggatatccattgcatggctacctgtcgcccaggttagagtgcagtgtcgcgatctcagctcactgcaatctccacctcccgggttcaagtgattctcctgcctcagcctcctgagttattgggattacatgcatgtgccatcatgcccagctaatttttgtatttttagtagagacaggatttcatcatgttggccaggctggtcttgaacacctggcctcaagtgatccacctgccttggcctctgaaagtgctgggattacaggagtaagccactgcacccatggccaccccttttaaccctgctntggctctgtgtga

SEQ ID NO: 32511 - DNA, 468 bp, Homo sapiens
  misc_feature (1)...(468): n = A,T,C or G
ngttgagtcctgtccatgtgggtagttcccgctctcatctgcggagaccgccaggacctggagcagccggaccgggtggacatgctgcaggagccgctgctggaggcgctaaaggtctacgtgcggaagcggaggcccagccgcccccacatgttccccaagatgctaatgaagattactgacctgcgaagcatcagcgccaagggggctgagcgggtgatcacgctgaagatggagatcccgggctccatgccgcctctcatccaggaaatgttggagaactcagagggcctggacactctgagcggacagccggggggtggggggccggacggnnntnnnntnnnnnnntnnttttttttttgnntttnntttttnnnntntttttttttttnnggttttgggtttttttnntnnnttttttttnttnnttttttttttnnnnnnttttttttnttttttttgtgt

SEQ ID NO: 32512 - DNA, 499 bp, Homo sapiens
  misc_feature (1)...(499): n = A,T,C or G
agtngntccgccnnnaatagaaattgantgcatangcangngcnggaattccgggcctctgtgggtgggttggggccttcctcgccctcggccggtccaccactcaccattgtctgtcccagtagagcccgaaggcgggggcgcgggagggcttctggctggggcgaagagggcttgagggctcagtcgggatgctgtgatcgcacgcggtaaacctccagtagatcaagaagctgtacaaagtgcccgacttcccctcgaaacgcctgcccaactggaggaccagagggttggaacagcgccggcagggcttggaggcttacatccagggcatcctgtacctgaaccaggaggtgcccaaggagttactggaattcctgagacttcggcacttccccacagaccccaaggctagcaactggggcaccctgagggagttcctgcctggcgacagcagctcccagcagcaccagcggcctgtcctgagcttccatgtgga

SEQ ID NO: 32513 - DNA, 469 bp, Homo sapiens
  misc_feature (1)...(469): n = A,T,C or G
ngctgagtccatttccatgtgggtagttcccctgtggacttggtgacgctgtatgccctcaccgctcagcccctggggctggcttggcagacagtacagcatccaggggagtcaagggcatggggcgagaccagactaggcgaggcgggcggggcggagtgaatgagctctcaggagggaggatggtgcaggcaggggtgaggagcgcagcgggcggcgagcgggaggcactggcctccagagcccgtggccaaggcgggcctcgcgggcggcgacggagccgggatcggtgcctcagcgttcgggctggagacgaggccaggtctccagctggggtggacgtgcccaccagctgccgaaggccaagacgccaggtccggtggacgtgacaagcaggacatgacatggtccggtgtgacggcgaggacagaggaggcgcgtccggccttcctgaacaccttatgctggt

SEQ ID NO: 32514 - DNA, 501 bp, Homo sapiens
agcctcgaccaccgtcagagtggagttagaacttccttcctctttgtcttccgccatgattgtagatttcctgaggcctcccaagctgtgctgaactggaacagaacaccggcctccgagattccatggagcaatgggaaaattgcagtgattactcatcactgtgaaacttctactttgaatacagtatcttctggcaagcataggggactgcagtcgacaatgctgctgaatatacctgagtacatagactggacctcactgtgggaacaacaagatcaacaagaggagcaagaacaacatcaagagtcagggcccgggggtcctgacgggtacaggatgggtacagacccacacaggaatcccagagtgtgttccacagcaggacacgcctgcgctgaaagagtgggcagaaaggagctgacctgggattatgatccaaactcagctgggcctcccctccctgccccaggattgtggagtgagaacgttgcagcaggg

SEQ ID NO: 32515 - DNA, 475 bp, Homo sapiens
  misc_feature (1)...(475): n = A,T,C or G
nggtcgagtnccctattccagtgtggtttaattcacatgctggaggccccggtgaggtctgccattggtctgccaggtccctctgcactgaggcaggggaggccagcaaggacttcagggctgcagagccttccctgcagtttctaccttacaaacagggatctaatccctaacctggggtacgtgtgagaccacagggagaaggccctcgaggcatgggcaccatgccaggcctgtagggcaccttcctgcagcaggcagaatccccttcccaagtaggaggggaaagtgacaagaaccagggcccagggagggagcagcaaggccatgggaaagggcagccagcatccggctggatttgggctgcctctggggattcgggagggaggactggtggaggacaaggcacacttggctcagcagcattcccctcctctccctagggaaacctgtttgacttcttacgcttgacgga

SEQ ID NO: 32516 - DNA, 500 bp, Homo sapiens
  misc_feature (1)...(500): n = A,T,C or G
gggttagaccccagtccagtgtggtggtagacgtactggggttggtggatggagacgtangcatgcagggcttccacatatgtgtgctgcagcctctctacctggagctggtcctgcacgttgggccggtctgcagagaagatgctgatagcaatgagcaaggcaaactcggcatcattgagttgcagctcattcatggccctggagaactcgaagatggggttgatgaattccacttgcagccctgctttggcaaagtcttcccggttataactgaaatccttgaggaaggtgatactctcactcccagggttgtacctccgagatgtctccagaagcatcacctcgatcgcagaggtcttcagcagggcaatctggtcctcccggctgagctgcaggaagccgggtagctgtttagcaaagtcaactatctcctgcacagagacgatggccagctcagtgaagtgggcaaagcgctgctgacgggcctcccggctatg

SEQ ID NO: 32517 - DNA, 501 bp, Homo sapiens
  misc_feature (1)...(501): n = A,T,C or G
aggattgatcaccgtccagagnggngttagaccaaccttagtctgggctgcagacaagttgggcagatgttcggggtcaggcaggaggctgcaacccttgaccttgaccaccggttcacactctctcaccagctactggttactacatcttccgtggggcgaattcccagaaaaacactttccgaaagaatccttctgaccccagagtggctggtgagctggttctctagggccatgggtgaggtggggcagctgggcttcctgggaactctccaccctgctgtctttccccagggcttgagaccatctctacagccacagggcggaaactgctggtgtctgggtggtggggtatggtccgccatcccaactatcttggagacctcatcatggctctggcttggtccttgccctgcggtgagtggcccatgtggatatgggtagggacatgtgaggggaagaggtggctcagcgaccacaggatgcctactttgggtatgn

SEQ ID NO: 32518 - DNA, 485 bp, Homo sapiens
  misc_feature (1)...(485): n = A,T,C or G
gggaattgatagccctcggannncacctgagttcctcggacanngcgnggaantccttcctaaaggaggatacgaagcgttttcggcttcctgcccggagctgtgcagcaaacagtcgacccccatggggctcagccttcccctgagtactagcgtccctgacagcgcggaatctgggtgcagttcctgcagtaccccactctacgatcagggtggcccggtggaaatcctgccctttctgtacctgggcagtgcgtatcacgcttcccgcaaggacatgctggatgccttgggcataactgccttgatcaacgtctcagccaattgtcccaaccattttgagggtcactaccagtacaagagcatccctgtggaggacaaccacaaggcagacatcagctcctggttcaacgaggccattgacttcatagactccatcaagaatgctggaggaagggtgtttgtccactgccaggcaggcattn

SEQ ID NO: 32519 - DNA, 490 bp, Homo sapiens
  misc_feature (1)...(490): n = A,T,C or G
gcagtctnnnnnnnnttttgaaaatcgatnagcactagtccagngnggnggaattccaggcaggtgtgaccatcaacctgcaggaatggctcaggctgtagagacctccccacccccggttctgggctgggaccctggctccagggccatgtccagggctctggtgtttgcctgggttggtgcaggttgatgtgctggctgcaggcaggtgtgaccatctctcgtgcctgccacctctttgcccccaggcttttttgctgtgagggagccaccagggggtgatttaaataggtttatttcttcatttacaagaggaatatatttggcttctctcttaagactctgagattcacaatcagcagctctaaaaaataaaggagcagtttggcttccggaaggaagaggaggcnnnnnnnnnnnnnnnnnnnnnnnnnnnnnnnnnnnnnnnnnnnnnnnnnnnnnnnnnnnnnnnnnnnnnnntntttttttt

SEQ ID NO: 32520 - DNA, 513 bp, Homo sapiens
  misc_feature (1)...(513): n = A,T,C or G
aggccttgatcaccanctcagngnnnncgctcgatccactactcagtgtggtgcaattccccagacacagacgatgtacctgtcccagctccagccggtgaccagaatgaggtggacacttcagaaaagaaacttctcgagcggctccctgagggtgacgtgccccaacatttgtgatcctcacgtgaccctagccctcatgattcctgaagctccaaggcgactgatgggcgctggatgaagaggcacatcagcttccctgggggccggtgtcatgttgggctcctggggcgggggcacggcctggcatttcacgcattgctgccaccccagatccacctgtctccactttcacagcctccaagtctgtggctcttcccttctgtcctccgaggggcttgccttctctcgtgtccagtgaggtgctcaaggatcggcttaacttaaagaagcccgccccctccccttctccgtctgtcccaagagggtctgctctgagcctgcgttcctagg

SEQ ID NO: 32521 - DNA, 455 bp, Homo sapiens
  misc_feature (1)...(455): n = A,T,C or G
agcgccggnnnnnaactgacttagancatagacgngccnggaattccccaagctcatccgagatgtctggggcatcgagggccccatcgatgccgccttcacccgcatcaactgtcaggggaagacctacctcttcaagggtagtcagtactggcgctttgaggatggtgtcctggaccctgattacccccgaaatatctctgacggcttcgatggcatcccggacaacgtggatgcagccttggccctccctgcccatagctacagtggccgggagcgggtctacttcttcaaggggaaacagtactgggagtaccagttccagcaccagcccagtcaggaggagtgtgaaggcagctccctgtcggctgtgtttgaacactttgccatgatgcagcgggacagctgggaggacatcttcgagcttctcttctggggcagaacctctgctggtn

SEQ ID NO: 32522 - DNA, 502 bp, Homo sapiens
  misc_feature (1)...(502): n = A,T,C or G
aggcttgatcaccgtccagagaggaggtagtatccctctgccttggngccagtagcccagccccagctctcccgggactgcccagctctccggggtccgccgaagctgccctgcaggagaccatgggctgcggcggggacttccgggtgtctgagaaagggaagcagaaagactgggaggccagggtcgcatccccctcgcattcagccgacccggctggcccccgcccgaagttgctggagccggagttggaagagggtcatttgcatgtgctaggagctgtcttccctgttcagaatgaaattggttaggacagagaaccgtgtctgagctaaccaagtggaacagaattccctatggtcaaattaagtgatctctttatttcgccatcctgattgaataatcttatcattttaaatagagaaggtctccaaggaatgtaaataatatgaatgcccacggatttgtatttactgagcgtctccttctccttctcttggct

SEQ ID NO: 32523 - DNA, 509 bp, Homo sapiens
  misc_feature (1)...(509): n = A,T,C or G
aggcttgatcaccnctcnnannnnccctcgaaccacagctccgagtggtgcaattcaagggcttcatctgaaatagggccatgatgattagctctctctttccttcctttggcttcattgctgtattccatgtgggtcttgatatcttgaaactggatgagatacccaaatagtcagtccctgaatataaatcatttccttgtacagaatcactgccaaactcagtatggttaaaagatttttaacacccagctgcagcattcactctggttagaattggccatttaaatttatttcacatatgtaagtatcatatcctttataatgcattcttaattgttgctcagttcttccagattgaattcctttaaaaaattccttatgtaatcttttaattctagttggaaaacatcacttgacagttgctgtttatacaggcatgcctcgttttattgtgcctggctttattgtactttgcagatactgtgtttttcacaaatggaagggtt

SEQ ID NO: 32524 - DNA, 498 bp, Homo sapiens
  misc_feature (1)...(498): n = A,T,C or G
agcacggagganncaggagcaagtcagcnanctaacggaangncgnggaanncgggaggtggtgggaagctgtggagctatggaaaggcctcagttagtgagtcaagctgtgatgtgtgtgtctgaacacaactggctcccttggtataccgggggctccctctccagatgggtgtgagtgcatggtcctactgtacacacaggtctcagtatctatatgtgtctcatttgttcccatgggtctctgtgtttggatacataagcatggatatccctgctcatacagcaggaactcaggatctgcatggtgtatgtccctgtctgtaaacatgggctccagcaagtggatatgtgcgggcctgcccgctcctgtccatccgcaggtcttccttcaggcctggctggtcaagggtcctggccaaagaggtaggtggtgagctcaagccggaggccccgagcataggagcgaagagtatagaagagggtgaggaagtcctg

SEQ ID NO: 32525 - DNA, 468 bp, Homo sapiens
  misc_feature (1)...(468): n = A,T,C or G
gtttggtccatttcagnnggggtcgagatcctatccaggggggaatccgctgcttcaggcagtgctcttcctcactgggttgctgtttggctcggtggtcatcttcctcctctgctaccgagagcgggtgctagagacacagctgagtgctggggcgagcgcgggcatcgctctgggcatcgggctgctctgcgggctggtggccatgctagtgcgcagcgtgggcctcttcctggtggggctgctgctcggcctgctgctcgcagctgctgccctgctgggctccgcaccctactaccagccaggctccgtgtggggtccactggggctgttgctggggggcggcctgctctgtgccctgctcactctgcgctggccccgcccactcaccaccctggccaccgccgtgactggtgctgcgctgatcgccactgccgctgactacttcgccgagctgctactgctggg

SEQ ID NO: 32526 - DNA, 486 bp, Homo sapiens
  misc_feature (1)...(486): n = A,T,C or G
gggggggnnnnnnagttgagtcatatcagtggcttcgtagtccatagtccagcgggcggaattctgagactgtggttcccggagcacgtaacttgagcatatgtttatgtgtgtgtatacggcaggtcctgggttaaagggacaggagctactgtcattattccaattcagtcactgaggaggtgaggctgagaggcattctcatgtctgaagaggatgggcttgcctgacccccgcccccgtgcccagcccagcccagcagcccaagcagttctccaggactcaggtttcagaccttcaacacttgccttgggagacaaacagcggtgcagcccttgcttgcaagccattccacattagacttcggattgatttatggcaggatccctgctgtgcgagaactgcagggggggtggggggcggctatttcttgctgctaactcaggcaggatgtgtctatatcctgtctcagtttatgtagctgct

SEQ ID NO: 32527 - DNA, 456 bp, Homo sapiens
  misc_feature (1)...(456): n = A,T,C or G
nacttggggactntcgtcagnngcggggaattcgtgttgtggagaatggaggtttgaaagcaaaaacaataacaaaggagaccagaactgccttctgaatgccattatgacttgactcagctgggaaccacgagaggacgagatgacatctcttcaggatggtgtacagacgtgggcggagtgtgcagggctggcgtgcaaggggtggggacacgttgcatccgtggtgctgtttgtgcaggtggcctccaggagggcagtttccagagatgaatttccttccccttgcccagcccaccactgcccagccctgtgggctctgaggctgacggagagagacctggtaggtcacctcgtcccttgtccctgggaaactccatgttaccagcatgttatcagcatggctccgaatcctatatccaccctccagccacaccccgggacactctggatcgn

SEQ ID NO: 32528 - DNA, 499 bp, Homo sapiens
  misc_feature (1)...(499): n = A,T,C or G
agtacggggaannaagggagcanttgcagnnagctacaggaangncgnggaancgncccatagagcccgaaggcgggggcgcgggagggcttctggctggggcgaagagggcttgagggctcagtcgggatgctgtgatcgcacgcggtaaacctccagtagatcaagaagctgtacaaagtgcccgacttcccctcgaaacgcctgcccaactggaggaccagagggttggaacagcgccggcagggcttggaggcttacatccaggtatgcgagagcacagttggttgccccccggccttctgtgccaggggtgtggcccagacagagaggtgtgggggcatggcagggagggaacccacaacttggggatgttattcaccacctcaagcatcaattttctgagtctaatataggtccaaacacccccctctggcttgttgaaaggactgaaagaggtaacggacacaggtagtcccagctccatgaaacccaggtn

SEQ ID NO: 32529 - DNA, 500 bp, Homo sapiens
  misc_feature (1)...(500): n = A,T,C or G
gggagtccccnagtncccccccctgagacccttnatagatggccgtaanncaggagccgcctgtagtcccagcaactccagaggctgagacaggagaatcgcttgaaccccagaggtggaggttgcagtgagctgagatggtgccactgcactccagcctgggcgacagagccagactgcatcttgtgggtgtaaaaaaaaaatttgtagtttgagagtcaactttttcctcacagtttctgaaaatgtggcccttttgatgctgattaaagctggttgtgattttaacaccttagtagccagaatcgagactgtcatggggacatttaaaatctcaccacacttgacaccattcacaagtagccatgtggctcagtctcctgagtgctcctgcagagtgcagctctgccaggcttttctctagataatctcgtgtgtgttactgtagcagtttgagtttaaacacaagagttcactcggttaacatgttctaaccagca

SEQ ID NO: 32530 - DNA, 473 bp, Homo sapiens
  misc_feature (1)...(473): n = A,T,C or G
cggagaanccgggnngnnccnaactgagnccccatacgagaccctagaacangcgnggaattcctggacgtggtgaaggttcgcctgcagtctcagcggccctccatggtcagcgagctgatgccttcctccagactgtggagcctctcctataccaaatggaagtgcctcctgtattgcaatggtgtcctggagcctctgtacctgtgcccaaatggtgcccgctgtgccacctggtttcaagaccctacccgcttcactggcaccatggatgccttccagaagatcgtgaggcacgagggcaccaggaccctctggagcggcctccccgccaccctggtgatgactgtgccagctaccgccatctacttcactgcctatgaccaactgaaggccttcctgtgtggtcgagccctgacctctgacctctacgcacccatggtggctggcgcgctagcccgcctgggcaccgg

SEQ ID NO: 32531 - DNA, 487 bp, Homo sapiens
  misc_feature (1)...(487): n = A,T,C or G
ggagtgtnnnatcgagatcatatcaatnngcggggaattncgttcctccccgcccgcccctgcccaccttccaagcgggcactgtgcaccccctggtggcagcatctgggattgcaagtgggtgccgcctgcggacaccccagtcggggaggcgcccaaggaggaggtgaattgctttcacaccaagctctgagcattgcctcaagacgccatacaggccgggggcggtggctcacgcctgtaataccatcactttgggaggctgaggcccgcagatcatatgagcttgaacgggtgcaggagcacttccctatcatgcccacaggaggcaggtagtgggagaagatacaccacgcacctcgcgttcagcactcctgccgagggggcttcctgaggggttacagaggggcccacgtgtccctccacctcctccctggcccaggctgcatagcctgagctgtgacacgccctgaagcttctggaccct

SEQ ID NO: 32532 - DNA, 501 bp, Homo sapiens
  misc_feature (1)...(501): n = A,T,C or G
ggtatgggtgcanncctggggnggacttaaaaanctaangcaannnncgnggaanncgggaaccatggggactgtgcacgcccggagtttggagcctcttctatcaagtggacctgattttggaggattaggagaagaagctgaatttgttgaagttgagcctgaagctaaacaggaaattcttgaaaacaaagatgtggttgttcaacatgttcattttgatggacttggaaggactaaagatgatatcatcatttgtgaaattggagatgttttcaaggccaaaaacctaattgaggtaatgcggaaatctcatgaagcccgtgaaaaattgctccgtcttggaatttttagacaagtggatgttttgattgacacatgtcaaggtgatggcgcacttccaaatgggttagacgttacctttgaagtaactgaattgaggagattaacgggcagttataacaccatggttgggaacaatgaaggcagtatggtacttgg

SEQ ID NO: 32533 - DNA, 491 bp, Homo sapiens
  misc_feature (1)...(491): n = A,T,C or G
naatagagaccctccgaannnccnnaactgagaccctaggacagngcgnggaattccagacaaagtgaccatcggcctgttgttctgggatggccgtggggaggggctccggctccttctgcgtgacactgaccgcttctccagccacgttggagggacccttggccagttttaccaggaggtgctctggggatctccagcagcatcagatgacggcagacgcacgctgagggttcagggcaatgaccactctgccaccagagagcgcaggctggattaccaggaggggcccccgggagtggagatttcctgctggtctgtggagctgtagttctgatggaaggagctgtgcccaccctgtacacttggcttccccctgcaactgcagggccgcttctggggcctggaccaccatggggaggaagagtcccactcattacaaataaagaaaggtggtgtgaaaaanaaaaaaaaaaaaaaaaaaaaaaaat

SEQ ID NO: 32534 - DNA, 494 bp, Homo sapiens
  misc_feature (1)...(494): n = A,T,C or G
gggttccnnagggggggnnaatcgaaaaccctnctcgtagaccactaggcagtgtggtggaattccagagagagaggtttcttcctttcagatcacccagtactgttccttatgcctggtgtccatcaggcaggaagcccaagccagagctggggcaccactgcaatccccccatcttgctgggactttgcctttttcttcctataaaagggacaacagtgctgtccctgactactgcaaaaccagggagaccaggaggttccttcccctgcccgcttcctggattcagagttaatttccctgaagtctcctggtggtagaggggaaggggctcatttgatgtcagcaggtacgaagggaagggttggagtgctgagaactgccccccacttgctgttctttttattgcagtggagttcacagggcccccacagaagcccccgaggctgggcgcacagtccatccagcccacagctaacctggaccggactgat

SEQ ID NO: 32535 - DNA, 490 bp, Homo sapiens
  misc_feature (1)...(490): n = A,T,C or G
cggggcccnnaggggnnnnnaattgagatccntatcgagngccgtggaattcactggatgtggtgagtctttgctggacagtccatggttccgcaggctcctaaaagccttccctgtgtgcccctgcagacctgttgccctggttctgctgctgtcttgggagctgctcttccccacctcccaccagaggcttgtccccttactactcccacacttgactccacccccttaattttcaggaagcagaaatatttctacaaagggggcctagtttgggatgagaacagctctgacggccggtatgtgaaggagaactgcaaacctctgaaggtcagtttctggctacccccagctgaactcatgccaaggagagaccccaggcactgggcagacatacagcagagacaggccaggccgctaaaggctgcctccttgatccagctctatgggaggcggcacccaagactgctgggtgctggcaatggggctn

SEQ ID NO: 32536 - DNA, 488 bp, Homo sapiens
  misc_feature (1)...(488): n = A,T,C or G
ggggcncnnggggnnnnnaatcgagtccactatcgagtgtcgtggaattccacctcccgggcacgtgagaagaacgtgcgtcctgtggttgctgggtggcgtgttctgcagatgtctgtcctgccgggcacgtgagaagaacgtgcatcctgcagttgctgggtggagagttctgcagatgtctgtcctcccgggcacttgagaagaacgtgcatcctgcggttgctgggtggagagttctgcagacgtctgtcctcccaggcacttgagaagaacgtgcatgctgcggttgctgggtggagagttctgcagatgtctgtcctcccaggcacttgagaagaacgtgcatgctgtggttgctgggtggagagttctgcagatgtctgtcctcccaggcatgtgagaagaacgtgcatcctgcagctgctgggtggcatgttctgcaggtgtctgtcctcccaggcatgtgagaagaacgtgaatgctgn

SEQ ID NO: 32537 - DNA, 429 bp, Homo sapiens
gccgtgttgcgtagggcgcctgtgcttgaggttgggggttgcgtcgctctctggtaaaggcgtgcaggtgttggccgcggcctctgagctgggatgagccgtgctcccggtggaagcaagggagcccagccggagccatggccagtacagtggtagcagttggactgaccattgctgctgcaggatttgcaggccgttacgttttgcaagccatgaagcatatggagcctcaagtaaaacaagtttttcaaagcctaccaaaatctgccttcagtggtggctattatagaggtgggtttgaacccaaaatgacaaaacgggaagcagcattaatactaggtgtaagccctactgccaataaagggaaaataagagatgctcatcgacgaattatgcttttaaatcatcctgacaaaggaggatctcctt

SEQ ID NO: 32538 - DNA, 530 bp, Homo sapiens
  misc_feature (1)...(530): n = A,T,C or G
gcaattgatcaccntcgcgangggctttgaatggcacttgcgtccaggcctcagagagctgtttgtttcgcttcttcaaaaactcctattctccacttctgctaaaggactggatgagaccaattgtgatagcaatatttgtgggtgttctgtcattcagcatcgcagtcctgaacaaagtagatgttggattggatcagtctctttcgatgccagatgactcctacatggtggattatttcaaatccatcagtcagtacctgcatgcgggtccgcctgtgtactttgtcctggaggaagggcacgactacacttcttccaaggggcagaacatggtgtgcggcggcatgggctgcaacaatgattccctggtgcagcagatatttaacgcggcgcagctggacaattatacccgaataggcttcgccccctcgtcctggatcgacgattatttcgactgggtgaagccacagtcgtcttgctgtcgagtggacaatatcactgaccagtntctgcatgcttcagtggtn

SEQ ID NO: 32539 - DNA, 535 bp, Homo sapiens
  misc_feature (1)...(535): n = A,T,C or G
ggatttgatacccctnnannnnncattgagcatcgtccgtgaggngcaattcgtctcctggagagatcctgttcatcccggtgaaatactggcattacgtgcgggctctggatttgagcttctcggtcagcttctggtggtcgtagccaggataggagctgaaagggcctgacatgcagacagcattcatctgttcactaatttcctgggtcctggaatctatagagacaagcaggactgaacctgtgtcctgaagagccttcactgcccagtggcagccctggggggctgagctccagcactggacaggcacagagcaggggctgcccaggaaggagcacactccaggccaggggtgcatggcagaggaaggtggggagagcccagaaggacattgcagacagacagcctgcatggggactctggcatcagaaagccgaatgtttttgggaaacgggtgggtcacacaggcaggggtgaaacatgggctctgagggtggctacctgattcaaccccggcgcgctgcgcacctgt

SEQ ID NO: 32540 - DNA, 490 bp, Homo sapiens
  misc_feature (1)...(490): n = A,T,C or G
tgagcncnnnaggggnnnnnaatcgagacccctatcgagtgtcgtggaattccagaccagtgggagagggaccgcaggggcatcaggcctttctcaacatgcgactcttaatttgggacggacagaacagccgtacagaccagtagttctcagcgcctttgcttaccctgggttgctcagaagacttactggttactggttccttcttcccttttgaaggacttaaaggagaagaaggaagttgtggaagaggcagaaaatggaagagacgcccctgctaacgggaatgctgtgagtgtctgctttgctcctgagccctggcagctaccgccccacaaaatttttcctgttctactttaaacatacctatatatgtgtgtgtatgtgtatatgtatagctttgcacagcggcagtatcgtagccaatgagctttacccgaggcgcgattattgctagttaaatatttataaaaatctttcgagcagcgcc

SEQ ID NO: 32541 - DNA, 569 bp, Homo sapiens
  misc_feature (1)...(569): n = A,T,C or G
ggcatgttccggggcnncnnnnnnnagggatttgatcncccctnnnnnnnnnnntttctgaccatcactccgngtggngcaattcgttntgaggggatttcagaaaaactcagatctgagaagaactgtggagcctgaaaaaatgccgcaggtcgcggttgatgtactgcagagaatgctgatttttgcacttgacgctttggctgctggagtacaggaggagtcctccactcacaagatcgtgaggtgctgagcttcagcagcccgctcctgagcacacttcctctgccagttacgataacgtgcgtgaggaggaggcgaccatgggaaagcccggggaacgctctggtcagccttttcctgtgaggatgaggtcggaaggtgcgcccactgcagtatcctgttccgcctctggaagtcctgcaccaatgtttgtcccactcactgtgacctcctcctgtgtggagnctccccttgctcctcctttcctgggtggggntcangctctagagctggccctgcctctcagccccccacatttttagaacacactgtagctgtgcctctac

SEQ ID NO: 32542 - DNA, 552 bp, Homo sapiens
  misc_feature (1)...(552): n = A,T,C or G
gggagagcagggctcccncnnggactcgagcatcctcgcgagggnaattgatgctcttataaaagatctctttgtagccatcctgttaaatttgtaaacaatctaattaaatggcatcagcactttaaccaatgacgtttgcatagagagaaatgattgacagtaagtttattgttaatggttcttacagagtatctttaaaagtgccttatgggaaccctgtccctcctaacaagtgtatctcgattaataacctgccagtcccagatcacacatcatcatcgaagtcttccccagttataaagaggtcacatagtcgtgtgggtcgaggattctgtgcctccaggaccaggggcccaccctctgcccagggagtccttgcgtcccatgaggtcttcccgcaaggcctctcagacccagatgtgacggngtgtgtggcccgaggaagctggacagcggcagtgggcctgctgaggccttctcttgaggcctgtgctcttggggtcccttgctttacctgtgctggaccagactgccttggggtccctctgn

SEQ ID NO: 32543 - DNA, 494 bp, Homo sapiens
  misc_feature (1)...(494): n = A,T,C or G
tgggtagggagggtaggggnnnaattgatttctatccctgtggtgcaattcgaacgtcacggccacggacaagagcaccggcaaggccaacaagatcaccatcaccaacgacaagggccgcctgagcaaggaggagatcgagcgcatggtgcaggaggcggagaagtacaaagcggaggacgaggtgcagcgcgagagggtgtcagccaagaacgccctggagtcctacgccttcaacatgaagagcgccgtggaggatgaggggctcaagggcaagatcagcgaggccgacaagaagaaggtgctggacaagtgtcaagaggtcatctcgtggctggacgccaacaccttggccgagaaggacgagtttgagcacaagaggaaagagctggagcaggtgtgtaaccccatcatcagcggactgtaccagggtgccggtggtcccgggcctggtggcttcgtggctcacggtcccaagggagggtctgggtcan

SEQ ID NO: 32544 - DNA, 548 bp, Homo sapiens
  misc_feature (1)...(548): n = A,T,C or G
aggtnntgaagaggccnnnnnnnaatttgaccctcgaaccactgntccgagtggnggaattctcctggtggcctgtgatgtctgcctgtgtccctacacctcccatggtcactgcggtgagttccctccctcccaccagccctgctgccacccacactcctactgcccacttctcaacagggtggggacaggccagggcccaaggtgctccccaaaacccagtcatctgtcctgaagggctcctgagtgaaaacggagcattccgggctgaggagagccgccagcggctggctgaggtggcattggcgtatgccaaggcaggatgtcaggtggtagccccgtcggacatgatggatggacgcgtggaagccatcaaagaggccctgatggcacatggacttggcaacagggtatcggtgatgagctacagtgccaaatttgcttcctgtttctatggccctttccgggatgcagctaagtcaagcccagcttttggggaccgccgctgctaccagctgccccctggagcacgaggcctggctctccga

SEQ ID NO: 32545 - DNA, 534 bp, Homo sapiens
  misc_feature (1)...(534): n = A,T,C or G
nattgatcgcctcgnggnngcattgagcccgtccgngangggcaattccttcaacaaaaagatgtatgaggagttcaagcagctggctctggaggacgccaaagaaggctacagatatggtttggagtgcctttttcgatactacagttatggcctggaaaagaagttccggctggacatattcaaggattttcaggaggaaacggtgaaggactatgaagctggccaactgtatgggctggagaagttctgggccttcttgaaatattccaaagccaaaaatttggacattgaccccaaactgcaagaatacctcggcaaattccgacgtcttgaagacttccgagtagatccccccatgggtgaggagggcaaccacaagcgacactcattggtaacaagaggtggcggcggtgagggcaagaagcggtgcccctcccagtcttccagcaagcctgctgccatgatcagncaaccccctacaccacccaccggncagcctgtncgggaagatgccanatggacaagccagcn

SEQ ID NO: 32546 - DNA, 542 bp, Homo sapiens
  misc_feature (1)...(542): n = A,T,C or G
aggccntnaagagccccnnnnnnnattgacatcgaaccacgtccgagtggggaattcgcggcatcacggccgtgctaacagtggactcggaggagcccagcttcaaggcggggcctggggtcgaggatctatggcgcctcttcgtgccagcgctggacaaacccgagacggacctactcagccatctggaccggtgcgtggccttcatcggtcaggcccgcgctgagggccgtgcggtgttggtgcactggtctctttttcagtcatgcaggagtcagtcgaagtgtggccataataactgcttttctcatgaagactgaccaacttccctttgaaaaagcctatgaaaagctccagattctcaaaccagaggctaagatgaatgaggggtttgagtggcaactgaaattataccaggcaatgggatatgaagtggatacctctagtgcaatttataagcaatatcgtttacaaaaggttacagagaagtatccagaattgcagaatttacctcaagaactctttgctgttgacccaactac

SEQ ID NO: 32547 - DNA, 489 bp, Homo sapiens
  misc_feature (1)...(489): n = A,T,C or G
agggccgnnaggncccccctagtgnactttagnnggcngngancaccgcnccattnatgccaagggctgccctgcactgtttctgcaatatgtggagtatgctgaggcgatcttgctgggaatgattataagtgtgtgtgtggagggggagtgggtattacatgcattgctgaagagccatcctggtgttcctcattcctcccaccttcccgtggtcattttaattacggggcagtgtcaccgcatagggaggaaactcaaagccgaaagcaaaattccaggcctgattctggcttttgaggttcctggttcttgaagccaggcctgacccgactctcagatggggtcagtcccgtcgctttgcagactgaccctggaaatctacaaaatgcagattttcctgatttcctcttctcttgcccagtttttttttttttttttttttaaagcctggtatggaaaacaaattttttttttccccccttccan

SEQ ID NO: 32548 - DNA, 532 bp, Homo sapiens
  misc_feature (1)...(532): n = A,T,C or G
ngcaattgatcagcgtcagngnggggatttgattgccatgggctctccttgcatcagccaagcttcttgaaaggcctgtctacacttgctgtcttccttcctcacctccaatttcctcttcaacccactgcttcctgactcgctctactccgtggaagcacgctcacaaaggcacgtgggccggggcccggctgggtcggctgaagaactgcggatggaagctgcggaagaggccctgatggggcccaccatcccggacccaagtcttcttcctggcgggcctctcgtctccttcctgggttgggcggaagccatcacctggatgcctacgtgggaagggacctcgaatgtgggaccccagcccctctccagctcgaaatccctccacagccacggngacaccctgcacctattcccacgggacaggcttgacccagagactctggaccccggngcctcccctgagtagagacccggcctctgactgatggacgccgctgacctggngtcagacccgtgggcctgacccctg

SEQ ID NO: 32549 - DNA, 493 bp, Homo sapiens
  misc_feature (1)...(493): n = A,T,C or G
gggccnnnagggcccctctagtggtcctaagtggcccggaannnncnnagagcgaggggcacagaagacaaaactgagctacaaggacaccaagtatggagtaaggaaggagtggggtggaggaggcaggggagaaccctgcttacccctcaccttcccctaccgtaggctgattgtcagcaaacctgagcgcaagatggtcaagggctccggcttccacctggacctgctgctggtagtaggcatgggtggggtggccgccctctttgggatgccctggctcagtgccaccaccgtgcgttccgtcacccatgccaacgccctcactgtcatgggcaaagccagcaccccaggggctgcagcccagatccaggaggtcaaagagcagcggatcagtggactcctggtcgctgtgcttgagggagagagaaagctgngtcacgtcttcaccatnctcctgcccctcacccccggcccctttcccttccccttg

SEQ ID NO: 32550 - DNA, 486 bp, Homo sapiens
  misc_feature (1)...(486): n = A,T,C or G
gcggccgcccctggggngcctagnnganctnggaaancgcnngnggncctcagnggagacaacagtaaggtcacatcagaagtgaaccgactgctggccgagctgcctgcctctgtgcatgccctcacaggcgtggacctgtctaagatacccctgatcaagaaggccactggtgtgcaggtgtgaggctcctgcaggcccactctcttcagcagccacccggccctccctccagcacccgttttaatcccacagaacaacgggaacgttactgactctggtgccttatctcgaagggaccagaagtgctgcgtgttcaagccatctctggctgtcttcctgtctctcctgtctgtccacctcctcctcttcctctcctttaccccactttcactgccactttcatcaggtttgtgtctcatctccctgcgtgtcttttcctttggctgtctttttctttcccccatgcacatcatgtagattaag

SEQ ID NO: 32551 - DNA, 424 bp, Homo sapiens
gcttttgagagggggcttctgaagcccagagaacttcatgggccttggacgggctcagcagagaggtcggcctgaccaccctggaccagtatgggtgcctatcggtaaaggccagcttttccacccagcctgccactgtggggtggggcctgcctatacccctgccctcccagctgttctccttgcatccagaagcccctgcctgatgcctggtgagaaggccatggccaaggagggctcggccctgaggctgtgtgtggcctgtctccctcctctgcagggtttcagcagcctgaggctccggcccattcgcacgctgagctctgccgtggagcagctgaggggctgcagggtggtcggggtcatcgagaaggtgagtgagtggacactcgccttgcaggagggagacagtgtatgcaatttg

SEQ ID NO: 32552 - DNA, 468 bp, Homo sapiens
  misc_feature (1)...(468): n = A,T,C or G
catcgagaatcgagagccctagtccagngtggnggaattcgcagcagaaaaagacgagcttttgttatcagttccacggggttgccctagagagaaaacaggcaaactcacaggttagaagacatacagaaacagggctggtgtgtcccccatagtctgcatgctgtgccggaacattctttggcagaaggagcctccggctggggggagctcccctggaggtgggactggcccttgcacctgcctgacccttgagctccaggctcctgccagctggaggtgaaactgtgcttgtatccccagccacgaagagctggaccagcttcaagtacatgtccacagcaacatgcaggaaggcctcttccctgatggccgcgtcttcatggaagtaggagagaagactagaggtaaagacatagtgacaaatggctacagactgctggaaaggtagcaggtgatgccaaggga

SEQ ID NO: 32553 - DNA, 490 bp, Homo sapiens
  misc_feature (1)...(490): n = A,T,C or G
cccccccccaattcagtgtcctagnnantcntcgnacgngcggcggaattcctcctggactcaaatcatcctctacctctgcctccatgagtaactggaactacaggtcaacacagattctcggaattaaacacttccatgtcccagaggatcaaagtcacttgcaaaaatacctcaaaatgtgtttgtcaagaaattacactttctcttgattttgtggaccactttctaatttccaacccagacaaaagcctcctagtgaagctggtctttcctagcacatccccctacccccccagccactgtcccatccctggatggcctgtccacagagagcactgtctgtgtggccactgggggaggcagctgcatcccagagatgatggtgtccagggcatgacgaggaagctctttgtgtggcctggagacgtcccgggagctggctggcgcccaccttctctcacttccttaccaccttctttcttgagtg

SEQ ID NO: 32554 - DNA, 471 bp, Homo sapiens
  misc_feature (1)...(471): n = A,T,C or G
gggccaggcttagatacccctnnttttgagaccatagtcagtgtggtggaattccaattgtaatgatgggccgacaccagtacataaatgaagacgagtatgaagtaaatttgaaagactttgagccacagcccggtaagggttctccccccccgggggctggtgtgggtttcagactaagaaacaagtggtctggggctgggaggggcagccccagggtcaagtgccagctcctctctctccactggccgacctgtggaaccaggagcaatagcattccataacctacgagttcttaacagatccttacatcctttgtaacctgtgagatcttcaaggagagaagcttggacatgtgtgcagggtgattgagactcatggttgtgagggcagtggctctgaggctcagtcagggtgtgggcctccttagctccaggtgggcgtgtagctcaggtcctggcttccctgcga

SEQ ID NO: 32555 - DNA, 483 bp, Homo sapiens
  misc_feature (1)...(483): n = A,T,C or G
ggcggcnnnaatcgagttcatagnccatgtggnggaattccagacagtattctggggttcacctgaggtcagcagtgtgaagatgaccagtgcctttttagcatgacgactttggaccatgtgattgccacccaccagtcagaatgggtctccttcaatgaagagccaccctttcctgcccactcgcaggggggcacggaagagcacctcccaggactgtcatcttccccagaccagtccgagagctcctccggggagaaccatgtggtggatggaggctctcaagaccattcccactcggagcaggatgactcctctgaaaagatgggcctcatctctgaagcagcttccccacctgggagccctgagcagcccccacctgacctggcctcggccatcagcaactgggttcagtttgaagatgacacaccctgggccagcacatcttcacctcatcaggaaacagctgagacagccctacca

SEQ ID NO: 32556 - DNA, 494 bp, Homo sapiens
  misc_feature (1)...(494): n = A,T,C or G
agggtgccccaggtgtctcccccagggangcctagggangccaggaaggncgnggaannnagcgggcagcgcgtggacgtcaaggtggtgatgctgggcaaggagtacgtgggcatgactaacctggtggagcgctacgtgcacgaccgctttctggtggggccttatcataacaccatcggggccgccttcgtggcctacgtgatgtcggtcggagaccggactgtgacattaggtatttgggacacagcaggctctgagcgctatgaggccatgagtagaatctactatcggggtgccaaggctgccatcgtctgctatgacctcacagacagcagcagctttgagcgagcaaagttctgggtgaaggaactgcgcagcctanaggagggctgcccaatctacttatgtggcaccaacagtgacctgctggaagaagaccggaggcgtcgacgtgtggacatgcacgacgttcaggactatgcagacagtag

SEQ ID NO: 32557 - DNA, 486 bp, Homo sapiens
  misc_feature (1)...(486): n = A,T,C or G
gaggccnagaggccccaactgagatcatgatggtctcggaancacccacgngaacgggaaagcacccagctcccacccgagcttcagatccgcaggctcaattcaagagcccagaggcacatgtcagtgcctcggaccgtggtccaaggggagtcctggggctgggggccttccccgggccgcgccgcactcccggctcacagcacgctcgccgcctgcagggacagatcacctctgggggagccccactcagggcgtaaatacatttggttcactgtgagattctgggggtactgacagcggcaaacactgtcctatggaagtcacgtgacatgagggcaaagatggtgacggcagcactggttataagaaaagaaaatgaagacagccgaaaacggctcataacagggacatgacgaaggaagggacactgtatagtgagcaggtttacaagatgcttccgggataagcaggagggaaaaggcg

SEQ ID NO: 32558 - DNA, 500 bp, Homo sapiens
  misc_feature (1)...(500): n = A,T,C or G
agagtcnccnaggaggcccccaatgagacccccaagnngngctacgnaagngcggnggaannnngncagnaccggggcaacggcaccagctccaagggctccgaccaggccatcatcacgctccgcgtgcgcagccacctggccgccctctggcccttcctggacatcgtggctgaggtgctggtgctggtcaccatcatcttcatctactagaagcgccggaagcccgaggacgtcctggatgatgacgacgccggctctgcacccctgaagagcagcgggcagcaccagaatgacaaaggcaagaacgtccgccagaggaactcttcctgaggcaggtggcccgaggacgctccctgctccgcgtctgcgccgccgccggagtccactcccagtgcttgcaagattccaagttctcacctcttaaagaaaacccaccccgtagattcccatcatacacttccttcttttttaaaaaagttgggttgtctccattcacg

SEQ ID NO: 32559 - DNA, 483 bp, Homo sapiens
  misc_feature (1)...(483): n = A,T,C or G
ggtggcnnnnaaggagttcgtagccatngtggnggaattcccaaggacaggtaccaacctcctcccctactgacacttctcaaccaagaaaacttcctttccattccctcaccagctgggcacccctatagctgcttaaatactttccaaatccagctgcactcctagccagggaaggtgaagggatgcacagaggtgggggaggggtactgtgcagggtactcagcatccctgaccaccaggtgccaatgatcagcggacgtggtctggggcacacaggaggcaccttggataagctggagtctattcctggattcaatgtcatccagagcccagagcaggtacggggcgccacggatcagtcattgatccaggttgatgatggagaccctggccagaatcactaaaagatcactggtggatcattagggtcactaatgagaacactggtcaaggttactcatgagtcactgggcctgggcn

SEQ ID NO: 32560 - DNA, 467 bp, Homo sapiens
  misc_feature (1)...(467): n = A,T,C or G
aatgagnattgagagccactggccgngngcnggaannccagcgaggaaaacatcaagaacaattttgtgctcatatatgagctgctggatgagattctagactttggctacccacagaattccgagacaggcgcgctgaaaaccttcatcacgcagcagggcatcaagagtcagacaaaagaagagcagtcacagatcaccagccaggtaactgggcagattggctggcggcgagagggtatcaagtatcgtcggaatgagctcttcctggatgtgctggagagtgtgaacctgctcatgtccccacaagggcaggtgctgagtgcccatgtgtcgggccgggtggtgatgaagagctacctgagtggcatgcctgaatgcaagtttgggatgaatgacaagattgttattgaaaagcagggcaaaggcacagctgatgaaacaagcaagagcgggaagcaatcaat

SEQ ID NO: 32561 - DNA, 432 bp, Homo sapiens
cgtagctcctggggcctcctggacggcagcgcctgccccgcgtggcccagggtgcaaagaggtctctgtgaggggcggcgctcactcgggcggtgaggaaagggtgtctgtctcgtgggatcccacggagtcaagtgccggctctgcccctcgttgggccccttccgcggcttctgtacctcagtcctgcagctcctcccgcagcctgtcctacagcacaaaggctctggagcaaattccagctctgcctcccaccagctctgtgtccttggacaaggtacaaggcaccttttgtaatacactgtctctccatgtccttggctcactctctcaggcgaggcctcccaagcctctttacctccgcgcacatgtgcacagagctcaccggaactcctcttacacatttttgattattcgttgctggtacctaga

SEQ ID NO: 32562 - DNA, 499 bp, Homo sapiens
  misc_feature (1)...(499): n = A,T,C or G
cgggccgnnnnnnnngnatctgagaccctcggcanngctggannccctaggccttgacgggaagttaaaggaccccgagaagggaccagtccccactttccagccgttccagaggagcatatctgctgatgatgacctgcaagagtcatccagacgtccccagaggaaatctctgtatgagagctttgtgtcttctagtgatcgacttcgagaactaggaccagatggagaagaggcagagggcccaggggctggtgatggtccccctcgaagctttgactggggctatgaagaacgcagtggtgcccactcctcagcctcccctccccgaagccgcagccgggaccgcagccatgagaggaaccgggacagagaccgagatcgggagcgggatcgagaccgggatcgagacagagacagagagcgggacagggatcgggatcgggatcgagatcgagaccgggaacgggacagggatcgggagcgggatcgagaccga

SEQ ID NO: 32563 - DNA, 483 bp, Homo sapiens
  misc_feature (1)...(483): n = A,T,C or G
caatgaaaccatcgagngccgatgagaccgtagaagancgnngaaaatgaggggcagctggccccttggccatggcctggcccctcacccccagcccctcctctccctcttctgacctgctttggcacagcaaagaaaatgatgcatcagaaagtctccattgggttaaaggagaaagaaagagtggttggggtggggagggagtccaagagaggaggtggagggttaacaggaccaagacagagcagccagtgccccggcggtggctacctgagcggtgcttcctggctacacacacactctgtgggctccaggtgctgcctggccccaggaggggtgggtggggcatgcttgggccccacacacagcctggaaccctcgaaggaacagcagataatggacactgcacagactgaagctgccctttctgtgccaggtcaggccaagggctctctcctgccagctgccctcggactatactan

SEQ ID NO: 32564 - DNA, 494 bp, Homo sapiens
  misc_feature (1)...(494): n = A,T,C or G
aaatagatacccatcggannnncccactgataccatcggaagngccgnggaantcctgcatgatgagccccatgatcacaagctctcagatcaacgggaggccctgagtcatggccagaaccctctgcccatctactgtgccctcaacaccaaagggcagagcctgaccacttttgaatttggggagtggtgcgagttctctccctacgaggtcggcttccccaagtacggggccttcatcccctctgagctctttggctccgagttctttatggggcagctgatgaagaggcttcctgagtcccgcatctgcttcttagaaggtatctggagcaacctgtgtgcagccaacctccaggacagcttatactgggcctcagagcccagccagttctgggaccgctgggtcaggaaccaggccaacctggacaaggagcaggtcccccttctgaagatagaagaaccaccctcaacagccggcaggatagctgagt

SEQ ID NO: 32565 - DNA, 481 bp, Homo sapiens
  misc_feature (1)...(481): n = A,T,C or G
cactgataccctacgangcccgatgattccatcgtagctnctagnccagacgccatgggtcatttcacagaggaggacaaggctactatcacaagcctgtggggcaaggtgaatgtggaagatgctggaggagaaaccctgggaaggctcctggttgtctacccatggacccagaggttctttgacagctttggcaacctgtcctctgcctctgccatcatgggcaaccccaaagtcaaggcacatggcaagaaggtgctgacttccttgggagatgccataaagcacctggatgatctcaagggcacctttgcccagctgagtgaactgcactgtgacaagctgcatgtggatcctgagaacttcaagctcctgggaaatgtgctggtgaccgttttggcaatccatttcggcaaagaattcacccctgaggtgcaggcttcctggcagaagatggtgactggagtggccagtgccttgt

SEQ ID NO: 32566 - DNA, 469 bp, Homo sapiens
  misc_feature (1)...(469): n = A,T,C or G
ggagggggggattggagcctctgagagcgtcnggaannccgnngaccctgnaagtggctgcggcggcaagatggcggaactgcgcgtgctcgcacctttcaagattgtcatcgactactccgtgaagatccgagtgaagcctgacaggaccggtgtggtcactgatggcgtgaagcactccatgaaccccttctgtgatatcgcggtggaggaggctgtgcggctcaaggagaagaagctggtgaaggaggtcatcgccgtcagctgtgggcctgcacagtgccaggagacgattcgtaccgccctggccatgggtgcagaccgaggtatccacgtggaggtgcccccagcagaagcagaacgcttgggtcccctgcaggtggctcgggtcctggccaagctggcagagaaggagaaggtggacctggtgctgctgggcaaacaggccatcgatgatgactgtaaccag

SEQ ID NO: 32567 - DNA, 465 bp, Homo sapiens
  misc_feature (1)...(465): n = A,T,C or G
natcgagncctcgagnaccactaggccgtgtggtggaattctgagctctgaccactgccctgcgggtgcagtcttgagtgtggcctctgcgcctgcaaaacagtgcccacctctgtgcacccgcttcctacctgagttcgcaggcacccagctcaagatccttcgcttgctagttcctctcgaacaaagtcctgtgttggagcaatcgacgctgcagcacaacaatcaaacccgggtacagacatgccaaaacaaagcccaagtgcgctcaaccaggcctcagcccagtcaggttggctctagccgaggccagaaaaacctgaagagctactttcagccctcccctagctgtacccaagcctctcctgacatagagctgcctagcctaccactgatgagcgccctcatgagcccgaagactccagaagagaaggcagtggccagagtgatgaatgggcaagccan

SEQ ID NO: 32568 - DNA, 492 bp, Homo sapiens
  misc_feature (1)...(492): n = A,T,C or G
gggatgtgccngnnnncnnnnnnaatcgatgaccctattcgagtgccgtggaatncgaacgcgggtccacgcgtgtgatcgtccgtgcgtctagcctttgcccacgcagctttcagtcatggcctccggtaacgcgcgcatcggaaagccagcccctgacttcaaggccacagcggtggttgatggcgccttcaaagaggtgaagctgtcggactacaaagggaagtacgtgggcttctttttctaccctctggacttcacttttgtgtgccccaccgagatcatcgcgttcagcaaccgtgcagaggacttccgcaagctgggctgtgaagtgctgggcgtctcggtggactctcagttcacccacctggcttggatcaacaccccccggaaagagggaggcttgggccccctgaacatccccctgcttgctgacgtgaccagacgcttgtctgaggattacggcgtgctgaaaacagatgagggcattgc

SEQ ID NO: 32569 - DNA, 481 bp, Homo sapiens
  misc_feature (1)...(481): n = A,T,C or G
caattgtacccttcgangcctgaatatcgcgcttgaagncgcccaacttcattccgtggggccccgccagcatccaggtggccctgtcgaggaagtctccctacctgccctcggcccaccgggtcagcgggctcatgatggccaaccacaccagcatctcctcgctcttcgagagaacctgtcgccagtatgacaagctgcgtaagcgggaggccttcctggagcagttccgcaaggaggacatgttcaaggacaactttgatgagatggacacatccagggagattgtgcagcagctcatcgatgagtaccatgcggccacacggccagactacatctcctggggcacccaggagcagtgagtcccccaggacagggaccctcatctgccttactggttggcccaagccctgcctgactgaccaccccctcagagcacagatcagggacctcacgcatctctttctcatatacatggacn

SEQ ID NO: 32570 - DNA, 513 bp, Homo sapiens
  misc_feature (1)...(513): n = A,T,C or G
ggggctcccnnncatagacttcgtccacgtggaggaattcgggctagcaggtgtgtaaacagagggttccatcaggctggggcagggtggccgccttccgcacacttgaggaaccctcccctctccctcggtgacatcttgcccgcccctcagcaccctgccttgtctccaggaggtccgaagctctgtgggacctcttgggggcaaggtggggtgaggccggggagtatggaggtcaggcgggtctgagcccacagagcaggagagctgccaggtctgcccatcgaccaggttgcttgggccccggagcccacgggtctggtgatgccatagcagccaccaccgcggcgcctagggctgcggcagggactcggcctctgggaggtttacctcgcccccacttgtgcccccagctcagcccccctgcacgcagcccgactagcagtctagaggcctgaggcttctgggtcctggtgacggagctggcatgaccccggnggtcgtccatgccag

SEQ ID NO: 32571 - DNA, 484 bp, Homo sapiens
  misc_feature (1)...(484): n = A,T,C or G
nctcgagactcgtagtccacgtgtggcggaattccagatcacccagcgcaagtgggaggcggcccgtgaggcggagcagtggagagcctacctggagggcacgtgcgtggagtggctccgcagatacctggagaacgggaaggagacgctgcagcgcgcggaacacccaaagacacacgtgacccaccatcccgtctctgaccatgaggccaccctgaggtgctgggccctgggcttctaccctgcggagatcacactgacctggcagcgggatggcgaggaccaaactcaggacaccgagcttgtggagaccaggccagcaggagatggaaccttccagaagtgggcagctgtggtggtgccttctggagaagagcagagatacacgtgccatgtgcagcacgaggggctgccagagcccctcaccctgagatgggagccatcttcccagcccaccatccccatcgtgggcatcgttgctggc

SEQ ID NO: 32572 - DNA, 502 bp, Homo sapiens
  misc_feature (1)...(502): n = A,T,C or G
ngtggganaannnnnnnactcgagactcgtattccgtgtggtggaattcctcgtaattacattctctcggccagcgcctccgcgctctggaatgatgaagtggacaaggccgagcatgagctccgcgtggcccagacagagtttgaccggcaagcagaagtgacccgtctcttgctggagggaatcaacagcactcacgtgaaccacctgcgctgcctacacgagttcatcaagtgtcagacaacctactacgcacagtgctaccgtcacatgctggacttgcagaaacagctgggcatatttcccggcaccttcgtgggcaccacagagcccgcctccccacccctgagcagcacctcacccaccactgctgcggccactatgcctgtggtgccctctgtggccagcctggcccctccgggggaggcctcgctctgcctggaagaggaggccccccctgccagtgggacccgcaaagctcgggtgctctatgactacgagg

SEQ ID NO: 32573 - DNA, 483 bp, Homo sapiens
aattgaattttcagtccactatccgtgtggtggaattccttgggtgtccctgggtggtcgggtccccgagttgggaggggcggaaggctgaacctccagcttgagccggacaagccgattcccagcgttgagagggtagagatgaactgtgtgtgaggccaaactggatcggtcaacatggtcttccccctccccactccccaggagcccatcatggcgacgccccctaagcggcgggcggtggaggccacgggggagaaagtgctgcgctacgagaccttcatcagtgacgtgctgcagcgggacttgcgaaaggtgctggaccatcgagacaaggtatatgagcagctggccaaataccttcaactgagaaatgtcattgagcgactccaggaagctaagcactcggagttatatatgcaggtggatttgggctgtaacttcttcgttgacacagtggtgtgagtgtctacccgcccctct

SEQ ID NO: 32574 - DNA, 516 bp, Homo sapiens
  misc_feature (1)...(516): n = A,T,C or G
agggccgnnnnccttttgatttcgcaccacantccgtgtggtggaattcgcggatgaaggccagggacccgcggcgctctccctgtggtcaggaagcagcccggagaccctaaaactccattggcctcatgtccagaactgaatcaggttcagctcgtggaagacattcaggatccggtctcgagacttctgggccgaccgtctcatgaggaccctgctgaggaacttcctgtcgaagtgggaccacctgtagggacagaccttgggtgtgagcctcaggcgcgtttaaaatgagggaagcagcccctgccacacgcccaggccgtccgccgttctcccgcctgtcctgttggatggaggccgttagacgcatatgaaactgcatgccgcctcctccagagggtggctcaggacacgcctaacggaattagagtattcgctggttatccggatcagaagggacggtggcctggccggacttagaggaaactctggggcacaaggaggtgatgcctg

SEQ ID NO: 32575 - DNA, 516 bp, Homo sapiens
  misc_feature (1)...(516): n = A,T,C or G
tgggtnnnnnnnaatagatttcgaccactatcagcgaggtggaattctgtataaacatgcctaaaccctgtgccttgagtgtgcacgctgacttattacaaaaggacagggctggctgacctgtccctatcagtcccaagttatgcaccctgtgccccgggaagggggcggggaccctatgctggtggtgtggcatcacaggcccggggcagggagtgctgtgtaaacctgggatgtacagccgcattcccccactccctgtgcatgctgggcttggccccacattatgccaagggaagcgggacctcttttgtcattggccatcctagccacccctccctgccttgtgcctgcatgaggttgggagacttgatgaataaagaatccctgaaggactctgttccttcttcaaaagctttaaggaagcatggtttgtatgagaaatggctaatcagaaagggatgatgtttcataggtatgaaagatgggcaaaagatactatntcatggagaagga

SEQ ID NO: 32576 - DNA, 512 bp, Homo sapiens
  misc_feature (1)...(512): n = A,T,C or G
agggtnccncnccatagacctccntccacgtggtggaattcggaagtgacatcgtctttaaaccctgcgtggcaatccctgacgcaccgccgtgatgcccagggaagacagggcgacctggaagtccaactacttccttaagatcatccaactattggatgattatccgaaatgtttcattgtgggagcagacaatgtgggctccaagcagatgcagcagatccgcatgtcccttcgcgggaaggctgtggtgctgatgggcaagaacaccatgatgcgcaaggccatccgagggcacctggaaaacaacccagctctggagaaactgctgcctcatatccgggggaatgtgggctttgtgttcaccaaggaggacctcactgagatcagggacatgttgctggccaataaggtgccagctgctgcccgtgctggtgccattgccccatgtgaagtcactgtgccagcccagaacactggtctcgggcccgagaaacctcctttntcaggct

SEQ ID NO: 32577 - DNA, 444 bp, Homo sapiens
  misc_feature (1)...(444): n = A,T,C or G
ggagccctggctgtcccctctccctcagtccttcctgactgtctccagctgggaggtggtctctgtgtgccactcctctgtgtctctattacagttgtgtctctctcatcctgtctctttttcccttgtttctctgttcctgttaatgtgtttctccccatggtcctatttctctcactctgacctctctctcttagtcccctttagctgtcttctatccccagctcctaactgggactctgtgtctatgcagggggccagcacccctgggttatctggggctaagggaagggacttcatttccaggggccacagccaagcccagagtcccccagcggctcgcatgtcagcccagaccccagggtccttggcctaagagaggagcagtggaggggcccaggctctgagctccacaggtctgagcagggagcaactcangccccn

SEQ ID NO: 32578 - DNA, 496 bp, Homo sapiens
  misc_feature (1)...(496): n = A,T,C or G
caatagaaacccatcgcannnnncnncnattgagnagcaataggaagcgccgcggnanttttggcgcaacatccacggcatcacccagcacatgtttattgtgcgcaacgacatcattctggcggccaagctgatccacacgctggatgacaggacacagctttgggcctcagaaccagggacgcctcccctgcccacgagcctgccctcgcaaaacccgatcttgaagaatatcaccgactacctgatcgaggaagtaagcgccgaggaggaggagctgctggggagcagcgggggcgctcctcctgaggagcctcctaaggaagggaacccggcagagatcaacgtggagcgggatgagaagttgattaaggtcttggacaagctcctcctttacctgcgcatcgtgcattccttggattattacaacacctgtgagtaccccaacgaggacgagatgcccaatcgctgtgggatcatccacgttcgggggccg

SEQ ID NO: 32579 - DNA, 547 bp, Homo sapiens
  misc_feature (1)...(547): n = A,T,C or G
agtnnnatgggaggccnnnnnnncaattgatactcgtccacactccgcgtggtgcaattctcgatacttggtaatagaagtaataattaaaagtagggagatttgcgtgctctttgacagtatcataagttctgtttgggttagggaactttgatgctcatattcatggttcagccttccctctgtagaagtgctaataatttttactatccctgtgattttatattgagagggctcttaggtatgaaattttcaaaagatttgcctcctgtaattttcttaccctttcttctggcattctcttttaatctaggacttttccactttattttattttaagttgcagggtacatgtgcaggatgtctaggtttgttgcataggtaaacgtgtgccatggtgggtttgctgcacctattgacccatcacctaagtttaatctaggattcttcttcctggttgttaaaactccttcatcctacctaccattactctcaccagccaccccactcttagtgcattccactgattactgacaaaataatcttt

SEQ ID NO: 32580 - DNA, 487 bp, Homo sapiens
  misc_feature (1)...(487): n = A,T,C or G
agcggctcctaatgagatcctacgnagngngcnggaantcaggaggtcccccacggcccttcaggatgaaagctgcggagctgaccttggccgtgctcttcctgacggggagccaggctcggcatttctggcagcaagatgaacccccccagagcccctgggatcgagtgaaggacctggccactgtgtacgtggatgtgctcaaagacagcggcagagactatgtgtcccagtttgaaggctccgccttgggaaaacagctaaacctaaagctccttgacaactgggacagcgtgacctccaccttcagcaagctgcgcgaacagctcggccctgtgacccaggagttctgggataacctggaaaaggagacagagggcctgaggcaggagatgagcaaggatctggaggaggtgaaggccaaggtgcagccctacctggacgacttccagaagaagtggcaggaggagatggagctctaccgcca

SEQ ID NO: 32581 - DNA, 519 bp, Homo sapiens
  misc_feature (1)...(519): n = A,T,C or G
agggcngnnnnnntttagatttccgtcccctagtcagagtggtggaattcccaccagctacatccagctccctgaggcagagttgagaatggagagaatgttacctctcctgactctggggctcttggcggctgggttctgccctgctgtcctctgccaccctaacagcccacttgacgaggagaatctgacccaggagaaccaagaccgagggacacacgtggacctcggattagcctccgccaacgtggacttcgctttcagcctgtacaagcagttagtcctgaaggcccctgataagaatgtcatcttctccccactgagcatctccaccgccttggccttcctgtctctgggggcccataataccaccctgacagagattctcaaaggcctcaagttcaacctcacggagacttctgaggcagaaattcaccagagcttncagcacctcctgcgcaccctcaatcagtccagcgatgagctgcagctgagtatgggaaatgccatgtttgtcaa

SEQ ID NO: 32582 - DNA, 471 bp, Homo sapiens
tttgagaccctggaaggcgtgatatcgtccgaaccacggagacccctggtacttctcattcccctgcgcctggggctcacggacatcaacgaggcctacgtggagacgctgaaggtgggtcctgccgtgcggggcttgccctgagtccccgtccccttctcccagttcttagtcactttcagcgcatcgtcgtcacgtggccatttgtgcagccggctctcgggggaggggtaaacaaccctggtttacaccgttgcccaaggggtgagtgggcgtgaggcacgtccatcagtaggcacgtgctgctttcgttctgcaagtgtcaaggcgagtgtcgaggatgaaagcatgaggcgcttgcagggggtccttggaaccaggtgccactcctcggcctgacggggagccccgccccctcccgggtctccactgtgccccaggcatgcccaccccacttcccccacagacctg

SEQ ID NO: 32583 - DNA, 541 bp, Homo sapiens
  misc_feature (1)...(541): n = A,T,C or G
agtnnntggggggtnnnnnnctttgacttcgtccagcgtgggcaattcagcagacaagcgtgttgcacctggtcggngacaacttccgggagaccctgaagaagaagaaacacaccttggtcatgttctacgccccttggtgcccacactgtaagaaggtcattccgcactttactgctactgctgatgccttcaaagatgaccgaaagattgcctgtgccgctgttgactgtgtcaaagacaagaaccaagacctgtgccagcaggaggcggtcaagggctaccccactttccactactaccactatgggaagttcgcagaaaagtatgacagcgaccgcacagtaagtgggggagaggcgtctgcccagagctctctctctgctgatgggcagggaaacttccactgaggaggggcagcactgggcagcatcccagaaactgcagaagtcagctggaacactgcaccgagaggcccaggccctgggcctggctgaggcttgacattgttggaggagagtcccaaggggttgccacagat

SEQ ID NO: 32584 - DNA, 545 bp, Homo sapiens
  misc_feature (1)...(545): n = A,T,C or G
aggtttantggaggccnnnnnnnnattgaactcgaccacgtccgcgnggngcaattcagtctttgtacgtgtctgccaccgtcatcttgcactcaggcagtgacatggtgcaggcagagcgcagcgggatccccatcgtgacctctccctaccagatccacttcaccaagacacccaagtacttcaaaccaggaatgccctttgacctcatggtgttcgtgacgaaccctgatggctctccagcctaccgagtccccgtggcagtccagggcgaggacactgtgcagtctctaacccagggagatggcgtggccaaactcagcatcaacacacaccccagccagaagcccttgagcatcacggtgcgcacgaagaagcaggagctctcggaggcagagcaggctaccaggaccatgcaggctctgccctacagcaccgtgggcaactccaacaattacctgcatctctcagtgctacgtacagagctcagacccggngagaccctcaacgtcaacttcctcctgcgaatggaccgcgcccacgag

SEQ ID NO: 32585 - DNA, 500 bp, Homo sapiens
  misc_feature (1)...(500): n = A,T,C or G
cgggggccnaanaaaaatttgaaactcgattgcctagtccgngnggnggaattcccagcatctggcacgagtgggagatcgccaacaacaccttcacgggcatgtggatgagggacggtgacgcctgccgttcccggagccggcagagcaaggtggggcctcagacgggagcccgggaagaggggccccagtctccccaacccacctacccacgttccctccccaggtggagctggcgtgtggaaaaagcaaccggctggcccatgtgtccgagccgagcacctgcgtctacgcgctgacgttcgagacccccctcgtctgccacccccacgccttgctaggtaggggtgcgggacgcagttgagcccagtggggtcagccgcgcacgcagccctgctggaggccctgtagtgctgggggccagggttgggacatggggtgcagctgagcctggcttctcttgggtcctcagtgtacccaaccctgccagaggccctgcg

SEQ ID NO: 32586 - DNA, 550 bp, Homo sapiens
  misc_feature (1)...(550): n = A,T,C or G
agttcnnnnagcacgcgcnnnnnnnaatttgacaatcgatccactgctccgagtggngcaattcgaaatccagccatcaagtggtttaaaagaaagtgtctactttagaagctttggtcgtttgctgaaatagccaccctttcagtgctagcccttgggctggaatttaagtccaggggtctgatcgagccagaaagtaggtgtcagcgtggcttccggaagtccgttgtcacttggatttgacaagggacaagccgacctgctggtttctgggctcctgctcgctgtgcgctctgcgctgtctgcagggattggtgcccgcggagtgcgctttgtctggagaaactcagtgctcgaagagtgaggagaccgggaggaaaccttccccctgcaaagcttatctcccttccctctcatcagaggcggngccccgcaagacacaagggatttccccgcagaatgaaccaaggcctccccaggacatggngacagttctgctgtgcaaagcctgaattcacgtttcttttctaaagtggctcccagtctctct

SEQ ID NO: 32587 - DNA, 480 bp, Homo sapiens
gggctgagatcatgtcagtgtggtggaattcccaagcggcgcctcggccctcccgacctttccgagccctctttgcgccctgggcgcacggggccctacacgcgccaagcatgctgagggtcttcatcctctatgccgagaacgtccacacacccgacaccgacatcagcgatgcctactgctccgcggtgtttgcaggtctgcagagggcgactcaaagggaaactgaggctggaaggagagaggtgtctgaatggcgcttctcctggaagcttcagcccaggagctgagggctgggccctggctgctctccaggaacccttcaggaccaagccagagctaggatctacacagctgggtctttgggcttggaaccatactgggggagaagaactagggggaaagagtgtgaacctcccacccagcctgtgggttttcctctcagcctccactacctgccactccccttctccccagagg

SEQ ID NO: 32588 - DNA, 497 bp, Homo sapiens
  misc_feature (1)...(497): n = A,T,C or G
ngtggaannnnnnnnacccgatactcctttccgtgtgcnggaattctgggcctccaggggagctcgggcctgacggccctgacggtccagaggaaaagggccgggatcgtgaccgggagcgacggcggagccaccggagcgagcgcgagcggcgccgggaccgggatcgtgaccgtgaccgtgaccgcgagcacaaacggggggagcggggcagtgagcggggcagggatgaggcccgaggtgggggcggtggccaggacaacgggctggagggtctgggcaacgacagccgagacatgtacatggagtctgagggcggcgacggctacctggctccggagaatgggtatttgatggaggctgcgccggagtgaagaggtcgtcctctccatctgctgtgtttggacgcgttcctgcccagccccttgctgtcatcccctcccccaaccttggccacttgagtttgtccttccagggtaggtgtctcatttgttctg

SEQ ID NO: 32589 - DNA, 498 bp, Homo sapiens
  misc_feature (1)...(498): n = A,T,C or G
agtgggggannnnnnaaatctgagatctattccatgtggtggaattccagtgctgtatgcggctgcagccgtctcacctgtttccccacaaagggaatttctcactctggttggaagcacaaacactgaaatgtctacgtttcattttggcagtagggtgtgaagctgggagcagatcatgtatttcccggagacgtgggaccttgctggcatgtctccttcacaatcaggcgtgggaatatctggcttaggactgtttctctctaagacaccattgttttcccttattttaaaagtgatttttttaaggacagaacttcttccaaaagagagggatggctttcccagaagacactcctggccatctgtggatttgtctgtgcacctattggctcttctagctgactcttctggttgggcttagagtctgcctgtttctgctagctccgtgtttagtccacttgggtcatcagctctgccaagctgagcctggccaan

SEQ ID NO: 32590 - DNA, 470 bp, Homo sapiens
  misc_feature (1)...(470): n = A,T,C or G
naatcgaagaccctattcgagngccgtggaattcgcagagcactgcgctgtcagcgatagcccagtggatggccattccaggtgaggcacggtgcatggcgggcgcccgatgatgctggggagaccagaaggttctccacccaaaggttttctgtggacatcgtgacttcgggagactgttgataatcacagccatgtgggtgtcaggaggctgctgtaacaacgcagcacagaccgggtggcccagaccgcagaagctcatctcacggtgctggagaccagaggtgcaaaatcaaagtgtgggcaggactgcacttcctccctgcgttccagggaggctccttcctgccccgcccacttctgctggctccaggcctccctgggcttgtgggcgcctcgctctaatctctgcctccatccttacgcagctttctcccctgtgtttctgtgggtctcaagtctctctctcn

SEQ ID NO: 32591 - DNA, 518 bp, Homo sapiens
  misc_feature (1)...(518): n = A,T,C or G
gcggcncnnnnnnnaatggacttccgtccagcgtggaggaattctctgtctcanaaaaaacaaaagttggccagggctgggcgtggtggctcacacctgtaatcccagcactttggggggctaaagcaggtggatcacctgaggtcagaagtacgagaccatcgtggctaatatggtgaaaccccatctctactaaaaatacgaaaaaagaaaaaaaaaaattagccaagcacgggggtgcacacctgttatcccagctgcttaggaagctgaggcaggagaattgcctgatcccataggcagaggttgcagtgaactgggattgtgccactgcactccagcccaggcgacagagcaagattctgtctcaaaaataaatacataaataaagttttagagcaggaatgaaaggaagtaaagtacacttggaagagctgtgttggcaactggagagatccgagtgcctcatctgacccttgacttgggattaatacattggcatgagatgtgagcagtgn

SEQ ID NO: 32592 - DNA, 475 bp, Homo sapiens
  misc_feature (1)...(475): n = A,T,C or G
cgcccgcccngnnnnattgagnaactgagaccctaggcagngnggtggaattcagaagtcagtgctaggcttggagacagatggagcttggctagggcttgaggagccgggcagaagttctgagtggagggcacagctaaggtagcggctgggaggttatggctggcccttcccacctgcagcgtgggggtgggagggaggggagagggaggcagctcccaggagtcgaaggcccccaggggcaggtccaacccagtctctgctcagcttggccttaacggcggcacccccagatctccatccagttcctggtgtacaggcgcagcaccgccgcctcggagcttgagcccctcctccccagctgaccagaaccaggctgagcgcaggaggacaggcaccaccggatgccacaccaggcaggaggaggtgtggacagtgatggtacggcggccctgcatcagcctgcgggtggccn

SEQ ID NO: 32593 - DNA, 491 bp, Homo sapiens
  misc_feature (1)...(491): n = A,T,C or G
agccgcccnatagaaaaccnttaactgagaccctggcagngnggnggaattcaggagcctgacatgactggccaactggtcgacctgcctgaatattacagctggggggaggaactgacagagacccagcacatgatccagcgacgcatcatggagtctgtgaacgggctgaagtctctctcagcaggaagggtggtggttgtgaagaatcaggagcatcacaacgcattgggagtgatcctacaggtctcctcgaactccaccagcagagtattcacaaccctggtcttgtgtgataagcccttgtcccaggacccacaggacagggggccagccactgcagaggtgccctatccagatgacctcgtgggattcaagctgttcctgcctgaagggccttgtgaccacaccgtggtcaagctccagccaggagatatggctgccatcaccaccaaggtgctccgggtgaatggggagaagatcttggagga

SEQ ID NO: 32594 - DNA, 542 bp, Homo sapiens
  misc_feature (1)...(542): n = A,T,C or G
agcgctacnnananagtannnannnnnagnnnngnnnnnnnntttgaaaaccctaatcgaagcactactccgagtggnggaattcctcctttctagccctgaacgctcagacctctgtggggctgtgggatgcatctgtgtcttcacacacgcccttcccttcagccgcccatccctgcccctccccagctcagccaggcgcagcttctccttgaaaactcagcctttccttcccccaaatggtcacagctctaattacacatttcctttctgatctggtgctggacatgtggcttctccaggaggctgagctgcaggtctcagtccgagtcacatcccagcctcagagcggagcctggcatgtgtgacgctcanggcctggtgtgtgtgtggtgtgtgcgctggtgtgtgtgtggcctggggccttgtatgtgtgaggatgtggtgcacagnctgcaaagtgtgtggtggggcctggactgtgtgtggtgggctctgggctgtgtgtggtgggctctgggcagtgactccgtgtgtatgtn

SEQ ID NO: 32595 - DNA, 463 bp, Homo sapiens
  misc_feature (1)...(463): n = A,T,C or G
agcngttnnnnnanncatggacctagtaagagccgcgaattcctctgaagtcatcctgccagtcccggcgttcaatgtcatcaatggcggttctcatgctggcaacaagctggccatgcaggagttcatgatcctcccagtcggtgcagcaaacttcagggaagccatgcgcattggagcagaggtttaccacaacctgaagaatgtcatcaaggagaaatatgggaaagatgccaccaatgtgggggatgaaggcgggtttgctcccaacatcctggagaataaagaaggcctggagctgctgaagactgctattgggaaagctggctacactgataaggtggtcatcggcatggacgtagcggcctccgagttcttcaggtctgggaagtatgacctggacttcaagtctcccgatgaccccagcaggtacatctcgcctgaccagctggctgacctgtan

SEQ ID NO: 32596 - DNA, 563 bp, Homo sapiens
  misc_feature (1)...(563): n = A,T,C or G
nggaggcnnnnnnattggatcgacctagngagnnnnaannnaattgatcaccgtccgtgaggngcacattccttttatgtggaggcttcagctctgaaatgaaagcttgggatataaggactggcaaggtgatgagaagctacaaggcgaccatccagcagaccttggacatcctgttcctccgggaaggctccgagttcctgagcagcgcagacgcttccacccgggactcagctgaccgcaccattattgcctgggatttccggacctctgccaaaatctccaaccagattttccacgagaggttcacctgccccagcctcgccttgcacccgagagagcccgtgttcctggcacagaccaatggcaactacctggcccttttctccactgtgtggccctaccggatgagcagacggcggcgctatgaagggcacaaggtggagggctactcagtgggctgcgagtgctccccaggcggtgacttgctggtgacgggcagcgccgatggccgggtcctgatgacaagttncgacagncagncgagcatgcacactgcangn

SEQ ID NO: 32597 - DNA, 463 bp, Homo sapiens
  misc_feature (1)...(463): n = A,T,C or G
nggagcggccngnnttctgagacccacntngcangaaggccgngaannccggagnggaaactgaccttagagggtggggccctggtgctggctgaccagggtgtgtgctgcattgatgagttcgacaagatggctgaggccgaccgcacagccatccacgaggtcatggagcagcagaccatctccattgccaaggccggcattctcaccacactcaatgctcgctgctccatcctggctgccgccaaccctgcctacgggcgctacaaccctcgccgcagcctggagcagaacatacagctacctgctgcactgctctcccggtttgacctcctctggctgattcaggaccggcccgaccgagacaatgacctacggttggcccagcacatcacctatgtgcaccagcacagccggcagcccccctcccagtttgaacctctggacatgaagctcatgaggc

SEQ ID NO: 32598 - DNA, 552 bp, Homo sapiens
  misc_feature (1)...(552): n = A,T,C or G
aggcgccnnnnnnattggacctacttcgnnggggaattcgcttgattnccnctacggaagccgctttcctgacgagaactttacactgaagcacgtggggccaggtgtcctgtccatggctaatgctggtcctaacaccaacggctcccagttcttcatctgcaccataaagacagactggttggatggcaagcatgttgtgttcggtcacgtcaaagagggcatggacgtcgtgaagaaaatagaatctttcggctctaagagtgggaggacatccaagaagattgtcatcacagactgtggccagttgagctaatctgtggccagggtgctggcatggtggcagctgcaaatgtccatgcacccaggtggccgcgttgggctgtcagccaaggtgcctgaaacgatacgtgtgcccactccactgtcacagtgtgcctgaggaaggctgctagggatgttagacctcggccaggacccaccacattgcttnctaatacccaccctttctcacgacctcatttntggcatctttgtgacatgatgcacccc

SEQ ID NO: 32599 - DNA, 457 bp, Homo sapiens
  misc_feature (1)...(457): n = A,T,C or G
agcggctgnnnnnaattgactgcgtncntaggccgtgtcgtggaattccgtgttccactgcctcttctcttctcgcttgggaactccagtctcacctcggcttgcaatggaccccaactgctcctgcgaggctggtggctcctgcgcctgcgccggctcctgcaagtgcaaaaagtgcaaatgcacctcctgcaagaagagctgctgctcctgttgccccctgggctgtgccaagtgtgcccagggctgcatctgcaaaggggcgtcagagaagtgcagctgctgtgcctgatgtcgggacagccctgctgtcagatgaaaacagaatgacacgtaaaatccaggattttttttttctacaactccgactcatttgctacattccttttttttctgtgaaatatgtgaataataattaaacacttagacttgaaaaaaaaaaaaaaaaaaaaaaaaa

SEQ ID NO: 32600 - DNA, 570 bp, Homo sapiens
  misc_feature (1)...(570): n = A,T,C or G
agtgagtccnnnnnnaatttggagagtccttagngnggngnaannnnccttgatccntcgtccgtgaggngcaattctcgcatcctgctggctgcgtcctgcgattacttcagaggaatgtttgctgggggattgaaggagatggaacaggaagaggtcctgatccacggtgtgtcctacaatgctatgtgccaaatcctacatttcatatacacctccgagctggagctcagcctgagcaatgtacaagagacactggtggctgcctgccagcttcagatcccagaaattatccatttctgctgtgatttcctcatgtcctgggtggacgaagagaacattctcgatgtctaccggctggcagagctgtttgacttgagccgcctgactgagcaactggacacctatatcctcaaaaactttgtggccttctctcggactgacaagtaccgccagcttccattggagaaggtctactccctcctcagcagcaatcgcctggaggtctcctgcgagaccgaggtatatgagggggcccttctctaccatataggctggagcaggtgcagg

SEQ ID NO: 32601 - DNA, 499 bp, Homo sapiens
  misc_feature (1)...(499): n = A,T,C or G
aggaaaaaaanaatttgaaatcgagagccntgcccangngcnggaattctcaatggacgcccagcccagaaaggcaccactccctggattgccatgctgtcacacctgaatgggcagcccttctgcggaggctcccttctaggctccagctggatcgtgaccgccgcacactgcctccaccagtcactcgatccggaagatccgaccctacgtgattcagacttgctcagcccttctgacttcaaaatcatcctgggcaagcattggaggctccggtcagatgaaaatgaacagcatctcggcgtcaaacacaccactctccacccccagtatgatcccaacacattcgagaatgacgtggctctggtggagctgttggagagcccagtgctgaatgccttcgtgatgcccatctgtctgcctgagggaccccagcaggaaggagccatggtcatcgtcagcggctgggggaagcagttcttgcaaaggttcccagagn

SEQ ID NO: 32602 - DNA, 504 bp, Homo sapiens
  misc_feature (1)...(504): n = A,T,C or G
aggggaannannnnnnacctcgatattcgtgtggcgtgtgcnggaattcggtttgtctccaagtttaggagctgattgtcattctgccaagtcacctcattcttctgtttgaaagacttaaaaggaattcaaagctttctagtgacaagttaacatatgtgactgaggccgggcgcagtggttgacaattgtaatcccagcactttgggaggccgaggtgggtggatcacctgaggtcaggagtctgagaccagcctggccaacatggtaaaaccccatctctactaaaaatacaaaaattagccaggcatggtggtgtgggtgcctgtaatccaagctacctgggagcctgaggcaggagaatcgctggaacccgggaggtcgaggctgcagtgagctgagatctcaccactgcactccagcctgggcaacagagcgagactccatctcaaaaaaaaaaaaaaaaaaaggggccggaaanggggtcggggaattgggtgccca

SEQ ID NO: 32603 - DNA, 550 bp, Homo sapiens
  misc_feature (1)...(550): n = A,T,C or G
cgtgcggcccnnnnncattggaccatccttcgngnggnggaattcgctcgatactcgtcggngcgccgcgtccgcaagaagaggcgcggngtgcaggcttgtaaacatataacataaaaatggcttccaaaagagctctggtcatcctggctaaaggagcagaggaaatggagacggtcatccctgtagatgtcatgaggcgagctgggattaaggtcaccgttgcaggcctggctggaaaagacccagtacagtgtagccgtgatgtggtcatttgtcctgatgccagccttgaagatgcaaaaaaagagggaccatatgatgtggtggttctaccaggaggtaatctgggcgcacagaatttatctgagtctgctgctgtgaaggagatactgaaggagcaggaaaaccggaagggcctgatagccgccatctgtgcaggtcctactgctctgttggctcatgaaatangtttggaagtaaagtacacacaccctcttgctaagacaaatgatgatggaggtcatacactactctgagatcgtgtgaa

SEQ ID NO: 32604 - DNA, 501 bp, Homo sapiens
  misc_feature (1)...(501): n = A,T,C or G
aggaaacaannnnaacttgaaactgagagccntccccangngcnggaattcctgtaaacctggtggccaagtgattgtaagtcaggagactttccttcggtttctgcctttgatggcaagaggtggagattgtggcggcgattacagaaaacgtctgggaagacaagttgctgtttttatgggaatcgcaggcttggaagagacagaagcaattccagaaataaattggaaattgaagatttaaacaatgttgttttaaaatattctaacttcaaagaatgatgccagaaacttaaaaaggggctgcgcagagtagcaggggccctggagggcgcggcctgaatcctgattgcccttctgctgagaggacacacgcagctgaagatgaatttgggaaaagtagccgcttgctactttaactatggaagagcagggccacagtgagatggaaataatcccatcagagtctcacccccacattcaattactgaaaagcaatcg

SEQ ID NO: 32605 - DNA, 497 bp, Homo sapiens
  misc_feature (1)...(497): n = A,T,C or G
aggggggtnnnnnnaacctcgaattcgtttgccatggcggaattcatgaaattcccttgtcctgattcccctaatgcccacctctccccacccctggcccaggggtccctgtcccaaaggaaggcgcttttagagcacgggcacctatcgtcctgttaacatctgtttggctccaaactgactctcttctcccggtctaaacttatttctcctctaaccctggactatccacaagtttttaatagagctgtacacactatctgcagttcccaggtgtcctgcccaggaccttgccaccagcacaggccttggccctttaagtgggtcttaatgtggctgatggccctgaacaaagctccagctcagtggggttgagtggagacccatgagccggctctggaggcggcccaggaaccggggcttgcattgcagagctagggatccgctcccaggaagttatttgttcctttgcatgggcttggctagggacagccagt

SEQ ID NO: 32606 - DNA, 562 bp, Homo sapiens
  misc_feature (1)...(562): n = A,T,C or G
aggcgccnnnnnaattggtactccttgngagngncnnnnccttgagcatcgtccgtgtggngcaattccttattttgtttgaattgttaattcacagaatagcacaaactacaattaaaactaagcacaaagccattctaagtcattggggaaacggggtgaacttcaggtggatgaggagacagaatagagtgataggaagcgtctggcagatactccttttgccactgctgtgtgattagacaggcccagtgagccgcggggcacatgctggccgctcctccctcagaaaaaggcagtggcctaaatcctttttaaatgacttggctcgatgctgtgggggactggctgggctgctgcaggccgtgtgtctgtcagcccaaccttcacatctgtcacgttctccacacggnggagagacgcagtccgcccaggtccccgctttctttggaggcagcagctcccgcagggctgaagtctggcgtaagatgatggatttgattcgccctcctccctgtcatagagctgcagggtgggattgtacagcttcgctggaacctct

SEQ ID NO: 32607 - DNA, 498 bp, Homo sapiens
  misc_feature (1)...(498): n = A,T,C or G
gggggannnnnnnaaatcgagatcgtttgcatgtggnggaattcccgcgagaaactgcagcaggtgatgtccaggaggaaagagatgaatgagaagtgggaagcccgctgggagcggctccgcatgttgctggaggtgtgccagttctcgagggatgcctctgtggctgaggcgtggctgattgcccaggagccctacctggccagcggggactttggacacacagtggacagtgtggagaagctcatcaagaggcatgaggcttttgagaagtccacggccagctgggcagagcgctttgctgccctggagaagcccaccacgcttgagctgaaagaacgccagattgcagagagacccgcagaggagactgggcctcaagaggaggaaggcgagacagcaggggaggctccagtttcccaccatgcggccaccgagagaacgtccccggtcagtctctggtctcgtttgtctagttcctgggagtcactgcagcca

SEQ ID NO: 32608 - DNA, 465 bp, Homo sapiens
  misc_feature (1)...(465): n = A,T,C or G
gaggtcagggaggagactactagagcnctnggaannncnangangcctgagccagccaagtctgctcccgccccgaagaagggctccaagaaggtattgacctttgcgcagaagaaagatggcaagaagcgcaagcgcagccgcaaggagagttactctgtgtacgtgtacaaggtgctgaaacaggtccatcccgacactggcatctcttccaaggccatgggcatcatgaattctttcgttaacgacatatttgagcgcatcgcgggcgaggcttcccgcctggcgcattacaacaagcgctcgaccatcacctccagggagatccaaacggccgcgcgcctgctgcttcccggacagctggccaagcacgccgtgttggagggcaccaatgccgtcaccaagtacaccagctccaagtacacattccgaggggagacaacagatcttacacatatcttttcc

SEQ ID NO: 32609 - DNA, 452 bp, Homo sapiens
  misc_feature (1)...(452): n = A,T,C or G
taagaggctacgcactgtcgcaangncnnggaanttnngaatttcattgactagtattaagtgaacaatattttcatgcaaccaacgtttgtcttggcatatttcaaagagataaaaaaagtgaaaatgcaagcatgtacattaagtacttattcatactatccatccattatgagatgctatagtcagtgaaatgaacccaatataggatgaattattgcaaaatatttttaaaaattaagtctacattaacaagaaagcttgatgaatgaagtttttctaggaaatttaatttgcctgataaatggaaagcaggtaaattcatagtacgaagtactgagggagataaaagctgtaaaatataatcctgttactagggaattcattcttgtaggatttatcaggtttaccaaaaatcctttctatttcaagatttgttcctgaaaaacttn

SEQ ID NO: 32610 - DNA, 472 bp, Homo sapiens
  misc_feature (1)...(472): n = A,T,C or G
ngcgggctaggatacggatacctactgatgngcctncgaannnccangnaaggacagaaggggaacctccaatgtctctctgaacttaaagacaggagctgttatttattttttacaaagaaagaagcccacgtgtcctggtgttctctgagacactctttgtgagcttcactttcctgttctataacatgaacataagtgcttacctgccatgagggaaaagtaaagagagaagtttctagaagccactccagccactccttcctggggctgacaaaagggtgattccaagatcatacttcacccgaggtcctgcccaagcacaggccacatgcaagaatggggaaaagtctggtcctgatctccaagcctcaacatcctatcagtgactctgctccctgaccacacatcggaagggctggatgaccccaatcaaaagaaagaacaaggactgtgcttacccttagctccg

SEQ ID NO: 32611 - DNA, 462 bp, Homo sapiens
  misc_feature (1)...(462): n = A,T,C or G
ggccgggtttggactttgatgtctncgaangncaangaanatgaaaccactctagagaagtgctgagccgctgcagatcctcatgaattttatgcctttttgttcgatgaatttaaacctcttgtggaagagcctcagaattctaatcaaacaaaattgcgagctttttgaccatcttggagagtacaaattccagaatgcgctattaggtcgttacaccaagaaagtaccccaagtgtccactccaactcttgtagaggtgtcaagaaacctaagaacagtgggcagcaaatgttgtaaacatcctgaagcaaaaagaatgccctgtgcacaagactatctatccgtggtcctgaaccagttatgtgtgttgcatgagaaaacgccagtaagtgacagaggcaccaaatgctgcacagaatccttggtgaacaggcgaccatgctttttagctctggaatn

SEQ ID NO: 32612 - DNA, 515 bp, Homo sapiens
  misc_feature (1)...(515): n = A,T,C or G
tgttttttttttnnntngggggggggggagggaggggnggggnnnaatcganatacatcgacagtggggaannccgcggnccgcaacgacgacacgcgcacggctgcggtgctgctgcagaacgaccccaacccggacgtgctttccaagacgggattcacgcccctgcacattgcggctcactacgagaacctcaacgtggcccagttgctcctcaacagaggagccagcgtcaatttcacaccacagaacggcatcacgccactgcacatcgcctcccgcaggggcaacgtgatcatggtgcggctgctgctggatcggggagcccagatagaaaccaagaccaaggacgaattgacacctctccactgtgcagctcgaaatgggcacgtgcgaatctcatagatcctgctggaccacggggcaccaatccaagccaaaaccaagaacggcctgtccccaattcacatggcggctcagggagaccacctcgactgtgtccggctcctgttgcn

SEQ ID NO: 32613 - DNA, 540 bp, Homo sapiens
  misc_feature (1)...(540): n = A,T,C or G
tgtcctatcacccctacaatacataacctattcgttatatagtgttgaaatccacacaagtacatacctggggcccacannaatgagaccttcgagaccgtagccanggcgggaancgccccgattgggctctctggaacttgcggaggacgacacagtggattcatatgccacatatggccttatcgatttgcttgaacaggaggaaggtcagaggtcagaagagaagctgccaggttctaagaggcaggatgacgcgacaggtgcagggcaggactcagagaatgaagtgtctcttgtttcaggccatcagagggggcaagcccgaatcacacattcccccaccgtgagtcaggtgacggagaggagtcaggacagactgcaggactgggatgcagacggctcgattgtctcatacctgcaagatgctgcacaaggttcctggcaagaggaggtcacgcaaggtccacactcattccagggaacaagtaccatgactgaagggctagagcccggtggatctcacgagtacgagaaggt

SEQ ID NO: 32614 - DNA, 497 bp, Homo sapiens
  misc_feature (1)...(497): n = A,T,C or G
tggggggggggnagcggaggggaggggnnnaattgaaatgcattcacagtgggcaattccgggccagagctggaaggaggaggtggtgaccgtggagacgtggcaggagggctcactcaaagcctcctgcgtaagtgaccatgcccgggcaaggggagggggtgctgggccttanggggctgtgactaggatcgggggacgcccaagctcagtgcccctccctgagccatgcctcccccaacagctatacgggcagctccccaagttccaggacggagacctcaccctgtaccagtccaataccatcctgcgtcacctgggccgcacccttggtgagtcttgaacctccaagtccagggcaggcatgggcaagcctctgcccccggagcccttttgtttaaatcagctgccccgcagccctctggagtggaggaaactgagacccactgaggttacgtagtttgcccaaggtcaagcctgggtgcctgcaatccttg

SEQ ID NO: 32615 - DNA, 257 bp, Homo sapiens
  misc_feature (1)...(257): n = A,T,C or G
agcccgcttttaacattggtttcagtgcganccncagannangagnncaagactagcctggccaacatttctctactaaaaatacaaatattttccaggctttgtggtgtgtgcctgtaatcccagctactcgggatgctgaggcacgagaatcacttgaacccacagggcagaagttgcagtgagccgtgatcgcaccactgcactctggcctgggcatcagagtgagaccctgtctcaaaaacaacaacaacaaa

SEQ ID NO: 32616 - DNA, 486 bp, Homo sapiens
  misc_feature (1)...(486): n = A,T,C or G
aggccaggggnggggnnnnaatcgatttccgtccacgtgggcaattcccagactcagagagaacccaccatggtgctgtctcctgccgacaagaccaacgtcaaggccgcctggggtaaggtcggcgcgcacgctggcgagtatggtgcggaggccctggagaggatgttcctgtccttccccaccaccaagacctacttcccgcacttcgacctgagccacggctctgcccaggttaagggccacggcaagaaggtggccgacgcgctgaccaacgccgtggcgcacgtggacgacatgcccaacgcgctgtccgccctgagcgacctgcacgcgcacaagcttcgggtggacccggtcaacttcaagctcctaagccactgcctgctggtgaccctggccgcccacctccccgccgagttcacccctgcggtgcacgcctccctggacaagttcctggcttctgtgagcaccgtgctgacctcc

SEQ ID NO: 32617 - DNA, 496 bp, Homo sapiens
  misc_feature (1)...(496): n = A,T,C or G
gggctcgaganccnctnngcanngngcnggtcgtagaccactagtcagngtgggggaattcgcccgtgctgctgctgctcctggcgggagcccccgcctcgcggcccactcccccgacctgctactcccgcatgcgggccctgagccaggagatcacccgcgacttcaacctcctgcaggtctcggagccctcggagccatgtgtgagatacctgcccaggctgtacctggacatacacaattactgtgtgctggacaagctgcgggactttgtggcctcgcccccgtgttggaaagtggcccaggtagattccttgaaggacaaagcacggaagctgtacaccatcatgaactcgttctgcaggagagatttggtattcctgttggatgactgcaatgccttggaatacccaatcccagtgactacggtcctgccagatcgtcagcgctaagggaactgagaccagagaaagaacccaagagaactaaagttatg

SEQ ID NO: 32618 - DNA, 509 bp, Homo sapiens
  misc_feature (1)...(509): n = A,T,C or G
nggagggggccnnnnagggccccaactgagaccanccagcnaggctacgcaanngcgnggaanttctgncactcagccccacatggcccagggctgatttatagacaaccgaactgcgatgatccagaaactgaggaagcagctctggtggctatagactacatcaatcaaaaccttccttggggatacaaacacaccttgaaccagattgatgaagtaaaggtgtggcctcagcagccctccggagagctgtttgagattgaaatagacaccctggaaaccacctgccatgtgctggaccccacccctgtggcaagatgcagcgtgaggcagctgaaggagcatgctgtcgaaggagactgtgatttccagctgttgaaactagatggcaagttttccgtggtatacgcaaaatgtgattccagtccagactcanccgaggacgtgcgcaaggtgtgccaagactgccccctgctggccccgctgaacgacaccagggtggtgcacgn

SEQ ID NO: 32619 - DNA, 544 bp, Homo sapiens
  misc_feature (1)...(544): n = A,T,C or G
aggggnnnaangcgccnnnnnnnnttggacatcgaacactgtccgtgtggtgcaattcgttcactcttgtcgcccaggctggagcgcaatggtgcgatctcggctcactgcaacctccgcctcctgggttcagatgattttcctgcctcggcctcctgggtggctgggactgcaggtgcccgccaccacgcctgactaatttttgtattttcagtggagacggagtttcaccatcttggccaggctggtctcgagctcctgacctcgtaatccacccgcctcggcctcccaaagtgctgggattacaggtgtttgccaccgcgcccagcccaaattattacattcgtaagacagacacctcttagaatctatatatatgaggttttactcccttttctacactcagtatgttttaattgatgcaaagcaattaattggcctaaaatgtttcaaatattatagtctatacattcagaaagtaagggttaagaatgaattattggtgcttcttggggggtgtatatagcagtttttagaagtttaa

SEQ ID NO: 32620 - DNA, 497 bp, Homo sapiens
  misc_feature (1)...(497): n = A,T,C or G
agcngccngcnnnctattgattncactangcatagcgnagngngcnggaannnctngattgatgattagtacacaacagaaatagttacaaagaacccggctctattttttttattttatatattaggatgagtgaccaggaggcagagtaacagtggctaaaacaggagcaaagtttaattctttctcataggcaggacagggctgagatgaccatcagggatctaggcttgctcttttttttttttttttttttttaaaaaaggggttccccccttccccccgggggtaagggggggggggaaaaaacccccccgggggggggtcttttccctttccccccccaaaagatggggaaccggggctatttccccccccccgggggaaattggggtttttttttttaaaaaagggggtttttcccaagggggggggggggggttaagggcttaaaataaaaaaaaaccccccccgcgccccccccaaagggggggaaa

SEQ ID NO: 32621 - DNA, 479 bp, Homo sapiens
cgtggtttccgagttcgagtgcatggcagaactctcaggccagctgctgctgtcctggtggtgggcgtgttcacagccccaggcctgcacctgaagcagccgtttgtgcagggcctggctctttatacccctgtggtcctcccacgctctctggacttcacagaactggatgttgctgctgagaagattgacaggttcatgcaggctgtgacaggatggaagactggctgctccctgacgggagccagtgtggacagcaccctggctttcaacacctacgtccacttccaagggaagatgaagggcttctccctgctggccgagccccaggagttctgggtggacaacagcacctcagtgtctgttcccatgctctctggcatgggcaccttccagcactggagtgacatccaggacaacttctcggtgactcaagtgcccttcactgagagcgcctgcctgctgctgatccagcctca

SEQ ID NO: 32622 - DNA, 489 bp, Homo sapiens
  misc_feature (1)...(489): n = A,T,C or G
cgtcncttnnaaccgggtacgncagctaatgcagnggctggaattcggtttggtcgttcgttgggcggtgctggtttttcgctcgtcgactgcggctcttcctcgggcagcggaagcggcgcggcggtcggagaagtggcctaaaacttcggcgttgggtgaaagaaaatggcccgaaccaagcagactgctcgtaagtccaccggtgggaaagccccccgcaaacagctggccacgaaagccgccaggaaaagcgctccctctaccggcggggtgaagaagcctcatcgctacaggcccgggaccgtggcgcttcgagagattcgtcgttatcagaagtcgaccgagctgctcatccggaagctgcccttccagaggttggtgagggagatcgcgcaggatttcaaaaccgacctgaggtttcagagcgcagccatcggtgcgctgcaggaggctagcgaagcgtacctggtgggtctgttcgaagat

SEQ ID NO: 32623 - DNA, 486 bp, Homo sapiens
  misc_feature (1)...(486): n = A,T,C or G
cggttctttaaaaggattcgantgcatggcaggaactcgncgntcgagccgggtcctctgttggagagctgggcgctgtcccaggtggcgggcatgcctgtcttcctcaagtgtgagaatgtgcagcccagcggctccttcaagattcggggcattgggcatttctgccaggagatggccaagaagggatgcagacacctggtgtgctcctcagggggtaatgcgggcatcgctgctgcctatgctgctaggaagctgggcattcctgccaccatcgtgctccccgagagcacctccctgcaggtggtgcagaggctgcagggggagggggccgaggttcagctgactggaaaggtctgggacgaggccaatctgagggcgcaagagttggccaagagggacggctgggagaatgtccccccgtttgaccaccccctaatatggaaaggccacgccagcctggtgcaggagctgaaagcagtgctg

SEQ ID NO: 32624 - DNA, 473 bp, Homo sapiens
  misc_feature (1)...(473): n = A,T,C or G
gcctacgaacctccngcaangtcctagagcctcgnaaaaccacnnnnatgccntaaaccttcctctttttaaaaatagtatcttattgcactcctttctgattttaagccattgttctttgcttggattcctccttggaaagtgaaacttgggaagaaacttgggctagtcctagataggggtaactgggggacaaaagcttccgccttctcatattgttctctgacttctaaactagtaatctttgagtgtatctgtgcctcagaaccatgtgcattttttcttagcattttctatgctcaatccagataaaatggattagaaattagcagaagcatcctggagtatgcgtttgacaatttattcggtgattttgatggaaaaccgggaacaactgctttaaatgtccactcttcttttaacaaataggactttactaggtatcatagctttgttaggtgccatcttttttn

SEQ ID NO: 32625 - DNA, 481 bp, Homo sapiens
  misc_feature (1)...(481): n = A,T,C or G
agcatctgaaactctcgaannctccgtgactcctggaagngcgcggaannntatgatgatctggacttcaaaaacatcatggactttgttcagaaaaagttcaagtgctgtggcggggaggactaccgagattggagcaagaatcagtaccacgactgcagtgcccctggacccctggcctgtggggtgccctacacctgctgcatcaggaacacgacagaagttgtcaacaccatgtgtggctacaaaactatcgacaaggagcgtttcagtgtgcaggatgtcatctacgtgcggggctgcaccaacgccgtgatcatctggttcatggacaactacaccatcatggcgggcatcctcctgggcatcctgcttccccagttcctgggggtgctgctgacgctgctgtacatcacccgggtggaggacatcatcatggagcactctgtcactgatgggctcctggggcccggtgccaacg

SEQ ID NO: 32626 - DNA, 499 bp, Homo sapiens
  misc_feature (1)...(499): n = A,T,C or G
ggagggcccccncggcccccctagggngaccttaaatgnctngngaannncncnnanggagacnanaaacattcgtataattgatatgtaatataaaagattgtcctagccttaaaaagtgatccataaatttttcagtgagggtttagataaaataaaaaataacatttgagaaagaggttgccactttaataccatctattttatgtggacagtgcatttaagcttgaaatttcacaggtaataaatgtagctggatagtaacttatattctgttgattctgtgtacattgactcttgagatgaatgttacaagaattttaattttttttagatgacagatgaaaagaggtatttaatgtttttatacaattagtagcattaggatggattgcaaatcagatgctcttttggagctctgtgtataatattcacgaccttgtgaggtcacagagagcacggatgtatattcttaattacttccttactttggttggaa

SEQ ID NO: 32627 - DNA, 543 bp, Homo sapiens
  misc_feature (1)...(543): n = A,T,C or G
nggggatnnagcgntnnnnnnnaattgacatcgtccagctggngcaattccaggaaccttgcagcttccaccacagaagccttttgggcaggaggcttccttgcctcttgcaggggaagaagagttatcgaagggaggggagcaagactgtgccctggaggagctatgtaagcccctgtactgcaaactctgcaatgtcaccttgaactctgcacagcaagcccaggctcattatcagggtaaaaatcatggtaagaaactccgaaattactatgcagcaaatagctgtcctcctcctgctagaatgagcaatgtggtcgagcctgcagctactccagttgttccagtccctccgcagatgggctcctttaagccaggaggccgagtgatcctggccacggagaatgattactgtaagctctgtgatgcctccttcagttccccagctgtggctcaggctcactatcaagggaagaatcatgccaagaggctgcggctggcggaagctcaaagtaactcattctcggaatcctcagagctggg

SEQ ID NO: 32628 - DNA, 543 bp, Homo sapiens
  misc_feature (1)...(543): n = A,T,C or G
aggggatnnagagcccnnnnnnnaattgacatcgtccacgtccatgtggggaattcccggaagaccccgccgaaggttttctccggttcgggagagagacggagtcccgctctgtcacgcaggctgccaggctggcgtacagtggcgcaatctcagctcgctgcaacctccacctcctgggttcaagcgattttcttgcctctgcctcctgagtagctgggattactggcacacaccaccatgcacagttccttgttcaaaatgccaagaacctggatgactcatagtcaagaccctccaccagtaacatatattggcgagccagccaggagcttggaaccctcggtggacagtgcctaagcacagaggcaaccacaggtttctaacagggccactctctggtgaaactgaaaggtttctgtgtgaaagtgcctgaccaccactgcccagttcagaccactacaggaaacactccatttattccacctgacttcccacttggctgcatcctcaaccattgaaatgaatttgaccctgataatc

SEQ ID NO: 32629 - DNA, 485 bp, Homo sapiens
  misc_feature (1)...(485): n = A,T,C or G
cgcnctnnaaactgaactacagcatcgcagnggcnggaantcgaaggacaggctctgagtgtccagtggcagccagaacaggtgacacagagcaggggcttcagccacagagacacactcaggaggccagaagccgacactcaaggtgttcgtggggctggctcctgaagggcctgggagggtccatcagctgcctccagcatccagtggctgctggcatacagcctcatccccacgtcccaacccctctcctgtgtgtctgtgaccctgtgcgctgtctctgtgtgtaccccccacctgctcccccccccttttttttttgagacggggccttgctgtgtcccccaggcgggaatacagggccatgatcatagctcactgcagccttgaatccctgggctcaagggttcctcctgcctcatcctcctgagtagctggggttacaggtgtgtgccgccatgcccagtctcttttttggtagggcc

SEQ ID NO: 32630 - DNA, 430 bp, Homo sapiens
  misc_feature (1)...(430): n = A,T,C or G
agggnagaagcgnnnnnnnnnnnccttgatcatcgntccagcgtggnggcagacagcggcgatattgagtccattcgccattatcatccccaggatgccaccaccaatccttcgctgttactcaaagctgccggattatcacaatatgagcatttaatagacgatgctatcgcctggggtaaaaaaaatggcaagacccaggaacaacaggtggtcgcagcgtgtgacaaactggcggtcaatttcggtgctgaaatcctcaaaatcgtacccggtcgcgtgtcaacagaagttgatgcacgcctctcttttgataaagaaaagagtattgagaaggcgcgccatctggtggacttgtatcagcaacaaggcgttgagaaatcacgcattctgatcaagctggcttcgacctgggaaggaattcgatatc

SEQ ID NO: 32631 - DNA, 493 bp, Homo sapiens
  misc_feature (1)...(493): n = A,T,C or G
ggctttgccaggtnnnnnntttttgtagcctggcagnggttgaaacnttggagagcggctggcccccaccctcagccagctggaccgcaacctagacagagaaatgaaaccagaccctacacccctgctgacgtctcgccacaacgtcttccagaatgacgagtttgatgtgttcagcagggactcagtagacctgagccgggtgcacaagggcaagagcaccaggaaggaggaaaacacgcggagtttgctgaacgacaagcgtgcagtggcggcacagcggcagcgctacgagcagtacagcgtggtggtggaggaggtgccactgcagccaggcgagagcctgccctaccacagtgtctactacgaggatgagtacgatgacacatacgatggcaaccaggtgggcgccaatgatgcagactctgatgacgagctcatcagccgcaggccattcaccatccctcaggtgctgagaaccaaagtgcctaga

SEQ ID NO: 32632 - DNA, 498 bp, Homo sapiens
  misc_feature (1)...(498): n = A,T,C or G
agccgcctnnnnnnacatagaaaacctanagcagtgngcaggaacncggagaancgcttgaaaccagaaagtggaggttgcagtgagccaagattgtgccattgcatccagtctgggagcgaaactccgtctcaaaaaataaaaaagaacggaggcaggggagagaaatgaaggacctcccagctctaggtctgtcagagagagatggggtacctccttgtcctccacaaagaagatcatcactataactatactctgacccctcctaaccccggttgccctggcacacttggagacctgggaagtcacaagtgggccgtggaaggctcagcatatgcctctccttgtaagcaggcagccctgaagcagcttcctatgaacaaggtccccaacatggcggtgatgatcaagtccctgactcggagcacaatggacgccagtgtggttttcaaggaccccacggacaggaaaactgaggcagtgagcagcccacttccc

SEQ ID NO: 32633 - DNA, 518 bp, Homo sapiens
  misc_feature (1)...(518): n = A,T,C or G
agggcgnnnnnnaataggatttctgacccctagtcagagtggtggaattcggcaaaactccgtctctacaaaaattagctaggtgtggtgatacatgcctatagtccctgctacttgggaggctaaggtgggaggatcacctgagcccagaaggtcaaggctgcagtgagccgtgattgtgccgctatactccaccagcctgggtgacagaatgagaccctatctcaaaaaagagtaaagccttctctgattagtaaaggacagacaggatgagagcagtgccagaaggcagaacctcgctgtcatgaactggagcctgttgatgatgaggagaccatgcagggcttgcagccaaaagaaggaagctgaagggatgtaagcaagtcagattcagatgagaatctggtggtgagcctgcaaataaataagtagtttaatgtagtgctacagtatgtgaataatttcattgtgacatcaagaatctactgtaccttgcttaacttttaaatttcctttan

SEQ ID NO: 32634 - DNA, 487 bp, Homo sapiens
  misc_feature (1)...(487): n = A,T,C or G
cggtnctnnnaactgtgaactcgagcatcgcagnggcgggaanncaggaaacccttctaggaagtagttcaatgaaaaacctaaaaatgcccaaataaacattcgcttacatattatatatcttgggcttctttttatgacagttcattcagggacccagtcagtaaacaggtagttaacttcgtgtaaccaagcaagggttttgtttatcttttttaaagtagaaaaaagtgaggctcaaactctctctttctccttgtcataactattggtttacagtctttatttgtttaaaagtaaagcacattgtatgtatttatttggcaatacatgaggccattaaaaccctgagcctaaggtaccacagttagtctcatttgcctcttgtcctgtgaactccacttagaatgtcattgaacttgggcagacataattctagtgtctgttccaaacgcactgtgtcacagaagctagaattaccattagn

SEQ ID NO: 32635 - DNA, 488 bp, Homo sapiens
  misc_feature (1)...(488): n = A,T,C or G
acgttnctnnnccatggacctaatgcagtggcaggaacncgaggaaactcttttaggaagtagttcaatgaaaaacctaaaaatgcccaaataaacattcgcttacatattatatatcttgggcttctttttatgacagttcattcagggacccagtcagtaaacaggtagttaacttcgtgtaaccaagcaagggttttgtttatcttttttaaagtagaaaaaagtgaggctcaaactctctctttctccttgtcataactattggtttacagtctttatttgtttaaaagtaaagcacattgtatgtatttatttggcaatacatgaggccattaaaaccctgagcctaaggtaccacagttagtctcatttgcctcttgtcctgtgaactccacttagaatgtcattgaacttgggcagacataattctagtgtctgttccaaacgcactgtgtcacagaagctagaattaccattagaggcan

SEQ ID NO: 32636 - DNA, 486 bp, Homo sapiens
  misc_feature (1)...(486): n = A,T,C or G
naggttntnnncccagcttcanatgcatggcaggaacnngcaagntctctgcagcctgtggtccccctgtgacccccgagtgtgaacactgtgggcaacgacaccagcttggtggccccatgtgggcagagcccatccatgacctggattttgtgggccgtgtcctggaggctgtgagcgctaaccccggccgcttccacacctcggagcggatccgaggggtcctgagcgtcatcactgaggagctcccggacgtgcctctgtactacaccctggaccagctgagcagcaccatccactgcaacacaccaagcctcctgcagttgcggtcggccctcctccacgctgacttccgggtctcactctcccacgcctgtaagaacgctgtgaagacggatgcccctgcctctgccctctgggacatcatgcgttgctgggagaaggaatgtccggtgaaacgggagcgactatcagagactagcccag

SEQ ID NO: 32637 - DNA, 493 bp, Homo sapiens
  misc_feature (1)...(493): n = A,T,C or G
gaggnnnnnnnnaaactgagaactacggcnatcgcagngngcnggaantccagcagcaggcatcgtgggaaggtgaagagcttccctaaggatgacccgtccaagccggtccacctcacagccttcctgggatacaaggctggcatgactcacatcgtgcgggaagtcgacaggccgggatccaaggtgaacaagaaggaggtggtggaggctgtgaccattgtagagacaccacccatggtggttgtgggcattgtgggctacgtggaaacccctcgaggcctccggaccttcaagactgtctttgctgagcacatcagtgatgaatgcaagaggcgtttctataagaattggcataaatctaagaagaaggcctttaccaagtactgcaagaaatggcaggatgaggatggcaagaagcagctggagaaggacttcagcagcatgaagaagtactgccaagtcatccgtgtcattgcccacacccagatgg

SEQ ID NO: 32638 - DNA, 510 bp, Homo sapiens
  misc_feature (1)...(510): n = A,T,C or G
agcgctccnnnnccatagacatcatcagcgtggggaattcctctgcctcaggggcctggacatccctacggtacaggtggtcatcaaccacaacacccccgggctccccaagatctacatccaccgagtcggccggacggcccgtgcagggcggcagggtcaggccatcacgctggtgacacagtacgacatccacctggtgcacgccatcgaggagcagatcagtgagtggggttggggtgggtggtagagaaggagggtggggtgggcanaggtgggcacctcggggtgagacccattttcccgtcagacaccagccggcctgctcccgtgagcagatttaggctggggcttccttccctaggcacccccaaaagaagttcttttgcccatttattgaaacaaactctccatagttgtcgccagcagctgaaagccacatcagtcaggaggggacttgggtttcttagactgagatgtatggaaggtccctgagatgtcagaggcccn

SEQ ID NO: 32639 - DNA, 491 bp, Homo sapiens
  misc_feature (1)...(491): n = A,T,C or G
agccgccccccttgatanccnttnatagagnggcgtaanncangagcctgacatgactggccaactggtcgacctgcctgaatattacagctggggggaggaactgacagagacccagcacatgatccagcgacgcatcatggagtctgtgaacgggctgaagtctctctcagcaggaagggtggtggttgtgaagaatcaggagcatcacaacgcattgggagtgatcctacaggtctcctcgaactccaccagcagagtattcacaaccctggtcttgtgtgataagcccttgtcccaggacccacaggacagggggccagccactgcagaggtgccctatccagatgacctcgtgggattcaagctgttcctgcctgaagggccttgtgaccacaccgtggtcaagctccagccaggagatatggctgccatcaccaccaaggtgctccgggtgaatggngagaagatcttggaggacttcagcaagn

SEQ ID NO: 32640 - DNA, 517 bp, Homo sapiens
  misc_feature (1)...(517): n = A,T,C or G
agcgggggnnnnnnaataggatttccgtccccactccgagtggtggaattcgaaatctgtgattcattacaatgtagtgtctcaatgtcgggcgctccgagtcacagtgtggccacccccaggaggtgcagagccaggggttggggcacaccccggagtcagtgcctggctagaatctcagatcttccactgacttttctgagccaacatttctttttctgcacgatcaggatagtaataatagtgcttagtccagagtctatgtgggtttaactgcaaaggtccagtgaatggcctgaaccagtgcctgcctcagtgctgctggctgccactgttatcacagccaccaccgtcaccatcgttaccgttctccttgtccacagagaagggtgtgagtcggcacaggcccacccattccactgtcccgctgctctgttgctggggctgaaagctccatccctgtggaccaaggtcagctgtatttcttgggtttagtgacgggttaaaagaaaaacag

SEQ ID NO: 32641 - DNA, 519 bp, Homo sapiens
  misc_feature (1)...(519): n = A,T,C or G
agcggcncccnnnncataggatcttcgntccagcgtgtgggaattcgctcctcacagacccacacacgccctacgaggaggagcagcggcagtcagtgcagtctgaccagggctacatctccaggagctccccgcagccccccgagggactcacggaaatggaggaagaggaggaagaggagcaggacccagggaagccggccctgccactctctcccgaggacctggagagcctgaggagcctccagcggcagctgcttttccgccagctgcagaagaactcgggctgggacacgatggggtcagagtcagaggggcccagtgcatgagggcggctccccagggaccgcccagatcccagctttgagagaggagtgtgtgtgcacgtattcatctgtgtgtacatgtctgcatgtgtatatgttcgtgtgtgaaatgtaagctttaaaatgtaaatgtctggattntaatcccaggcatccctcctaacttttctttgtgcagcggtctggttatcgn

SEQ ID NO: 32642 - DNA, 533 bp, Homo sapiens
  misc_feature (1)...(533): n = A,T,C or G
cgttanttcatnnagggagannnnnnaggggnnnnnnnnncccggaacaccatttcgagtggccgaattcacggaatttgggttgcagaaattccacaagcctcttgcaactttttcctttgcaaaccacacgatccagatccggcaggactggagacacctgggagtcgcagcggtggtttgggatgcggccatcgttctttccacatacctggagatgggagctgtggagctcaggggccgctctgccgtggagctgggtgctggcacggggctggtgggcatagtggctgccctgctgggaggtggaatttaattctcctccccttgaatatgggctggacaaagagaaaaatggtagctcaacagtggagacacctggacagcactttaaccaagtgatcaaagttaatatcgccaattatgtatgtgctcccggatgtgatgttatgagaaaggcacactatacctctgtggaattccttcccaaaccctatatctcaatctattcatagnanacactggacaaatgg

SEQ ID NO: 32643 - DNA, 476 bp, Homo sapiens
  misc_feature (1)...(476): n = A,T,C or G
atttgagaccctcgcagngcctgaaattcctcggctcgacacagctcgtcctgtgctccaggtcttctccatactttgaggatatgataggagccagaacagaatggggttcctgcagggccaccggtgcctcacactggcaccaaggcctggggctcgcagtgtccgtgagggcgtcctggaagagacagggttcccccaaccgccaccagctgccctgcccagcatcaggcctgcaggtcctgctggagcacatgcctcagggagactcaggagtggggctctcacaggactggggcgctcctttccatccctctcctcacttcccccctcccctgagggtgctgcagggctgggcagggcgggctgggagcagggagatgtaccgtgaaactgaattactgcctttcacatcgtgactcccaagtatgcagaaggaaccctctggggattcttcaggtttcagttttactttn

SEQ ID NO: 32644 - DNA, 517 bp, Homo sapiens
  misc_feature (1)...(517): n = A,T,C or G
agcgggtccnnnncatagactttcgtccaccntccagagtggngcaattcgaatgaactgcccacaactcccgtgaagaaggactcccccaagaacatcacattgcttccagccaccgcggctaccaccttcaccgagaccccctcgggacagatcacgacctcgggggcactgacctttgaccgagcgtccacggtagaggccactgctgtcatatcagagagtccggcccagggcgacgtcttcgcaggggccacagtccaagaggccagcgtgcagtccccatgcagggccagccaccctgagcctcactaccccggctatcaggacagctgccagatcgcaccgtttccagaagctgcgttgccaacgtcacatcccaaaatagtgttgacatccctgcctgcgctggcggacccacccccgactcccaccaaagcggcacctcccgcgttggtcaatgggctggagctgtcagagccgcggagctggctgtacctagaagagatggtcaact

SEQ ID NO: 32645 - DNA, 514 bp, Homo sapiens
  misc_feature (1)...(514): n = A,T,C or G
agcggtncnnnnncaatagacctctgtccgcgtggtggaattctgatgatcggcgtcccaggcgaggcatggatgatgaccggtgtcccaggcgaggcatggatgatgaccggggtcccaggcgaggcatggatgatgaccggggtcccaggcgagggttggatgatgatcgaggaccttggaggaacgccgatgatgacagaattcccaggcgtggtgcagaggatgacaggggcccttggagaaacatggatgatgatcgcctttcaagacgtgctgatgatgatcggtttcccagacggggtgatgactcaagacctggtccttggagaccattagtcaagccaggtaaaattctatttcctagaatatgcttaagtgttcacctgtaaaagtgaaattctgatggataaatatcagggctgtattgttattttccagataaactggtctttcatctttccttcagtatcatttgcagtgacttcgctgtcaaaagtttgccttcagaata

SEQ ID NO: 32646 - DNA, 519 bp, Homo sapiens
  misc_feature (1)...(519): n = A,T,C or G
agcggtnnnnnnnnnaatagatnttcgatccgcantccgcgtggnggaaatcggaagcgctgcagccttcgagcccggcatccagcattgcagccgccgcggcggcctaagagctcgaaccctttcacacgcgcgcaggaggaggagcggcggcggcagaacaagacgaccctcacttacgtggccgctgtcgccgtgggcatgctgggggcgtcctacgctgccgtacccctttatcggctctattgccagactactggacttggaggatcagcagttgcaggtcatgcctcagacaagattgaaaacatggtgcctgttaaagatcgaatcattaaaattagctttaatgcagatgtgcatgcaagtctccagtggaactttagacctcagcaaacagaaatatatgtggtgccaggagagactgcactggcgttttacagagctaagaatcctactgacaaaccagtaattggaatttctacatacaatatggttccatttgaagctggacagtat

SEQ ID NO: 32647 - DNA, 515 bp, Homo sapiens
  misc_feature (1)...(515): n = A,T,C or G
agagccnccnnnccaatagatcatcaatcagcgtggagcaattcatgccgtttatgtattgacaagtctaagatggaaggttttaaaaattgttaataagttaaacttttttgaaatattgttttaaacatgttcatcaagcaaatacacgattactaacggacatccatatttctggatggtttgtttgtagctgtcagcattatagtttctacctaaaaagtcatggatggatgcagaaagttggacttctttttttttgtgaaaaatgggtcctttaaaatgcttctaatggtcttctataatatggtatggctttagtgataccttcctctgttgattttctttttaccactttgctggtatttcccagtcttatttgtagttgtttctttcctgtatctcttcttcatgtattgggattactcaattttttttgtttttgtttctttttacagggtttcgccatgtcacccaggctgagtgcagtggcgtaatcgctcgctgcggcctcg

SEQ ID NO: 32648 - DNA, 468 bp, Homo sapiens
  misc_feature (1)...(468): n = A,T,C or G
gggacggggnnnnnnaactgagnactgacgaacgtcgggganncnnaagnngnttcagngagaattccctcgtcgactccacagggacctttcagacaaaaatgcaagaagcagcggcctcccctgtcccctgcagcttccgtggtgcctttgctgccggcagcccttggggaccacaggcctgaccagggcctgcacaggttaaccgtcagacttccggggcattcaggtggggatgctggtggtttgacatggagagaaccttgactgtgttttattatttcatggcttgtatgagtgtgactgggtgtgtttctttagggttctgattgccagttattttcatcaataagtcttgcaaagaatgggattgtcattcttcacttcagcacagttctagtcctgcttctctggagtagggttgttgagtaaggttgcttgggttgtgcattgcacaagggcacatgg

SEQ ID NO: 32649 - DNA, 461 bp, Homo sapiens
  misc_feature (1)...(461): n = A,T,C or G
tggggctnnncctgactgagtacatagtccgtgcggtggaattaaaccccgctgacagccagtccagcccgggacacgcgcccagctctgtagcctcctccgtcgactcagccttaggtaccggtcaggcaaaatgcggtcctccctggctccgggagtctggttcttccgggccttctccagggacagctggttccgaggcctcatcctgctgctgaccttcctaatttacgcctgctatcacatgtccaggaagcctatcagtatcgtcaagagccgtctgcaccagaactgctcggagcagatcaaacccatcaatgatactcacagtctcaatgacaccatgtggtgcagctgggccccatttgacaaggacaactataaggagttactagggggcgtggacaacgccttcctcatcgcctatgccatcggcatgttcatcagtggggtttttgggg

SEQ ID NO: 32650 - DNA, 461 bp, Homo sapiens
  misc_feature (1)...(461): n = A,T,C or G
tggtgctnnnaccaggctgcgagcatctgcanggcannnnnnntttntctttctttctttctttttctttctttctttctctttcttaccgcaggaaatctactgggttctgcagaaacagctgtcaagaatgcgcagaaaacagacaaacataggaaggtgaaaaaacactgagtcttcaaataataaaaaagtattattgaaaataaatacagcatataccattactttatctcattcccctggcactctattaaaaagtatgtatctacagataaaaagcacctatccccattctagtttcatgtatacagacggataacaaattacatatgtataaacccaattcaatgtccatttcctaatatctaccatgtacaaggcactatgctggcaaatgaaaagtatagtaaaaggttctctatgtcctcagaaatccaaggggcaaataaaacgaaaca

SEQ ID NO: 32651 - DNA, 468 bp, Homo sapiens
  misc_feature (1)...(468): n = A,T,C or G
agcgtgcntnnaaaaggaaacgtccancnaacgtcagngccgnggaanncctaccgactcatcaagggacgaaagacggtcactgcctgggacacagccattgctcctctggatggcgaggagctcattgtcgagggccttgaagatgtcccgctgaccatgcacaattttgtacggaagaccttcttcagcctggcgttctgtgacttctgccttaagtttctgttccatggcttccgttgccaaacctgtggctacaagttccaccagcattgttcctccaaggtccccacagtctgtgttgacatgagtaccaaccgccaacagtgagcccagcctggggtgggtggggggatggggagcacagaggcccagccacgaggcccttacagacagctgacccgtgtccccttgctttatacccttcatgccctcaaggttctaccacagtgtccaggatttgtccgg

SEQ ID NO: 32652 - DNA, 470 bp, Homo sapiens
  misc_feature (1)...(470): n = A,T,C or G
attgagatcgatatcctaggccagngcggtggaattctagatactctcttcttctcataggtgtccagcaatgctggactctgaaatattccggttgtggggggtgggggtgggtcacaaccctgccatggaactgtttccttcatcatgagttctgctgaatgccgcgatgggtcaggtaggggggaaacaggacgggatgggataggactagcaccattttaagtccctggcacctcttccgactctttctgagtgccttctgaggagactccggctgtgctgggagaaatactcgaacttgcctgtattacctgctgcttctccaaaaatctgcctgagatctgttccctatatttctctactgtcctccctcaccccctccttcatatgaaaggagccatggaagaggcgtcatggccacacgctgagccacctgccctttgatctgcctcctttagtaaaactcg

SEQ ID NO: 32653 - DNA, 472 bp, Homo sapiens
  misc_feature (1)...(472): n = A,T,C or G
natcgcagttcgctagcacatngnggnggaattcacggaatttgaatcctgacggaatggacagggaccgccaggttccaaagccagatggagggactggctgggcattctggaaagaccctgtggtctgcggagctgagtccagcctgggcctcagcagcacccctcccgctctcaggctcatcatctccaagaaggagcgcatgctgcagaagggctccggcttccacctggacctgctgctcatcgtggccatgggcggcatctgtgccctctttggcctgccctggttggctgctgccactgtccgctctgtcactcacgccaacgcgctcactgtcatgagcaaggctgtggcacctggggacaagcccaagattcaggaagtcaaggagcagcgggtgacggggctgctggttgccctgcttgtgggcctctccatagttaacggggatctgctccggcagatccn

SEQ ID NO: 32654 - DNA, 493 bp, Homo sapiens
  misc_feature (1)...(493): n = A,T,C or G
aggggccnnnnnnncatagaaatgatgaccctcggcgaggaacctttgtgatctcttagcagaatagatttattatttgtattgcttgcagaataaagcctatccttgaaagctctgcatcatgggcagtgagctcagtggtatctggaggacagggcactggccactccagtcaccatcttctgccaggaagcctgcacctcaggggtgaattctttgccgaaatggattgccaaaacggtcaccagcacatttcccaggagcttgaagttctcaggatccacatgcagcttgtcacagtgcagttcactcagctgggcaaaggtgcccttgagatcatccaggtgctttatggcatctcccaaggaagtcagcaccttcttgccatgtgccttgactttggggttgcccatgatggcagaggcagaggacaggttgccaaagctgtcaaagaacctctgggtccatgggtagacaaccaggagccttccca

SEQ ID NO: 32655 - DNA, 500 bp, Homo sapiens
  misc_feature (1)...(500): n = A,T,C or G
agganaacaaaaaaatttgaacttgagagccntacgcagngngcnggaattcgcgagcacttctgggcccagcctcctgcaaggagactcttgaggctacatacaggccgccttccgtccctgtttcccccatccttctggtttgccccgggttgacgtctttttctttttgagggcccctggatatccatttttgaggggtacacccatctccccaacaatattagaagatagcatttggagggggagacccgtggttcaggccctagtgggccagccttggctgctccacccctcagtgtcctcaagactgggtaggaagaaccaggtgaccccaggggatctcagtccagagaaggtgccccagaagtggggaccacccagcctacagggaggagtttaggggcggggctcacagaggagtagtggatgatttctagccatgggtctgaagtacctgaccaacaggtgcctgcccggccccctgaagccagcctccn

SEQ ID NO: 32656 - DNA, 468 bp, Homo sapiens
  misc_feature (1)...(468): n = A,T,C or G
gtgggcnnnnaatcgagatcctagaacagcgttgcggaattccgcagggtcaccccgcagtgaagcttccttgtgggaggccctggaagcggatggatattacgcgcattcacctgacacgagacgcgcaacaccaacaggaccttgttaatccgcggctgattgatgggaagatgaccaggcggggagacagtccctggcaggtggtcctgctggactcaaagaagaagctggcctgcggggcagtgctcatccacccctcctgggtgctgacagcggcccactgcatggatgagtccaagaagctccttgtcaggcttggagagtatgacctgcggcgctgggagaagtgggagctggacctggacatcaaggaggtcttcgtccaccccaactacagcaagagcaccaccgacaatgacatcgcactgctgcacctggcccagcccgccaccctctcgcagacca

SEQ ID NO: 32657 - DNA, 474 bp, Homo sapiens
  misc_feature (1)...(474): n = A,T,C or G
ngccgagtcccctttnagngngcgtcgagatccatatcagtgtggtggaattccccggctcgagcggacggaaagacaagcatgaaagccaggagcatcccctaagcaggagcgtctcagccaagttggcaggtaaagcaagccaccctttgcctctgggagcttttccttttttaacagtactttgttgagagatgattcacatataataaaatttaccaacctttagattcagctcagtgacatcttaccgatgtctgcccatttgtgatcaccaccaaatcggcacatagggcatttccataccccaggatgtgttcacatgctcttatcctgctggtgcctgccacccagggtaactgctgttctgactcccatcaccctgaagcggtgctgcctatcctttaacttaatataaatgcagtcatacagcgtatacacttttgctaaaaatggggattttgagattttccc

SEQ ID NO: 32658 - DNA, 507 bp, Homo sapiens
  misc_feature (1)...(507): n = A,T,C or G
agaattcgaacaccgtccagagnggngttagactgacactatcaaggaaaaaaatcaaagagaaagaaagataaagagagacttcagttttccagtctagcatataaagagtttacaagtcaccattgcatcctagcaactaaaaagctgaacaaagtgaaaactaaacagctcttcttagctccatcagagaagtgaggtcacaggggcaaactgctccaccaaaaactggcgaaacaggtggatgccgagaattacagtcatgcatcgcttcacatcatggatgagttctgagaaacgcatcattgagcagtttcattgtgcagatatagaggtgctcacacacacctagattgtgtagccaactacacccctgtgctctgtgagatagcctgttgctcctaggctgcaaagctgtacagcattactgcactgaatactgtagcaattgtaacacaatggtgtttttgtatctaaacatagatatagaaaaggtacagtaaaaat

SEQ ID NO: 32659 - DNA, 464 bp, Homo sapiens
  misc_feature (1)...(464): n = A,T,C or G
agacggtctnnaaaagtgataccgtaactntcggaannnncnngaananaagagtgaatttgggtgctgacaaggcagcaagtttataagaattgttaagttattaaaacagactgcaatattgatggcgggctaattgattaaattttaaaatgtacttttccatgtttttctttgaattgtcagtaattttgtttcaactgacattcatacatacattattcacccaatgttgacaactagtagatttatatattttttatgttgcctatccttttttgggcaaggattaacagaatgtataatcacctacattataggtacactactaatcacttgctacttgaaaaaacctaaagctttgaaatctttttattattgcacacaaacttatgccaaaaatggagataaagagaaaaatgtcatccactaaaccccaacaaataatgttgacaatgtggtcg

SEQ ID NO: 32660 - DNA, 471 bp, Homo sapiens
  misc_feature (1)...(471): n = A,T,C or G
tacgttctgaatagccnatttatcgtaaatctngnaannnncnnggaaaancnggccaagnggatattgtgggcatgaatgacccctttattgacctcatttacatggtttacatgttccaatatgattccacgcggggcatattccatggcaccgtcaaggctgaaaacggcaagcttgtcatcaatggaaatcccatcaccatcttccaggagcgagatccctccaaaatcaagtggggcgatgctggcgctgagtacgtcgtggagtccactggcgtcttcaccaccatggagaaggctggggctcatttgcaggggggagccaaaagggtcatcatctctgccccctctgctgacgcccccatgttcgtcatgggtgtgaaccatgagaagtatgacaacagcctcaagatcatcagcaatgcctcctgcaccaccaactgcttagcacccctggccaaggtcatcg

SEQ ID NO: 32661 - DNA, 475 bp, Homo sapiens
  misc_feature (1)...(475): n = A,T,C or G
nttgatgtcatatccaggggttgtttacctagagatgttctggagaagactcaatgaggcagctgtgactgtgtcaagggaagccacgactctgaccatagtcttctctcagcttccactgccgtctccacaggaaacccagaagttctgtgaacaagtccatgctgccatcaaggcatttattgcagtgtactatttgcttccaaaggatcaggggatcaccctgagaaagctggtacggggcgccaccctggacatcgtggatggcatggctcagctcatggaagtactttccgtcactccaactcagagccctgagaacaatgaccttatttcctacaacagtgtctgggttgcgtgccagcagatgcctcagataccaagagataacaaagctgcagctcttttgatgctgaccaagaatgtggattttgtgaaggatgcacatgaagaaatggagcaggctgtggaagat

SEQ ID NO: 32662 - DNA, 477 bp, Homo sapiens
agaaaaaaattcgatgacccttggcttcgagatccctagtcagtgtcgtggaattcggatggactcgggccctggggccagagcagttgctgagagcctgtgaagccatcactgtggggaaagtggacttgagcagctggcgggagaagattgctcgggatgtggctggggccacctggggtaatggctctggggaggaggaggaagaggaggatggcccagcagtcctggtggagcagcagactgattcagcaatggagccaactggcccaacccaagagcgctacaaggatggggtggtgaccatcggctgtgtgggtttccctaatgtgggaaagtcctcgctgatcaatgggctggtggggcggaaagtcgtgagtgtctccagaaccccgggccatacccgatactttcagacctactttcttaccccctctgtgaagctctgtgactgcccaggcctcatcttcccatctc

SEQ ID NO: 32663 - DNA, 491 bp, Homo sapiens
  misc_feature (1)...(491): n = A,T,C or G
tatggaaagccttcgnannnatctcgagactcctcgcaagngccgcggaanncgcagaaacaggattccagaagcctctagggtttgcagggttctttttttgttttttttgttttttgagacagaatttcgctcttatcacccaggctggagtgcaatggcatgatctcgactcacggcaacctccacttcccgggttcaagtgattctcctgcctcagccttgagtagctgggattacaggcgcgcgccaccacgcgtggctaattttgtatttttagtagtgagagggttcttgtcacgaactcctgacctcaggtgatccgcccacctcggcctcccaaagtgctgggattacaggcgcaggcgtgagccaccgcccccagcctctagggttcttgccgacaccacccggngaataatattttatctcaataataaatcgaggaagccatctaacatatactcatatgctctccgatcgtctcccct

SEQ ID NO: 32664 - DNA, 494 bp, Homo sapiens
  misc_feature (1)...(494): n = A,T,C or G
ccatagaaacccntcgnannnncnnnnactgagaccctaggccagngcggnggaattcggcagagcgcagtttttgaagctgggagaacaggcagatgtgtgggacactcagggcccttcagatctcccccaggagccactgatacaggacttgagcttggagggagctggagtggccgcttgctgagtctttctccctggagctcgtgggcagctggttacctcgcgctggggcgaccctgacttaggacctcctgccgtttctctgggtgactgctctgtagtcgtgagtcgtctctttaatgctgagcatcagtacctgcacagccctgaatggagcagctgcccagaatctgtcttgtcatcgatagatggacagttgccgagtgtcctgcgtgccgactgactaaggagtttttgtctctgtcaccctgtcccctgtggttttatgaagacgttagttatgaatctgtgtttaggatgagaagatgtan

SEQ ID NO: 32665 - DNA, 472 bp, Homo sapiens
  misc_feature (1)...(472): n = A,T,C or G
agatgttctggaacagatgactacctgaaacancgggaanngncgnggaattcgccactgcactccagcttgggtgaccgtgagactcttaaagacagcggtttatacctttcttacctcanaaatccctgatcttggtcagctgacccttacctgatatggccccagatggccttgcataccccacagcatggggaactcactacttggctgaactccctctccatgtcacgtctcctccccacccccacccccggctttgctgtccccacagagaagaagctggaggagttctccgtggaagaggccgaggtgctacagatcctcacacaggtcaacgtggtgcgaagagagtgtgagatcgtgagtgtcagaggcgggcaggaactaaagtgctctccagggccgggggtgctcccttccaggtggggcccccgtgaccagcatctccttaccccacttccctccaccg

SEQ ID NO: 32666 - DNA, 478 bp, Homo sapiens
  misc_feature (1)...(478): n = A,T,C or G
atccaaaaccctcngangncnggtaagatacctagcacntncccagtagggggctctctgagtgcagggtctgaagctgattcccacttagcttggggtcataaccaaggggtttaataaataacccttgaagactggatcggatgaattggctttcattgtgttcctagcatcttctcaaatcaacttcccaggactccagggtgaaggaggaaaagaggcatggcccaggccctggggtgtgggatatggtctccctaggggatgacagttgggatcaatggcctagtgacttctcctctcccttcccccatgctgggacctaactggaaataaaaccttgactgttgcccgggagtcattttaccagtggatttctgccagggcttgtgtcctaggagaaggtttaagttaaaccagattgcccaggtctccaaacgatttgtcatgctgacctgagatcatcgaanggggcacc

SEQ ID NO: 32667 - DNA, 496 bp, Homo sapiens
  misc_feature (1)...(496): n = A,T,C or G
aggggccngcccncattgaaactgaatgcactcgcagngngcnggaattcagctgagtgcgggctggagcagcgagaatgcttcacggaggatgttggggagagaggatttgatttgccgagtggtttggagatctttaggggcgggtaggggaagagggtggctggacttaaggtaggagccgaaagtgggcatgggagcccatccccgtgggtgtgaggccggggtaggaccaggcttcccggctaggcacgcctggctggctgcctctgcctctactaacttcctttgtctctttatcctcctgcttaggccgngtcttcctctctctctgccattttctctatcagaaaacattaaagctgagtagaaacttcaagatgatcattctggcccagcccttttatctctttatctccaatggtgtgcgttttaagtttctctgacttggtttttctgtccctgtctcccacagttgttcccgctctgcacctgg

SEQ ID NO: 32668 - DNA, 496 bp, Homo sapiens
  misc_feature (1)...(496): n = A,T,C or G
taaagaaatttgtnngcntnnccnntatagagacctaaggacagtgccgnggaattccagggagcgtggctgtgctgtctgcagagcagaaccacaaggttgacacgtccgtccactacaacattcctgagctgcagtcctccagccgcgcccctccaccccagcacaatgggcagcaggagccccccactgcaaggaagggccccccaacccaggagttggaccgggactcggaggaggaggaagaggaggatgatgaagatggagaagatgaggaggaagtccccaagcgcaagtggcaagggatcgaggccgtttttgaagcttaccaggaacacatagaagagcaaaatctggagcggcaggtgttacagacacaatgtagacgactggaggcccggcactacagcctcagcctgacggcagagcagctctcccacagcgtggcggagttgaggagccagaaacagaagatggtctcagaacgggagcggct

SEQ ID NO: 32669 - DNA, 487 bp, Homo sapiens
  misc_feature (1)...(487): n = A,T,C or G
catgtgccccctttgaannncnnaactgagtctatggaagcgcggggaatttcggaggtggaggccggaaaggtcgcaccaagagataagctgctgccaacaccaaccgttccagccctggcgggcacgagaggaaactggtgaccaagctgcagaattcagagaggaagaagcgaggggcacggcgctgagacagagctggagatgaggccagaccatggacactacacccagcaatagagacgggactgcggaggaaggaggacccaggacaggatccaggccggcttgccacaccccccacccctaggacttattcccgctgactgagtctctgaggggctaccaggaaagcgcctccaaccctancaaaagtgcaagatggggagtgagaggctgggaatggaggggcagagccaggaagatcccccagaaaagaaagctacagaagaaactggggctcctccagggtggcagcaacaataaa

SEQ ID NO: 32670 - DNA, 476 bp, Homo sapiens
  misc_feature (1)...(476): n = A,T,C or G
ctcgagcccatagcacggcgggaagtanagntagaaattccccccgaattcgagaagcagacgctccctgaggacacggnatattaggccagnggccccgacttggctnncagtttgccaagaaaagagctntttttggcagtaactctccctccgaggagcctgctaaaccgcctggccagctctgtagaccgcagaggccagggcaagcacacactggccagacaccctgcccaggctcccaagtcctccccttgccctctagagacacagcatgggtaccagagaggcaggagagccagtcttgcaggcatgctgccaggtccgcatccatgaggacagaggaggcagaccacacctggcatgccagagcccgccctccctgccagccactcacagcccacaccctcttcctgacagggctggcaagaggagaacctcacctttctgtcattagcatctctggacctgacaga

SEQ ID NO: 32671 - DNA, 499 bp, Homo sapiens
  misc_feature (1)...(499): n = A,T,C or G
ngtgggggnnnnnnaactcgagatcctantncgtgtggnggaattccgcccacgcccgatggcaagaccatgctgcggcccgtgctgcggctcacctccgccatgacccgcgaggtggccaccgatcacaaagccttctacgtcctttttacctgggaccaggaggcccagatatacgagctggtggcacagactgtgtcggagcggaaaaactggtgtgctctcatcactgagactgccggatccctgaaagtccctgcccctgcctctcgccctaagccccggcccagcccgagcagcacccgagaacccctcctcagcagctctgagaacggcaatggtggccgagagacgtctccagctgatgcccggaccgagagaatcctcagtgacctcctgcccttctgcagaccaggccccgagggccagctcgctgccacggcccttcggaaagtgctgtccctgaagcagcttctgtttccggcggaggaagacaatg

SEQ ID NO: 32672 - DNA, 462 bp, Homo sapiens
attgagaccataggcttgaggtgcatttccattttctcagaggtcgtgggccggaagcggcagcggtcaggacccaacaggggagccaagaggcggagggaggaggcccggcagcgggaccaggaattctacatcccctaccggcccaaggactttgacagcgagcggggcctgagcatcagcggggaagggggagcctttgagcagcaggcagctggcgctgtcctggacttgatgggggatgaagcccagaacctgacgaggggccggcagcagctcaagtggtgagtgatcgagtgagccgcccctccatgctcggggtgagtgaccgagtgagctgctcctccgtgcctggggtgagtgatcgagtgagccgcccctccctccatgcccggggtgagtgagtgagtgagccgcccctccatgcccggggtgagtgatcgagtgagctgcccctccagg

SEQ ID NO: 32673 - DNA, 493 bp, Homo sapiens
gcctgatcccatcagggggctagatatacatgcaagtagttgaagacatagagatatgacaaaactggcacatgtgcctaggcaagtgtggcatggatttgatcctgaggccatgtttagaaaatggttcccagtgctaagagaatttaaaagtcttataataagagttataatagtaataggaacctgcttactgctcctttgtttgctacctgtacttcttcaaatgataaaaagcttcattgcaggccgggcgcggtggctcacgcctgtaatcccagcactttgggaggccgaggcaggtggatcacgaggtcaggagatggagaccatcctggctaacacggtgaaaccctgtctctactaaaaatacaaaaaaatgggctgggcgtggtggcgggcgcctgtggtcccagttgctcgggaggctggggcaggagaatggcgtggacccgggaggcggagctggcagtgagccgagatcgcgccactg

SEQ ID NO: 32674 - DNA, 477 bp, Homo sapiens
  misc_feature (1)...(477): n = A,T,C or G
aaaaaaattagagaaccnttngttttgagaccatagtcagtgtggtggaattcctgggaaagaatatttgatcatgggtctggatggggccacctatgacctcgagggacacccccagtacctgctggactcgaatagctggatcgaggagatgccctctgaacgcctgtgccggagcacccgccagcgggcagcctgtgcccagctcaacgacttcctccaggagtatggcactcaggggtgccaggtgtgagggctgccctcccacctccgctgggaggaacctgaacctgggaaccatgaagctggaagcactgctgtgtccgctttcatgaacacagcctgggaccagggcatattaaaggcttttggcagcnnngtgaanaanaaaaaaaaaaaaaaaaaaaaaaaaaaaaaaaaaaaaaaaaaaaaaaaaaaaaaaaaaaaaaannnnnnnnaaaaaaatcacccaccccc

SEQ ID NO: 32675 - DNA, 267 bp, Homo sapiens
  misc_feature (1)...(267): n = A,T,C or G
cagcccccttggataccctctggtttcaattgagcanagnccnggaannnnnnncgccagcacgtagaggaggctggctggcccgcgtgagtccacagtctcttccctttttcccccgcctctctgttcggccccctgcatagtccctgcgatgacggaggaggtggcccgggaagccctcctcagctttgaggactctaagtgctgctacagcagcacggtggctggagacctcgtcatccaggagctgaagcggcagaccctctg

SEQ ID NO: 32676 - DNA, 477 bp, Homo sapiens
  misc_feature (1)...(477): n = A,T,C or G
gaaaaaattagananccntnnnnttcgtagtccctagtcagtgtggtggaattcgccacattgaagaccaagtcccagaccaaattctacctggagttccactcgagctgcttggagagttttgtcaagagtcaggaaggagaaaatgaagaaggaagtgagggggagctggtggtgaagtttggtgagactcttccaaagctgaagcccattatctctgaccctgagtacctgctagaccagcacatcctcatcagcatcaagtcctctgacagcgacgaatcctatggcgagggctgcattgcccttcggttagaggccacagaaacgcagctgcccatctacacgcctctcacccaccatggggagttgacaggccacttccagggggagatcaagctgcagacctctcagggcaagacgagggagaagctctatgactttgtgaagacggagcgtgatgaatccagtgggcca

SEQ ID NO: 32677 - DNA, 484 bp, Homo sapiens
  misc_feature (1)...(484): n = A,T,C or G
natcggagaccactagtccagtgtggttgtattcggcgagtgagaagcatttatagtctgataacttgcagtagaggcattagccttcataatggggaacaccatgtttttgttaaaagctaggattgcaggaaggcccattcaggtgcccctgtgtttccaaagagagaaagccgttctctgggccaggcgcgctagctcatgcctgtaatcccagcactttgagaggccaaggcgggcggatcacttgaggtcgggagtttgagactagcctgaccaacatggagaaaccccatctctactaaaagtacaaaattagccgggcgtggtggcgcatgcctgtaatcccagctacttgggaggctgaggcaggagaatcgcttgaacccgggaggtggaggttgtggtgaaccaaggtcacgccattgcactccagcctgggcaacaagagcaaaactccgtctccaaaaaaaaactaggattg

SEQ ID NO: 32678 - DNA, 481 bp, Homo sapiens
  misc_feature (1)...(481): n = A,T,C or G
cgccgaattgagcccctngganattgagnacactagtccgnngcgtggaattcagtcgagtcagggttgccaaatgccagatgctggtcacctgcttctttatcttgctgctgggcctctctgtggccaccatggtgactcttacctacttcggggcccactttgctgtcatccgccgagcgtccctggagaagaacccgtaccaggctgtgcaccaatgggccttctctgcggggttgagcctggtgggcctcctgactctgggagccgtgctgagcgctgcagccaccgtgagggaggcccagggcctcatggcagggggcttcctgtgcttctccctggcgttctgcgcacaggtgcaggtggtgttctggagactccacagccccacccaggtggaggacgccatgctggacacctacgacctggtatatgagcaggcgatgaaaggtacgtcccacgtccggcggcaggagctggg

SEQ ID NO: 32679 - DNA, 463 bp, Homo sapiens
  misc_feature (1)...(463): n = A,T,C or G
aggccggttnnnnnnncccagttagcaagcaaagccgcgngnaattaagggcaacacagtcctgcatgccctagtgatgatctcggacaactcagctgagaacattgcactggtgaccagcatgtatgatgggctcctccaagctggggcccgcctctgccctaccgtgcagcttgaggacatccgcaacctgcaggatctcacgcctctgaagctggccgccaaggagggcaagatcgagattttcaggcacatcctgcagcgggagttttcaggactgagccacctttcccgaaagttcaccgagtggtgctatgggcctgtccgggtgtcgctgtatgacctggcttctgtggacagctgtgaggagaactcagtgctggagatcattgcctttcattgcaagagcccgcaccgacaccgaatggtcgttttggagcccctgaacaaactgctgcaggcg

SEQ ID NO: 32680 - DNA, 499 bp, Homo sapiens
  misc_feature (1)...(499): n = A,T,C or G
atttgactcgcaccacagtccgngnggngcaattcctggcagaaggtggtagcatcctcagcagagtggctgagactcgtcggcaggcaagcgaggctcagcagcgggcccaggcagccctggacaaggctaatgcttccaggggacaggtggaacaggccaaccaggaacttcaagaacttatccagagtgtgaaggacttcctcaaccaggagggggctgatcctgatagcattgaaatggtggccacacgggtgctagagctctccatcccagcttcagctgagcagatccagcacctggcgggtgcgattgcagagcgagtccggagcctggcagatgtggatgcgatcctggcacgtactgtaagagatgtgcgtcgtgccgagcagctactgcaggatgcacggcgggcaaggagctgggctgaggatgagaaacagaaggcagagacagtacaggcagcactggaggaggcccagcgggcacagggtattgn

SEQ ID NO: 32681 - DNA, 469 bp, Homo sapiens
  misc_feature (1)...(469): n = A,T,C or G
agccggntttnntnnanccatggaggctactgaagangccgcggaattcagacaaccgaactgcgatgatccagaaactgaggaagcagctctggtggctatagactacatcaatcaaaaccttccttggggatacaaacacaccttgaaccagattgatgaagtaaaggtgtggcctcagcagccctccggagagctgtttgagattgaaatagacaccctggaaaccacctgccatgtgctggaccccacccctgtggcaagatgcagcgtgaggcagctgaaggagcatgctgtcgaaggagactgtgatttccagctgttgaaactagatggcaagttttccgtggtatacgcaaaatgtgattccagtccagactcagccgaggacgtgcgcaaggtgtgccaagactgccccctgctggccccgctgaacgacaccagggtggtgcacgccgcgaaagctgcn

SEQ ID NO: 32682 - DNA, 487 bp, Homo sapiens
  misc_feature (1)...(487): n = A,T,C or G
agcccggccactgataccctatttagaggccgtaannccagaagctcaaccagtcacttaaaacgagattgcagtgatgttttacaactctgtgaacgcactaatagccactgaattctacactaacgtgtgcattttatgacaggagtgctgcatctggatggcatggcagagggaagccccagctgccactgctccagggacccttatagttccacggtgatggggaacagaaagaggctcttccaggaaacagccttggggacaaggagaccacacttctgggtgattcgaagatcagacaaggctcctgtaaaatgaacgaatgaagtgaatgaatgagacggaaatggggtctcgctgtgttgcgcgggctggtctcaatctcctgggctcaaaggatcctcctgcgcttgtcctcctgtaaggctgggattacaggtcctccagtgagcagaccccaagtcaggaggagaggggcaagaga

SEQ ID NO: 32683 - DNA, 466 bp, Homo sapiens
  misc_feature (1)...(466): n = A,T,C or G
nattgaganccnatcgagaccgtcaggccangnggnggaattcctcaccttctacagcagtgtgaaggcggagatgctgcacatgtacagccagaaggacccgctcatcctctgtgtgcgcctggccgtgctgctcgcggtgaccctcactgtgccagtcgtgctgttccctatccgccgggccctgcagcagctgcttttcccaggcaaggccttcagctggccacgacatgtggccatagctctgatcctgcttgttttggtcaatgtccttgtcatctgtgtgccaaccatccgggatatctttggagttatcgggtccacctcagcccccagcctcatcttcatcctccccagcatcttctacctccgcattgtaccctctgaggtggagcctttcttatcctggcccaagatccaggccctgtgctttggagtcctgggagtcctcttcatggccgtcagt

SEQ ID NO: 32684 - DNA, 465 bp, Homo sapiens
  misc_feature (1)...(465): n = A,T,C or G
nnnaacctcgagaccctagtccgngtggaggaccttcatataattaatcacttccctacggatggacattgagtttatttccaattttcacagttgcaagcaaagctgcaaaacacatcctcacgtagaaaaattggcttgcttatgacatgactctccagaatgaagtcccagaattgaaaatactcagtaaaaagctacaaactcagctgggcgcggtggctcacgcctgtagtcccagcactttgggaggccgaggcgggcggatcacgaggtcaggagatcaagaccatcctggctaacacggtgaaaccccgtctctactaaaaatacaaaaaattagccgggcgtggtggcaggcgcctgtagtcccggctactcgggaggctgaggcaggagaatggcgtggacccgggaggcggagcttgcagtgagtgtggagatcgcgccactgcagtccagcct

SEQ ID NO: 32685 - DNA, 492 bp, Homo sapiens
  misc_feature (1)...(492): n = A,T,C or G
ngggctcgagntcccctatncagngnggttcgtagtccctagtccgtgtggtggaattcccggtgcctgcaggggatggcagtgctcacagcctgagtgtccacgggaactgggggagagggagccttagttgtatggggttctactaggagagggttcaggggttacagaaagagcgtggctcctgaatctgaccagcgtgggttcaaatccaggctccatcctttcctcaccagtgttgttaccttggctcaattcctcattgtcctcagtccagtgggaataatcctgatgaacctactggggagaagggtgtccaaattggtgacgcagtgtgctttgctctcgccttctccgagggaaccttccttgaagcacccatcccctcttccttaatccccagcacactgtctagcacagtaggtgctcaataaaatcttgttgacttgcttaatgtgtcacctagtctagagactgtctcatagtaggttc

SEQ ID NO: 32686 - DNA, 452 bp, Homo sapiens
  misc_feature (1)...(452): n = A,T,C or G
naccgaaatacccgctctcctcggaanancccnnnncttnttnctccgagatcacttcaacaaaaagatgtatgaggagttcaagcagctggctctgtaggacgccaaagaaggctacagatatggtttggagtgcctttttcgatactacagttatggcctggaaaagaagttccggctggacatattcaaggattttcaggaggaaacggtgaaggactatgaagctggccaactgtatgggctggagaagttctgggccttcttgaaatattccaaagccaaaaatttggacattgaccccaaactgcaagaatacctcggcaaattccgacgtcttgaagacttccgagtagatccccccatgggtgaggagggcaaccacaagcgacactcattggtatcaggaggtggcggcggtgagggcaggaagcggtgcccctcccagtctg

SEQ ID NO: 32687 - DNA, 448 bp, Homo sapiens
  misc_feature (1)...(448): n = A,T,C or G
nattgagtacgctgcttactgcananccncnnanntnnnngagccggnctaagggacagtcagcaggttaacctggctcgtccattttaaaattggtattttcactcaaatttttctaaggctgagaggtactgcaactagagaacccgtgttttgacctggtgtcctcaaatttacccacatattcttttatttcactacctcccataactgggttttggaaccactgcttctgaccatggtcttggcagtcctctgcttgcgcccttttatcacgtgccctcagctgcccctgctctgtgctgtcgagtgccaacctctgcccctgctctgtgctgtcatgtgccagcgtctgcccctgctatgtgctgttgtgtgccagcctctttgggccctctgtggggctttactacatttagtcacctgtgggcgtggcagctaatcagcg

SEQ ID NO: 32688 - DNA, 466 bp, Homo sapiens
  misc_feature (1)...(466): n = A,T,C or G
agcccgtnttntnnnaaatgagantcatctgnagtgtcgcggaattcgcctcctccagacccagagatattccgccaacgcttcaggcgcttctgttaccagaacacttttgggccccgagaggctctcagtcggctgaaggaactttgtcatcagtggctgcggccagaaataaacaccaaggaacagatcctggagcttctggtgctagagcagtttctttccatcctgcccaaggagctccaggtctggctgcaggaataccgccccgatagtggagaggaggccgtgacccttctagaagacttggagcttgatttatcaggacaacaggtcccaggtcaagttcatggacctgagatgctcgcaagggggatggtgcctctggatccagttcaggagtcctcgagctttgaccttcatcacgaggccacccagtcccacttcaaacattcgtctcggaaac

SEQ ID NO: 32689 - DNA, 464 bp, Homo sapiens
  misc_feature (1)...(464): n = A,T,C or G
agccnnntnnnnnanncctggggtctatgcagagngcgcgaantcagaaggcttgtctgtcggccctgtctgaagtgacggtgcagccaggctgctccctgcccagcaaccccgaagccattgtgctggacgtcgactacaagtctgggaccccgatgcagagtgctgcaaaagccccatatctggccaagttcaaggtgaagcgatgtggagttagtgaacttgaaaaagaaggtctgcggtgccgctcatactccgaggatgagtgcagcacgcaggaggccgacggccagaagatctcctggcaggcagccatcttcaaactgggagacgactgccggcaggacatgctggccctgcagatcatcgacctcttcaagaacatcttccagctggtcggcctggacctctttgtttttccctaccgcgtggtggccactgcccctgggtgcggagtgatcgag

SEQ ID NO: 32690 - DNA, 467 bp, Homo sapiens
  misc_feature (1)...(467): n = A,T,C or G
nggacggtnnnnnnaaatgataactgagtacnctcgaggaanccntgntgntgatgcccgaagaggcgcggctcttggccgagatcggcgccgtgactctggtcagcgccccgcgtccagactctcggcaccacagcctggccctgacatccttcaagcgccagcaagaggagagcttccaggagcagagcgccttggcagctgaggcccgggagacccgtcgtcaggagctcctggagaagattacggagggccaggctgctaagaagcagaaactagaacaggcttcaggggccagctcaagccaggaggccggctcgagccaggctgccaaagaggatgagaccagtgatggccaggcttcgggagagcaggaggaagctggcccctcgtcttcccaagcaggaccctcaaatggggtagcccccttgcccagatctgctctccttgtccagctggccactgcc

SEQ ID NO: 32691 - DNA, 461 bp, Homo sapiens
  misc_feature (1)...(461): n = A,T,C or G
nnaaactgagaccctaggaagngtcgaggaccnttaaaaacatctttgggcctcatttgcgccccaggccccccaggctccgccaggctggggggtggaggtgcaggcagtggtggagagctgagtcctggactggcctaggagaccccagtcctggctgcacggcctcaaccacgtgacttggaggggcagctcctcctcttgacaccccagctgttcacccgcacagcctggagcccaccctgctgtcggggctgcggtgagaatctgctgagggcctgtgttgcagggtctggtgtcgcccagggaagttctgcaccaggtcgaatctccaggcctcctattgtgttttaatcacagcctacctgtctagacctagtgtgtcctacagggtgtgcggtggccaggccccagggggccccagggaccctcacctcccagcatctgtcacctcctgccct

SEQ ID NO: 32692 - DNA, 463 bp, Homo sapiens
  misc_feature (1)...(463): n = A,T,C or G
aggcccccnnnnnnnaaacttgattctatcagcagcgcgaatacctgaagcgctgcctcttcaccgtggagcccttgggggataaagagccttcaccagaacagcgccggcgcctcctccgaaacttctataccctggtcacctccacgcacttcccaccagagccagggccaccagagaagacagaagatgaggtctaccaggcccagctgcccagagcttgctacctggtgttggggactgaggaaccaggcacaggagtgcgtctggtggccttgcagctggggcttcggcggctgctgctgctgctgtctccccagagtcccacccatgggctgcgaagcctggccacccacactctgcatgccctcaccccacttctttgactacctagcagtgggtgatggacacagacatggggctgttagcgtctctctgtttattcgctcacaataatacacag

SEQ ID NO: 32693 - DNA, 464 bp, Homo sapiens
  misc_feature (1)...(464): n = A,T,C or G
agccggnnnnnnnnaacatagatgtctntactccagcgccgnggaattccaagccccgagtgtctcggcccccacgccgcaccctgcagcggtgcgccgggagctcggagccggcggctgccctgtctttggctggcctggccttcgcctgggcattcactgtctcgtcctactagtgtgatagtttttaaaaattgagaatcgcataaaagcaatgcatgctccctatcccactcccaattgcgtatattctccaaacggcatacagccacgttacaggctcctccaagcttgggttaagaacctccgtgttagtatagggagagcgcgccaaagctaccttaccttactgcttaccagcgtcacaagctgcttttcccaaggtagaggactttaattgacatcctggtgtgctatttctgtggtatttagttttgagggattccccccattattggaatata

SEQ ID NO: 32694 - DNA, 467 bp, Homo sapiens
gggggctgagaccctaggcagaattgtagacatctgtcagtgcggtggaattcggaatctgtaattctcacaggctgtcccatacattttaaatccaggaaatgtgctcacccatgagacagggatggcaagaagatatgaatgaaaagcaaccagtccgtaaaattggaagccatttcactccttaccaggtacaaagataacatgctgcatggatcagggacacaaacttacctaccttatgatgtagtgaaagaatctaaaacttttgtctcagcagactccctggaggaagccaataacaggaggccttgactaggagacctcaagccttggaatgtgcccagaccagtggggagggaaggctgggaggcagtcctcccttaccccttttctcccaggcagacctaccctgggttctctccaggcccctccgcctgagcaagtgctcagttggccactagctc

SEQ ID NO: 32695 - DNA, 509 bp, Homo sapiens
  misc_feature (1)...(509): n = A,T,C or G
gaggggtnnccccncatagaaaactgagtgtcntgtgcagngngcnggaattctcccacttttcccccaaaactgcgcctctttggggtcatcagtgaccttcgcagggtcaagtcatccccctctcctgtcccaggaccttaagcactgccctgttttacagaagaggaaactgaggccccgagaggtaaggcagccagctcagggtcatcgcccacgcccagaaatgccaggattcccacccggacctctgaccaccaagctccaccttagtctggcccggggtcatccctcaggtgctgcctcatgccttgggtctgtctctcagaccaccctggcccttgcccctgctccccagcctgactgaagctgggccaggcagagactgaagactgaacgagtgtggccagcattcctcctgcacctgcccggagcctccaggcccagccgtccatgttcccagaagtccagaagtggctttgctgctcctggactctcactggcccccc

SEQ ID NO: 32696 - DNA, 506 bp, Homo sapiens
  misc_feature (1)...(506): n = A,T,C or G
agccccccccnncccttganatcgatgtccgtgtgcgaggaattccccagcccggcagggaagaggccagcgtgaaggacctgggctcttggccgtggcatttccgtggacagcccgccgtcagggtggctggggctggcacgggtgtcgaggcaggaaggattgtttctggtgactgcagccgctgccgtcgcgacacaaggcttggtggtggtagcatttgggtctgagatcggcccagctctgactgaaggggcttggcttccactcagcatcagcgtggcagtcaccaccccagtgaggacctcgatgtccagctgctgtcacgtctgatagtcctctgctaaaacaacacgatttacataaaaaatcttacacatctgccaccggaaataccatgcacagagtccttataaaatagagtgcagtatttaaaccacccccccgnacatgtttccataaaatcaaaaaaggctttggctgtcctggactctcactggcccgcg

SEQ ID NO: 32697 - DNA, 488 bp, Homo sapiens
  misc_feature (1)...(488): n = A,T,C or G
ntcgaagtccctagtccagnggtctggnaccctactccgtgtggtggaattcgatggacaagatggagtcagggtgctgggtggggggccctatcaggactctgacccctccctcccctcaagatgtggatgagtgtgagacagaggtgtgtccgggagagaacaagcagtgtgaaaacaccgagggcggttatcgctgcatctgtgccgagggctacaagcagatggaaggcatctgtgtgaaggagcagatcccaggtgagccctggggcgggagaggggaggtcctcattcaaagagaaggcaggcaagccccttccccaggtagcagtggcagctccaggccctgccccatccctactgccacccagccccctggaggctgcactgagaccgggctctacatctgatctccaggttggctctcagcagccttataccttccagggtacaaagggaatcagacctggcatcaaatcagtctgcct

SEQ ID NO: 32698 - DNA, 450 bp, Homo sapiens
  misc_feature (1)...(450): n = A,T,C or G
aatgagacctgaggacgntgcgnggnaaccgccgctcgccccctgtgggggccttgccttgggcttcgggccgctgcgttccgccttgtcaggcgacaggtgccatgtgtctgtgccgtgcgacatatgaggagcagcggccatcagaggtgtgaggccctcgctggtgcacccctggataacgcccccaaggagtacccccccaagatacagcagctggtccaggacatcgccagcctcactctcttggaaatctcagacctcaacgagctcctgaagaaaacgttgaagatccaggatgtcgggcttgtgccgatgggtggtgtgatgtctggggctgtccctgctgcagcagcccaggaggcggtggaagaagatatccccatagcgaaagaacggacacatttcaccgtccgcctgaccgaggcgaagcccgtggacaaagtgaag

SEQ ID NO: 32699 - DNA, 453 bp, Homo sapiens
  misc_feature (1)...(453): n = A,T,C or G
natggaaaacccgtgatcgtcgcaagngcggnggaattcatttcttagggcagtgcctggccaataaaaagtgtctgttaaaccaagaaatcaccagtgtttgagctgagctgattaacctgcttcactcgcaagaaggaagggcttctctcttgccctttgatagaggtcaaaagaccagcatctctgtaggctctcagagtccctcaggagcataggggaaattgctctgtcagttttcttttttgagacggagtctcactctgtcacccaggctggagtgcagtggtgcaatctcagctcactgcaacctccgcctccctggttcaggcaattctctcgtctcagcctcctgagtagctgggattactggtacccgtcatcatgcctggctggtttttgtatttttgtagagatggggtttcaccatgttgttcaggctggtcttgaact

SEQ ID NO: 32700 - DNA, 472 bp, Homo sapiens
  misc_feature (1)...(472): n = A,T,C or G
agcgtnctnnaaatgatntccctaggcagtgccgnggaattcgcgatgcctgagggttagggatgtctccaccctgatggggtgtcccagagacattttcccatggcagtcctcctctctgagaccagggctgtcacttttctgccaggggtactgggtccccctcagcaccctccacagcacaggccttccaagtggatgtcccgttgccttattcccccagcccacaaaggcaccctggccttggcctgctgaagtgttaggaagagggtgggtgccctccagacctggggactgagtggggaaaggagttacacccgtgagtggggaatgaggctggtcctgcagcctctccctccgctcaaggcttgaaggtcggtggcggagggggtggctctcacagggcccaactctaaagtggaagaaccttgttagaccgagagcttgccatccagccaagctgctcgaggcc

SEQ ID NO: 32701 - DNA, 471 bp, Homo sapiens
  misc_feature (1)...(471): n = A,T,C or G
agcgggtnnnaactgactcagtgcatatgccgtgccgtggaattcgaagaaggaagaggagaaggaaattgtcccgaatccctgcagtctttctgtaggttgcggcacaacgccaggcaaaagaagaggaaggaatttaatcctaatcggtggaggtcgatttgagggtctgctgtagcaggtggctccgcttgaagcgagggaggaagtttcctccgatcagtagagattggaaagattgttgggagtggcacaccactagggaaaagaagaaggggcgaactgcttgtcttgaggaggtcaacccccagaatcagctcttgtggccttgaagtggctgaagacgatcaccctccacaggcttgagcccagtcccacagccttcctcccccagcctgagtgactactctattccttggtcccttgtattgtcggngacgattgcatgggctacgccaggaaagtaggctg

SEQ ID NO: 32702 - DNA, 491 bp, Homo sapiens
  misc_feature (1)...(491): n = A,T,C or G
ggggaagannnnnnnnaatcgatatcgtatgcatnggcggaattccagggggcaatggcggcttcctgtgttctactgcacactgggcagaaaatgcctctgattggtctgggtacctggaagagtgagcctggtcaggtaaaagcagctgttaagtatgcccttagcgtaggctaccgccacattgattgtgctgctatctacggcaatgagcctgagattggggaggccctgaaggaggacgtgggaccaggcaaggcggtgcctcgggaggagctgtttgtgacatccaagctgtggaacaccaagcaccaccccgaggatgtggagcctgccctccggaagactctggctgacctccagctggagtatctggacctgtacctgatgcactggccttatgcctttgagcggngagacaaccccttccccaagaatgctgatgggactatatgctacgactccacccactacaaggagacttggaaggt

SEQ ID NO: 32703 - DNA, 466 bp, Homo sapiens
  misc_feature (1)...(466): n = A,T,C or G
aggttctnacccgatcgagagcntaggccgtgcantcaaatgggaggccagtctagccaggagcgtgagagcccagacacaggaaggggccggtgcccgggctggtgcccaggctgttgacagagccagcactaaagtataggcggtcccaggaggtcctggtcgggagccagagggcctccgccaggcaggaggccaggaggctgaggagctcctccaggaggggctcaagcccgtcctggaggaatgtgataactaggttggggctggggaggcagcccagcgcgagtcctccccgggcaaataggctccgagggccccggggcctcctctcctcctctcaggcagcagggccctggagacaggcggaggcggggccagggccggtccctcaccccacatcgggatcggggccccccacttccccccaaggggccctgcccaccaccaccttcccggtgaccca

SEQ ID NO: 32704 - DNA, 465 bp, Homo sapiens
  misc_feature (1)...(465): n = A,T,C or G
agcnnnntnnnnncaactgagagccctctcagngncgnggaattcccgctcagcgcgcatcccctgcttcctggcaggggacacccgttccagtgagatgcccgagctcacctccatgcacaccctcttacttcgggagcacaaccggctggccacagagctcaagagcctgaaccctaggtgggatggggagaggctctaccaggaagcccggaagatcgtgggggccatggtccagatcatcacttaccgggactacctgcccctggtgctggggccaacggccatgaggaagtacctgcccacgtaccgttcctacaatgactcagtggacccacgcatcgccaacgtcttcaccaatgccttccgctacggccacaccctcatccaacccttcatgttccgcctggacaatcggtaccagcccatggaacccaacccccgtgtccccctcagcagggtctt

SEQ ID NO: 32705 - DNA, 465 bp, Homo sapiens
  misc_feature (1)...(465): n = A,T,C or G
atttgagnnactggagaccactaggcagngtggnggaattcgattgcaccactgcactccagcctgggcgacaaagcgagactccgtctcaaaaaaagagaaacatctttagcattttctaaggatccctgggggacgggaggcaggtgtgcggtgagttgggggattagaagctcccagggctcttccgtcagctgctgggaccccagatccactgtgactttccttcccagggaagacccttcgcacagtggagccgctggacagccgggtgcccctgactgcggtggctgtcatgcccgccccccacaccagcatcaccatggccagctctgactctaccctgcgctttgtggactgcaggaagcctggtctgcagcacgagttccgactgggcggtgggctgaaccctgggcttgtccgtgccctggccatcagccccagtggccgtagtgtcgtggccgg

SEQ ID NO: 32706 - DNA, 491 bp, Homo sapiens
  misc_feature (1)...(491): n = A,T,C or G
gatgcgtntnnnnnnnnnttcgattccctantcagtgtggtggaattcctcagagagaacccaccatggtgctgtctcctgccgacaagaccaacgtcaaggccgcctggggtaaggtcggcgcgcacgctggcgagtatggtgcggaggccctggagaggatgttcctgtccttccccaccaccaagacctacttcccgcacttcgacctgagccacggctctgcccaggttaagggccacggcaagaaggtggccgacgcgctgaccaacgccgtggcgcacgtggacgacatgcccaacgcgctgtccgccctgagcgacctgcacgcgcacaagcttcgggtggacccggtcaacttcaagctcctaagccactgcctgctggtgaccctggccgcccacctccccgccgagttcacccctgcggtgcacgcctccctggacaagttcctggcttctgtgagcaccgtgctgacctccaaataccgt

SEQ ID NO: 32707 - DNA, 465 bp, Homo sapiens
  misc_feature (1)...(465): n = A,T,C or G
atcgannnatcgtagaccatagtcagtgtggtggaattccagcccagtcaggttggctctagcagaggccagaaaaacctgaagagctactttcagccctcccctagctgtccccaagcctctcctgacatagagctgcctagcctaccactgatgagcgccctcatgaccccgaagactccagaagagaaggcagtggccaaagtggtgaaggggcaggccaagacttcagaagccaaagatgagaaggagttacggacctcattctggaagtctgtgctggcggggcccttgcgcacacccctctgtgggggccacagggagccatgtgtgatgcgtactgtgaagaagccaggacccaacttgggccgccgcttctacatgtgtgccaggccccggggtcctcccactgacccctcctcccggtgcaacttcttcctctggagcaggcccagctgaaccaat

SEQ ID NO: 32708 - DNA, 517 bp, Homo sapiens
  misc_feature (1)...(517): n = A,T,C or G
tggaggggnnnnnnnnnnagccccgatcaccgtccgagaggngctagatctcactgcgccgngncgncgagttagctcgttgccccgcgccacctccttgcacacctgatgtggggctgtgggggagcagcagaggtgaggacagcctctgctgcctcagcatcgtggggttctcattgctctgaaccctcagtagctgtcgctggtgtgaggggtcagcgcagcggccatcgggggtgaaacttgtccttcgcctctcagctgtcttctacgggccttgtcttcttgactccctgcctgtctagtcatgtatgagaagacacttcccggcagtgtgtgaacaggcacctgtggtgggaacgctgctgtctctgggctggccatctagagtgttaggatcccctgttgttgtagaggatgctgcacatttgccttcctgctttgagacgctttaatgacggagacctcttagtcccacaccttcctcctcaaagcccacgcatgctgcctactgacg

SEQ ID NO: 32709 - DNA, 495 bp, Homo sapiens
  misc_feature (1)...(495): n = A,T,C or G
tggaacaaannattcgaacttgacatcatcgtccagngngcnggaattcgcgcgatgtgtcccaccagtatggggccctgaccttcgtggatgaggtccatgctgtaggactgtatgggtcccggggcgctgggattggggagcgtgatggaattatgcataagattgacatcatctctggaactcttggcaaggcctttggctgtgtgggcggctacattgccagcacccgtgacttggtggacatggtgcgctcctatgctgcaggcttcatctttaccacttctctgccccccatggtgctctctggagctctagaatctgtgcggctgctcaagggagaggagggccaagccctgaggcgagcccaccagcgcaatgtcaagcacatgcgccagctactcatggacaggggccttnctgtcatcccctgtcccaagcacatcatccccatccgggtggcaatgcatcactcaacagcaagctctgtgattg

SEQ ID NO: 32710 - DNA, 457 bp, Homo sapiens
  misc_feature (1)...(457): n = A,T,C or G
nttgagactctagccatgtggggaattctgatgctccaagcgactgatgggcgctggatgaagtggcacagtcagcttccctgggggccggtgtcatgttgggctcctggggcgggggcacggcctggcatttcacgcattgctgccaccccagatccacctgtctccactttcacagcctccaagtctgtggctcttcccttctgtcctccgaggggcttgccttctctcgtgtccagtgaggtgctcagtgatcggcttaacttagagaagcccgccccctccccttctccgtctgtcccaagagggtctgctctgagcctgcgttcctaggtggctcggcctcagctgcctgggttgtggccgccctagcatcctgtatgcccacagctactggaatccccgctgctgctccaggccaagcttctggttgattaatgagggcatggggtggtcc

SEQ ID NO: 32711 - DNA, 527 bp, Homo sapiens
  misc_feature (1)...(527): n = A,T,C or G
aggaggggnnnnnnnnnnagcattgataccctcagnannnncctcgatccacatctcagagtggtgcaattcgaccagccgggtcccaatgataagaagtcagaactgctgccagctgggtggaacaacaataaagacctgtatgtcctccggtatgagtataaggatgggtccagaaagctccttgtgaaagccatcaccgtggagagcagcatgatcctcaatgtgctggaatatggctcacagcaagtggcagacttgaccctgaacttggatgattatatcgatgcagaacacctgggtgacttccacaggacctacaagaacagtgaggagcttcggtctcgtattgtgtctggaatcatcacacctatccatgagcagtgggaaaaggctaatgtaagcagtccccaccgggagttcccccctgctaccgccagagaggtggacccactccggattcctccacaccacccacacaccagtcggcagcctccctggtgtgatcccctgggcccgtttgttgg

SEQ ID NO: 32712 - DNA, 465 bp, Homo sapiens
  misc_feature (1)...(465): n = A,T,C or G
aggacgggggngnnaactgagaaactggtngcangaagngcgnggaannaagtggggcaggctgcatggaaaatatccgcagggtcccccaggcagaacagccacgctccaggccaggctgtccctactgcctggtggagggggaacttgacctctgggagggcgccgctcttgcatagctgagcgagcccgggtgcgctggtctgtgtggaaggaggaaggcagggagaggtagaaggggtggaggagtcaggaggaataggccgcagcagccctggaaatgatcaggaaggcaggcagtgggtgcagggctgcaggagggccgggagggctaatcttcaacttgtccatgccagcagcccctttttttccagaccaagggctgtgaacccgcctggggatgaggcctggtcttgtggaactgaacttanctcgacggggctgaccgctctggcccagggtggn

SEQ ID NO: 32713 - DNA, 502 bp, Homo sapiens
  misc_feature (1)...(502): n = A,T,C or G
aacattgatcaccgtccagagnggngttagatccgccatcccacgtgaccgcgccgccccccagctccaccgctgagcccgctcgccatggccctcttcggggccctcttcctagcgctgctggcaggcgcacatgcagagttcccaggctgcaagatccgcgtcacctccaaggcgctggagctggtgaagcaggaggggctgcgctttctggagcaagagctggagactatcaccattccggacctgcggggcaaagaaggccacttctactacaacatctctgaggtgaaggtcacagagctgcaactgacatcttccgagctcgatttccagccacagcaggagctgatgcttcaaatcaccaatgcctccttggggctgcgcttccggagacagctgctctactggttcttctatgatgggggctacatcaacgcctcagctgagggtgtgtccatccgcactggtctggagctctcccgggatcccgctggacgga

SEQ ID NO: 32714 - DNA, 468 bp, Homo sapiens
  misc_feature (1)...(468): n = A,T,C or G
nttcgcagtccctagtcatcgaggtgcatttcgggcgatgctgggtgtggcaggcctcctgagccggctggaggaggacaggctgctgctgctaccgaaggaggatgtctgtcgctgggccttggctgtaggcagctgggcttactgccgggccctgcatacacagcgcctccagagggagtgacagttggatacagccaggcagggtttctgccctgccgaacactttccctcccacctgcctgctcctggcgccttctccctaagggtagactcttctgcctactgaagtgggtttgctgcacattgactggtcaggggcagagtctgggtgctgtcctttggccacgtgtggggacttgtctagaccagaatgaaagggacagggtcccagacacgtttgggggtcctgattctgggctggacacggttgtggatccagagaagaggcctagtctccaataaatn

SEQ ID NO: 32715 - DNA, 477 bp, Homo sapiens
  misc_feature (1)...(477): n = A,T,C or G
gcccccgctttgagaccctancatagagaccactatccagcgtggaggaattcccaactccgtgccccactctatatataccttgccagctgctgatactccgttggccttatagccctcctcaggccctgagcggactaatcccactgcacggtgcgaggcttggagttggcatgaacgacgggccttggccttgactattccatttactacagacaatattgtcgacttgccgggagatgactctaatgagctattggcaaggtacccgctgacagatagccagctagcgctagtccgggacatccgacgacggggcaaaaacaaggtggcagcccagaactgccgcaagaggaagctggaaaccattgtgcagctggagcgggagctggagcggctgaccaatgaacgggagcggcttctcatggcccgcggngaggcagaccggaccctggaggtcatgcgccaacagctgac

SEQ ID NO: 32716 - DNA, 425 bp, Homo sapiens
gccaccgcgcccggcccagcctgtatgtttaaaagaaaatgagtctgtaaccatcatttatagaacttgtagttgttgctgtttgtagcttcaagtcctttctcaagagtaagctgcaaactgccaacagcaatcaagcctgtcctgctgccactgcccggccccactgggccacctggaggcagagtcccgcccacctcagtgtcagcttgggatttgatttgccgttcctgtttttgattgacccaattcagctgctaatgataataatactattattgttattgagggtttacatttgttgggctcttactgctgcacgggaggcattgtgctgagcgtttccattgttagccagtttagtcctcataacacaagtctttgaagtagaaactattattagcccatttttaaaaggggaaatt

SEQ ID NO: 32717 - DNA, 477 bp, Homo sapiens
  misc_feature (1)...(477): n = A,T,C or G
nttcgcgacccctagtccagtgtggtgtcgagatcactatccaagtgctgcaattttattgtatagttgatcatcctctaccatactccctggaacccacccaagagaaatacgaccagagagactcgcatgcaaacattcctaacagcattgtccacgccaaccagaacgtccaccaaccgcggatgcatgagcaccaaggaaatggccatgaaaagaaactgctgagacatgggcctacatggatgaacctcaaaaacgctaggccaggtgaaagatgccagacaagaaaattccattattccatttatgtgacacttcttaaaaaggtaaatctctagagaggaagcaaattcatgtttgcctgggggtgagagtgggatcaactgcaaacaggcacgaaggaacttttttgggtgatgaaaaataaaactttggatgtcgaacatattttgaaactagattgcaatgatagtt

SEQ ID NO: 32718 - DNA, 463 bp, Homo sapiens
  misc_feature (1)...(463): n = A,T,C or G
nttcgagatctctagtccgtgtggnggaattcactaaaaatacaaaaatcagccaggcatggtggtgcccgcctgtaatcccagctacttgggaggctgaggcaggagaatcacctatgggaggcagaggttgcagtgacctgagatcaagacatcgcactccagcctgggcgacagagtgagactccacctcggggggaaaaaattgaatatagcaaaacccacaaaatctgacgagtgcagcccaggaaccggagtgagggacagagctggggtttagggactaggctgcccacaccccagccctgagcccagccatgagccagcgacagctcatggggactgactggggttctgagagacagaggctggccagggaggggatgagcatcaggaagtagcaaccagcactggggtggggtggggggttagtgactctggtgcttttccttctggggtggag

SEQ ID NO: 32719 - DNA, 256 bp, Homo sapiens
  misc_feature (1)...(256): n = A,T,C or G
tgnngctggaccccacccctgtggcaagatgcatcgtgaggcagctgaaggagcatgctgtcgaaggagactgtgatttccagctgttgaaactagatggcaagttttccgtggtatacgcaaaatgtgattccagtccagactcagccgaggacgtgcgcaaggtgtgccaagactggccctgctggccccgctgaacgacaccagggtggtgcacgccgcgaaagctgccctggccgccttcaacgctcagaan

SEQ ID NO: 32720 - DNA, 487 bp, Homo sapiens
aggggctcacaatgagatcgatgtgtatgtgcaggaactcgggccctgtcctattgctcagtggtctgcgtgcaaggcagttacttcctggaccgtgtgtgagaagcaaatggcaacagcttggccttgcctctccaggagccaccgtcacagacctggggtggacccggaagccaggaggtatagtgactcttgctgtgctccttgcctgcccataggtcctggtccagtggcgggaagctgtgtcagtgcagatgtattaccgacagcaggaggactgtgccatctgggaggcccagaaggtgctggacaggggctgtctgcggacctggtttcagcgctggtgggactgcagccggaggtcagcccagcagagactgcagctggagagggcagtgcaacaccaccaccggcagctgctgctggaggggctggcccggtggaagacgcaccatctgcagtgtgtcaagaagaggctcctgcacag

SEQ ID NO: 32721 - DNA, 518 bp, Homo sapiens
  misc_feature (1)...(518): n = A,T,C or G
tggaggggnnannnnnnnagccctgatcaccgtccgagnggggtagatggccacttaaggaccagccgaggccagccttctccgccattcggcggaaccccccaatggggggcaacgtggtcatcttcgacacggtcatcaccaaccaggaagaaccgtaccagaaccactccggccgattcgtatgcactgtacccggatactactacttcaccttccaggtgctgtcccagcgggaaatctgcctgtccatcgtctcctcctcaaggggccaggtccgacgctccctgggcttctgtgacaccaccaacaaggggctcttccaggtggtgtcagggggcatggtgcttcagctgcagcagggtgaccaggtctgggctgaaaaagaccccaataagggtcacatttaccagggctctgaggccgacagcgtcttcagcggcttcctcatcttcccatctgcctgagccagggaaggaccccctcccccacccacctctctggcttccatgctccgc

SEQ ID NO: 32722 - DNA, 469 bp, Homo sapiens
  misc_feature (1)...(469): n = A,T,C or G
catcgagatccctagtcatcgagctgccctacaaactgaggcaatcgcattcgcataggctgagtagcgtggtcattctactctgatcgngctgctgggcacccgcattgacctcagtcccacgacagtgatgtccgagggcgcccggaacattgcttcagccatgaaggctcatggtgtggacaaggtcgtggcctgcacctcggctttcctgctctgggaccctaccaaggtgccccctcgattgcaggctgtgactgatgaccacatccggatgcacaaggtgctgcgggaatcaggcctgaagtacgtggctgtgatgccgccacacataggagaccagccactaactggggcgtacacagtgaccctggatggacgagggccctcaagggtcatctccaaacatgacctgggccatttcatgctgcgctgcctcaccaccgatgagtacgacggacacagcacc

SEQ ID NO: 32723 - DNA, 471 bp, Homo sapiens
  misc_feature (1)...(471): n = A,T,C or G
ntcgagaccactagtcatagaggtgcatatcagtgtggtggaattcgtgaggatgagtcagatgaggcggaggaagaataggaagacagcgaggaatgcagcgaggaagaggatggctacagcagtgaggaggcagagaatgaggaagatgaggatgacaccgaggaggctgaagaggacgatgaagaagaagaagaagagatgatggtgccagggatggaaggcaaagaggagcctggctttgacagtggtacaacagcggtggtggccctgatacgagggaagcagttgattgtagccaacgcaggagactctcgctgtgtggtatctgaggctggcaaagctttagacatgtcctatgatcacaaaccagaggatgaagtagaactagcacgcatcaagaatgctggtggcaaggtcaccatggatgggcgagtcaacgggggcctcaacctctccagagccattggg

SEQ ID NO: 32724 - DNA, 467 bp, Homo sapiens
  misc_feature (1)...(467): n = A,T,C or G
ttttgatgacccctagtccatagaggtgcgatntcgagggaagggactagcgggagagagcaagggaggggagggcacagacagagaggctacagggcgagctctgactgaagatggccctttgaaatataggtatgcacctgaggttgggggagggtctgcactcccaaaccccagcgcagtgtactttcactgctgccgacaggaacctggggctgagcaggttatccctgtcaggagccctggactgggctgcatctcagccccacctgcatggtatccagctcccatccacttctcacccttctttcctcctgaccttggtcagcagagatgacctccaactctcacccaccccctctaccatcacctctaaccaggcaagccagggtgggagagcaatcaggagagccaggcctcacttcaatgcctggagggcctccactttgtggtcagcctatgctggg

SEQ ID NO: 32725 - DNA, 455 bp, Homo sapiens
gagccgggttgcgtaaggtaagggactcttcatatttttcttaaatcatatggagcaggctgggtgtggtggcttatgcctataatcagagcactttgggaggccagggtgggttgattacttgaggtctcgggagcgccctcctgccgaccccaggtcccaccaccaccgtacccgggaccctcgggacaacggctccaggtccggggacctcccctatgatgggcggctactggaggaggctgtgaggaagaaggggtcggaggagaggaggagaccccacaaggaggaggaggaagaggcctactacccgcccgcgccgcccccgtactcggagaccgactcgcaggcgtcccgagagcgcaggctcaagaagaacttggccctgagtcgggaaagtttagtcgtctgatctgacgttttctacgtagcttttgtatttttttttttaattg

SEQ ID NO: 32726 - DNA, 511 bp, Homo sapiens
  misc_feature (1)...(511): n = A,T,C or G
ggagataanaananaaacctgatccccatcagggggtagaactgcattctcaccctggagcttggtaaagtcttgggagataataagcctgttggattgtgcgggtcccagatgtggatgcggattatccttctcctgagtgcctactgtgtgcctggcactgccatgtatgatttcatttacttttcagacttccctccagagtagctattactgctccatgttatggacaagaaaactggggctcagagaggggaagtgaccagctcaaggccacccagcaggacagtgacagagcttggctcacatgggaacccaggtttcctggctgtataggaaggagaagttactgacgtgtgtgagctccatgctccacagtttgcagggggcggtcacccatcttttccccagtccctgcagcacggggcttgttgtcctgacactccagctgtgacctctgcgacagcatgcccttgtctgcctgtgtcctgctgcatccccgcacttaacn

SEQ ID NO: 32727 - DNA, 474 bp, Homo sapiens
  misc_feature (1)...(474): n = A,T,C or G
agttgaacccttnnagnggggtcgtagtccctagtccgtgtggtggaattcgaaaatggctgcaattacaacaagaagtgaaggaagaagactggtgacatctctgaaggatgcagttgaggttgatccaagtttatccgaatatgctacctttctgagccttaaaccttcatctctcaggtgttgattttcttctgatagcttcatcatttctccctgaagtcttttacactcttctgttagtttccttgtttcagtatcatgaagtgaagcactgtgtggttgtggcgtgggcccgtcttgcttagatgcattcagtgggacagctttgctgggttccatgtcattcaatttatcattttcattggggatctccatttggaatccattaattcatgaggttttgcctcattccacacagcttccatatctgaagtgtttagtggagcaaaaattgtaccataaacttgtgtt

SEQ ID NO: 32728 - DNA, 216 bp, Homo sapiens
agctacgagtgtctgtgcaagcccgagttcacaggtctcacctgtgtcaagaagcgcgcgctgagcccccagcaggtcacccgtctgcccagcggctatgggctggcctaccgcctgacccctggggtgcacgagctgccggtgcagcagccggagcaccgcatcctgaaagtgccatgaaagagctcaacaagaaaacccctctcctcaccgagg

SEQ ID NO: 32729 - DNA, 528 bp, Homo sapiens
  misc_feature (1)...(528): n = A,T,C or G
tggaggggnnnaannaanagatttgatcnccntnnnnnnnnnttcgaaccactatccagagtggtgtaattccgccgtggcgcacgtggacgacatgcccaacgcgctgtccgccctgagcgacctgcacgcgcacaagcttcgggtggacccggtcaacttcaagctcctaagccactgcctgctggtgaccctggccgcccacctccccgccgagttcacccctgcggtgcacgcctccctggacaagttcctggcttctgtgagcaccgtgctgacctccaaataccgttaagctggagcctcggtggccatgcttcttgccccttgggcctccccccagcccctcctccccttcctgcacccgtacccccgtggtctttgaataaagtctgagtgggcggcnnanaaaaaaaaaaaaaaaaaaaaaaaaaaaaaaaaaaatttnnnnnntttttttttttaagggggttttaaaaccccnttannnnnnctnntggggccctttttgacccccccctttttgtc

SEQ ID NO: 32730 - DNA, 462 bp, Homo sapiens
  misc_feature (1)...(462): n = A,T,C or G
aggcccggnnnnnnnnnacaactgatactnctcgaagngtcgtggaattccaggagctgatgcggcgcaaggaggagatagaagcgcagatcaaggccaactatgacgtgctggaaagccaaaaaggcattgggatgaacgagccgctggtggactgtgagggctacccccggtcagacgtggacctgtaccaagtccgcaccgccaggcacaacatcatatgcctgcagaatgatcacaaggcagtgatgaagcaggtggaggaggccctgcaccagctgcacgctcgcgacaaggagaagcaggcccgggacatggctgaggcccacaaagaggccatgagccgcaaactgggtcagagtgagagccaaggccctccacgggccttcgccaaagtgaacagcatcagccccggctccccagccagcatcgcgggtctgcaagtggatgatgagattgtgg

SEQ ID NO: 32731 - DNA, 501 bp, Homo sapiens
  misc_feature (1)...(501): n = A,T,C or G
aggatgtncccaaggagccccccaatcgaganccnatagaagagcgcgtggaannccgcncctgtaccacgagtcatggctgtgggcaccagtaatgtgctgggacaggtacccaatccagactctgaagccatccctgtactggtggtacctcttggagctgggtttctacctctcactgctaatcaggctgccctttgatgtcaagcgcaaggatttcaaggagcaggtgatacaccacttctgggcggtcatcctgatgaccttctcctacagtgccaacctgctgcgcattggctctctggtgctgctgttacacgattcctccgactacctgctggaggcctgtaagatggtcaactacatgcagtatcagcaagtgtgcgacgctctcttcctcatcttctcctttgtcttcttctacacccgactggtcctctttcccacccagatcctctacaccacatactacgagtccatcagcaacaggggccccttctn

SEQ ID NO: 32732 - DNA, 527 bp, Homo sapiens
  misc_feature (1)...(527): n = A,T,C or G
aggagcnnnnnnnnnnnnanncctagancaccgtcagagtggngttcgaaccactatccacgtggnggaattcggctgagaaacagccagcctgctacccccaggatccagcacccatttggctctgtgccctttggctatggggtccgggcctgcctgggccgcaggattgcagagctggagatgcagctactcctcgcaaggctgatccagaagtacaaggtggtcctggccccggagacgggggagttgaagagtgtggcccgcattgtcctggttcccaataagaaagtgggcctgcagttcctgcagagacagtgctgagctgagtctccgccttgctggggcttgtcctagaggctccagctctggcacagtggttcctggctgctgccatgtctcaaatgaggagggagagaaggaggccgccagactcgagaggtgggaggaactccttgcacacaccctgagcttttgccacttctatcatttttgagcaactccctctcagctaaaaggccacccct

SEQ ID NO: 32733 - DNA, 438 bp, Homo sapiens
ctccttacagaatgcctgaacagttccattgactcaaagtgaagatcaaaagaaccaaatgacagcaatagccaagtgtaatcatcagtaaccctgtgttctatccacagttaaaagaatattggcagagaaacagccttggtgttccagcaggagtgaagaggaacaggaaaacgagtggcagtagccctgaaacagccacttctggtggttgccactcacctgaggatagatggagtctcgttctgtcacccaggctggagtgcagtggcgcaatctcggctcgctgcaagctctgcctcccggattcccgccattctcctgcctcagcctccctagtagctgggactacaggcgccccccaccatgcccggctaatttttgatatttttagtagagacagggtttcactgtgttagccaggatggtctcgatctc

SEQ ID NO: 32734 - DNA, 495 bp, Homo sapiens
  misc_feature (1)...(495): n = A,T,C or G
aggatgtcccnaggtgccnnncaatcgagaccatttgaagagcgctggaattcgctgcaggtgtattgagaagaaaggagagaagtggaatggagatgtacacgccatcccgaagggttaaattttttatttatatacagaacacttttttttccctgcctgaaaatgattaaagggaatgtttggctgcttggcaagagtctgccctgatattcaggggagattagagcagctttgtagataagctcaaaaaatctactgagccacatagttatttccgaggtcctccaagaagtcaccagtgttggggtattgatggcgtctgataatgttgcctatctggaacctgaagatgggtacatcttttagaggatgatatttccataaattgtaacacatgtggaagaaaggagtagtatcaacatgtattttattctcaattgcctaataactgattaccttagctcctcatctgaatgtttcagattctgacct

SEQ ID NO: 32735 - DNA, 473 bp, Homo sapiens
  misc_feature (1)...(473): n = A,T,C or G
agggggntnnnaactgttacgtnaatcagcgacanngcnnggcgangnacgcaggttcaatgcgttaaacgctgaatgacgatgggtggctaccatcaaatcctttttctgggattacagcatttctgccatatagggattacgtttaacgcggacatacggcgctaatttcggataaaccgaactcacgcgatttaacaagaaaggtaagatcgtatcggcagattcatctgaagcaccgatagttaatacgccctgaagattactgaacattaatgatgagcaggcctcatcattaaaacgcaggattttcctggcgcaaccaataagttgaatgccatgttcaactaacagtttgttgcgaccgtgacgagcgaacagttctttcccaacgagttgttacacacgctgcatttgctgacttacggcggactgagtacgacacacagcggcagctgcggcagcataagtgt

SEQ ID NO: 32736 - DNA, 497 bp, Homo sapiens
  misc_feature (1)...(497): n = A,T,C or G
aggatgtcncnagggtgncnnncaactgagaaccctcgaagacgctggaanccatggcggcggcggcggtagccaggctgtggtggcgcgggatcttgggggcctcggcgctgaccagggtgactgggcgaccctccgttctgttgctgccggtgaggcggtagagcgccggggccgacacgcgccccactgttagaccacggaatgatgtggcccacaagcagctctcagcttttggagagtatgtggctgaaatcttgcccaagtatgtccaacaagttcaggtgtcctgcttcaatgagttagaggtctgtatccatcctgatggcgtcatcccagtgctgactttcctcagggatcacaccaatgcacagttcaaatctctggttgacttgacagcagtggacgtcccaactcggcaaaaccgttttgagattgtctacaacctgttgtctctgcgcttcaactcacggatccgtgtgaagacctacacagat

SEQ ID NO: 32737 - DNA, 474 bp, Homo sapiens
  misc_feature (1)...(474): n = A,T,C or G
cggatagcggggcccccncctgaaaaactanatcnntggaagngcggnggaanncgaacgagcctttgcggggtttctcctggctgtcctccgaccccggcggtctcgaaagcgacacgctgcagtgggtggaggagccccaacgctcctgcaccgcgcggagatgcgcggtactccaggccaccggtggggtcgagcccgcaggctggaaggagatgcgatgccacctgcgcgccaacggctacctgtgcaagtaccagtttgaggtcttgtgtcctgcgccgcgccccggggccgcctctaacttgagctatcgcgcgcccttccagctgcacagcgccgctctggacttcagtccacctgggaccgaggtgagtgcgctctgccggggacagctcccgatctcagttacttgcatcgcggacgaaatcggcgctcgctgggacaaactctcgggcgatgtgttgtgtccct

SEQ ID NO: 32738 - DNA, 471 bp, Homo sapiens
  misc_feature (1)...(471): n = A,T,C or G
gtaagagccgggccnnnnncctgagaactgagaacctcggagaancccgcccanacctctctctcctcggccctcgtaagctgtccgcggtctgtttggcccgaacggcggcggaggcgctgatcatggcgacattcatctcggtgcagctgaaaaagacctcagaggtggacctggccaagccgctggtgaagttcatccagcagacttacccaagcggcggggaagagcaggcccagtactgccgcgcggcggaggagctcagcaagctgcgccgcgccgcagtcggtcgtccgctggacaagcacgagggcgcgctcgagacgctcctgagatattatgatcagatttgttctattgaacccaaattcccattttctgaaaatcagatctgcttgacatttacctggaaggatgctttcgataaaggttcactttttggaggctctgtaaaactggctcttgcaagct

SEQ ID NO: 32739 - DNA, 458 bp, Homo sapiens
  misc_feature (1)...(458): n = A,T,C or G
nactgaaaactgagtacnctcgaagngcggnggaattccaggccctgaagctgcacgcctgcgtttccggtgcttccactatgaggaggccacagggccccaagaggccctggcccagctccgagagctgtgtcgccagtggctgcgtccagaggtacgctccaaggagcagatgctggagctgttggtgctggagcagttcctgggcgcactgccccctgagatccaggcccgtgtgcaggggcagcggccaggcagccccgaggaggctgctgccctagtagatgggctgcgccgggagccgggcggaccccggagatgggtgagtgagtgtccacgagtggggttcaggactggagcatcatccagctcggcctcaccctgggcagcaccacgctttgccagacacacgttctcccttgtggtacagaagtggccacctgcaacagagaccctgn

SEQ ID NO: 32740 - DNA, 472 bp, Homo sapiens
  misc_feature (1)...(472): n = A,T,C or G
tggagttgcggggccnnnnncctgagaactganatcgtcgaggnncacaaaacaagaaaaacaggtcagttgtcagaactagacaagttactctcttcatttaaaagtctgttagaagaaacggagcactccgagatacagatcaaagaagaatctaaaactgcagtggagatgcttcagaatcagttaaaggagctaaatgaggcagtagcagccttgtgtggtgaccaagaaattatgaaggccacagaacagagtctagacccaccaatagaggaagagcatcagctgagaaatagcattgaaaagctgagagcccgcctagaagctgatgaaaagaagcagctctgtgtcttacaacaactgaaggaaagtgagcatcatgcagatttacttaagggtagagtggagaaccttgaaagagagctagagatagccaggacaaaccaagagcatgcagctcttgaggcan

SEQ ID NO: 32741 - DNA, 493 bp, Homo sapiens
  misc_feature (1)...(493): n = A,T,C or G
agggaggccaaggggnnntttcgattacattcacagtggnggaattcgaggcaggccccgagctcggggaaggggttttcccttcctctctgacccagatctgcgcgcggcctagcccgggcctcatttcttatccccgccaagggtttcctctcagtcatttgtttaccagaaacatgaaaactgcctgtctggccgggccgcacttgtggcccccgggaccccacctctggccccacctccctcaagtctgcgccccgtccccagccagacccactcgctgccgggaccctttcactgccccggtggagtgaatagaggatgaggggccctgaccctgtgtctacaactgctgcaccccatcccgaccctgtctccgccacctcgcagccccattaaagcgctctcatctgggctccggttcacttctngnnaaaaaaaanaaaaaaaaaaaaaaaaaaaaaaaaaaannnnnncccccggcatgctgtgc

SEQ ID NO: 32742 - DNA, 491 bp, Homo sapiens
  misc_feature (1)...(491): n = A,T,C or G
tgattgcnggnntncctcntcctgagacccctcgcagtgtcgnggaanncgacgagctgaccttcaccaagagcgccatcatccagaatgtggagaaacaagagggaggtttgtggcgaggggactacggagggaagaagcagcttgggttcccatcaaactacgtggaagagatggtcaaccccgtggccctggagccggagagggagcacttggacgagaacagccccctaggggacttgctgcggggggtcttggatgtgccggcttgtcagattgccatccgtcctgagggcaagaacaaccggctcttcgtcttctccatcagcatggcgtcggtggcccactggtccctggatgttgctgccgactcacaggaggagctgcaggactgggtgaaaaagatccgtgaagtggcccagacagcagacgccagggtgagattctgctggaaccttctggggggcagtgtgtgggcccgtcaggcagct

SEQ ID NO: 32743 - DNA, 493 bp, Homo sapiens
  misc_feature (1)...(493): n = A,T,C or G
agggaggggaggggnnnattgatttgatncactatcagagtgggcagggctggccacaggggcgtccacccaggacaccgtctgggtcccactcaggcccagtcccctcccagggcctggtctgagccccacacggccatctgcccagtccttgactcgtccatggagctgagggtcggaggaaccttccttgggggcagcagcccttcccgggggcctacccagtgccccacagcagaacccgtgggcgctcgtgttgtgcgggccctgctcctctgccccgaaaccactggctggtcccttccctgagccctggccaagattcaggctgcaggggaagaaagaacatgaccgggaggttgtgaccccaacccaaggtcaccccccaggggtgccgcatacaggaggtgcttaataaacgggtcttttgaagaanaaaaaaaaaaaaaaaaaaaaaaaataaaaaaaaaaaaaaaaacaaggaaagggggcc

SEQ ID NO: 32744 - DNA, 450 bp, Homo sapiens
  misc_feature (1)...(450): n = A,T,C or G
nttcgagttccctagcccagtgtggtggaattccactgaaagaagctgagagcctacaagttgcagtgaaggcctcacagatgggcgccgtgagtcaatcatgtgaggacagctgtggagactctgtcttggcggacacactcagttctcatgatgtaccaggatcaccgactgcctcattagtcacaggagggagagaaggaagaggctgttcggatgtggatcccgggatccagggtgtggtaaccgacttggccgtctctgatgcaggggagaaggtggaaagtagaaattttccaggttcttcacaatcagagattatacacgccatacagaatttaacccgtctgttatacagccttcaggccgccttgaccattcaggacagccacattgagatccacaggctgtgtctccagcagcaggagggcctgtctctcggccactcta

SEQ ID NO: 32745 - DNA, 474 bp, Homo sapiens
  misc_feature (1)...(474): n = A,T,C or G
tggacgagcagggtaggagaaccctattctactggaanngcgnggaantctgcatatatacataatgaggtatcttggtaggtctcatgtctaaacattttattcatttatgttttatatataccttatacatgtagcctgaaggtaactctatacagtattttaaataattttgtacatgaaacaaagtattgattgtggtcaggtgtggtattttccacttgtggtgtcatgttggtgctcacagttttggggctgggcacggtggctcacgtctgtaatcccagcactttgggaggccaaggtgggtggatcacttaaggtcaggagcttgagaccagcctggccaacatggtgaaaccccatctctactaaaaataccaaaattagccaggcatggtggcaggtgcctataatcccagctactctggaggctgnggcaggagaatcacttgagcccaggaggcggaggtt

SEQ ID NO: 32746 - DNA, 497 bp, Homo sapiens
  misc_feature (1)...(497): n = A,T,C or G
ntttagggaggggnaggggnnnnattgtaatacattcacagtggngcaattccagagggatcagcagctccagggaaggcctggctgccccgcttctaaatgccactccccctcccatcagcgttcgtgctgtcagccttgcagccttctcctactcattccagctccaatacccagcggctgccagaccgagtgaccggcggcttctcagtgaatggacagctcattggcaacaaggccaggagccctgggcagcatgacggcacgtacttcgggcggctgggaatcgcaaaccctgccacggactttcagttggaagtgactcctcagaacattacgctgaaccccggctttggtgggcctgtgttttcctggagggaccaagctgtgctgcggcaggacggggtggtggtgaccatcaacaagaagaggaacctggtggtgtctgtggacgacggtggcacctttgaggttgttttgcaccgagtgtggaaggg

SEQ ID NO: 32747 - DNA, 498 bp, Homo sapiens
  misc_feature (1)...(498): n = A,T,C or G
tgtaggcaggggaggggnnnaattgaaatcgaatcactatcagcgnggncgaattcagcggatgaacaccaacccttcccgaggcccctaccacttccgggcccccagccgcatcttctggcggaccgtgcgaggtatgctgccccacaaaaccaagcgaggccaggccgctctggaccgtctcaaggtgtttgacggcatcccaccgccctacgacaagaaaaagcggatggtggttcctgctgccctcaaggtcgtgcgtctgaagcctacaagaaagtttgcctatctggggcgcctggctcacgaggttggctggaagtaccaggcagtgacagccaccctggaggagaagaggaaagagaaagccaagatccactaccggaagaagaaacagctcatgaggctacggaaacaggccgagaagaacgtggagaagaaaattgacaaatacacagaggtcctcaagacccacggactcctggtctgagcccaata

SEQ ID NO: 32748 - DNA, 498 bp, Homo sapiens
  misc_feature (1)...(498): n = A,T,C or G
cggttaccnnnnnnnttttgaaactgagagcatatccangngcnggaattcgaggcccgagtgcaagctcaacgatgagatgcggtttgtcacgcagattcagcacatccacaagctgggccggcgctggggccccaacgtgcagcggctggcctgcatcaagaagcacctcaaatctcagggcatcaccatggacgagctcccgctcatagggggctgtgagctcgacctggcctgctttttccggctgattaatgagatgggcggcatgcagcaagtgactgacctcaaaaaatggaacaaactagcagacatgctgcgcatccccagaactgcccaggaccggctggccaagctgcaggaggcctactgccagtacctactctcctacgactccctgtccccagaggagcaccggcggctggagaaggaggtgctgatggagaaggagatcctggagaagcgcaaggggccgctggaaggccacacagagaacgn

SEQ ID NO: 32749 - DNA, 221 bp, Homo sapiens
  misc_feature (1)...(221): n = A,T,C or G
cctgngaaagnngangctctcatgaacatgcaatgagaagactgatcaatctgttacggcagtcccagtcctactgcacagacacagagtgtcttcaggaattaccgggaccctctggtgataatggcatcagtgttacaatgatcttggtagcctggatggttattgcattgatgctgttcttactgagacctcctaatctaagaggatccagcctacct

SEQ ID NO: 32750 - DNA, 495 bp, Homo sapiens
  misc_feature (1)...(495): n = A,T,C or G
ngacgccnnnnnnnaactgataactaggactctggcaatnncgagggccttgggcagagttatgcctggcatatagagaactcttagagtcagctgtgagcccctcgttgccagaggtgtgcaagcagaggcaggatggcccccagtggagtcctgcatggaagaagctgggttcgaccagctttcagatgctcctggtgctaaaacccaggcttcccctgaggggctttggggattctagcaggtacgtttttctccctgcctagctgtcaagattaaaactctgtgttgattgaaacttttatatattgtggtccctctggggaagagaacagagggcttccaaagcattacaatcttgcaaaacctcacaagcagataccgccacggtcccacacggccagcatatttcctgcttggctttttggggccctccgctgatgggggacaggggcagctggtgcacaggttgcccttaatcggagcccctcagag

SEQ ID NO: 32751 - DNA, 499 bp, Homo sapiens
  misc_feature (1)...(499): n = A,T,C or G
gaggctcnnnnnnaactgaaactgagcgctgtcgccagnggncgaattccaccaatacacacaaattttttaatcccatgaccaggccacggtcaaggctgtttttgagtatgagtgcagtcgtgtccatcctccatggcacagccctcctgctgccaggacctgcttgaactaccagggccacaggagggggataatcagagcttgaggctggcactctgactgctggcttttcccagacagcccaagggccggaacagcaggtggcttctcagttcctctgggcctggagtgacacaggaaggatctgcacttcctctgtgctgcttgccagccttgcagttggagttttaagcagaggtgacatctggttgacgcctcaggtgaaaatctggttttaaaatgtaacttctgcacaggctccttcctgctttgtaggctgggaagatgcccctggggtaggggtgctgattacctcagccatgtggaggaaggctgg

SEQ ID NO: 32752 - DNA, 491 bp, Homo sapiens
  misc_feature (1)...(491): n = A,T,C or G
naggcttttnnnaactgtaactagagcgtcacanggncaattcggattcttggaggaatgcatacattgctccgggatcactgtgaggattaggggggatggtgtgggggaagggcctgtcatatggtgaaagctgggtgagtgtgcctcacgtcctagctgtgtgggctgggacttttaactgcccctctctaaacccgatcttcattattatttcttaataattgtgtgcttctgagccagtcacttaaacactgagcctccctttcttgtgctacgagctgagaagcttaatacctatgtcacagaatggctgtgaggatccacggtggtgggataaattgggtgtctgtgtctgtgcctggcatgtatcaagccttccagaagcttggtggccggttcttgggctctgggaaggtagatagagcccagggaggggccctgtgttctttctgtgcccacagatgcagcctatccacgaggtgctgcgg

SEQ ID NO: 32753 - DNA, 500 bp, Homo sapiens
  misc_feature (1)...(500): n = A,T,C or G
agcattgatcaccgtccagagangggttagaaagcgcttcatctgaaatagggccatgatgattagctctctctttccttcctttggcttcattgctgtattccatgtgggtcttgatatcttgaaactggatgagatacccaaatagtcagtccctgaatataaatcatttccttgtacagaatcactgccaaactcagtatggttaaaagatttttaacacccagctgcagcattcactctggttagaattggccatttaaatttatttcacatatgtaagtatcatatcctttataatgcattcttaattgttgctcagttcttccagattgaattcctttaaaaaattccttatgtaatcttttaattctagttggaaaacatcacttgacagttgctgtttatacaggcatgcctcgttttattgtgcctggctttattgtactttgcagatactgtgtttttcacaaatggaaggtttgtggcaaccctgcgtt

SEQ ID NO: 32754 - DNA, 493 bp, Homo sapiens
  misc_feature (1)...(493): n = A,T,C or G
agtgttccnaaggggnnnnaaactgagatccntatcgagtgccgtggaattcggcggtccagccctgatgattggccccacctcctgctgccccataaccctctcttcatttcggctttttcatttaccctcatttagagccatttgcagagatttagaaagatttacagtaacgaatggattcctatataaagattatttttatactttttgcagcaaaaggaaattgtaatatttgtacagtgttcaagtgaataaaaaccatgcctaaggctaaaaaaaaaaaaaaaaaaaaaaaaaaaaaaaaaaaaaaaaaaaaaaaaaaaaaaaaaaaaaaaagggggccctttttttaaaggggccccataaaacccggtgaaaacccccgggggggctttttatgggcccccccttttggtggtcccccccccccgggtttttttttggcggggggggggccccccccctttttttttttaaaaaaaagggggan

SEQ ID NO: 32755 - DNA, 352 bp, Homo sapiens
  misc_feature (1)...(352): n = A,T,C or G
gagggggnnnnnncctgaaaactagcactatcagaagggcaaagcgagcgctcgagtgaccagggctcgaataagccggatgaccaggctacactgagcatactggatgccaagcgtgagcagtacggcactatcctgtgccttacttgaggcttgctcgtacacctgccaatgagctttgctgatgaagagaagaagtggcatgccattgtgtgagccggagacgatgtattctagaagtcccgggtcacagtgaagcatctcgaagagattgtagagaagctaaaaggagaacttgaaagttcggaccaggtgagggagcacacgtcgcatttggaggcagagctggaaa

SEQ ID NO: 32756 - DNA, 487 bp, Homo sapiens
  misc_feature (1)...(487): n = A,T,C or G
ggagtcctcacaatgagaccctactgcagngngccggaattccangagggagggttacagcttctaaaaagagctggaaagacactgctctgctggcgggattttaggcacaagccctgctgatgggagagggctaggagggagggccgggcctgagtacccctccagcctccacatgggaactgacacttactgggttcccctctctgccaggcatgggggagataggaaccaacaagtgggagtatttgccctggggactcagactctgcaagggtcaggaccccaaagacccggcagcccagtgggaccacagccaggacggcccttcaagataggggctgagggaggcccaaggggaacatccaggcagcctgggggccacaaagtcttcctggaagacacaaggcctggccaagcctctaaagatgagaggagctcgctgggcgatgtttggtgtggctgagggtgactganacagtatgan

SEQ ID NO: 32757 - DNA, 485 bp, Homo sapiens
ccgcgcttgaaaccctgtaagccgtaggaagtgtgcgggaattcgtttttcgctcgtagactgcggctcttactcgggcagctgaagcggtgcggcggtcagagaagtggcctaaaacttcggcgttgggtgaaagaaaatggcccgaaccaagcagactgctcgtaagtccaccggtgggaaagcccccctcaaacagctggtcacgaaagccgccaggaaaagcgctccctctaccggcggggtgaagaagcctcatcgctacaggcccgggaccgtggcgcttcgagagattcgtcgttatcagaagtcgaccgagctgctcatccggaagctgcccttccagaggttggtgagggagatcgcgcaggatttcaaaaccgacctgaggtttcagagcgcagccatcggtgcgctgcaggaggctagcgaagcgtacctggtgggtctgttcgaagataccaacctgtgtgccatccacgcta

SEQ ID NO: 32758 - DNA, 486 bp, Homo sapiens
  misc_feature (1)...(486): n = A,T,C or G
ggttagagtccctannnagngnggtcgagntccatagtcagtgtggtggaattcggatgagctggtcaactatgtcaacaaacggaataccacgtggcaggccgggcacaacttctacaacgtggacatgagctacttgaagaggctatgtggtaccttcctgggtgggcccaagccaccccagagagttatgtttaccgaggacctgaagctgcctgcaagcttcgatgcacgggaacaatggccacagtgtcccaccatcaaagagatcagagaccagggctcctgtggctcctgctgggccttcggggctgtggaagccatctctgaccggatctgcatccacaccaatgcgcacgtcagcgtggaggtgtcggcggaggacctgctcacatgctgtggcagcatgtgtggggacggctgtaatggtggctatcctgctgaagcttggaacttctggacaagaaaaggcctggtttctggtga

SEQ ID NO: 32759 - DNA, 488 bp, Homo sapiens
  misc_feature (1)...(488): n = A,T,C or G
cgagagcattgagaccacttgacaccagtaggaagtgnggnggaattcgcgtggtccaaggccagggcctgagtacgcgctggctctgcctgatcggctatggcgtgcccctgctcatcgtgggcgtctcggctgccatctacagcaagggctacggccgccccacatactgctggttggactttgagcagggcttcctctggagcttcttgggacctgtgaccttcatcattttgtgcaatgctgtcattttcgtgactaccgtctggaagctcactcagaagttttctgaaatcaatccagacatgaagaaattaaagaaggcgagggcgccttcctctacctgctgcactgcctgctcaacaagaaggttcgggaagaataccggaagtgggcctgcctagttgctggggggagcaagtactcagaattcacctccaccacgtctggcactggccacaatcagacccgggccctcagggcatcag

SEQ ID NO: 32760 - DNA, 495 bp, Homo sapiens
  misc_feature (1)...(495): n = A,T,C or G
atttggctcgcaccacagtccangnggtgcaattcataatggccatcagaggtcagtcacaggtgttaggcaggcatctatgaagctggggatgatagcactgacttcagtgcttggacgagaaccagaagagagtgtgtagaaaaagcacagccagcctcccataaaaggacagactcctgtgacaaccttgtcactctgttcctccctgatactctggggaggtggaggccagtgggcagttctgaaagctcagcaggtttggagccattgggtgtggactcctctcccagtgttcctcctgggtgtccacagatgttattgaatgcacactggaaccctgcacaggtaaactgaggctttattggcgtgactgccaaaggtcacacagggtggtttggcagagctgggattagaagcccagcctgtctctcttcaataataatggagtcctgggagggttactangctntagcctcaatctgtggcggcagn

SEQ ID NO: 32761 - DNA, 484 bp, Homo sapiens
  misc_feature (1)...(484): n = A,T,C or G
agtgctccccctgaatcctacgcaggngcnggaattcccagctggtgacctctggccagaaacatccctgtccaggccttgctctacccaggatcaatgcaggagacacctcatctacttggcccacccaggccgtgccaggcttgtgctctgatgcagagcccatggctgccgcgactacatgctcagcctctgggagggggtgtgtgagtgagcaagtgggggttccagctggccgcgccaagcactggcacaggagcgggctccgtgcaaggcttgtggctggaccaggcatgtcacactgaagggaatgtgttggtgcccaaacaggggtccccacgaccccgaagcccagagggggtgtaacagcatggtaatagctcttagcatttgataatgcctgcagcccaacagatggcggtgtgttaacaactctgtcagttccatcgccctgctcaggcctgcatctccaaggctgacttgg

SEQ ID NO: 32762 - DNA, 493 bp, Homo sapiens
  misc_feature (1)...(493): n = A,T,C or G
tggcaganaaaaanaagttcgaatacctattcagngngcttttgataacctccgccagtgtcgcggaattcccgggacaccagcttgggccggtggccagggcaagtctttcttcgctatgatggagcactcctctgtgggggatccctgctctccggggactgggtgctgacagccgcccactgcttcccggagcggaaccgggtcctgtcccgatggcgagtgtttgccggtgccgtggaccaagcctctccccacggtctgcagctgggggtgcaggctgtggtctaccacgggggctatcttccctttcgggaccccaacagcgaggagaacagcaacgatattgccctggtccacctctccagtcccctgcccctcacagaatacatgcaacctgtgtgcctcccagctgacggccaggccctggtggatggcaagatctgtaccgtgacgggctggggcatcacgcagtactatggccaacaggccg

SEQ ID NO: 32763 - DNA, 445 bp, Homo sapiens
  misc_feature (1)...(445): n = A,T,C or G
ggctggacccagagactctggacccggggcctccccttgagtagagacccgccctctgactgatggacgccgctgacctggggtcagacccgtgggctggacccctgcccaccccgcaggaaccctgaggcctaggggagctgttgagccttcagtgtctgcatgtgggaagtgggctccttcacctacctcacagggctgttgtgaggggcgctgtgatgcggttccaaagcacagggcttggcgcaccccactgtgctctcaataaatgtgtttcctgtcttaacaaaaaaaaaaaaaaaaaaaaaaaaaaaaaaaaaaaaaaaaaaaaaaaaaaaaaaaaaataaaaaaaaaaaaaaaatatataaaaaggacagaaaaaaatgaactaacaaaactgaaaaaaaggtnnantnatctcggttccctctgcgttccgcgccc

SEQ ID NO: 32764 - DNA, 467 bp, Homo sapiens
  misc_feature (1)...(467): n = A,T,C or G
aatcgagaatcgtaagccgtgnggnggaattcgcagcacagacagtgaggacgaagaagaggaggacgaggaggaggaggaagacgaggagggcattggctgtgcagcccgtggaggggccacccctctgtcctaccccagccctggccctcagcctccaggccccagctggacagccacctttgacccagtgcctacagatgccccgaccagcccccgagtctccggggaggaagagctgcacactgggcctccagccccacaggggcccctcagtgtgccccagggcctccccactcagagcctggccagccctcctgcccgtgacgccctgcagctcaggtctcaggaccccacacccccctcagcacctcaggaagccacagaaggcagcaaagtcacggagccctcagccccttgccaggccttggttagcatcggggaccttcaggccaccttccacggga

SEQ ID NO: 32765 - DNA, 452 bp, Homo sapiens
gttccatcccccagcctgaatatgtgaaccagccagatgttcggccccagcccccttcgccccgagagggccctctgcctgctgcccgacctgctggtgccactctggaaaggcccaagactctctccccagggaagaatggggtcgtcaaagacgtttttgcctttgggggtgccgtggagaaccccgagtacttgacaccccagggaggagctgcccctcagccccaccctcctcctgccttcagcccagccttcgacaacctctattactgggaccaggacccaccagagcggggggctccacccagcaccttcaaagggacacctacggcagagaacccagagtacctgggtctggacgtgccagtgtgaaccagaaggccaagtccgcagaagccctgatgtgtcctcagggagcagggaaggcctgacttctgctggcatcaagag

SEQ ID NO: 32766 - DNA, 482 bp, Homo sapiens
  misc_feature (1)...(482): n = A,T,C or G
gctggatccatatnangnggtcgagatcactagtccgtgcggtggaattcgatcgtgtctgcttcccagtaccgcaagttcgatgagttccagacaggcatcctcatctacgagctgctgcaccaacccaacccgttcgaggtgcgcgcccatctgcgggagagagactaccggcaggaggacctgccgccgctgcccgcgctgtccctctactcacccggcctgcagcagctggcacatctgctactggaggccgaccccatcaagcgtatccgcatcggcgaggccaagcgcgtgctgcagtgcctgctgtgggggcctcggcgcgagctggtgcagcagccggtcacctaggaggaggcgctgtgcggcacgctgcacaactggatcgacatgaagcgggccctgatgatgatgaagtttgcggagaaggcggtggatcgcaggcggtgcgtggagctggaggactggctttgctgccg

SEQ ID NO: 32767 - DNA, 486 bp, Homo sapiens
  misc_feature (1)...(486): n = A,T,C or G
agctgctccccctgagacctctcggagngngcnggaattcggaccccctctgcatgctgctgctcatcgaccacctggccttgcgggcccggaactacgagtacctgatccgcctcttccaggagtgggaggctcatcggaacctgtcccagctccctaattttgccttctctgttccactggcgtatttcctgctgagccagcagacagacctccctgagtgtgagcagagctctgccaggcagaaggcctctctcctgatacagcaggcgctcaccatgttccctggaggtgagtgagcgctgtgtctcgcctggggtaggggtgtgtcctgtcagccgtgggggctgctcttcctggtggtggaggccaggtcccagtccttccccacacttgtagaaacatgcattctctggtagggcctgcaaacctgtcctaccaaacctgaaagagggtcggctcatctcggaacccgctgcgtgccaa

SEQ ID NO: 32768 - DNA, 468 bp, Homo sapiens
  misc_feature (1)...(468): n = A,T,C or G
attgagaatcgatagcctcaggccgngnggnggaattccccgcttcgcgcggacgcgcagagcctatactgccgaccctgaccaccctctgggcgtacactgacccgtacccaaacaatgcattggacgccggcaccgcctccgtgcctgcgttcatgctggaaagcgccacactcactgtccttatgctgtcccaggaagacagcgccctgactcgggccagtgtgtgtctgaaaatgatgcagcaattcctgagccaagaggaacttgacccccagagtgtggaaagaaagaccatctccccaggctatgccatcaccatacacagtggcaccttcacctgggcccaggacctgccccccactctgcacagcctagacatccaggtcccgaaaggggcactggtggccgtggtggggcctgtgggctgtgggaagtcctccctggtgtctgccctgctgagagagn

SEQ ID NO: 32769 - DNA, 479 bp, Homo sapiens
  misc_feature (1)...(479): n = A,T,C or G
ccccccccccgcccccccaattgagacccttgatagagngctgtaagtcggattacccccagnttggcagccccaagtgaggggccgtggctgtggcatccagagtccctgcctggaccagcctctccactcatgtgactctttccaacctgctttgtggcactggggcaggggccgggggcagtctgagagaggccattctttcccaacacctcttggggagtttagggtgggggggggcgcggctgggaggagggcaggcatcggggagccgggagcctgaccctcatctttcttccaaacaggctcagagggtgtcctgcaccggggcctgggcaggagggaggtgcttctagttctgccaggagacaggttagctgctccccacgtcagctgggacaccccgacttttgtttaccagagaaaaagggagggggagagggctgcctttggacttgtcccgggacacctaggctagg

SEQ ID NO: 32770 - DNA, 481 bp, Homo sapiens
  misc_feature (1)...(481): n = A,T,C or G
ngttcgagtccctagtcagtgtggtggagttccgtaagctgaggatctgggataccacgcagaaggagcacctgttgaagtatgagtaccatcctttcgctgggaagatcaaagacattgcttggactgaagacagtaagaggatcgccgcggtcggggaaggaagggagaagtttggagcagtcttcctctgggatagtggctcttctgtgggcgagattactggacacaacatagtcatcaacagcgtggacatcaagcagagccggccataccggctggccacgggaagcgatgataactgcgcggcattctttgagggacccccattcaagttcaagttcacaagttggcgaccacagccgctttgtcaactgtgtgcgattctctcctgatgggaacagatttgccacagccagtgctgacggccagatatacatctatgacgggatgactggggagaaggtgtgcgcgctgtgcg

SEQ ID NO: 32771 - DNA, 495 bp, Homo sapiens
  misc_feature (1)...(495): n = A,T,C or G
agcggnccncncncaatagaaaaccangtgcatcgcaggnaaccgggngcataccattttatatggtgtgagagcttcagaccaaggagacatttcaccatctctcctcctttcctctggggggactgcagttgaggaaagcgtgccatggggtaaggggacattggtggccacattttggtgacagacccctgctgttgtctctgtgtccccattctctggactctggcctgccctcctagagcttgtgactccctctcttccagccccacccccatggtatgtatattccttacaagtcctccacaagagcagctgtctaggatgcggggaggggaggctccttcccttacggagcgtggagagaagggagcagccttgttgctgtatttttggttttgtttcagttgggcaggcatgggatgggagaggggctcagccactttcctccagaatcttccctcagcccctccaactgcatatgtaatcctactn

SEQ ID NO: 32772 - DNA, 489 bp, Homo sapiens
  misc_feature (1)...(489): n = A,T,C or G
ngtttgagtccctantcagngnggtcgagatccctantccgtgtggtggaattccttgcaaagaaaatcatcttaaatgccgtgtttggtttcataaacaacccaaagcccaagaaacctctcacgctctccctgcacgggtggacaggcaccggcaaaaatttcgtcagcaagatcatcgcagagaatatttacgagggtggtctgaacagtgactatgtccacctgtttgtggccacattgcactttccacatgcttcaaacatcaccttgtacaaggatcagttacagttgtggattcgaggcaacgtgagtgcctgtgcgaggtccatcttcatatttgatgaaatggataagatgcatgcaggcctcatagatgccatcaagcctttcctcgactattatgacctggtggatggggtctcctaccagaaagccatgttcatatttctcagcaatgctggagcagaaaggatcacagatgtggcn

SEQ ID NO: 32773 - DNA, 473 bp, Homo sapiens
  misc_feature (1)...(473): n = A,T,C or G
ggtgtagcccccccctaggagaccattantgaggcgtcggaccnnnccngagcacancagngatgaatgcaagaggcgtttctataagaattggcataaatttaagaagaaggtctttaccaagtactgcaagaaatggcaggatgaggatggcaagaagcagctggagaaggacttcagcagcatgaagaagtactgccaagtcatccgtgtcattgcccacacccagatgcgcctgcttcctctgcgccagaagaaggcccacctgatggagatccaggtgaacggaggcactgtggccgaaaagctggactgggcccgcgagaggcttgagcagcaggtacctgtgaaccaagtgtttgggcaggatgagatgatcgacgtcatcggggtgaccaagggcaaaggctacaaaggggtcaccagtcgttggcacaccaagaagctgccccgcaagacccaccgaggcctgc

SEQ ID NO: 32774 - DNA, 267 bp, Homo sapiens
  misc_feature (1)...(267): n = A,T,C or G
tggcnctcnctttgatgncctatggtataacnctcgccanngngcnggaanncctgnctcaaaaaacaaaacaaaacaaaaaagtgttgaattgtttgtcatttacttagatttaaactagatgaagggtgcattgactcatccaggaagagctggcgggttgggctcccagtcgcagatggacatggccagcacccccaagccctcaccagatgaccagggctgctccatccacctgtggggtttccctttcctcgtctccctcct

SEQ ID NO: 32775 - DNA, 494 bp, Homo sapiens
  misc_feature (1)...(494): n = A,T,C or G
aggagggaggccnaggggnnnaactgaaatccgatgacagtcgcgcgaggncgaattccctggctgtgggacccaggcggccccgggccctgtcgccctgcagtgcatgtcagctctgcggacgctcggctcatggtctttgacaagacggaagggacgtggcggctgctgtgctcctcgcgctccaacgccagggtagccggactcagctgcgaggagatgggcttactcagggcactgacccactccgagctggacgagcgaacggcggacgccaatggcacgtcgggcttcttctgtgtggacgaggggaggctgacccacacccataggctgctggaggtcatctccgtgtgtgattgccccagaggccgtttcttggccgccatctgccaagactgtggccgcaggaagctgtccgtggaccgcatcgtgggacgccggtacaccagctcgtgccggtggacgtggcaagtcagccttcgctatgatgg

SEQ ID NO: 32776 - DNA, 480 bp, Homo sapiens
  misc_feature (1)...(480): n = A,T,C or G
tggagccagggtggggnnnaactgatatcgatgcgtgggcaatccggggccagctgaccaccgctggatgacaggacacagctttgggcctcagaaccagggacgcctcccctgcccacgagcctgccctcgcaaaacccgatcttgaagaatatcaccgactacctgatcgaggaagtaagcgccgaggaggaggagctgctggggagcagcgggggcgctcctcctgaggagcctcctaaggaagggaacccggcagagatcaacgtggagcgggatgagaagttgattaaggtcttggacaagctcctcctttacctgcgcatcgtgcattccttggattattacaacacctgtgagtaccccaacgaggacgagatgcccaatcgctgtgggatcatccacgttcgggggcccatgccacccaaccgcatcagtcacggggaagtgctggagtggcagaagacttttgaggagaag

SEQ ID NO: 32777 - DNA, 474 bp, Homo sapiens
  misc_feature (1)...(474): n = A,T,C or G
tggtgtngacccccccccaatgagaccatcatggaggcctgtcgaccancgncnggaggagtcggaaccacctgtggaccgctgcttgggccagccaccgccctgccactcagatgccatgtgcactgacctgcacttccaggagaaacgggctggcgttttccacctccaggccaccagcggcccttatggtctgaacttttcggaggctgaggcggcatgcgaagcacagggagccgtccttgcttcattccctcagctctctgctgcccagcagctgggcttccacctgtgcctcatgggctggctggccaatggctccactgcccaccctgtggttttccctgtggcggactgtggcaatggtcgggtgggcgtagtcagcctgggtgcccgcaagaacctctcagaacgctgggatgcctactgcttccgtgtgcaagatgtggcctgccgatgccgaaatggctttgg

SEQ ID NO: 32778 - DNA, 520 bp, Homo sapiens
  misc_feature (1)...(520): n = A,T,C or G
nggggnnnnnnnnnnaatcggaccacattgcagtgtcgtggaattctgtgggcccttctctggagtcgttcgatgaggccagggcgatggtgttctcagcgttcctgtgcatggcaaaccagcaataacactttgcacccactctggacggtcccggtctccgtgccagggggcacccggcagtctcctattaacatccagtggagggacagcgtctatgacccccagctgaagccactcagggtctcctatgaagcggcatcctgcctgtacatctggaacactggctacctcttccaggtggaatttgacgatgccaccgaggcatcaggaattagtggtgggcccttggaaaaccactacagactgaagcaatttcacttccactggggagcagtgaacgaggggggctcaaagcacacagtggacggccacgcgtaccccgcagagctgcatttagttcactggaattctgtgaaataccaaaattacaaggaagctgtcgtgggagagaatggtt

SEQ ID NO: 32779 - DNA, 463 bp, Homo sapiens
  misc_feature (1)...(463): n = A,T,C or G
atcgagaccctgtcgagggcctgaanccngcgagctgcagtacatggacaacatccgctggatccgggaggccgccaggcaccgtttggtggtgggctcccaggcaaggatcctgtactcagaccagaagggccgcgtggccatcgctgtggccattaaccaggccatcgcctgcaggaggatcaagggctgtaccacatccatctcgtgggggcaaagcagcagctggctgcctctcctgggtatctgagcagccggagattcctggggaacaaggagtgctgccgatgagtgtattaaaaaatcaaactcagcatgaatgctttctctgtgcgaaaagtctttgtcctcagagagactggcagcacgaaaaggctcttagcaattacctcatccaggaaaccaagagctattcccagacggaagtgacctgcccaacgtctcatggtcaggggccaggctg

SEQ ID NO: 32780 - DNA, 237 bp, Homo sapiens
  misc_feature (1)...(237): n = A,T,C or G
tccganatgaanncctggagcactgtcctggcagggatggggaaagctttttctgaagctgccttcaccactgcctacctgttcacttcagagttgtaccctacggtgctcacacagacagggatggggctgactgcactggtggaccggctggggggctctttggccccactggcggtcttgctggatagagtgtggctgtcactggccaagcttacttatggggggatcgccctg

SEQ ID NO: 32781 - DNA, 485 bp, Homo sapiens
  misc_feature (1)...(485): n = A,T,C or G
agcggntnncatagaaactgtagcatgtgcagggcnggaaatcgaacaggaccgtggaggagaaaaatagaaagggagagaaaatagtcggagagacaaaaaccaggagacccatgcgtggacagaaagactaacggagacgaaaagaaagaggcagatggggagacacgtgcgagacgagacacatgtgcatttgttggggagaagaggattggaggtgtcagtgttaaaggaacctctacaacgaaggtgaagccacggaagataaggaaacccctcctggagtttccccaaagccatggacagccctagtcttcgtgagcttcaacagcctctgctggagggcacagaatgtgagacccctgcccagaagcctggcaggcatgagctggggtcccccttaagagagatagcctttgccgagtccctgaggggtttgcagttcctgtcaccgcctcttccctccgtgagcgctggcctggggg

SEQ ID NO: 32782 - DNA, 491 bp, Homo sapiens
  misc_feature (1)...(491): n = A,T,C or G
cgagaggggggnnccnngnaattganannccaactggagtaccgatgtgcagngngcnnggaaacccaagatcaagcggctggccctcagcctcatcgccatcgtgctggtctgctttgcgccctatcacgtgctcttgctgtcccgcagcgccatctacctgggccgcccctgggactgcggcttcgaggagcgcgtcttctctgcataccacagctcactggctttcaccagcctcaactgtgtggcggaccccatcctctactgcctggtcaacgagggcgcccgcagcgatgtggccaaggccctgcacaacctgctccgctttctggccagcgacaagccccaggagatggccaatgcctcgctcaccctggagaccccactcacctccaagaggaacagcacagccaaagccatgactggcagctgggcggccactccgccctcccagggggaccaggtgcagctgaagatgctgccgccagcac

SEQ ID NO: 32783 - DNA, 486 bp, Homo sapiens
  misc_feature (1)...(486): n = A,T,C or G
gagtgtnggcccccccccctaatgagacccattatcgagnanccactacgaagngncgnggaanncancagntgagagcctacctggagggcacgtgcgtggagtggctccgcatatacctggagaacgggaaggagacgctgcagcgcacggacccccccaagacacatatgacccaccaccccatctctgaccatgaggccaccctgaggtgctgggccctgggcttctaccctgcggagatcacactgacctggcagcgggatggggaggaccacacccaggacacggagctcgtggagaccaggcctgcaggggatggaaccttccagaagtgggcggctgtggtggtgccttctggagaggagcagagatacacctgccatgtgcagcatgagggtctgcccaagcccctcaccctgagatgggagctgtcttcccagcccaccatccccatcgtgggcatcattgctggcctggttctcg

SEQ ID NO: 32784 - DNA, 490 bp, Homo sapiens
  misc_feature (1)...(490): n = A,T,C or G
agagtgtnggccggggagnnccttaatgaaanccacttacntganacgctaccgaagngncgnggaannccgngccgtagggaacatgcacttttccattcccgaaaccgagtcccgtagcggggacagtggcggctccgcctacgtggcctataacattcacgtgaatggagtcctgcactgtcgggtgcgctacagccagctcctggggctgcacgagcagcttcggaaggagtatggggccaatgtgcttcctgcattccccccaaagaagcttttctctctgactcctgctgaggtagaacagaggagagagcagttagagaagtacatgcaagctgttcggcaagacccattgcttgggagcagcgagactttcaacagtttcctgcgtcgggcacaacaggagacacagcaggtccccacagaggaagtgtccttggaagtgctgctcagcaacgggcagaaagttctggtcaacgtgctaacn

SEQ ID NO: 32785 - DNA, 513 bp, Homo sapiens
  misc_feature (1)...(513): n = A,T,C or G
ggtctttttttgggggntttannnnagccaggggnggggnnnattgatatccatcacgtgggcaancccgagggaccccgaaccagggcaagaaggccgagggggcccagaaccagggcaagaaggccgagggggcccagaaccagggcaagaaggccgagggggcccagaaccagggcaagaaggccgagggggcccanaaccagggcaagaaggccgagggggcccagaaccagggcaagaaggccgagggtgctcacaaccagggcaaaaaagcagaaggggcccagaaccagggcaagaaggctgagggggcccagaaccagggcaagaaggccgcgggggctcagaaccagggcaaaaaggccgagggagcccagaaccagggccacaaaggagagggagcccacaatcagggtcaaaagacagacggggctcacggcaaaaaggcagaaaggagtgccaaccaaggcacaaaaggagagggagctcccatccagggcagacaggcag

SEQ ID NO: 32786 - DNA, 526 bp, Homo sapiens
  misc_feature (1)...(526): n = A,T,C or G
tggttttnttntnggggggnttttatnnnnacgggaggcncaggggnnnnttttgactttcgatccactatccgagtggtggaattcccctctcccaggccccatgacctccagctttcctgtatttgttcccaagagcatcatgcctctgaggccagcctggcctcctgcctctactgggaaggctacttcggggctgggaagtcgtccttactcctgtgggagcctcgcaacccgtgccaagtccaggtcctggtggggcagctcctctgtctcgagcgccctgcagaccctgcccttgtttggggcaggagtagctgagctcacaaggcagcaaggcccgagcagctgagcagggccggggaactggccaagctgaggtgcccaggagaagaaagaggtgaccccagggcacaggagctacctgtgtggacaggactaacactcanaagcctgggggcctggctggctgagggcagttcgcagccaccctgaggagtctgaggtcctgagcactgccaggagg

SEQ ID NO: 32787 - DNA, 476 bp, Homo sapiens
  misc_feature (1)...(476): n = A,T,C or G
ngaattgagatcatttccanngggttaattcccttacatccgaaagtgtctggagaagctggacactgacatttcactcattcgctattttgtcactgaggtgctggacgtcattgctcctccttatacctctgacttcgtgcaacttttcctccccatcctggagaatgacagcatcgcaggtaccatcaaaacggaaggcgagcatgaccctgtgacggagtttatagctcactgcaaatctaacttcatcatggtgaactaatttagagcatcctccagagctgaagcagaacattccagaacccgttgtggaaaaaccctttcaagaagctgttttaagaggctcgggcagcgtcttgaaaatgggcaccgctgggaggaggtggatgacttctttacaaaggaaaatggtagcagcttcagtgagaaactgcccttacaaacagtcccttctctgctgtcaatccaatacn

SEQ ID NO: 32788 - DNA, 505 bp, Homo sapiens
  misc_feature (1)...(505): n = A,T,C or G
attgagcncatggagcacantccgtgnggnggaattcggtcctcacagacccacacacgccctacgaggaggagcagcggcagtcagtgcagtctgaccagggctacatctccaggagctccccgcagccccccgagggactcacggaaatggaggaagaggaggaagaggagcaggacccagggaagccggccctgccactctctcccgaggacctggagagcctgaggagcctccagcggcagctgcttttccgccagctgcagaagaactcgggctgggacacgatggggtcagagtcagaggggcccagtgcatgagggcggctccccagggaccgcccagatcccagctttgagagaggagtgtgtgtgcacgtattcatctgtgtgtacatgtctgcatgtgtatatgttcgtgtgtgaaatgtaggctttaaaatgtaaatgtctggattttaatcccaggcatccctcctaacttttctttgtgcagcggtctggtt

SEQ ID NO: 32789 - DNA, 460 bp, Homo sapiens
  misc_feature (1)...(460): n = A,T,C or G
aggctgntnaaaccgatagccagcatctgcgnggcattcaaaatgtgaaagataaaatgttaaaattgataaagctgagtggtatcacagatgtttgttatatttttcatagttttctctatgttgctaatatgttataatttaaaaatttcttagaaagataagacttgtgccaagttgtttgcctttactcaaaacaacctttggctaatccgctattagaatgtattatttatcaatgttagccttcatttgctgctgccagtatgcctgccatagcaactcatgcctacaaatttgaatctgcttcttctgatctgttgattagagaaatcgattttgaagctcgtttagaagtatacataacttaagagttttggctgggcgcagtggctcatgcctgtaatcccagcactttgggaggctgaggtgggcagattgcctgaggtcaggagttccc

SEQ ID NO: 32790 - DNA, 492 bp, Homo sapiens
  misc_feature (1)...(492): n = A,T,C or G
gaagtttccaggnnncnnnnnaatcgaagatccctatcgagngtcgtggaanncgggagacagtggagatgcaccctgcctacaccgaggaagagctgaggcgctttgaagaggagctggctgcccgggaggcagagctgaatgccaaggcccagcgcctcagccaggagacagaggctctagggcggtcccagggccgcctggaggcccagaagagagagctgcagcaggctgtgctgcacatggagcagcggaagcagcagcagcagcagcagcaaggccacaaggccccggctgcccaccctgaggggcagctcaagttccacccagacacagacgatgtacctgtcccagctccagccggtgaccagaaggaggtggacacttcagaaaagaaacttctcgagcggctccctgaggttgaggtgccccagcatctgtgatcctccgggaccccagccctcaagattcctgatgctccaaagcgactga

SEQ ID NO: 32791 - DNA, 493 bp, Homo sapiens
  misc_feature (1)...(493): n = A,T,C or G
cgaanctncaggnngnnnnnaattgannnccctattcgtagaccactaggccatgtggtggaattcgggaagccgcagaagctgcgggtgtcctgtgaggcgccgggtgacggcgaccctttccagggcctgttgtctggcgtggcccagatgaaggacatggtaacggaattattcgaccctctggtacagggggaagtgcagcaccgggtggcggcggctccagacgaggacttggacggtgatgatgaagatgatgcagaagatgaaaataacattgataacagaactaacttcgatggaccatctgcaaaacggccaaaaacaccgtcttaacaatagccttcatgacatttaaaagatggctgttgtatccttattgtcacactaggacatttaaggaagacttatgctctaatttggaaaaagcatttgtgttgttctcctgggacaattttgtcaaagagaaaactggtttttctgtttctagcan

SEQ ID NO: 32792 - DNA, 517 bp, Homo sapiens
  misc_feature (1)...(517): n = A,T,C or G
nggagtnnnnnnnnaattgacccattgagngtcgtggaattcgaactttcagactggcttcagtggaaatgacattgccttccacttcaaccctcggtttgaagatggagggtacgtggtgtgcaacacgaggcagaacggaagctgggggcccgaggagaggaagacacacatgcctttccagaaggggatgccctttgacctctgcttcctggtgcagagctcagatttcaaggtgatggtgaacgggatcctcttcgtgcagtacttccaccgcgtgcccttccaccgtgtggacaccatctccgtcaatggctctgtgcagctgtcctacatcagcttccagcctcccggcgtgtggcctgccaacccggctcccattacccagacagtcatccacacagtgcagagcgcccctggacagatgttctctactcccgccatcccacctatgatgtacccccaccccgcctatccgatgcctttcatcaccaccattctgggagggctgtacccn

SEQ ID NO: 32793 - DNA, 457 bp, Homo sapiens
  misc_feature (1)...(457): n = A,T,C or G
atcgagattagtaggccgtgcggnggaattcgagaggggaggacaccccagatccgcctccctgagggatttggggtctggacgggggcggctgggtgtagggtcgttggttggtggggaagtgaggggtgaatcctgggacaggaggtgaagaaaccgcattctgctgaatgggctccctcgttgggacttcaacctgattggcgccagcctttgctgggattcaggatctgagaactccggcgactcttgagcagttctcagagatcttatccccaggcacaatggggaagccggcggtcagcgtctgctgtgacctgactctcagggaggcggccccttgaggcagcggggctgagggcacctggttaatatctaactgcaatctcgcctccagcctggctcgcagttcctgtgaacccggtgaggaggctgcacggtgacgacgagtcaccag

SEQ ID NO: 32794 - DNA, 471 bp, Homo sapiens
  misc_feature (1)...(471): n = A,T,C or G
cgcgacacngaatgagncctaattanagtctcgcagnggcgcgaancaacattcctttaaattccaaaattgctaagtgaggtcttaggcgatgtattgccttgaggactgtgcagtgatctgagaggcagcttgccatgctgcctagaatatttactcacgtttttcccaggagttacaggcgatttataactagttgccaattaactacaaagttaactttgcaggtagagctgaacatttcatcacaggacacaacagctcacaagttaccttgctgagcaagcttcccagagaaagttattagtattacgaatggctccagtttttccacactcaatttattcattcaacaagcctcctgtaaggaacttctggccactcagcaatggcctgaatgcacttgcttctctgtgggccagntccccagatatgactcttacagtgcaaataagggttagctttccttca

SEQ ID NO: 32795 - DNA, 465 bp, Homo sapiens
  misc_feature (1)...(465): n = A,T,C or G
aggcngntnnnaactgacttagagctaacgacanngcgnggaattcggctgcgaggcctttgccactgactttcaggactcacctgcagctaagaagctcatcaacgactacgtgaagaatggaactagggggaaaattacagatctgatcaaggaccttgactcgcagacaatgacggtcctggtgaattacatcttctttaaagccaaatgggagatgccctttgacccccaagatactcatcagtcaaggttctacttgagcaagaaaaagtgggtaatggtgcccatgatgagtttgcatcacctgactataccttacttccgggacgaggagctgtcctgcaccgtggtggagctgaagtacacaggcaatgccagcgcactcttcatcctccctgatcaagacaagatggaggaagtggaagccatgctgctcccaaagaccctgaagcggtggagaga

SEQ ID NO: 32796 - DNA, 467 bp, Homo sapiens
aggacagctttgagaccatagtcatagaggagcaattcggccgcctctcaaggctatactgtggctagaattaagctcggagactaccatttctatgggtttggcaccgatgtagattatgaaactgcatttattcattaccgtctggcttctgagcagcaacacagtgcacaagctatgtttaatctgggatatatgcatgagaaaggactgggcattaaacaggatattcaccttgcgaaacgtttttatgacatggcagctgaagccagcccagatgcacaagttccagtcttcctagccctctgcaaattgggcgtcgtctatttcttgcagtacatacgggaaacaaacattcgagatatgttcacccaacttgatatggaccagcttttgggacctgagtgggacctttacctcatgaccatcattgcgctgctgttgggaacagtcatagcttacaggca

SEQ ID NO: 32797 - DNA, 482 bp, Homo sapiens
  misc_feature (1)...(482): n = A,T,C or G
nttgataaccctttncangngttttgagacactantccgtgtggnggaattccgtctccttcctgggttgggcggaagccatcacctggatgcctacgtgggaagggacctctaatgtgggaccccagcccctctccagctcgaaatccctccacagccacggggacaccctgcacctattcccacgggacaggctggacccagagactctggacccggggcctccccttgagtagagacccgccctctgactgatggacgccgctgacctggggtcagacccgtgggctggacccctgcccaccccgcaggaaccctgaggcctaggggagctgttgagccttcagtgtctgcatgtgggaagtgggctccttcacctacctcacagggctgttgtgaggggcgctgtgatgcggatccaaagcacagggcttggcgcaccccactgtgctctcaataaatgtgtttcctgtcttaaaaag

SEQ ID NO: 32798 - DNA, 473 bp, Homo sapiens
tttgtgtccctatccaggggttgattccctctgagtgatccctagcagccaaggccacccccagctgctgtctaggccagccctacctgcgctctgcccctggtccctgctcctccctgtcctggtttggcatgataggcgctccagtctccaggacaaaggggcaaatgtgtggccacccccatctggctgcagaaaaggccactccttcctggggttggggtggtccaggagtgctgggccttcttccacagccctgggctggaattcagtgtggctgcctgggttacttgtatgcgcccctgaaggaagggtccactccaggccgcctggtccctgcgaagtgtcacactgtgggtcaccgggggctgtggctaatgtggtccgggaggcctgtgtccctgagagttgctcagccctgctccgagggcttgtcctctccttccaggacccagctttccttctaaccttgt

SEQ ID NO: 32799 - DNA, 485 bp, Homo sapiens
  misc_feature (1)...(485): n = A,T,C or G
gaattgagaacattnnanngngtttgagacactantccgtgtggtggaattcccagcagtgggacagccagacagacggcacgatggcactgagctcccagatctgggccgcttgcctcctgctcctcctcctcctcgccagcctgaccagtggctctgttttcccacaacagacgggacaacttgcagagctgcaaccccaggacagagctggagccagggccagctggatgcccatgttccagaggcgaaggaggcgagacacccacttccccatctgcattttctgctgcggctgctgtcatcgatcaaagtgtgggatgtgctgcaagacgtagaacctacctgccctgcccccgtcccctcccttccttatttattcctgctgccccagaacataggtcttggaataaaatggctggttcttttgttttccccangaaaaaaactaaaataaaaaaacaaaaaaaacatagggcccttgg

SEQ ID NO: 32800 - DNA, 476 bp, Homo sapiens
  misc_feature (1)...(476): n = A,T,C or G
gggtttgtaccatatccangtggtgaattccctggaggccagggcagctccagatgttttcaggggaggagctggggttgtgactgtaaaacgagaggccagggttacctgtcccctgatccctgtggcctggcctcctcccccaggaaggctgtgggatgacaccaaatgccaacccatcccaaatttacaacatcgaccctgcccgcttcaaagatctcaacctggctggaacagcggaggtggggcttgcaggtgaggacctgtgtgggtggtggggaggagcaggagtgatgtggaaggacaactgggagcgtccagggagcactgggggggatcacctgccccgagcagctcagcagccccagggccaacatgtacggctgtgtaggttgtttactgtacagcagtacagtgataatccagccccgggccttgacctgtggttgcatccaccagagggagtgcctcttaat

SEQ ID NO: 32801 - DNA, 471 bp, Homo sapiens
  misc_feature (1)...(471): n = A,T,C or G
aggcccgacttagatanccntnnnatcgagaccactatcagtgtggtggaattcggaatgacatcaaacctgggtgattcatcacccttaatcttcctggtgccagagcggatcacaagctctttgtgggattggggtcagagccagcaacatgagccctgcacctatagatccaggaagggcaggaagagcagtgagcaaaggtgatagagcattggccaggtttgaatccttagcgccctactgactcaatacagcctcggtttccttatctgtaaatcaggagaataatttgtacatgagtctggcacgtagggaacatcatcattgtttggatctagggtcagatgcttttaaatagtcatgagaagcccctgatgtttgcttatgcaatcattcattcattcattttgagatcccatggaaagcactgtgcaaatctttgaatcaatgaatcagtgagtgagttag

SEQ ID NO: 32802 - DNA, 462 bp, Homo sapiens
  misc_feature (1)...(462): n = A,T,C or G
agcgtgctnnaaaggactgccagcatctgcgnggcannnnaangngnncggngacagaccccagcgccgactgagcctctaaagcgacttcagctctgccccaccaacaccaccgcgcgcccgggaacagccgctccgggaagaaacctgaggggactgcggggggcacgagggacagctgagggaagggaggacgcgagagaaacagcgcgagcacgctgagggccgggggttgccaggagaggggcccgcggacccgcagagcggaggaaggtccgggagaaaaggggcgggacggaggagaatccgggatcgcctggcagaaaaagagaagggagtttctgaatcctgggaagaggaggcgtgggtagggacgcttatcccgagatccgacagcagggaaccggagcgctccgggggaggggcttaatgctggggaagggatgtcttaaaagaggagat

SEQ ID NO: 32803 - DNA, 464 bp, Homo sapiens
  misc_feature (1)...(464): n = A,T,C or G
tggcagntnnaaatgacttanagctcacgacanngcgnggaantcgtgcctgcttctgagcctgcatgtagcagacaagactcacagctgggagggagtggtggcagtgaaaggtggacggtctggggccacttgcttgcccttcccgtctctaatcagtgcatcccccaccccaagccctgtactggttcaactatgagctggtgaagagctggctcaatgggctcaggccgaaggaccagacttctgtgggcatgagctttgtggctggtggcatctcagggacggtgagtggactgggctggaggtgaggccagcggaggtctccctgcggggggcctgaggatttttggagatgcccagaagcagaccccatgaggcctttgtccctcccagccgcaagagccatctgggaggtaggggtgggggtccaggaagtggagctgagccctctccccgcccan

SEQ ID NO: 32804 - DNA, 484 bp, Homo sapiens
  misc_feature (1)...(484): n = A,T,C or G
tattgataccctcgcaggncgtctgagtaccttggaagnngcgcggaattcccagggtatggcacgtggccgcggcgtggaggcagggagaatgcgactctccaaaaccctcgtcgacatggacatggccgactacagtgctgcactggacccagcctacaccaccctggaatttgagaatgtgcaggtgttgacgatgggcaatgacacgtccccatcagaaggcaccaacctcaacgcgcccaacagcctgggtgtcagcgccctgtgtgccatctgcggggaccgggccacgggcaaacactacggtgcctcgagctgtgacggctgcaagggcttcttccggaggagcgtgcggaagaaccacatgtactcctgcagatttagccggcagtgcgtggtggacaaagacaagaggaaccagtgccgctactgcaggctcaagaaatgcttccgggctggcatgaagaaggaaggtgagccn

SEQ ID NO: 32805 - DNA, 254 bp, Homo sapiens
  misc_feature (1)...(254): n = A,T,C or G
agagccgnttttgaaacacgaagctctcgcanggcngaantcctcgttccatgggcctaatacagatagggcggatttctgccccttaaccgaattgggatacagaggacgacggtgttaggcgcctgtgtaggagtaaaatgtgtttattttgcattcaacgagagctcctgcattgcagctattttgcatatgatttgcatcttacgaagaatttgtggcaaaaaaaagctgggcgtgcgccgtacgaacct

SEQ ID NO: 32806 - DNA, 468 bp, Homo sapiens
aggcccgccttcgagatccctagtcttagagggcaattccaaaattggctgaataaacagtgcacagtgacatcattgatttacttttgaggcaagcttcttcatctcattgtgcaattataatgtcttgcaaaccagtgcactgcaaaaccatgacacacaggtgcattactttttaaaatttttatgtgtagagacagggtcttactctgctccaggccatagtgcagtggtacgatcagagctcactgcagcctccaactccttagctcaagccatcttcccacctcagcttcctgagtagctacagcatgcaccaccatgcccagttaatttttcactttttttgtagagatagggtctagctatgttgcccaggctggtctcaaactcctggcctcaagtgatcctcacacctcagcctcccaaagtgttgggaatacaggcatgaacactgtgccctgccaa

SEQ ID NO: 32807 - DNA, 474 bp, Homo sapiens
  misc_feature (1)...(474): n = A,T,C or G
gggcagcctttgataccctcnnnttgatcancattagtccagagcggaggaattcgagaggaggatgcatctgcttttcagagatctctgtccatctgaggggcatggggagagcagccagaggcagcggtcaggaagtgctgtgggccagagctgaaggggagctgtcacccttgaggcatgagctcccaaggccagggagcacatccgctccatccctgggttcccaaggctggcgcatggcggacatcagtgcatgttggcagagctgaactgagaaagtgaaggcctcacctagcctcacctagccccttcttggcacaagccctggctcaagaaaaatggctcttcctaagtacaaggatctgctgggggatgtctccccaggtgaccacgtaggcacgggggcctctgcccctctccaagggcacagagcacagtgctctccttggcccatacagagaggcatcctgg

SEQ ID NO: 32808 - DNA, 487 bp, Homo sapiens
  misc_feature (1)...(487): n = A,T,C or G
ncctcgataccactggccangncgnactgagaccctactccgagcggcggaattcatcaaagtcgatggcattcggatgtccttccagaatcttctggcgaagatctgttttcaccaccatttttccgttgtggagcgagtggactcctgcgcctccatgtacagccgctccatccagggccaccatgtctgcctcctggtgaaaaagggtgagaactctgtctcagtcgacgggaagtgcagtgactccacgctactgagcaacttgttagaagagatgaaggcgacgctggccaagtgttgagagctgcctgcgagccccgcaccaccccgcggagcacgtacccagggaccgcagccctgacgtgtctcgcctctcctcagtcgtgtgtactgtacccaagcctgagtgttaatttaactctatgttgtccgccgtgtagacatccgaggtcatttgttgcgttgaattatctgaccatccttt

SEQ ID NO: 32809 - DNA, 497 bp, Homo sapiens
  misc_feature (1)...(497): n = A,T,C or G
gcganaaananaaatttgaaactganatcatatccangngcnggaattcggaactaattccccctcgggtcacccgggacctggagctggaaatgtcatggatcagggtttcctaagacccttggaagaggggacgatcgccccaagttagaaatccttctgccagctgataagcgcggttcaatttaaactaggggtgtggccccttgaccccaacctagccccgtcccttcctggttgtattagcgacggcggtggcgtaccaagatggcgtcgtggctgccggagactctctttgaaactgtaggacaaggcccgccgcctagcaaagactattaccaggtactggtcacccggtctcaggcaagtgcgagccgcgggttaccctctctcctaactccctacctggcccggctggggcccgggacgcaggctgtgctaggccaagagcaaccgtagcccgtcggaagcgcccagtcccggctccgcgccgagag

SEQ ID NO: 32810 - DNA, 500 bp, Homo sapiens
  misc_feature (1)...(500): n = A,T,C or G
gtggannnnannnnnaaatcgatattcgtatggcgtgtgcnggaattcgagcaaagctgtatcctggagttggtctgtgatttgccgacagccttgcaggctgggctcagggacaaagtcccccccaaaacccgcaggtcctcatgtccagacgctgcccagtcctgtcctgaaaacagcacgccccaggcccacagaaccccccaccctacatttgccttgggtggagctgggggtggtcctaggactgcgggtgcccttatctgaagggggtggggagaagcgtggactgggcagcctgtgggtaattggaggttcattgagaattgagtctttggaaacactaagaaaatcaaatttttaaaagttatttatggcctgggaaacaatttgcatttgtccccaaatacgcttagctgtgtgccgcttagaacgatgcgaaaccatccctctgtgtaagcccgtgccgtgtgactcgaagcctagcgccctccctgcga

SEQ ID NO: 32811 - DNA, 476 bp, Homo sapiens
  misc_feature (1)...(476): n = A,T,C or G
nactgtacccttgcagngcgttagagctcagtctgccgagcagctaggatttcaggcaagcaccaccacgcccagctaattatttttattttttattttttgtagaaacagggtctcactgtgttgctcaggctagcctgggtctcccaaagtgctgggatcacaagcatgagccaccgagcacagccgaaaaagtctttttgtatactgaagtctccactaggacaaaaatttgctcttaaggcttcctttgggacacacacacacacacacacacacacacacacacagnttttgattatacccattagggacccaagccttgggacacagggaccagaaaatgacaagagcatgcaggcagtagtaaactctggttatacttaaaatgggaacagaaatgtatgcctatgatccagactgatcatataaaaccatggatcctgaaagtacgttctctctttacaagccttaat

SEQ ID NO: 32812 - DNA, 500 bp, Homo sapiens
  misc_feature (1)...(500): n = A,T,C or G
ngggggnnnnnnnnacctcggactcgtatccagtgtggtggaattcccagggaaagaatatttgatcatgggtctggatggggccacctatgacctcgagggacacccccagtacctgctggactcgaatagctggatcgaggagatgccctctgaacgcctgtgccggagcacccgccagcgggcagcctgtgcccagctcaacgacttcctccaggagtatggcactcaggggtgccaggtgtgagggctgccctcccacctccgctgggaggaacctgaacctgggaaccatgaagctggaagcactgctgtgtccgctttcatgaacacagcctgggaccagggcatattaaaggcttttggcngcnnnnaaaaaaaaaaaaaaaaaaaaaaaaaaaaaaaaaaaaaaaaaaaaaaaannnnnnnnnnnnnaaaaaccccccccttttataaaaggggcccttaaaaaccccggtaaaccccttgggggggttttc

SEQ ID NO: 32813 - DNA, 499 bp, Homo sapiens
  misc_feature (1)...(499): n = A,T,C or G
ggcggtccaaaaaaaattgaaactgagagcatacgcagngngcnggaattccatgtgacttctgcatgccttgtcacctggactgtcactgctgggccagccccaccgccccaggccacagaagggtgcgcgcaaacaccctccttttccaggtggggaggcccaggcccagggcggaggcccctgtcccgtcactcagagtggcagcagggctggacacaaatgggggcttcagctccaggtcagggagcccccatccccaggcctagaagggagggtgactctgcagctctgtggcccccatggcccctcctgtgccctcccaactctgcttctggagaaaggctattctcgggttttcccaacaggtgccgagcacggagcatgagtctgcgctgatgtcagcctcccaaagtgtcttggctgggcctcgaggccacctccacccccagcagtgctgagaagcccaaggcccgagactgacaagcgtttccggggn

SEQ ID NO: 32814 - DNA, 499 bp, Homo sapiens
  misc_feature (1)...(499): n = A,T,C or G
gtggggannnnnnnnnacctcgatattcgtattgcgtgtgcnggaantcctccggcaaagcaaagcagaagctgctgaagcacggggtgaacttgctctgaactgcacccaggaggtgactgggaaggagaaaaccagcaaaggaagctctgccttttataattgaaaaggcccctctattttatttttcttgaaaacattcccttttttaggaaccaaatgatatttgagtttttgttattccttttgcagattgggatgtgttttgggggcaggggttagttcttcaggtcggcagacccagagcacttgataaagaactgtatttaatcggtagtgttggggccgggacgggcttggctccctctctgccatactgagcctgaggtatttcatatctcctgctgttccatcccagcttgaattggtgccacaagcttccaagttggcattttttctagaacctgatcgtccactagcccagagtgtgtggttcaan

SEQ ID NO: 32815 - DNA, 471 bp, Homo sapiens
  misc_feature (1)...(471): n = A,T,C or G
tgggatgcccaggnngnnnnnnaactgagaccacattgagagcgtggaanncccgggcacacgggggcggtatttagcgtggactacaatgatgaactggatatcttggtgagcggctctgcagacttcactgtgaaagtatgggctttatctgctgggacatgcctgaacacactcaccgggcacacggaatgggtcaccaaggtagctttgcagaagtgcaaagtcaagtctctcttgcacagtcctggagactacatcctcttaagtgcagacaaatatgagattaagatttggccaattgggagagaaatcaactgtaagtgcttaaagacattgtctgtctctgaggatagaagtatctgcctgcagccaagacttcattttgatggcaaatacattgtctgtagttcagcacttggtctctaccagtgggactttgccagttatgatattctcagggtcatcaag

SEQ ID NO: 32816 - DNA, 500 bp, Homo sapiens
  misc_feature (1)...(500): n = A,T,C or G
gtggggannnnnnnnnacctcgatactcgtgtggcgtgtgcnggaantccgcgtgtgatcgtccgtgcgtctagcctttgcccacgcagctttcagtcatggcctccggtaacgcgcgcatcggaaagccagcccctgacttcaaggccacagcggtggttgatggcgccttcaaagaggtgaagctgtcggactacaaagggaagtacgtggtcctctttttctaccctctggacttcacttttgtgtgccccaccgagatcatcgcgttcagcaaccgtgcagaggacttccgcaagctgggctgtgaagtgctgggcgtctcggtggactctcagttcacccacctggcttggatcaacaccccccggaaagagggaggcttgggccccctgaacatccccctgcttgctgacgtgaccagacgcttgtctgaggattacggcgtgctgaaaacagatgagggcattgcctacaggggcctctttatcatcgatggc

SEQ ID NO: 32817 - DNA, 465 bp, Homo sapiens
  misc_feature (1)...(465): n = A,T,C or G
ggccggttnnnnnnnnccatcnnagctgcagaagtcgtcgnggaattcgctccttgctaccaggacgcgcggcctcctcagcctctttcctcccgctgccatgcaccctgcagccttcccgcttcctgtggttgtggccgctgtgctgtggggagcggccccgacccgggggctcattcgagcgacctcggaccacaatgccagcatggactttgcagaccttccagctctgtttggggctaccttgagccaggagggcctccaggggttccttgtggaggctcacccagacaatgcctgcagccccattgccccaccacccccagccccggtcaatgggtcagtctttattgcgctgcttcgaagattcgactgcaactttgacctcaaggtcctaaatgcccagaaggctggatatggtgccgctgtagtacacaatgtgaattgcaatgaacttctgaacat

SEQ ID NO: 32818 - DNA, 465 bp, Homo sapiens
  misc_feature (1)...(465): n = A,T,C or G
ggccgnnttnnnnnccccaggggactagtcagagtcgncgaattcgcgggtctacttcttcaaggggaaacagtactgggagtaccagttccagcaccagcccagtcaggaggagtgtgaaggcagctccctgtcggctgtgtttgaacactttgccatgatgcagcgggacagctgggaggacatcttcgagcttctcttctggggcagaacctctgctggtaccagacagccccagttcattagccgggactggcacggtgtgccagggcaagtggacgcagccatggctggccgcatctacatctcaggcatggcaccccgcccctccttggccaagaaacaaaggtttaggcatcgcaaccgcaaaggctaccgttcacaacgaggccacagccgtggccgcaaccagaactcccgccggccatcccgcgccatgtggctgtccttgttctccagtgagga

SEQ ID NO: 32819 - DNA, 518 bp, Homo sapiens
  misc_feature (1)...(518): n = A,T,C or G
nattgatcttcgaccagcgtggnggaattcacactatttttanaaaaagccatttcccacccaaggacacagtggatgtgttttccctgactccagcagggcaaggaatgtanccgagaggttgtgtgggctgggctctggtgccctcttccctggccaggacacctctcctcctgattcccttggcaccttgtctttctgtctgtttacctgtctccctgcctgcccatctgcatcttttgcagcccactctgacttccatctgggggctgagaccacccttgcctgcccccttctttctgccttaagaatgtccttttaggctgggcatggtggctcacgcctgtaaccccagcactttgggaggcggagacgggcagataacctgaggtcaggatttcgagaccaacctgacctacatggagaaactccgcctctagtaaaaatacaaaattagccgggcatggtggtgcacgcctctaatcccagctactcgggaggctgaggcaggagaatcn

SEQ ID NO: 32820 - DNA, 491 bp, Homo sapiens
  misc_feature (1)...(491): n = A,T,C or G
ggatcgatnnccntngggnnnnnncnnatcgtaganccctagtcagtgtggtggaattctcctgcgcttcgaccctgtcaggggagaggtgcctcccaggtacccgcgggatgtccgagactacttcatgccctgccctggcagaggccatggacacaggaatgggactggccatgggaacagtacccaccatggccctgagtatatgcgctgtagcccacatctagtcttgtccgcactgacgtctgacaaccatggtgccacctatgccttcagtgggacccactactggcgtctggacaccagccgggatggctggcatagctggcccattgctcatcagtggccccagggtccttcagcagtggatgctgccttttcctgggaagaaaaactctatctggtccagggcacccaggtatatgtcttcctgacaaagggaggctataccctagtaagcggttatccgaagcggctggagaaggaagtcg

SEQ ID NO: 32821 - DNA, 488 bp, Homo sapiens
  misc_feature (1)...(488): n = A,T,C or G
tgggccccnagnnnnnnnnacctcgagaccctattgagtgccgtggaattcacgggcgggcgcggatccctgcgtcccgctgaaaatgtgtgtctgacatgcaagctcagtggggcagagacccgtggattgctgtgccctgccctccggacctggatcatgaaggtgttgggaagaagcttcttctgggtgctgtttcccgtccttccctgggcggtgcaggctgtggagcacgaggaggtggcgcagcgtgtgatcaaactgcaccgcgggcgaggggtggctgccatgcagagccggcagtgggtccgggacagctgcaggaagctctcagggcttctccgccagaagaatgcagttctgaacaaactgaaaactgcaattggagcagtggagaaagacgtgggcctgtcggatgaagagaaactgtttcaggtgcacacgtttgaaattttccagaaagagctgaatgaaagtgaaaattccgt

SEQ ID NO: 32822 - DNA, 240 bp, Homo sapiens
actttctggcttgaacaaggagacatatcagagctgtcttaaatcttttgagtgtttactgggcctgaattcaaatattggaataagagacctagctgtacagtttagctgtatagaagcagtgaacatggcttcaaagatactaaaaagctatgagtccagtcttccccagacacagcaagtggatcttgacttatccaggccacttttcacttctgctgcactgcttttcacatgcaa

SEQ ID NO: 32823 - DNA, 478 bp, Homo sapiens
  misc_feature (1)...(478): n = A,T,C or G
tgtgagtgctgnaacagactgactatcctgaaaaactnggnaanngncannggaataaccatatcaaacaacacggtcagcgacatgcacagcagcatgacgatgatttcatcttttggcgcatgacgcagcaagtcgacggactttgtgcgcttcactcatgttccacgccaccatcaacagcagggctgccatggcggaaagcggcagccaggagagcagcggtgccagtaccagcagggcaagaataaccagaatagagtggatcaccgccgagataggggacgttgccccggcacggacgttagcggcagaacgcgcgatggcagctgtagcggtaataccaccaaagaacggagcgataatattccccagtccctgtccaaccagttcgctgttcgccttgtgtttcgtcccggtcataccatccagcaccacggcgcagagcagagattcgattgcgccgagcattgccatt

SEQ ID NO: 32824 - DNA, 467 bp, Homo sapiens
  misc_feature (1)...(467): n = A,T,C or G
cgcggtctggaacgagtcntaccgaaataccgganangncnnggaaatcgccttccatggatctataggagagcgagtcctccaggataagaagtcctttccgtgttcggagacctctctgaactaaggaggggatgggcacgtcagccccactaccgagcctggaaaaggaggtgacctgctccatctgtcttgattacctgcgggaccctgtgaccattgactgtggccacgtcttctgccgcagctgcaccacagacgtccgccccatcttagggagccgccccgtctgcccactctgcaagaagccttttaagaaggagaacatccgacccgtgtggcaactggccagcctggtggagaacattgagcggctgaaggtggacaagggcaggcagccgggagaggtgacccgggagcagcaggatgcaaagttgtgcgagcgacaccgagagaagctgcactag

SEQ ID NO: 32825 - DNA, 483 bp, Homo sapiens
  misc_feature (1)...(483): n = A,T,C or G
gctcgagacccctgtccangtggtgttagacgcccgtccgggacatggctgaggcccacaaagaggccatgagccgcaaactgggtcagagtgagagccagggccctccacgggccttcgccaaagtgaacagcatcagccccggctccccagccagcatcgcgggtctgcaagtggatgatgagattgtggagttcggctctgtgaacacccagaacttccagtcactgcataacattggcagtgtggtgcagcacagtgaggggaagcccctgaatgtgacagtgatccgcaggggggaaaaacaccagcttagacttgttccaacacgctgggcaggaaaaggactgctgggctgcaacattattcctctgcaaagatgattgtccctggggaacagtaacaggaaagcatcttcccttgccctggacttgggtctagggatttccaacttgtcttctctccctgaagcataaggatctn

SEQ ID NO: 32826 - DNA, 227 bp, Homo sapiens
  misc_feature (1)...(227): n = A,T,C or G
aaagcgactaccacgacctggagtcggnggttcagcaggtggagcaaaacctggagctgatgaccaaacgggctgtaaaggcagaaaaccacgtcgtgaaactaaaacaggaaatcattttgctccaggcgcaggtctccaactttcagcgagagaatgaagccctgcggtgcggcagggtgccagcctgaccgaggtgaagcataacaccgacgaggccctgcaag

SEQ ID NO: 32827 - DNA, 481 bp, Homo sapiens
  misc_feature (1)...(481): n = A,T,C or G
gatgagaccatatccangtggngttagacgtcactcatgagcggctggacctaaagaagatccagttccccaagaaagaggccaagacccccactaagaacggacttcctgggtcccgtcctggctctccagagagagaggtgccggcctcggcgcaggccaacgggaagaccttgccaatcccgggccagatcacactccgcttcaacctgcccaaggagcgggaggccattcccggtggcgagcctgaccagccgctctcctccagctcctgcctgcagcccaaccaccgctcaacgaaacggaaggtggaggtggtttcaccagcaactccagtgcccagcgagacagccccggcctcggtttttccccagaatggagccgcccgtagggcagtggcagcccagccaggacggaagcgaaaatcgaattgtttgggcactgatgaggactcccaggacagctctgatggaataccgcn

SEQ ID NO: 32828 - DNA, 477 bp, Homo sapiens
  misc_feature (1)...(477): n = A,T,C or G
nttgagaccatagcagnggcggtagtcgtctatgggaccaggcccagagtcctgacgggcaaccctcgcttggacctgcaagagatcaacaactgggtgcaggcgcatatgaaagggaagctcgccaggtccacaaaggaaattcccgatgagatcagcattctccttctcggtgtggcgcacttcaaggggcagtgggtaacaaagtttgactccagaaagacttccctcgaggatttctacttggatgaagagaggaccgtgagggtccccatgatgtcggaccctaaggctgttttacgctatggcttggattcagatctcagctgcaagattgcccagctgcccttgaccggaagcatgagtatcatcttcttcctgcccctgaaagtgacccagaatttgaccttgatagaggagagcctcacctccgagttcattcatgacatagaccgagaactgaagaccgtgcatgcg

SEQ ID NO: 32829 - DNA, 484 bp, Homo sapiens
  misc_feature (1)...(484): n = A,T,C or G
naatcgagacccctagtccagngtggtgttattcatgcgaattctctatgggagttccctgagccagtaaggggcagttttcttggttaatctcagctagagttgtatgagcactaaaacggaacaaacactggcccatatcattctctgtgagcttcttgatgggagcacagcatcaacaggttaggcagccccctttcagaggaagagagacctgacacctctcctgtccaggacttctgtcccaggttggactggatgaccccagcagttgtggtgtgtaggtcttggtccttgtttttgaagctgtatcacaggctatgaagacagcagaaggtgggggaaaaaaaggttattcttttgtttcacaccactcagctatagatcacagaaacactccaaagtggctttaatgagttaggagggcatggtgtggtggcttacgccggcaatgccagcactttgggaggccgtggcaggagga

SEQ ID NO: 32830 - DNA, 483 bp, Homo sapiens
  misc_feature (1)...(483): n = A,T,C or G
gtggaggggnggggnnnattgatttacgtccgcgtgggcaattcgaggtttacaagcttcccaggtcattctgatgtagctgtgccaggaaccatgctttgagaaataccgggacagccttagcgtgcctctgactttgtcttcctcttcccaggaagtgagagttctgggccataaattccgaaatccagtaggaattgctgcaggatttgacaagcatggggaagccgtggacggactttataagatgggctttggttttgttgagataggaagtgtgactccaaaacctcaggaaggaaaccctagacccagagtcttccgcctccctgaggaccaagctgtcattaacaggtatggatttaacagtcacgggctttcagtggtggaacacaggttacgggccagacagcagaagcaggccaagctcacagaaggtgctgcangagagggatggcttgcggagagtgcacaggccggcan

SEQ ID NO: 32831 - DNA, 483 bp, Homo sapiens
  misc_feature (1)...(483): n = A,T,C or G
ttcttgacnccntnnnnnnnctgagaacactctccatgcggtggaattcccgagaacaagactctgcctcgctcgagctccatggcagccggcctggagcgcaatggccgtatgcgggtgaaggccatcttctcccacgctgctggggacaacagcaccctcctgagcttcaaggagggtgacctcattaccctgctggtgcctgaggcccgcgatggctggcactacggagagagtgagaagaccaagatgcggggctggtttcccttctcctacacccgggtcttggacagcgatggcagtgacaggctgcacatgagcctgcagcaagggaagagcagcagcacgggcaacctcctggacaaggacgacctgtccatcccaccccccgattacggcgccgccttccgggccttacccgcccagacggccagcggcttcaagcagaggccctacagtgtggccgtgcccgccttctcccat

SEQ ID NO: 32832 - DNA, 489 bp, Homo sapiens
  misc_feature (1)...(489): n = A,T,C or G
tggggagggcggggnnnaattgaaattcgatcactattccgcgnggncgaattcgatgataaagacaaaggcttcataacgctatagaaaaaactagaaaataccatgtgaaataaacacacatgcgtggattagctgtgccatgaccacatccagatataactacttccacccacaggtaggaatggtcataccaaggccatgggatatgggtgactgtttatttcttaactgtttttttctcatttataagttcctttgagtatttggctcaagttcatagatttagcatgttttgtactctctccctctggggagcccattccaattgtataaaggaatactggaagaaataagcttgcgagctgcacaggggttcctccagccacctgtgagattttgggaattcctggctgctggatggcgtgtgggagtgtgctgagggggaggcaacaaagagctgttgactgcaagccaaaggaagcccag

SEQ ID NO: 32833 - DNA, 491 bp, Homo sapiens
  misc_feature (1)...(491): n = A,T,C or G
tgagccaggggnggggnnnaattgatttccactgacagtggngcaattccagcagtgggggccttttatgagcgaaaaatcgtcaccacggatctgcgtcagcgctgtaccgatggccacactgggacctcagtctctgcccccatggtggcgggcatcatcgccttggctctagaagcaaacagccagttaacctggagggacgtccagcacctgctagtgaagacatcccggccggcccacctgaaagcgagcgactggaaagtgaacggcgcgggtcataaagttagccatttctatggatttggtttggtggacgcagaagctctcgttgtggaggcaaagaagtggacagcagtgccatcgcagcacatgtgcgtggccgcctcggacaagagacccaggagcatccccttagtgcaggtgctgcggactacggccctgaccagcgcctgcgcggagcactcggaccagcgggtggtctacttggn

SEQ ID NO: 32834 - DNA, 487 bp, Homo sapiens
  misc_feature (1)...(487): n = A,T,C or G
tgtggccngnnnnnaattgaaattgatnaccctaggccagngcgnggaattcccaccgttcccgggctgtgacccattctcgggacactggtggataagaatggtgtctttggagtccgacgcctggattcacgtcctggctagtcgcgtgaaccttggtgctctcatctgtgcagngggaataatgcaggttctgggcagggatgggaagagtgaatgcgctggtacgggacctgatgcccagaaccctggacgggcagatcaccatggagaagacgcccagttacttcgtcacgcgggaggcccccgcgcgcatctcggccatgtccaaggacaccaagctcatcgtggtggtgcgggacccggtgaccagggccatctcggactacacgcagacgctgtccaagcggcccgacatccccaccttcgagagcttgacgttcaaaaacaggacagcgggcctcatcgacacgtcgtggagcgccat

SEQ ID NO: 32835 - DNA, 531 bp, Homo sapiens
  misc_feature (1)...(531): n = A,T,C or G
ggtgaggggnnaggnagnctcgannctcctccgngnattgatccaccgtcccgagaggtgcaattcggctggccagtgtgggtgctggtacatatgtcatcaactactattacagagttttggggcaggcaagaccaatacagggggacagtgggcctgtggttcactggtaactccccatgacatggagtggaatgggcattggttttggagacagggttttgaatcttagctctatgtgaccccggccaagttacttcacctctctgagagtcagtttgcttatcgaaaaagaattgataatccttttagtgaaaattaaatgagatggcgcatatcaagtgcccagcctgataatgggtacacagtcaacacttggtcagtgctgctggtctgcccctccctagattcctgccagctgggctactcggccggtccctgcatgggaatgaccagcaggtatttctataatggtacatccatggcctgtgagactttccagtacggcggctgcatgggcaacggtaacan

SEQ ID NO: 32836 - DNA, 461 bp, Homo sapiens
  misc_feature (1)...(461): n = A,T,C or G
ggggcagggattgataacctganaccgtcggaaannncancatgtggagaataaaattttgaatttctgtgttttcaggaaaatatctaaatgttttcagagtttgtggccatgacgtcacctgcccgggggctagagagatcatctacacgttaaaagagcgggcgtatgtggagcagatcgagaaggcgtttaactacgccagcaaggtgctgctggacttcctgatggaggagaaggagctggtggctcacctcaggtccatcaagcgctacttcctcatggaccagggcgacttcttcgtgcacttcatggacctcgcggaggaggagctccggaagccggaggaggacatcacgccccctcgcctggaagcgctcctggagctggcgctgcgcatgagcacggacaacactgaccccttcaaggacgacctcaagatcgacctgatgccccatgac

SEQ ID NO: 32837 - DNA, 514 bp, Homo sapiens
  misc_feature (1)...(514): n = A,T,C or G
aagggccggnnnncatcgacaatagagcactntcnagagnggngcaattcgagaggaggggctggggggaggcccaaggggcaagaagcatggccaccgaggctccagcttaacggtatttggaggtcagcacggtgctcacagaagccaggaacttgtccagggaggcgtgcaccgcaggggtgaactcggcggggaggtgggcggccagggtcaccagcaggcagtggcttaggagcttgaagttgaccgggtccacccgaagcttgtgcgcgtgcaggtcgctcagggcggacagcgcgttgggcatgtcgtccacgtgcgccacggcgttggtcagcgcgtcggccaccttcttgccgtggcccttaacctgggcagagccgtggctcatgtcgaagtgcgggaagtaggtcttggtggtggggaaggacaggaacatcctctccagggcctccgcaccatactcgccagcgtgcgcgccgaccttaccccaggcggncttgacngttgt

SEQ ID NO: 32838 - DNA, 512 bp, Homo sapiens
  misc_feature (1)...(512): n = A,T,C or G
agggcccccnnnccttagacactcgacagcgntgtggaattcggaactcagagggtcagtttttctccagcatgactctctgggggctagcgatgaagacgctgcagaatgaaaacgagttagaccagtgatgtaccgcgcttctccacggtagaggcgtgttctcagtttagcaggctggtgttaaggctgtaggaggacccagtttccccatgacagtgccttctaactagccagagaataggtagcttccctcctgatgatggctcataatctgaagcatcttgagctgggggtgtgagggggagggcctgctggctcaccgtgaggcagccgcgggagggagcgctgacgtcacagaagcgaaggcttgatgctgtctcagcagcctcagctgtgggggggaagcgcgtgtgcatcgtgtcaactactgtacatgttggtcatgtgaaaggaattatatatgtatagtattacaagtatttttgcatttttacaagattgaaatttgn

SEQ ID NO: 32839 - DNA, 520 bp, Homo sapiens
  misc_feature (1)...(520): n = A,T,C or G
agggcgcgnnnnnnttttgacaatcgatcccctgctcagagtggtgcgaattcggtgtttctggaatttgctttccctcacctctcacttccttctagaaggagcttcctgactggaaccagagaatgcatgtctgtccacttggtggctgctgggtggggccgggaacaagggcccctgaccctgtgtgctggccgggacctgccaccagccccccagcctgcttcttccccttaagctttgtgcccctggatgcgctaacattcactcttgtttgtccctggactggccatgaagtgaggagatggttatttaaagagaattccctatttatttgacaaaaaatccagttaatatattaatgtgaaataaaccctgtttgcacctcgaaaaaaaaaaaaaaaaaaaaaaaaaaaaaaaaaaaaaaaaaaaaaaaaaaaaaaaaaaaaaaaaaaaaaaaaaaaaaaaaaannnnnaaaaaaanccccccnnntttaaaaaagcccctcttcaccctcct

SEQ ID NO: 32840 - DNA, 519 bp, Homo sapiens
  misc_feature (1)...(519): n = A,T,C or G
gagagganaaagaagtttgatcccattcgngngttgattaccgtggtgaagctcctcgacaccatggtggacacttttcttcagaagctggtcgccgccggcagctaccagagattcactgactgctataagtgcttctaccagttgcagcctgcgatgacacagcgaatctatgacaagtttatagctcagttgcagacatctatccgggaggaaatctctgacatcaaagaggaggggaacctagaagctgtcttgaatgccttggataaaattgtggaagaaggcaaagtccgcaaagagccagcctgcaacgggacaccctgcggcgccatgtgcagaaacaggaggccgagaaccagcagctggcagatgccgtcctggcagggcggaggcaggtggaggagctgcagctacaggtccaggcccagcagcaggcctggcaggctctacacagagaacagagggagctggttgctgtgctgagggagcctgagtgaggagaccgccagccccaat

SEQ ID NO: 32841 - DNA, 491 bp, Homo sapiens
  misc_feature (1)...(491): n = A,T,C or G
agggccncccccaatgaaaatgagtgcgtgcgcgaggaacccgggaccaggtctttagtgtctgtttccagaggcccttacgcctggaacaatgaccacttgatgtaattcattgctttgcacttccaaagaagtgaggccaagcccacagtttcttagagccctttcctcctttgatttcttagtttctctttcagagcctttccatgaccctagtaaataactgagcagtagatctctgttagcctccctgtacctcccattaaatggcaatagtgcagtccacccacaggtcaacagggcaacctgcatctccagatgttcatgacaggagaggaggtggcatgttgccaccatttangaactactgtattgtttgggggagctggtctgcaggagtctgcttttaaaaataaataaggattatagtaatcattgcttcagcaagaatcatccacagatgccaaatccattgggtgaaaattagttgg

SEQ ID NO: 32842 - DNA, 475 bp, Homo sapiens
  misc_feature (1)...(475): n = A,T,C or G
cggagagggagggttttgaaacttctgaaaatcttgcgaangncgnggaantccgngnaggaatgaaggatggggagaactcggcccttacctccttcctgttttcatccttttggcttggagggactggagagcttcatggtgggcttatttccatttgtgcagaggtggctgggaagctcaggaaccacaggcttttgttttgagtcaattggctttctctctctcttgcagggaagtactacatggccactatgaccatggtcacattctcaacagcactcaccatccttatcatgaacctgcattactgtggtcccaatgtccgcccagtgccagcctgggctagggccctcctgctgggacacctggcacggggcctgtgcgtgcgggtaagaagggagccctgtgggcagttcaggccacctgagttatcttctaacccccatctgcctgaggaggggctggcctcccg

SEQ ID NO: 32843 - DNA, 472 bp, Homo sapiens
  misc_feature (1)...(472): n = A,T,C or G
gggccaggctttgagatccctagtcttggtggtcgaattcggaaaactcagtgcagtccagtgcctgtggcaggcagcaccttgagccaacaggaaccattgacatgcgaggcccagggcaggcagactgtgcagtggccattgggcggcccctcggggaggtggtgaccctccgcgtccttgagagttctctcaactgcagtgcgggggacatgttgctgctttggggccggctcacctggaggaagatgtgcaggaagctgttggacatgactttcagctccaagaccaacacgctggtggtgaggcagcgctgcgggcggccaggaggtggggtgctgctgcggtatgggagccagcttgctcctgaaaccttctacagagaatgtgacatgcagctctttgggccctggggtgaaatcgtgagcccctcgctgagtccagccacgagtaatgcagggggctgccggcn

SEQ ID NO: 32844 - DNA, 477 bp, Homo sapiens
  misc_feature (1)...(477): n = A,T,C or G
ggcccaggcttctgagaccctanctcagtagtcgctatcgcanngcgcggaactcacccatcacgagggatcagcagctccacggaaggcctggctgccccttttctaaatgcctctccccccccatcagcgttggtgctgtcagccttgcagccttctcctactcattccagctccaatacccagcggctgccataccgagtgaccggcgtggacacagaccctcacttcatcatccacgtgccccagaaagaggacaccctgtgcttcaacatcaatgaggagcctggtgttatcctgagcctggtacaggaccccaacacaggcttctcagtgaatggacagctcattggcaacaaggccaggagccctgggcagcatgacggcacgtacttcgggcggctggtaatcgcaaaccctgccacggactttcacttggaagtgactcctcataacattacgctgaaccccggcttt

SEQ ID NO: 32845 - DNA, 469 bp, Homo sapiens
  misc_feature (1)...(469): n = A,T,C or G
nttcgagancctcgagaccctaggccgagnggcggcagttcgcctacgggactcatgatgacatctgccgatgctttgctggagataccctcttgggcatccgggccccatcaggcaccagcctggaggtgcccatgccagagggtctcaatgggcagaagaagtaccagattcacctgaagagtgtgagtggtcccattgaggttctgctggtgaacaaggaggcatggagctcaccccctgtggctgtgcctgtgccaccacctgaagatttgctccagagcccatctgctgtttctacacctccacctctgcccaagcctgccctagcccagtcccaggaagcctcacgtccaaatagtcctcagctcactcccactgctgtgcctggcagtgcagaagtccagggaatggctggcccagcagctgagatcacagtgagtggcggccctgggactgatagcaagga

SEQ ID NO: 32846 - DNA, 468 bp, Homo sapiens
  misc_feature (1)...(468): n = A,T,C or G
cagcaggggatgagaccctgagcagcgtcnggaanncccagacctacttcccgcacttcgacctgagccacggctctgcccaggttaagggcctttgcaagattgtggccgacgcgctgaccaacgccgtggcgcacgtggacgacatgcccaacgcgctgtccgccctgagcgacctgcacgcgcacaagcttcgggtggacccggtcaacttcaagctcctaagccactgcctgctggtgaccctggccgcccacctccccgccgagttcacccctgcggtgcacgcctccctggacaagttcctggcttctgtgagcaccgtgctgacctccaaataccgttaagctggagcctcggtggccatgcttcttgccccttgggcctccccccagcccctccttcccttcctgcacccgtacccccgtggtctttgaataaagtctgagtgggcggcaaaaaaaaaaa

SEQ ID NO: 32847 - DNA, 496 bp, Homo sapiens
  misc_feature (1)...(496): n = A,T,C or G
aggggccnngncncaattgaaactgagagcatacgcaggngcgggaattccgggcctctgtgggtgggttggggccttcctcgccctcggccggtccaccactcaccagggtctgtcccagtacagcccgaacgcgggggcgcgggagggcttctggctggggcgaacagggcttgagggctcagtcgggatgctgggatcgcacgcggtaaacctccagtagatcaagaagctgtacaaagtgcccgacttcccctcgaaacgcctgcccaactggaggaccagagggttggaacagcgccggcagggcttggaggcttacatccagggcatcctgtacctgaaccaggaggtgcccaaggagttactggaattcctgagacttcggcacttccccacagaccccaaagctagcaactggggcaccctgagggagttcctgcctggcgacagcagctcccatcaacaccagcggcctgtcctgagcttccatgtg

SEQ ID NO: 32848 - DNA, 486 bp, Homo sapiens
  misc_feature (1)...(486): n = A,T,C or G
agggntnccccccaatggaacatanagtcatggcagaaccgaactcccttcaaaaaaaagagagaaaagaanaaatacatttgaagtcaattccataaatataggaatgccttatatatttgtgtggtttctcgatgctttaaggttgagtttagcaacagtatgattcatagttgttgtttttgtttagtgatacaaggcagttcctcattttgacagttgccttttttccctaaatcactagctctcaagcttttaaatctcccaaaatgtcccaaatcctgggccacacctctcccacacctctcaaattataatctctgggagggccccaggtgccgcggtggcactgacagcagtgtgctgggggctgctggttccctgtcaggctttaatcagttgaagggctcttcctcccctctcccctcaactcatggcccgtagcagtgtctttttacagagttacaggcagctaggcaacactcg

SEQ ID NO: 32849 - DNA, 466 bp, Homo sapiens
  misc_feature (1)...(466): n = A,T,C or G
ntttgagaccactggcttctgaggccatttccttccgcggctggcgccacagccaccaccagcacgtcctccacggtcaccgtcacggccccggcccccgccgccacaggaagcccagtgaaaaagcagaggccgcttttaccgaaggagactgccccggccgtgcagcgggtcgtgtggaactcatcaactgtccagcagaaggagatcacacagagcccatccacgtccaccatcaccctggtgaccagcacacagtcatcgcccctggtcaccagctcggggtccatgagcacccttgtgtcctcagtcaacgctgacctgcccatcgccactgcctcagctgatgtcgccgctgatattgccaagtacactagcaaaatgatggatgcaataaaaggaacaatgacagaaatatacaacgatctttctaaaaacactactggaagcacaatagctgagatta

SEQ ID NO: 32850 - DNA, 494 bp, Homo sapiens
  misc_feature (1)...(494): n = A,T,C or G
agagcnnnnnnncccccatagagttcgtttcccatggcgggaatcgaggtcgtaggtacaggtcagtgtggccactcaccctgctggccctgaagtccacggcgtgtgccctggcctttacccggatgcctggctttcagaccccctcagaattcctggagaaccccagccagagctcccgactaacagctccattccggaaacatgtcaggcccaagaagcagcatgagatccggaggctgggagagttggtgaagaagctgagtgatttcacaggctgcacccaggttgtagacgtgggctcaggccagggccatctctcccgcttcatggctcttggcctggggttgatggtgaagagcatcgaaggggatcagagactggtggagagagcccagcgcctggaccaggagcttctgcaggctctggagaaagaggagaagaggaacccgcaggtggtccaaaccagccctcgtcactccccacaccacgtg

SEQ ID NO: 32851 - DNA, 263 bp, Homo sapiens
  misc_feature (1)...(263): n = A,T,C or G
cagganncctgtgacctcagcccacgcggggacctacaagtgctacggctcactcaactccaacccctacctgctgtctcaccccagggagcccctggagctcgtggtctcaagaccctccatgggttccagccccccacccaccggtcccatctccacacctgcagggcctgaggaccaacccctcacccccactgggtcggatccccaaagtgggctgggaaagcacctgggggctgtgatcggcatcttgctggccgccg

SEQ ID NO: 32852 - DNA, 470 bp, Homo sapiens
  misc_feature (1)...(470): n = A,T,C or G
ntttcgagaccactaggncttgcagtccctantcagtgtggtggaattccggcggcccgtgtggacgtcagcagcaaggtggaggtggtgtgggctgacaactcaaagaccatcatcctgccccagcacttgtacaacatagagtctgagattgaggagtcagactacgattcggtagaaggcagcaccagcggggcatcctcggatgaatgggaagatgatagtgacagctgggagacggacaatgggctggtggaggacgagctccccaagatagaggagccccccatcccacccctggagcagccggtggcccctgaggactagggagtggtgatcagtgaagaggcagccaccgctgccgtccagggggctgtggccatggctgcccccatggccgggctgatggagaaggctggcaaagacgggccacccaagagcttccgggagttgaaagaggccatcaagat

SEQ ID NO: 32853 - DNA, 506 bp, Homo sapiens
aggccccccccccatcgacatcgacagcggtggaattcggacaagaggggaggagagagacacagatcacccatgggtcagcagtgtagagaggacccaggacttcacagccttgtgtggggaagggaaggaggaagaaatgtgggtaagcctcaggccaagctgctgcactgtgaggccacttggactcacacccacagcctgggctcattcctggctggtggccggtatgaggtctcaccctagttccactcctcgtgggggctggcaaaggcacaatcctcggcctgtttgagggtaacccagccacagcaccccaagccagtgcctgctccctccctcccctaggagtgctggggaatccgaggtgactgcaaggagcctgacaagtgctgctggagacacaagcagtgcactgggcacatcatctaccctttcgcctctgactgtgtccgccacagcctgcacctacactctgtcaaccactgcaactgtaattctagctt

SEQ ID NO: 32854 - DNA, 475 bp, Homo sapiens
  misc_feature (1)...(475): n = A,T,C or G
tgtagagcaggggtttatacctttgagaacctcggaagnngcgnggaattcgccagctctgtgtcacattcagcagagacaccaggtacagcagaaggattttggacttgttcatgaggagggccttgttggccatgacctgggatggatgggggtgagagcctgggggaccacaccatgtccccagtacacgaaacagtgcctggtagacaggatggatttatggatggatggataggtaggtggatgaatggacagatgatacatgcatgcaaagacagatgaatagatggacagatggatggacggacagacggaatgaatgatcacaaaaggctttatgaacaaagtgagactgagctgcatctccatgggtagattgcacaggactctcctcttgagtcaggaatgacccaatgtcctggtgcacggagcaagtcaacttggcttgactgcagacacttgtggcatattt

SEQ ID NO: 32855 - DNA, 262 bp, Homo sapiens
  misc_feature (1)...(262): n = A,T,C or G
agcnccgtttgataccttggaagcagcagcagngnccnggaanncgnggagagcgggattaggtgagatttaaggaagggagctggggaatcctggggccaggttcccgtccctcaggccagcactgggggctccacttgagtgcctcctgtgatgccaggctgtggcagggggcagcatccctgggcccaggagccactcttacttatgggatgtgtgccctgccagggctgaggctcagttgccgaggagggggtatgtg

SEQ ID NO: 32856 - DNA, 498 bp, Homo sapiens
  misc_feature (1)...(498): n = A,T,C or G
aggggcncggncccaattgaaatcgattgctatatgcagngngcnggaattcctgaacttaaatctcttccctcattctgtgcccttccctcctcccccaggcgggaaaaccctcatgatgctgttgtctttcacccaaagtttggtgggaagaccctacaaaccctgccagagaagagtgtggtgggaaccatctccctgcgaagagcagcccagctgcagagaaagttcccgcatctggagttcaggagtattcggggaaacctcaacacccggcttcggaagctggacgagcagcaggagttcagtgccatcatcctggcaacagctggcctgcagcgcatgggctggcacaaccgggtggggcagatcctgcaccctgaggaatgcatgtatgctgtgggccaggtacacttgaccagggaagccacatggtgacatatgccttccctttgttctcaaccaagaagcttgtctcacaaccttctgcatctgctt

SEQ ID NO: 32857 - DNA, 512 bp, Homo sapiens
  misc_feature (1)...(512): n = A,T,C or G
ggggccggnnnnaattggaaatcgatcagcgntgnggaattccagagaacaaccctgcattccccacacaacacccacaatcagccactgcgggcgaggagggcacgaggccaggttcccaagagctcaggaacatggagctgatccaggacacctcccgcccgccactggagtacgtgaagggggtcccgctcatcaagtactttgcagaggcactggggcccctgcagagcttccaggcccggcctgatgacctgctcatcagcacctaccccaagtccggcactacctgggtaagccagattctggacatgatctaccagggtggtgacctggagaagtgtcaccgagctcccatcttcatgcgggtgcccttccttgagttcaaagccccagggattccctcagggatggagactctgaaagacacaccggccccacgactcctgaagacacacctgcccctggctctgctcccccagactctgttggatcagaaggtcaaggtggtn

SEQ ID NO: 32858 - DNA, 502 bp, Homo sapiens
  misc_feature (1)...(502): n = A,T,C or G
gggaaggtgccaggnntnncnnnncaatcgatanccntttgtagagcgcnggaanncgggactgtgggcccaggccaggcccagcagagactggagcagaccagctcgtccctggcagctgcactgagagccgcagagaagagcattggcaccaaggagcaagagggcacccccagcgcctccaccaagcacattctggatgacatcagcaccatgttcgacgccctggctgaccagctggacgccatgctggactgagccctccagcagtgcccactgtgacctgccgaagtccactgcctttgccccagcacagaagaggcccctgccaccctagggacgggccaagggctggtcaggctgaagtgcccctcctagcagggccccttcccactcagcccgcggctgtgggcaccacagctcttgtggggcagcccaccttagaacctgactagcgagggacctccgctgcatctcagcaaagcccctcccagggtttgat

SEQ ID NO: 32859 - DNA, 470 bp, Homo sapiens
  misc_feature (1)...(470): n = A,T,C or G
agaggccggtttcttacccaggtaactgagacgctcgnggaanccangnagacaagggcgtggtccccctggcagggacaaatggcgagactaccacccaagggttggatgggctgtctgagcgctgtgcccagtacgggaaggacggagctgacttcgccaagtggcgttgtgtgctgaagattggggaacacaccccctcagccctcgccatcatggaaaatgccaatgttctggcccgttatgccagtatctgccagcagaatggcattgtgcccatcgtggagcctgagatcctccctgatggggaccatgacttgaagcgctgccagtatgtgaccgagaaggtgctggctgctgtctacaaggctctgagtgaccaccacatctacctggaaggcaccttgctgaagcccaacatggtcaccccaggccatgcttgcactcagaagttttctcatgaggagatn

SEQ ID NO: 32860 - DNA, 501 bp, Homo sapiens
  misc_feature (1)...(501): n = A,T,C or G
nattganccccatcgaccactatccgngnggnggaattcggacccgcccggctcccagctccgccccctggcctagcgggccgtgtaactgactagcgggcagagtcgcaggggcgcacagttagtggggaggacggaacctgggctttctgcttggggagcccccactttctcccccgtctaagagacgcggatgtgttcatggaagcgagtcccataccagggctcacaccctggaaggggctggttccgcgcgtggaacttcccaggggacctcggaagaagcggccctggctcctgcgttaacgtccagcccgcggacgacactgaacatatctcagggcctaggagacgaagccgaccaaaaccctttatagcatcattaaactttttagtcggcttggggacccccttctnnnnnnaaaaaaaaaaaaaaaaaaaaaaaaaaaaaaaaaaaaaaaaaaaaaaaannnnnnaannnnnnnnttttttggggggggg

SEQ ID NO: 32861 - DNA, 471 bp, Homo sapiens
  misc_feature (1)...(471): n = A,T,C or G
agagtnagcggcccnnnaactgaagacctgntacctcgcagngcgnggaancgacttacctcaacacttcactccatggcagttcccgagacccgccctaaccacactatttatatcaacaacctcaatgagaagaggaagaaggatgagctaaaaaagtccctgtacgccatcttctcccagtttggccagatcctggatatcctggtatcacggagcctgaagatgaggggccaggcctttgtcatcttcaaggaggtcagcagcgccaccaacgccctgcgctccatgcagggtttccctttctatgacaaacctatgcgtatccagtatgccaagaccgactcagatatcattgccaagatgaaaggcaccttcgtggagcgggaccgcaagcgggagaagaggaagcccaagagccaggagaccccggccaccaagaaagctgtgcaaggcggtggagccaccccc

SEQ ID NO: 32862 - DNA, 473 bp, Homo sapiens
  misc_feature (1)...(473): n = A,T,C or G
agagggccggtttctttannaagggatactagnacngtcgngnaanccnnagaagaggggctacgtaaaggcaggaccctggactcctgaagctgctgtggagcacccagaagcagttcgccagcttcatcgagagttcggcagagctggctcaaacgtcatgcagaccttcaccttctatgcgagtgaagacaagctggagaacaggggcaactatgtcttagagaagatatctgggcaggaagtcaatgaagctgcttgcgacatcgcccgacaagtggctgatgaaggagatgctttggtagcaggaggagtgagtcagacaccttcataccttagctgcaagagtgaaactgaagtcaaaaaagtatttctgcaacagttagaggtctttatgaagaagaacgtggacttcttgattgcagagtattttgaacacgttgaagaagctgtgtgggcagttgaaaccttga

SEQ ID NO: 32863 - DNA, 473 bp, Homo sapiens
  misc_feature (1)...(473): n = A,T,C or G
tgcgggcgcggcccnnnaactgaggactagnatcntncgccgnngcgnggaantcccctgagacgctggcttggcctagggaattggcacccttgactccagatttgcagggaccctgggcctccgcagacccagagctgaggtccctttcttcctgcctgcagcggatgctgcgtacctggactcggaagaggagcggcaggagtatgtcctcacccagcagggctttatctaccagggctcggccaagttcatcaagaacataccttggaattttgggcaggttgaagatgggatcctagacatctgcctgatccttctagatgtcaaccccaagttcctgaagaacgccggccgtgactgctcccgccgcagcagccccgtctacgtgggccggatggtgagtggcatggtcaactgcaacgatgaccatggtgcgctgctgggacgctgggacaacaactacggtgacg

SEQ ID NO: 32864 - DNA, 467 bp, Homo sapiens
  misc_feature (1)...(467): n = A,T,C or G
catcgatattcatagcaatcgcgangacncnnnanctaagncttcctctctgccaccctgaggcagcaagaccagcccctcctcctctttcactttacatgaagacaacgaggatgaagacttctatgataatccacttccacttagtagatgctttctcttatgatattcttaatgacattttattttcccaagcttagtttattgtaagaatacagtataaatacacatacaaagtacgtgttaactgattttttaatgttaccagtaaggcttccagttaacagtaggctatttattagttaagtttggagggagcctgaagttatacaagctctgactgcgtgaggggttggctctccaaccctcacattgttcaaggctcaactgcacctctcctacctatctcccccaccctctgatgtagtaggataaatataaaaacacttagaaatccttgaaaaccn

SEQ ID NO: 32865 - DNA, 471 bp, Homo sapiens
  misc_feature (1)...(471): n = A,T,C or G
natcgatattccgtgcacatngncgnggacttcgacgggggtggctggatgaacccccagtaacatcaagcagatccagcaggagctggagcagtgttacgtccccgaggacgtgcgggttggctgcctgaccacagacttcgccatgcagaatgttctgctgcagatggggctgcacgtgctggcggtgaacggcatgctgattcgtgaggcccggagctacatcttgcgctgccatggctgtttcaagacaacgtctgacatgagccgagtgttctgctcacactgtgggaacaagaccctgaagaaagtgtccgtgaccgtcagcgacgacggcaccctgcacatgcacttctcccgcaaccccaaggtgctgaacccccgcggcctccggtactcgcttcccactcccaaagggggcaaatacgccatcaacccccatctcaccgaggatcagcgcttccctcagcn

SEQ ID NO: 32866 - DNA, 485 bp, Homo sapiens
  misc_feature (1)...(485): n = A,T,C or G
gagcggccnnnnnnnaattgtattgcatactcatagcagnngcgnggaattcggagttcgagaccagcctgaccaacatggtgaaacaccatctctaataaatactaaaaattagccaggcgtggtgccatgcacctgtaatcccagttacttgggaggatgaggcaggagaaccgcttgaacccaagaggaggaggttgcagtgagccgagattgcaccactgcactctagcctgggcaacaagagtaaaactccatctcaaaaaagaaataaataaaataaaattacttatcatacagcatgaagaggcagatctcaggcatcttgggagtatggaggaaggaggaatccttggtcatactcccaagtattggccaagagagttaaagaaaatgtcagcaagaagatggcattggaggtgatgtttacattgggttttgaatgacccctgtgggtagtaggaaagattcacgctatccgatag

SEQ ID NO: 32867 - DNA, 475 bp, Homo sapiens
  misc_feature (1)...(475): n = A,T,C or G
tggagaggagggtaggagaccccgagaaactangaagngncgnggaattcggagtctgtgatatcatggaccatgctggcgggaatgagaaactggtctttctggagtttgtactgaaggtgtacgggggtgacgaccgtatcggggccctgactcacaagatcactcacctgtccacactgcaggtggggtctctgaacgtcaagtgcctggcgaccccgtgccacacttcaggacacatttgttacttcgtgagcaagcccggaggctcggagccccctgccgtgttcacaggtgacaccttgtttgtggctggctgcgggaagatctatgaagggactgcggatgagatgtgtaaagctctgctggaggtcttgggccggctccccccggacacaagagtctactgtggccacgagtacaccatcaacaacctcaagtttgcacgccacgtggagcccggcaatgccgccag

SEQ ID NO: 32868 - DNA, 487 bp, Homo sapiens
  misc_feature (1)...(487): n = A,T,C or G
agtggctncccccactgaaaatagtgctatggcgggaacccggaagatgacctggcaacatcaaccaatgggtgaaggaggccacggaggggaagattcatgaattcctctctgggctgccggaagacaccgtgttgcttctcctcaacgccatccacttccagggtttctggaggaacaagtttgacccgagccttacccagagagactccttccacctggacgagcagttcacggtgcccgtggaaatgatgcaggcccgcacgtacccgctgcgctggttcttgctggagcagcctgagatccaggtggctcatttcccctttaagaacaacatgagctttgtggtccttgtacccacccactttgaatggaacgtgtcccaggtactggccaacctgagttgggacaccctgcacccacctctggtgtgggagaggcccaccaaggtccggctgcctaagctgtatctgaaacaccaaatgga

SEQ ID NO: 32869 - DNA, 498 bp, Homo sapiens
  misc_feature (1)...(498): n = A,T,C or G
naattgaagcccgatcggagnggcggaattccttcccatctcccctgctatcgtgtacggattcgtggtagggtcgtagcctaccagcccattagctaggcaggcatcccgctggactggcctgccctgaggtgggactcacccgtcccgagcaaaccacccatctacaggcatcgacatcctgtactcgggctcccagaaggccctgaacgcccctccagggacctcgctcatctccttcagtgacaaggccaaaaagaagatgtactcccgcaagacgaagcccttctccttctacctggacatcaagtggctggccaacttctggggctgtgacgaccagcccaggatgtaccatcacacaatccccgtcatcagcctgtacagcctgagagagagcctggccctcattgcggaacagggcctggagaacagctggcgccagcaccccgaaggccgcgcgtatctgcatgggcgcctgcaagacatctgggctga

SEQ ID NO: 32870 - DNA, 458 bp, Homo sapiens
  misc_feature (1)...(458): n = A,T,C or G
tggtgctnaccagctgcanacatgtgtcnggcatttgncatatcccacccctcagtgctgctggcggttgcctgacgaaaagctgcacttaatagaaatcactgtggatgcaggagatggacggtgaggagctcaggaccagccagcaaccccatcaggcggtaatgcctaccatggtcacccgtgacttcctctcgccactgctcggagctcctgcaaagccacaggcaacaacacatttctgctccatacgagaagttcctattgtaaatcggtgacatggctgcagttttctctcagcaaatattgagcaaacactgactgtgccaggtgatgtgctgggtcccagacccttcccagacccaggcctggcactcacggagatccagctaggaagtccgggaaaaggtcatcggggaaataagcgacgtcaagcacagtggatgaacgcgctgccg

SEQ ID NO: 32871 - DNA, 474 bp, Homo sapiens
  misc_feature (1)...(474): n = A,T,C or G
gtaggtcncgggnggngccnttttgaaaacctaccctanatcatcgcaagngcgcnggaantctggctcccgccgcctgagacacccatgacgtctcacatccgctacgatgtggacgtctcggccggcaacggcgcagggagcggacagagggtggagatcctggagggccgcaccgagtgtgtgctgaacaacctgcggggccggacgcgctacaccttcgccgtccgcgcgcgtatggctgagccgagcttcggcggcttctggagcgcctggtcggagcctgtgtcgctgctgacgcctagcgacctggaccccctcatcctgacgctctccctcatcctcgtggtcatcctggtgctgctgaccgtgctcgcgctgctctcccaccgccgggctctgaagcagaagatctggcctggcatcccgagcccagagagcgagtttgaaggcctcttcaccacccacaagggg

SEQ ID NO: 32872 - DNA, 472 bp, Homo sapiens
  misc_feature (1)...(472): n = A,T,C or G
ggagatccaggnngnnnnnncctgtagaccacttttgagngcggtggaantcgccacatcctcctctgccagagaccagtctggaagcccaactgcctatggggttattgcagctgctgcggtgctcagtgcaagcctggtcaccgccaccctcctccttttgtcctggctccgagcccaggagcgcctccgcccactggggttactggtggccatgaaggagtccctgctgctgtcagaacagaagacgtcgctgccctgaggacaagcacttgccaccaccgtcactcagccctgggcgtagccggacaggaggagagcagtgatgcggatgggtacccgggcacaccagccctcagagacctgagctcttctggccacgtggaacctcgaacccgagctcctgcagaagtggccctggagattgagggtccctggacactccctatgaagatccggggagctaggatgn

SEQ ID NO: 32873 - DNA, 413 bp, Homo sapiens
gatactgcgaccgcctgaaccgagacggaccggatgaacccgacgataacccttgagtgggcgacacaaaggccggccgtatggaggtcgaccctccacagagccttgatatgacgttgagcgagccagtggcagtgcacttgcatactggaacggcgacagaggatccaagtgcctgactgagccagaatctatattgaacctcagcggaggacacgcctgtggtgcagttggcagccgagaccccaacagcagagagcaaggagagagccttgaactctgccagcacctcgcttcccacaagctgtacaggcagtgagccagtgcccacccatcagcaggggcagcctgccttggagctgaaagaggagagcttcagagaccccgctgaggttctatgcacgggcgcggag

SEQ ID NO: 32874 - DNA, 448 bp, Homo sapiens
  misc_feature (1)...(448): n = A,T,C or G
ntcgagattcgtaggccgtgtggnggaattcattaacaacttctgacgtttgacacttgcttttcagcgaagtagacaggaattgaatttttgttttctgatgcaatttataagctcctggtatagacctttcgacctaaaatgtagacattctagtggggaacaagttctgaaataaaaagttacccaaatggtatgccaattacttcagagctagctctagttttaacagtgtgcttcttcaaagcagcttgcagttcttctcagacattagtgcattactcctgtaacctcattattcctgtagcttcatggaacagcaggtgagggagctgagaaagaggcaagggcacccagtgacttgggtggtcccagaggacaggggcaaagtggcttaaagtcctctgatgagacgtgtggtatttcctctgggatggtcactgatact

SEQ ID NO: 32875 - DNA, 500 bp, Homo sapiens
  misc_feature (1)...(500): n = A,T,C or G
aggcgcngnaggggccccgccaggggngacctagngagctaacgcaagngcggnggaantcggccaggagacctacacgccgcgactcatcctcatggatctgaagggtagtttgagctccctaaaagaggaaggtggactctacagggacaaacagttggatgctgcaatagcatggcaggggaagctcaccacacacaaagaggaactctatcccaagaacccttatctccaagactttctgagtgcagagggagtgctgagtagtgatggtgtctggagggtcaaatccattcccaatggcaaaggttcctcaccactccccaccgctacaactccaaaaccacttatccctacagaggccagcatcagggtctggtcagacttcctcagagtccatctccatccccggagcatctgtatgattcagaagtacaaccacgatggggaagcaggtcggctggaggcttttggccaaggggaaagtgtcctaaaggaan

SEQ ID NO: 32876 - DNA, 407 bp, Homo sapiens
gtgctggcctccttggggcccccccggcctgccacttcagtcaacttcactgaggagactgccactacagttgttgctgctgcctcctccaccagcatccctagctcagaggccacgaccccaaccccaggagcctccccaccagcccctgaaatggaaaggcctccagctcctgagtcagtgggcacagaggagatgcctgaggatggagagcccgatgcagcagagctccgccggcgccgcctgcagaagctggagtctcctgttgcccactgacactgccccagcccagccccagcctctgttcttttgagcagccctcgctggaacatgtcctgccaccaagtgccagctccctctctgtctgcaccagggagtagtacccccagctctgagaaagaggcggg

SEQ ID NO: 32877 - DNA, 538 bp, Homo sapiens
  misc_feature (1)...(538): n = A,T,C or G
aggttacnttnttnagggagggganncnaggggnnnnnngggcctcgaancacagtctcgagtggccgaattcggaggtgcaggtcctggtgcttgatggtcgaggccatctcctgggccgcctggcggccatcgtggctaaacaggtactgctgggccggaaggtggtggtcgtacgctgtgaaggcatcaacatttctggcaatttctacagaaacaagttgaagtacctggctttcctccgcaagcggatgaacaccaacccttcccgaggcccctaccacttccgggcccccagccgcatcttctggcggaccgtgcgaggtatgctgccccacaaaaccaagcgaggccaggccgctctggaccgtctcaaggtgtttgacggcatcccaccgccctacgacaagaaaaagcggatggtggttcctgctgccctcaaggtcgtgcgtctgaagcctacaagaaagtttgcctatctggggcgcctggctcacgaggttggctggaagtaccangcagtgacagccacccttga

SEQ ID NO: 32878 - DNA, 487 bp, Homo sapiens
  misc_feature (1)...(487): n = A,T,C or G
naagcgggnngnnnnaaactgagattcatagctatngncgnggaantccaggctggcatgactcacatcgtgcgggaagtcgacaggccgggatccaaggtgaacaagaatgaggtggtggaggctgtgaccattgtagagacaccacccatggtggttgtgggcattgtgggctacgtggaaacccctcgaggcctccggaccttcaagactgtctttgctgagcacatcagtgatgaatgcaagaggcgtttctataagaattggcataaatctaagaagaaggcctttaccaagtactgcaagaaatggcaggatgaggatggcaagaagcagctggagaaggacttcagcagcatgaagaagtactgccaagtcatccgtgtcattgcccacacccagatgcgcctgcttcctctgcgccagaagaaggcccacctgatggagatccaggtgaacggaggcactgtggccgagaagctggact

SEQ ID NO: 32879 - DNA, 539 bp, Homo sapiens
  misc_feature (1)...(539): n = A,T,C or G
aganctctnatttagtttgnannnnnaggggngnnnngggatttgaaaacccctttcgaaccactatccagngggnggaattccgcttacgggagagagcctgcacattgcatccactgcggtgcctgcccacccactccatgggagcctgtctgtttctgcagagcccctcctgatttgggagttctcaggcaggaagggagggatttctgggctgatcctcaaactactactgaaagcagggacctggggagggccccagggacacggtgcctggggtggcagggctgtccctggggaccagcacagcagagggagaagctgcgctaaaacgctcaggcctgaggtcatggctgccacgcagcagtgcccagatttgaacccaggactcccttccacatctcccctgctatcgtgtacggattcgtggtagggtcgtatcctaccagcccattagctaggcaggcatcccgctggactggcctgccctgaggtgggactcacccgtnccgagcaaaccacccatctacaggcatcgg

SEQ ID NO: 32880 - DNA, 531 bp, Homo sapiens
  misc_feature (1)...(531): n = A,T,C or G
agtattatattagggttnnnnnnnagnnnnnnnnnngatcgaaccacatttcgagtggccgaattcggngaaaacaaaaggagacgaaggacgcatgcgtttggtgagtcccggattctggtgggttcttccgctcaggctgggtgaagcgcttccgggtcgccgccggcagcagcctcccggcgcgatgaagacactgaggctcagagaggttaagtgactcagccaaggtcaaacagctagtaagtggtggagccaggactcaaagccagtctaggagccatgtccactttgttcccctcactcttccctcgtgtgactgagactctgtggtttaatctggatcgaccctgtgtggaagagacagagctgcagcagcaggaacagcagcatcaggcctggctccaaagcatcgcggagaaagacaacaacctggttcctattggcaagccagcctcagagcactatgatgacgaggaaaaagaggatgatgaaaatgatgaggatagtgaagaggactcanaggatgan

SEQ ID NO: 32881 - DNA, 497 bp, Homo sapiens
  misc_feature (1)...(497): n = A,T,C or G
agcnggccngcncncaatggaaatcganagcatacgcaggngcgggaattccccggctcgcgtgatgcttagcgccagctcaagggcggcttctgcctcggggtccttccaggagcactctgagggctccgggtagggggtaacacagaggctagggggagcttgcggcatcctccggggcagcctctggaacagctcctccgtcacgaagggcatgaagggtgagagcagccgcaggccaacgtccaggcaagtgtacagggtctggcgggcacactcagctgccacctggtccaccccattcagtacaggtttcaggcactccaagtagacatcacagagctcatagagccagaagctgtactgggcagtggtgacggccgggaagtcgtaggcctggaagccttgattgctgagcctcacagcctctgtcaggcggctgcggatccagcggtccaccaggctctcatggcctccgggctgggaggtgggtgagg

SEQ ID NO: 32882 - DNA, 483 bp, Homo sapiens
  misc_feature (1)...(483): n = A,T,C or G
atttgtaccctggcagnggcactgagaccntaggaagnngcgnggaattcgcaagttcggtgccgcgggctggggtaggcggcagtggggtccctggctttggggcactgggaagatcgcgagtgggaaggtcctcccgcggtcctccgggtcatctttcctcctgaggagcagcatatttcgcatctgccggagattagaattacttgttattggtaaatagccactatggagactaaggaccagaagaaacaaagaaagaaaaatagtggacccaaagctgcaaagaaaaagaagcggcatctgcaggatctccagctaggagacgaagaagatgcctggaagagaaatcccaaagcttttgcatttcagtctgctgtgtggatggctcgatcctttcacaggactcaggatttgaagacaaaaaagcatcatattccagtggttgatcgaactccactagagcccccaccaatagtggta

SEQ ID NO: 32883 - DNA, 537 bp, Homo sapiens
  misc_feature (1)...(537): n = A,T,C or G
agagacanttcnnnagggagaannnnnaggggnnnnnnnngcctcgaaccactatctcgagtggcggaattctccacctacctgctaactccagatattatttttaagttggagacctaaaaataattctcttgtattttggagatgaagaaaaaagtcattcacctgggagggatttttaacaaacatgcactaatattacctccctcttccaaactcctactgtcctcacctcacccaccactgtaaaagtattacgtcgtgcattaaagaccagaaaagacttgcttttacccagggaggggacattcccccaatcctgtgtctgggcagcttgcctggtggatgtttctggccctttttccaccatgggaatttctcacctctagctctaagggcagctgaccacctgccagcccctctctggttccagaagattacccttcgcaccggcacaggagagatcttanatggtctctgggctgctgggacatgcangctctgagtggggactgcacccactcatgctgttcctga

SEQ ID NO: 32884 - DNA, 535 bp, Homo sapiens
  misc_feature (1)...(535): n = A,T,C or G
cgggttatantaagcctgaannnnagggggnnnnggattgatncccctatcgaaccacagtccagngnggcggaattccacagactcagagagaacccaccatggtgctgtctcctgccgacaagaccaacgtcaaggccgcctggggtaaggtcggcgcgcacgctggcgagtatggtgcggaggccctggagaggatgttcctgtccttccccaccaccaagacctacttcccgcacttcgacctgagccacggctctgcccaggttaagggccacggcaagaaggtggccgacgcgctgaccaacgccgtggcgcacgtggacgacatgcccaacgcgctgtccgccctgagcgacctgcacgcgcacaagcttcgggtggacccggtcaacttcaagctcctaagccactgcctgctggtgaccctggccgcccacctccccgccgagttcacccctgcggtgcacgcctccctggacaagttcctggcttctgtgagcaccgtgctgacctncaaatacccgttagctgg

SEQ ID NO: 32885 - DNA, 506 bp, Homo sapiens
  misc_feature (1)...(506): n = A,T,C or G
gggagctnnnngcctcgatcaccgtctcgagtggccgtattcccacctccctgtctgtcgggcccccaggggcaccacttcacaggccacagaagccccgagaaggagcctgggacatggaggatgtggcccccacaggggtcaggcaggcgttctccgagctgccctttcccagtcacgtgcttccggaacccgggttcccagacacagacccctctcaggtttacagccccggcctgccgcctgccccggcccagccctcaagcatcccaccctgcgcactggtcatccagcccacggtccagatcatacttcaggggagcctgccgctagtgggctgtggggcagcacagaccctggccccagagcccgctgccctgaccccagcctcagagccagccagtcaagccactgcagccagcaactcggaggagaagaccccggcccccaggctagctgcggagaaaccaagaggaggagtacatganaaagctgcacatgcanga

SEQ ID NO: 32886 - DNA, 493 bp, Homo sapiens
  misc_feature (1)...(493): n = A,T,C or G
nattgatncacagctgcgagngcgcgaattccggcgagcgggcggagagcggnggccgcactgtggagtgtgggctgggccgcaaatgacatgtggtctgtgttttggaccgtggttcgtacctatgctccttatgtcacattccctgttgccttcgtggacggggctgtgggttaccacctggaatggttcatcaggggaaaggacccccagcccgtggaggaggaaaagagcatctcagagcgccgggaggatcgcaagctggatgagcttctaagcaaggaccacacgcaggtggtgagccttaaggacaagctagaatttgccccgaaagctgtgctgaacagaaaccgcccagagaagaattaatggaggacacagggccctatggtcctactgtgggtggtgacttggcctgctaccatgttgactgagccccagaacccacatctaattggtttgttgcttattctggcccttccacaccacacag

SEQ ID NO: 32887 - DNA, 462 bp, Homo sapiens
  misc_feature (1)...(462): n = A,T,C or G
agcggctgnnnnnnaacggatagcgagcntaggacgngncgnggaattcgtacgagcccgtgctgatcgagatcctggtggaggtgatggatccttccttcgtgtgcttgaaaattggagcctgcccctcggcccataagcccttgttgggaactgagaagtgtatatggggcccaagctactggtgccagaacacagagacagcagcccagtgcaatgctgtcgagcattgcaaacgccatgtgtggaactaggaggaggaatattccatcttggcagaaaccacagcattggtttttttctacttgtgtgtctgggggaatgaacgcacagatctgtttgactttgttataaaaatagggctcccccacctcccccatttctgtgtcctttattgtagcattgctgtctgcaagggagcccctagcccctggcagacatagctgcttcagtgcccctttt

SEQ ID NO: 32888 - DNA, 467 bp, Homo sapiens
  misc_feature (1)...(467): n = A,T,C or G
gagcggctgnnnnnnaaacggactgancangcatcgacgngncgnggaattncacatgcctgtaatcccagctagttgggaggccgaggcaggagaatagcttgagcccgggaggcggaggttgcggtgagccgagatcgcgccattgcattccagcctgggtgacagagggagaccccatctcgaaaaaaaaaaaaaaaaggccaaggggctgaaattataaacaggagcccccttgcccccccttttttggtttttttcttaagtaaaaaaaaaaaggctcgcaaaaaaaactatttataaaacccgccctgttaattcagggggggctcgtgaaaccaaatataacttatacaaggtcaagagggggggatttaatattaagccaccgggctccctagggggaaaaaaaaacaaatagtttgcaaaaacaactttttaaaataaattttacaatattactgttt

SEQ ID NO: 32889 - DNA, 227 bp, Homo sapiens
  misc_feature (1)...(227): n = A,T,C or G
cagnangactgtatgggtcccggggcgctgggattggggagcgtgatggaattatgcataagattgacatcatctctggaactcttggcaaggcctttggctgtgtgggcggctacattgccagcacccgtgacttggtggacatggtgcgctcctatgctgcaggcttcatctttaccacttctctgccccccatggtgctctctggagctctagaatctgtgcgg

SEQ ID NO: 32890 - DNA, 456 bp, Homo sapiens
  misc_feature (1)...(456): n = A,T,C or G
agccggtgnnnnnnaactgatagcatgcgtatgtcgtggaattcggtcgacttctgcgcgctcaaccacttcaccactaggttcgtgatgcacgagcagctggccggcagccgctacgactcggacagggacatccagtttctgcaggacatcacccgcctgagctcccccacgcgcctggctgtgattccctggggggtgcgcaagctgctgcggtgggtccggaggaactacggcgacatggacatttacatcaccgccagtggcatcgacgaccaggctctggaggatgaccggctccggaagtactacctagggaagtaccttcaggaggtgctgaaagcatacctgattgataaagtcagaatcaaaggctattatgcattcaaactggctgaagagaaatctaaacccagatttggattcttcacatctgattttaaagctaaatcctca

SEQ ID NO: 32891 - DNA, 452 bp, Homo sapiens
  misc_feature (1)...(452): n = A,T,C or G
agcgcttttnnnaactgactgcgtgcatgtggcnggacntccccatacgtggagcctctcgagcgccttgaaaagctgctaaccaaagagcagctgaagatctggatggggaagatgcagaagaaggctgttgccatctccttgcccaagggtgtggtggaggtgacccatgacctgcagaaacacctggctgggctgggcctgactgaggccattgacaagaacaaggccgacttgtcacgcatgtcaggcaagaaggacctgtacctggccagcgtgttccacgccaccgcctttgagttggacacagatggcaacccctttgaccaggacatctacgggcgcgaggagctgcgcagccccaagctgttctacgccgaccaccccttcatcttcctagtgcgggacacccaaagcggctccctgctattcattgggcgcctggtccggcc

SEQ ID NO: 32892 - DNA, 455 bp, Homo sapiens
  misc_feature (1)...(455): n = A,T,C or G
gcggctnnnnnncccgactgcccagctacgcnggcnnnnnggattncagctgttgaaactagatggcaagttttccgtggtatacgcaaaaagtgattccagtccagactcagccgaggacgtgcgcaaggagtgccaagactgccccctgctggccccgctgaacgacaccagggtggtgcacgccgcgaaagctgccctggccgccttcaacgctcagaacaacggctccaattttcagctggaggaaatttcccgggctcagcttgtgcccctcccaccttctacctatgtggagtttacagtgtctggcactgactgtgttgctaaagaggccacagaggcagccaagtgtaacctgctggcagaaaagcaatatggcttttgtaaggcaacactcagtgagaagcttggtggggcagaggttgcagtgacctgcacggtgttccaaacan

SEQ ID NO: 32893 - DNA, 463 bp, Homo sapiens
  misc_feature (1)...(463): n = A,T,C or G
agcgccggnnnnnccttgacatgcaccctacgacgngccgnggaattcctacgagccagacgacggactcacaggacaggagctcttcaactgcggagacgggctcgcctacaatgactttctcattctccctgggtacatcgacttcactgcataccatgaggacctgacttctgctctgaccgagaatatctctcttaagaccccactggcttcctctcccatggacacaggcacagaggctgggatggccatagcaatggcgcttacaggcggtattggcttcatccaccacaactgtacacctgaattccaggccaatgaagttcggaaagtgaagaaatatgaacagggattcatcacagaccctgtggtcctcagccccaaggatcgcgtgcgggatgtttttgaggccaaggcccggcatggtttctgcggtatcccaatcacagacacaggccgg

SEQ ID NO: 32894 - DNA, 454 bp, Homo sapiens
  misc_feature (1)...(454): n = A,T,C or G
agcggntgnnnnnaaccgatagcgagcatgtgccnggacntcaggtcctggtgcttgatggtcgaggccatctcctgggccgcctggcggccatcgtggctaaacaggtactgctgggccggaaggtggtggtcgtacgctgtgaaggcatcaacatttctggcaatttctacagaaacaagttgaagtacctggctttcctccgcaagcggatgaacaccaacccttcccgaggcccctaccactttcgggcccccagccgcatcttctggcggaccgtgcgaggtatgctgccccacaaaaccaagcgaggccaggccgctctggaccgtctcaaggtgtttgacggcatcccaccgccctacgacaagaaaaagcggatggtggttcctgctgccctcaaggtcgtgcgtctgaagcctacaagaaagtttgcctatctggggcgcctggn

SEQ ID NO: 32895 - DNA, 467 bp, Homo sapiens
  misc_feature (1)...(467): n = A,T,C or G
gggggactgagaccataggcaggctgaggtatctaggacangcggnggaattcggagatgggaggacgaacaggtcccaacaggacatcttactgtctaaatccggtctgtgagccgggatcctctgggggctctagtggaagccacacttccaatgcatcggtgaccattgttcgttcccgcaccaggagcagttctggaacaggcctctccagccctcctctggccacccaaactgttgtgcctctacagcactgcaagatccccgagctgccagtccaggccagcattctgtttgagttgcagctcttcttctgccagctcatagcactcttcgtccactacatcaacatctacaagacagtgtggtggtatccaccttcccacccaccctcccacacctccctggtttgggatgtacattccgttcctgcagctgaattgcgacctccgcaagacaagcctct

SEQ ID NO: 32896 - DNA, 496 bp, Homo sapiens
  misc_feature (1)...(496): n = A,T,C or G
agggccngcccncttttgataactaaagcatcgcagnggcnggaattccgncagccaccatctgccttgcttaccttatgaggactaatcgagacaagctgtacgatgcctttgagtttgcgaagcacaggcgaggcatcatctctcccaacttcagctgcatgggccagctgctgcagtttgagtcccaggagctggctccgcactgttcggcagaggctgggagccccgccatggctgtgctcgaccgaggcacctccaccaccaccgtgttcaacttccccgtctccatccctgtccactccacgaacagtgcgctgagctaccttcagagccccattacgacctctcccagctgctgaaaggccacgggaggtactctaacccgagcggtgagcccctggaattggaatcccgcttctgggagctccgggacagcattgtgcaacgtgagcttctcatgctgagagttctgcgcttccaggtctgcttacag

SEQ ID NO: 32897 - DNA, 466 bp, Homo sapiens
  misc_feature (1)...(466): n = A,T,C or G
ggggactgagaccctaggccangactgagaacactcgacagngcggagcaactcatgataaattgagcatcggtactgccgcgttgaagagcactccgtgacagctcattaatgaatgctcgcccgcctgaacagctagcgtgggaggactgggtgctccttccagctgtgggactcgcagaggtggctgcggctctctgggctgcatcatctgcatagcaggagcattcaccttggccctgcctccacacagggccattcaccagccatacatctctggccatttacaatctcttttcttcggttttcctcagtgaaaatggactcatggtcgtatcaacctcttagggctcctgtgacgatgaactgagttatgtaaatttagcaatcagctaccatcatggccccatctttcagtggaatcagaccaggccaggggtgctgtcctccccgctctctaccacag

SEQ ID NO: 32898 - DNA, 461 bp, Homo sapiens
  misc_feature (1)...(461): n = A,T,C or G
natcgaagcccctaggacagaactgaggaccatctgacagngccaagcaccccatgaaaaactgaccattgctcatgcccgcttaagaacaccagctgacaggcctgtcagagtatacgccgatggaatatttgacctcttccactcaggtcatgcaagagcccttatgcaagcaaaaacactgtttcccaacagctacttgttggtaggagtttgcagcgatgatctcacccacaaattcaaaggtttcaccgtgatgaatgaagccgagagatacgaagctctcagacactgtcgctacgtatacgaagttatcagagatgctccctggacactcacgccagagtttgtggaaaaacacaagattgactttgtggctcatgatgacattccgtattcctctgctggctctgatgatgtttacaagcacataaaggaagcatggatgttcgttacaacat

SEQ ID NO: 32899 - DNA, 405 bp, Homo sapiens
ttttgaagagggtgcagcccagctgggtcctctttctcctctccccatctgcccccatccctgctagatgagcttggggcagagggcgaagctgacctgcacccctgatgtggcatatggagccacgggccaccccggtgtcatccctcccaatgccaccctcatctttgacgtggagctgctcaacttatagtgaaggcaggaaggaactcaaggtggctggagatggctgctgctcaccctcctagcctgctctgccactgggacggctcctgcttttggggctcttgatcagtgtgctaacctcactgcctcatggcatcatccattctctctgcccaagttgctctgtatgtgttcgtcagtgttcatgcgaattcttgcttgaggaaacttcggttgcag

SEQ ID NO: 32900 - DNA, 413 bp, Homo sapiens
ccattatataagaaagaaacaggtgagaggaagagcatttagctgatactggctgatgttcagagcacttactcctctagagggaaagcatgacaccgaacactaagcacacagctttttgttgttttggttttttctcccgcaaatcttaaagtgattcccatgaccttggccaaggacacttcttaaagattaatgactggcactgacattgccccaggcgggccactcctcacactggctctcagttcccagccatgcctggggctcagtcacttctattccaccctctgagactccattggtgtcacacaaggcgtcttcttggctttgattttgagaatcccctattttcacttcagatctgtcagctgccatgggggaattaaaaaaaaccagaaatgcgtgtagag

SEQ ID NO: 32901 - DNA, 526 bp, Homo sapiens
  misc_feature (1)...(526): n = A,T,C or G
gtccgatactctcactcttacttcattatccggaattaccttttgttaacttctaggtcaattacttcttttcactccggggnnnntttgactcatgccgtccggccggaatccggtgaccacgcgccgggcttattctttatatgacctatacttattatgttattactacctgataccctatttaggctgtttgtactgatggcaagctcttcaaccacttatagactatttggcgattcagccctggtattcctgcctatcctcgaacctgcactgtggacttttcgggagtcaggaggttgtgtagcagaggacgaggactgggtatgaggaagggctggggtactgtgacagggttattaatttatttgagatggagtcttgctccgtcacccaggctggagtgcaatggcacgatcttggctcactgcaacctccaccttctgggttcaagcgattttcctgcctcagcctcccaagtagctgggattacaggagcctgctaccaagcccgactgatttn

SEQ ID NO: 32902 - DNA, 481 bp, Homo sapiens
  misc_feature (1)...(481): n = A,T,C or G
tagtgaggagttttntttgattgcgatgcgcatgcggaacgcgcttcggaattccaggctcgacgccacgcgtgcgngaaacttcaagtaaagaagacatagaaagttatggtttagaaacattggaaacaacttctaatgaggaacagacacctcttcttaaaaagattaacccaaccgaatctacttccaaagcagaagaaaatgaaaaagttgattcaaaagtgaaagctttcaagaaaccattgagtgtatttaaaggccccttactacacatcagcccagcagaagaactgtactttggaagtacagaatccggagagaagaaaaccttaatagtgttgacaaatgtaactaaaaatatagtggcatttaaggtgagaacaacagctccagaaaaatacagagtcaagccaagcaatagcagctgtgacccgggtgcatcagtggatatagttgtgtctccccatgggggtttaan

SEQ ID NO: 32903 - DNA, 403 bp, Homo sapiens
ccctagatgacactgagcttcggctgttgggacggtttcactcggcctgcgatgctctgcggacgctggcagaggcccggcgcctctttcccgggcgcgtgtctgtagacttgatgctggggctgccggcacagcaggcggggccgtggcttgggcagctgcaggaactgctgcaccactgtgatgaccacctctccctctaccagctgtccctggagcggggcaccgcactcttcgcccaggtgcagcggggtgcccttccagcccctgacccggagctcgcagctgagatgtaccagaggggccgggctgtccttcgggaggctggcttccaccagtatgaggtctccaactttgcccggaatggggcgctcagtacccacaattggacttactggcagtg

SEQ ID NO: 32904 - DNA, 415 bp, Homo sapiens
cggacgcgtggggcctttcctcagtctgagaaattggtctcttttaaaagacgaatctcatgaatattcacatcaaagacttgagctttttaaactagtgagagtgccaagtgctttttagaaaggacccatatgttatcaaactttgaaattgagttgctggaatgaagtagaggtgactctctctgtggtacacattgaatgtactatgtatgttcaagtattcaggcgccatgtcttatatactgaagaaagaaaaaggtgaggcccaccttgctcttacaatgtttgcaattgttactgtattgaatacagtataatgactactatggcttcaatcttaaacctggaaacaaatatccctttttttccccttcatttcaccaagcctttacttaaaatcttcagggggctg

SEQ ID NO: 32905 - DNA, 155 bp, Homo sapiens
gtgttctgtatcttgattatgttggcgattccatgtgagtttacagctgtcaaaactcaacaaagtatacactttaagaagacatggtttattgtaaataagtaatttctcaataaagttaataaaaacaatctaatggaaaaaaaaaaaaaagg

SEQ ID NO: 32906 - DNA, 411 bp, Homo sapiens
tttgttttcctttatgcccttttcctgttgaccacttttacacatttaaatgtaatttgttgcgagaataaatttagctgcataaaacgttcggctcatttatctgacatcttagtcacatatacaaggaatagaaatagaaactcggtgtctctagttatttttaaattattcttacctcagacttcttagaaatcactttagtaatggagcattttgctttgattagttactacatatttctgcctggcaagaactaggaagtaacttcaaattttgagtaatcaccctgtacttatttggtgatcaggaaagccagctggcctttcggacattagaacctattttagcacccacttaaggcttttggaacccgccttgctaggattgtgatattttaacacgaagaag

SEQ ID NO: 32907 - DNA, 417 bp, Homo sapiens
aatttttgtatttttagtagagaccagcctggccaacatggtgaaaccctgtctctactaaaaatacaaaaaattagctgggcgtggtggcaggcgcctgtaatcccagctactcgggaggctgaggcaggagaatctcttgaacctgggaggtggaggttgcagtgagccaagaatgcaccactgtactccagcctaggcaacagtgcaagactccatctctgaaaaaaaaaaaaaaaaaaaaaagtccttcttaaaggattttatttatcgggaggcaaaaacatatatgttgggagggatacaaccccacattacctttttaggcccctggaccattggttttttatttttttaggggagggaaatggccctcagagaaaaacctttttttttaatctaaagccttgcatttgg

SEQ ID NO: 32908 - DNA, 404 bp, Homo sapiens
  misc_feature (1)...(404): n = A,T,C or G
agttctggaagcagcaaaagcataggcaggctttcataaacaggtataaatatctacacaaaactgtgcagtcaagtcattagttttcctaatgttgtctcaggtccttatttatcagatggcttctaattatcctaaaatataaaatcactatcaatagtaccttgaccacctccggagcacttaaggggtaatatgtttcttgacatgaggattcactctctgtcctggacacagatttacaaccatcaattaccataaaaattcttctctattgtgacataaacttaattaggtaggttcaatgaaacattatctcttgattgaatgcccataggtaattggaaattctttattacttattcgtagttggtagaaggcatggtttctcacctaggattatn

SEQ ID NO: 32909 - DNA, 419 bp, Homo sapiens
cccagctcatccagtcctggcactcggacttgaaaagtttggcccatgggtgcgaggggaactccgagttctttctgagcctgctggacatgaagagcagatgaccaccatgctctgtgtcagccaggacgaagggagacatctgggtgccagggagccttccgtccatacgcaacaaggactcctcgctgctgaccaggctctatgaatgtacatggaaaacccctaaaaatccccaaaacagaaacatacaagagttcacctgtccaggtacatagtaatccaagacagaggtctactttgaaaaaaaaaaaaggggagttttccttatgcagcccaaacccaggtggggggttcccccccacccccacattcaaacctttaaattctggttggctctgaaaacgggggtttccccg

SEQ ID NO: 32910 - DNA, 417 bp, Homo sapiens
  misc_feature (1)...(417): n = A,T,C or G
caagaaaagccatatggtcgcctcctgatccagccggttcccagattccactgaggttagagtccatttacaaagctgccaggaaaccggccacttctagtaaaccacgtcgtgcctcactgggtcctgcttacctcatttctgaatgtgcatttccagccttcttgctctcagagctattgttcaagcagaaaacaagctgcttttattacagtatgatgtcatgactcatttgtaacagatccagcctcagggacagccctgtaaggcagcaagtggggctggctccaaatgggtatgagtctcagaatctttggtaaggcagaactgaactgggctgagaggtggtcttaaggcctgggcaggctctattctctctggactggctgcagcctgcagtctaagagaggcccaatn

SEQ ID NO: 32911 - DNA, 507 bp, Homo sapiens
  misc_feature (1)...(507): n = A,T,C or G
caaggccccnataagatntccataggaacntgcgcaggaancccngggncgacccacgcgtgcgaggaggtggtggctcacgcctgtaatcccagcacttttagaggcttaggcaggaggattgcctgagctcaggagttcaggacaagcctgggaaacattgcgaaacccattctctacaaaaaatacaaaaaattacccaggcatggtggcatgcgcctgtggtcccacctacttgggaggctgaagtgggagaatcgcttgagcctgggaggttgaggctgcagtgagctcacgtcatgccactgcactccagcctgggtgacagagggagatcctatctcaaaaaaacaaaacaaaacaaaataataataataataataactattaaagcactttctaagtgctgggtactaattgctcagcacatgctagtacccttaatactcacataaacaaactcttggagatgtgcataattatccccattttacaaactacaaaccn

SEQ ID NO: 32912 - DNA, 412 bp, Homo sapiens
  misc_feature (1)...(412): n = A,T,C or G
ntgctctcactaaagggaaatttccggcgaaataacttaggtttaactagctgcgtgcccagaatcactgtgccttcatacatgtgtcctctccttaaattcattactttcaaatgatgttcaaagcattgactattttcattcaaagaaactaccttcggccgggcacggtggctcacgcctataatcccagcactttgggaggccgaggcgggtggattacctaaagtcaggagttcaagaccagcctggccagcatggtgaaaccccatctctactaaaaatacaaaaattaaccaggcgcagtggcacacccctgtaatcccagctactcgggaggctgagggaggagaattgcttgagcccgggagacagacgttgcagtgagtcaagatcgtgccactgcactcct

SEQ ID NO: 32913 - DNA, 406 bp, Homo sapiens
cgcctccgggcataaggcccctgaccacacttcagaagccccatcccccctgccaccgggcgatccctgctgtgagccgaagctctccctgccccgccctggccatgtgatcgtgttggtgacagaccctgatgtgctggtgctgtgtccccaaaaccggggccctccacagaggccccttcccagcgacactacctggggctcaggcctggacccccccagttcacggttgctcctgggagctgcccctcccgtcacatcagaaccttggaagctgctgctgctgcttacagaattatatttttttcttttgaagagttttaagaagttgtaactttttgtgtcttgtcatgtcagagaataaataaatattctaagtagaaaaaaaaaaaaaaaaaaggggcgg

SEQ ID NO: 32914 - DNA, 418 bp, Homo sapiens
gcaggagaatcgcttgaacccgggaggcagagattgcagtaagctgagatcgtgccactgcactccagcctggtgacagagtgagactccgtctcaaaaaaaaaaaaaaaaaacctcacttttttcaaaaaaataaattggggggaggaccccaggcccacatcccaagttttggaacatgggccctcatcctttttggaatggcaaaccttccgggtttgttttcccccctgttagggcccatataccccctcccatgttttccttcaggttatgggccgggggaacttccccagggggtttatggataggcttaaaaagggtttgggaccccccaaaaattggggggaaaactgattttgtttttttttttccaggaaaggctccaggggtttttacttgttccaaaaattgtcaa

SEQ ID NO: 32915 - DNA, 414 bp, Homo sapiens
agagaagtaaaaaaagaagaaggtgaagcttttgcactataacatggactcatcttcatggaaacgtctgctaagactgcttccaatgtagaagaggcatttattaatacagcaaaagaaatttatgaaaaaattcaagaaggagtctttgacattaataatgaggcaaatggcattaaaattggccctcagcatgctgctaccaatgcaacacatgcaggcaatcagggaggacagcaggctgggggcggctgctgttgagtctgtttttactgtctagctgcccaacggggcctactcacttattctttcaccccctctcctcctgctcagctgagacatgaaactatttgaaatggctttatgtcacaaaagactttaatccgtcaaattcttgtataactttgaataaag

SEQ ID NO: 32916 - DNA, 408 bp, Homo sapiens
taagaatcaggtccttaaatacctcccaatctgatgaaacgatagaataaagtaacatttcccagaatggaggaatacattattttatcgtatatttttgtccaagcgatgagctgacggtggtattgcttctctgcatgttatcagtgtgtacatctggtgcttttcatgtgtcatttgtgagccacaaatgcaaagttgccatttgaattcagtcaggctacagggtggtgtcagtcaaggtctttcaggtgggggagaaattggttagggctcccactgccaaatgcaagcagatagcataacctgactgttatgtgccctcaggcagcatgcttagggacaactctgtggcctgggggacatctgtgtcacagtataggattgccattcaggtgttttgtacct

SEQ ID NO: 32917 - DNA, 413 bp, Homo sapiens
  misc_feature (1)...(413): n = A,T,C or G
cccacgcgtccggcgctgtccatgggcgtttttggcctttgccacccagagatgataaatagccagagacgtcaatggcacccatggacatagtaagcatagtaggagctgaaaaactagaagcaatgacaatgtcaactattttgagcaaaaagaagcagtgtcttcggaacatttgatcataaaaccagaaattaaaggatgagaaaaacatttttctgaagcttatactttcacatttcctagagagcatatttgtgtggatgggggtgggtaaacactcaacaaaagtttctttaaaaagaagaaaccatcctggtttgatgtaaacaatggttgcccactgctcccttcctgtgcctgtgacccttcccaaactgccctgttgcttgcaggctcgcctgagctgaaan

SEQ ID NO: 32918 - DNA, 479 bp, Homo sapiens
  misc_feature (1)...(479): n = A,T,C or G
ggtagtgccncagcncnncncactgataccccctagagnccctcgaaccgncccgaatcccggtcgacccacgcgtccgcagagtcaaaggaatcagaggctcttccatggcatgttttgaaaagagccaggagtcctgggttctattccctgctctgcgggcaactggctgtataacctttgaaaaatcattttctttgtctgagtctctggttctccgtcagcaacaggctggcataaggtcccctgcaggttccttctagctggagcactcagagcttccctgactgctagcagcctctctggccctcacagggctgattgatctccttctccctggagctctctctcctgaaaatctccatcaaagcaaggcagccagagaagcccctgagagggaatgattgggaagtgtccacttctccaaccggctcatcaaacacactcctttgtctatgaatggcacatgtaaatgatgg

SEQ ID NO: 32919 - DNA, 421 bp, Homo sapiens
  misc_feature (1)...(421): n = A,T,C or G
cccacgcgtccgcttggctgtactataagaacacattatttcattatcagatctataccattaaaatattagcaaagtgtatttccattgaattctcttaaaaacatactgtattctgttgctgtgtgtttcattttaaattgagcattaagggaatgcagcatttaaatcagaactctgccaatgcttttatctagaggcgtgttgccatttttgtcttatatgaaatttctgtcccaagaaaggcaggattacatctttttttttttttttaccagttggagtgggggaagggtattcttggttatcaaaaaactcatatagctttggaattttggaattgaaaaatatctggaggggggaaaaaattttgaacatactggccaggctcaaccccaataaaagggatgttgcgctcccn

SEQ ID NO: 32920 - DNA, 401 bp, Homo sapiens
atcatcccaccaacctgagccatgaaagggctgagcagaaagttaaatggtagtttcctgactggaagccacacgtaggtcacttgagtagtcaggaagcacagtgggtgtggagccatcatctgtcttgggctggttcctcccaatctttgtccagtggtataaatggactgtctgctgatggccatacgcagcactggctgttaagatggggaaggggtacatcaggattccactcatagccctggttcgttattgttactcatggctctgacgtccccaagccctcttgaatgttgcaagcaatgttaaatatcacacctcggtctccttttgagcagcccaggtacctaaagcaaggtcaccaaacttgggtttaaacttcagttgccatcacagcg

SEQ ID NO: 32921 - DNA, 414 bp, Homo sapiens
acctgcagaggggtccatacggcgttgttctggatttccgtcgtaacttaaagggaaactttcacaatggccggagcccttgatgtcctgcaaatgaaggaggaggatgtccttaacttccttgcagcaggaacccacttaggtggcaccaatcttgactttcagagggaacagtacatctatataaggaaaagtgagggcatctatatcatacatctcacgaggacctgggagaagcttctgctggcagctcgtgcaattgttgccattgaaaaccctgctgatgtcagaggtatatcctccaggaatactggccagagggctgagctgaagtttgctgctgacactggagccactccaattgctggccgcttcactcctggaaccttcactaaccagatccaggctaccttg

SEQ ID NO: 32922 - DNA, 415 bp, Homo sapiens
ctccgtgtgtgatgaaaacgcctccttttctgaccttcaaagtcccctgtagagaccatgcatgctctaagccttagggagtgagaccaacacccatccctgcccagccaacagtggccggggcttgtcttatgtttccatctgttttcttcgtggcattcaatttcatttttttccttttcattttcatgttattttcattattggcaaagaaaatcaaaatgtttatagccaaataacaaatgtgccatgtaaaagtaagtctggacttaagagtttaaaatttttaaacatcagtttccaagtttatatcatattaatacatttcagtggataatttatttaaaaaaaaaaactatgcctaaatatcccttatttgtaatattcagtatcaaattagagcattttgaccaag

SEQ ID NO: 32923 - DNA, 415 bp, Homo sapiens
taaagagctgtcttctaaccacatgttcccctgtatatgttctggttttgattatcaagacttctttgcctctctagaagactgtgttatcatactttgttcccttaagcttctatttgctatgtatgttatttattcctctcctttttatgcctttatattcttgcatatctgaaacttcttacctgcagtaacttgggaagatgtgtgtcttatgtggaatacaagatgagatcaaatgataactgaaaatatccttttttgtgttattaatatttgcattccgtgaatattaataactgagtagctttccttgtttgtacctcttggctcttaaactctgtaagtgtggtatttttcccgcttggtggtgtcttctcatggggttctagaaagcaaatactgctctcctttt

SEQ ID NO: 32924 - DNA, 420 bp, Homo sapiens
actgtccccaccacactggagacagtggaaagggccctttttaggtttcacgacctccaaaggccctttccactgtccccaccacactggagatgtcctggcggtcagtgttcttctgtggccctgctgctctgctgcccgaagactcagtaggagaggttcagtcaagacccagaacttgttttcctgacaccaacgcgggtgaggaagctccctgcccaagccccagagcatgtggcacaggcacagctgtacatggacaaggtccttgggcgcatgtggtcctgaatggcaggcgcatcaaggtctggatgcgctcaacctggagagctcggagcactgccacccttaattcatgtgtggtcaggaagggctgaatggctgggaatccctctaaggcactttcagtatgtgagggag

SEQ ID NO: 32925 - DNA, 415 bp, Homo sapiens
aatgttggcagcccagtggcttgaaggccaatgatgatcagtcctttaccccacagcgagatgagcaactcttaggaattcccacatcctagagtgaatgcaccaactaacagtatagaatgctgtccttttcaaagcgtcctaacagcaggattacctggtcaagtatggactttctttgaatctttcttttcacaaattggactgcctgtaataccaataacattgttgtatctaactaaataaatgactgcatatacacacataccctcaattctcttgcttccccattttctttttcatcccctgtctcaagacttttattttcaatgttgacctttggtttggccatatatcactgttataggaaatctcatgagaggaatggctagtgaccccccttttcacatgtctt

SEQ ID NO: 32926 - DNA, 417 bp, Homo sapiens
  misc_feature (1)...(417): n = A,T,C or G
ctcagatgaaagctcttcttccgagtcagatgacgagtgtgatgtcattgagtatcctcttgaagaagaggaggaggaggaggatgaagacactcggggaatggcagaagggcaccatgcagttaatattgaaggtttgaagtctgccagggtggaagatgaaatgcaggttcaagaatgtgaacctgagaaggtggaaatcagagagaggtatgaattaagtgaaaagatgttgtctgcatgcaacttactgaaaaatactataaatgaccccaaagctttgaccagcaaagatatgaggttctgtctgaacaccctccagcacgagtggttccgcgtgtccagtcagaagtcagccattccagccatggtgggggactacatagctgcttttgaggccattttcccagatgtctn

SEQ ID NO: 32927 - DNA, 414 bp, Homo sapiens
aaggtagtagattgttgggggtggggagggagggatctatgatacatggcagggataaatacagcgcatgtctgcttcaattagcagatgccgcaactccacacagtgtgtaaaatatatacaaccaaaaatcagcttttgcaggtctttatttcttctgtaaaacagtaggtaacttttcctaggtttcactctttttagtgtactagatccagaaacttagtgtaatgccctgctttatatttctttgacttaacattggtttcagaaagaatcttagctacctagaatttacagtctctgtttcatggcaacacttggataatggctttgtgaaatttaaaaaatttttgtagcgactggaaacagaaatgcccaattgatggttaattgttgctgcttcaaaaataagta

SEQ ID NO: 32928 - DNA, 207 bp, Homo sapiens
caaatatctataatgaataaatttattgtcttacaaaaatcattgtctagaaatatgggaatacaagaaaagatatttgtaagacaataaatttattcattatagatatttgcgcctgctctgtttacttgaagaaaaaagcacccgtggagaataaagagacctcaataaacaagaataatcatgtgaaaaaaaaaaaaaaaaagg

SEQ ID NO: 32929 - DNA, 414 bp, Homo sapiens
gcatggggacgtatgtgccccctggctttccccatccacagagcaggacctatgctacagcgttgggtcaaggggccttcctgcccgcagagttgtccttgcagcatcctgaaacacagatccatgcagaatgagccctgcgagcaatagagttgaagcagcctctgctggacagtggactgttctatttttttcaataaccaaaaagattaaacaaaaaatactataaaacccctgaccacatttaaaaaatgataataaaagtaaacaaatcagcatctttttccccttccctgcttcattaccccctcttccatctatagactttgtcatttttgtctttagaaaagatctgaaggatggtaaagccccgtgctgaaacccagtagagaaacctgtctcaggacacacttg

SEQ ID NO: 32930 - DNA, 413 bp, Homo sapiens
cttttctctatacttggtttttccttccttataaataatgggttgtgtagcatacatttcagtttttcaaaatgacctttcttcttggaaaatggaagtgaactcaggatgcaacatgagtgtcctaaattgaaataaacttttccactgttgatactgttttaatacctttacatagcaatttaaattactgtattataatgttttctttctgttgagcaatgtgattttaaaatgcagatacaattactgcattatatagattatgggatttctatacttcagcttgcagcctttttaccaaaaaaaatctgtactcttttcttatagatctacacttttcctgtttgaaataaatgtgggccatgtctgtgtgattattcacaattttactttaaaactcaatatgcttg

SEQ ID NO: 32931 - DNA, 408 bp, Homo sapiens
agggagtcgagccagcgtcgccgcgatggtgttgttggagagcgagcagttcctgacggagctgaccagacttttccagaagtgccggacgtcgggcagcgtctatatcaccttgaagaagtatgacggtcgaaccaaacccattccaaagaaaggtactgtggagggctttgagcccgcagacaacaagtgtctgttaagagctaccgatgggaagaagaagatcagcactgtggtgagctccaaggaagtgaataagtttcagatggcttattcaaacctccttagagctaacatggatgggttgaagaagagagacaaaaagaacaaaactaagaagaccaaagcagcagcagcagcagcagcagcagcacctgccgcagcagcaacagcagcaacaacagcagt

SEQ ID NO: 32932 - DNA, 415 bp, Homo sapiens
cgtggctgtctcctctctccgccatggcgtgtgctcgctcactgatatcggagtactccgaaaagggggagtcatctggcaaaaatgtcactttgcctgctgtattcaaggctcctattcgaccagatattgtgaactttgttcacaccaacttgcgcaaaaacaacagacagccctatgctgtcagtgaattatcaggtcatcagactagtgctgagtcttggggtactggcagagctgtggctcgaattcccagagttcgaggtggtgggactcaccgctctggccagggtgcttttggaaacatgtgtcatggaggccgaatgtttgcaccaaccacaaacctgccgccgttggcatcgtagagtgaacacaacccacaaacgatcccccatctgtctggcctggttgcctg

SEQ ID NO: 32933 - DNA, 407 bp, Homo sapiens
agaaaagagaaagacagtggctgattattttgcttgtctgtaacgaaattcatctaagagaaataagtcattctcaaaactcaacctctgtttaacctttaaaagagcatttgagaaagaataataagacgtaattctgccaaggtgcggcctgaccctgagtaaatcattcaacttctgttggatgatttcctcatgtgaaagatgaacagtattgtgctggaagctaaggttccctcctactctaaatgtttaaaattctgtatcagtggactgtgaaaggaaaaatagatggataataccagagttggaaagtgtgagagtttatctgtttacattaaaaacaactataatgatgcaagcacctgtgatgatacccaacggaacaatgcaaaaaaatgtcagtt

SEQ ID NO: 32934 - DNA, 406 bp, Homo sapiens
aacaaatgtggaaggtgtttcctcccaccagagtgccccccctcatcaggagggtgagcccggggcaggggtgacccctgcctccacacccccctcctgccgctatcgccgtttaactggcgactccggtattgagctctgcccttgtcctgcctccggtgagggtgagccagtcaaggaggtgagggttagtgccaccctgccagatctggaggactactccccgtgtgcactacccccagagtctgtaccgcagatctttcccatggggctgtcttccagtgaaggggacatcccataagtagttttgagagggtggatgggttacttgcccaccagaaacagccctagtcccaactccttgcgttcctttggcccctccctgcctacctagaatctgcctgag

SEQ ID NO: 32935 - DNA, 404 bp, Homo sapiens
  misc_feature (1)...(404): n = A,T,C or G
aaaaaaatttacccagattcttttagtcctgctatacagctgcaccttgtacatcaagctccatgtaaagttcctccttacctctcaaagaatgaatcaaaccttggggacctcttactgggctttcttaaatattatgctacagaatttgactgcaatagtcaaatgatgtcagctcgtgaagccgaagccattccaaggcctgatggtattgaatggagaaataaatacatctgtgtagaagaaccttttgatggaacaaatacagtcagagcagtgcacgaaaagcagaaatttgatatgatcaaggatcaatttttaaagacatggcacagattgaaaaacaagagagatttgaacagtatactacctgtaagagctgctgtcctgaaaagataactggn

SEQ ID NO: 32936 - DNA, 418 bp, Homo sapiens
agccaagtggttctgcaaggtcaaggcactagtatcagatggcaagctcagtgcccgggattcccactgctggcaggagaaggcccattttcacagtccacagaagcgtgttaggctggggttgggggtgggatgggctggtgagaaagttcaaattccaggaagccactttttattggatataaggtatctaacggcaaaagtacttagtagcaaagtggccaccttttgattgattgggcttcctcataggaagcactgagggtgtgtctttgtacttggttcattgcccttcacctggtagagaaagagaggtcagaaatagcaagcaaaaagcaggactcccaggagccacaagaaaagagcacaggctgcaccaaagcaggggcagcagagaataaaatatccctttgaactt

SEQ ID NO: 32937 - DNA, 397 bp, Homo sapiens
atggagtgctcttttctaggcccattttctgccagtttccgggatgcgggggcaactggactctgcacgggggtctacagggggagggagggtggtcacaatgagaacctcggggtttgaggaggccatgggcacacagccgaaagggagggagggtgtgggtgtgcgcgtgtgcatgtgctggtgtgtaagggggaaagggtctttcctggctttatttaaataaagtagattatgtgacagttaaaacaaataaaaaaaaaaaggggaccccgtttaaaatgttcctatccgggcccaaagcttttacatgaatcaccattcttagctcttacccttgagagaatgcttttaggaccagccattctggaacattacatatgtgaggctgggaaat

SEQ ID NO: 32938 - DNA, 407 bp, Homo sapiens
  misc_feature (1)...(407): n = A,T,C or G
actgcccttctgacaagcaggggcgggcgccaggcatgatgggtcatgccactcaggggtccctggagccctgggagggagggactgggtcgtgggaggtcctggtagctcccggcacccaacctcgcttcccgtgtgggccccgtgttgcttttctgctgagaggggcttgggcctcggttctccctgtggcagcggcattggtgcctgggttcttaaccctctggacccagcagctaggagcttctggaacccacgaggacatctgccactggcatggtctactcactgatggggtcctcctgactccagggcagagacgtccgtgcgggaactgaccgaggcgtggccccaggccccggcatcctcccctcgctgcacgtggtcacttncgaagcagcgctcct

SEQ ID NO: 32939 - DNA, 419 bp, Homo sapiens
cccacgcgtgcggtgaaaggttgattgctgaagaatattatagtatttctcatctgtgcagcgtctcatttcacctcacagaaaaggatacataagaggagtttgtaatttatcttaggatattctaattgcatttaaaagaacttatcttgcgcagggtaaatgggggactcacatacatatattaatacctctgactcattaacagaaagaaatacttggtaccttctttcgctgaatgaccatactgtggaggatgcatactatttggcatagagaaataaatgaggtctcaaaagagaaattaaattattttacctgaaacaacatttttgactttccttttcctttccgcatcctctgcattcgtagttgcctctccgtccccctcgtgcctggccctctcccaatctctatag

SEQ ID NO: 32940 - DNA, 415 bp, Homo sapiens
attctccttcctccaattccactctcagcatctctccgtgtctcctatagtcaagcagtcaattaccagtttcagttatggaaaaatcaaaatccaaaataagtaacgaatgtgaagtggacactagctcttccatgtggatttatgttttcctgggcaatcttcttcgtggaataggagaaactcccattcagcctttgggcattgcctacctggatgattttgccagtgaagacaatgcagctttctatattgggtgtgtgcagacggttgcaattataggaccaatctttggtttcctgttaagctcattatgtgccaaactatatgttgacattggctttgtaaacctagtcatttttaggtggaagcatgttacagcacattatcgaggaagactggctttttttttggg

SEQ ID NO: 32941 - DNA, 476 bp, Homo sapiens
  misc_feature (1)...(476): n = A,T,C or G
gggtncnnnaatgatgcctcgagacccgtcncggaagcccgggacgacccacgcgaccggacttctctacggctctggcttcttcccgaagagatataggagccatgtaagcacgcagtgggtgaactgcttaatttcactacatgttgatgtacttgtcttccgtcctgtaggtcttttctatataactttatgccacccttaaatgaatcattgggtatacctgtcatgttggatcctgtaatcacagttttccctgctcacctttttgtctaagatctattgagaaagggaaatatgggaaggagaaccatttgatcagaatacaaccaatagtctttaagcattgttaaagtatgaaactgaaatacattcaaaacacttaatccttgaggcttgtgatctgagtaattagcaggtatgatgctgggactggaaaatagaaagtaataactaaagggttaatgtgcaacgtt

SEQ ID NO: 32942 - DNA, 403 bp, Homo sapiens
agagaaattctgacacctgccctaatgctggtagtctggggaggccatggcagtggctgttcctgggagaatatctatagcttctgctcactgggcaaatataaaagacagcatattatttaacataatatggtagcttttatattatgattgtaaatctggatcactaaaatataggacccatgatcatttcatgttacaaaccccatttaaagcactatacggctgaatatgcacaagcgattaaaagtagatgccgcgccacataaaaatacatgttctaatttacttacagctgtattcaagttgtttgataccagacagaaagctgacagcctgctctttgtcaactgcctttccctgctcttctagtttgccttgctgctcaagattcattatttac

SEQ ID NO: 32943 - DNA, 403 bp, Homo sapiens
  misc_feature (1)...(403): n = A,T,C or G
aacagcctctaccttgcgagccgtcttccccaggcctgcgtccgagtctccgccgctgcgggcccgctccgacgcggaagatctgactgcagccatgagcagcaatgagtgcttcaagtgtggacgatctggccactgggcccgggaatgtcctactggcggaggccgtggtcgtggaatgagaagccgtggcagaggtttccagatagtttcctcggctcttccagatatttgtgatcgctgaggagagtctggtcatcttgccaaggattgtgatcttcaggaggatgcctgctataactgcggtagaggtggccacattgccaaggactgcaaggagcccaagagagagcgagagcaatgctgctacaactgtggcaaaccaggccatctggctcgtgan

SEQ ID NO: 32944 - DNA, 427 bp, Homo sapiens
atgcagcctttgcctttgcctctcttgccatagacttttcctcctatatcactcttgttgtgctctttgtgcccaagatgcgcaggctgatcacccgaggggaatggcagtcggaggcgcaggacaccatgaagacagggtcatcgaccaacaacaacgaggaggagaagtcccggctgttggagaaggagaaccgtgaactggaaaagatcattgctgagaaagaggagcgtgtctctgaactgcgccatcaactgcagtctcggcagcagctccgctcccggcgccacccaccgacacccccagaaccctctgggggcctgcccaggggaccccctgagccccccgaccggcttagctgagatgggagtcgagtgcatttgctttataagtgatggtagggtgagggaggacaggccagtagggg

SEQ ID NO: 32945 - DNA, 413 bp, Homo sapiens
  misc_feature (1)...(413): n = A,T,C or G
tgttattaccatggcaacttttctctgaatgcagcttttgagattttgctgcactggatggcggtgaccgcagcagtactcttcgagatggtccaaggttggcatcggaaagccacctcctgtggcttcttgttagtcccagttttggaggggccttttgcactgcccagttacctgtatggcgacccccttcgtgcccagctcttcatcccactcaacatcagctgcttgctcaaggagggcagcgagcacctgtttgatagctntgaacccgaaacgtactgggatcgaatgcacctcttccaggaagccattgcacacaggtttggggttgtacaagataaatattctgcctctgcttttaactttcctgctgagaacagcctcagtatatccacgttacaggaacaggg

SEQ ID NO: 32946 - DNA, 409 bp, Homo sapiens
ctcacagtgcttccaccctggacgaagccacccccactctcaccaaccaaagcccgaccttaaccctgcaggccaccaacacgcacacgcagagcagcagctccagctctgacggaggcctcttccgctcccggcccgcccactcgctcccgcctggcgaggacggtcgtgttgagccctatgtggactttgctgagctttaccgcctctggagcgtggaccatggcgagcagagcgcggtgacagcaccgtagggcagccggagaatgcagcccaagcagggcctggcatggggcaggacagggtccagccttttcctaacatctgcctgtgccacaacggccagcaggtgccccatcctctgcccacagcagactctgtcccatggctctccgggcagtagagtgag

SEQ ID NO: 32947 - DNA, 419 bp, Homo sapiens
accttacctagcatgagagaattcacactggtgagaaaccttacaaatgtaaggaatgcaggaaaaccttcagccagatgactcatctcacacagcatcagactacacatacgagagaaaagttccatgaatgcagtgaatgtggaaaggccttcagccgtgtctcagctcttatagatcaccagcgaattcatagtggagaaaagccgtatgaatgtaaggagtgtggaagagccttcactcaaagtgcccagctcattagacatcagaaaactcattctggagaaaaaccctatgagtgtagtaagtgtaagaaatcttttgtgcacctgtcttccctgattgaacattggagaattcacactggagaaaaaccatatcaatgtaaggactgcaaaaagaccttttgtcgtgtgatg

SEQ ID NO: 32948 - DNA, 404 bp, Homo sapiens
ccatttaatgctttatggcagttactgtattacttttttagactcccgtctgcacaaaacgcaataaaaataattgtattatacccttaaaaaaaacaaacctactaaaaaaaaaaacagggggggcccgcttaaaagaacacatggggggcccaatttttggagggaatgacaactacaatttttttcccttatagggggcccattaataagggtatcgggggccggatttttaccacaatatgagggaaaaatgccacagtcgggcactccaggaaagaacccttttgctggggggagcactgactgggcaaacctccctgcagaagcaaaaggcttaggggaaactttaaattcttacccgtaaaccggggaaaactgccctgaaacacgggctgggaaaa

SEQ ID NO: 32949 - DNA, 408 bp, Homo sapiens
agaagccccctattctcagtagctctttcaatcctatcacagggaccatgctggccggcttccgcctccacactggcccgttgccggagcagtgtcgtctgatgcatattcagcctcccaagaagaagaataagcacaagcacaaacagagccgtacccaggatcctgtccccccagaaacaccatctgattcagatcacaagaagaaaaaaaaaaaaaaaaaaaaaaaaaggggggggccgtttaaaagaatccttgggggggccaaattttacgggggctgggaaggtattatttttttccttttgggggggggatttaaaggttgggccggggcggggttttaaaaacgcggggaggggaaaatcggttacttgggaatttttggaagggaccttttttttgggg

SEQ ID NO: 32950 - DNA, 491 bp, Homo sapiens
  misc_feature (1)...(491): n = A,T,C or G
cgcggcncnatagatcgccctcggtaccgatagagaacccctcggtcgacccacgcgtccggctagaagccatcaagcgggcccggtgctgaggtgcgatctccaaaggcaccagattacttttctcaaaactggaaggcgctgcaagaggggctgctgaaacaaacatctcacgccccagaaaagcctcttgtcatctctcagatgggttccaaaaagaagcccacaattatccagcaaaacaaaaaagagacctcgcctcaagtgaagggagaggagatgccggcaggaaaagaccaggaggccagcaggggctctgttccttcaggctccaagatggacaggagggcgccagtacctcgcaccaaggccagtggaacagagcacaataagaaaggaaccaaggaaaggacaaatggggatattgctccacaacgaggggacatcgagcataataagcggaaagctaaggaggcagccccagccccacg

SEQ ID NO: 32951 - DNA, 415 bp, Homo sapiens
cggacgcgtgggattgaatatgcacggccaactcgtctaaatgttattaggaatgacaatgacagttgggactacactaaaccatatttgggaagacgagatagaggaaagggtcgccagagacaagccattttgggagaacacccttcttcgtttagacatgatggctatggatcccatggtccattattgcctttaccaagtcgttacagaatgggctctcgagatacacctgaacttgttgcttatccattaccacaggcttcttcctcttacatgcatggaggaaatccctctggttcagttgtaatggttagtggattacatcaactaaaaatgaattgttcaagagtcttcaacctgttctgcttatatggaaatattgagaaggtaaaatttatgaagaccattcctg

SEQ ID NO: 32952 - DNA, 411 bp, Homo sapiens
  misc_feature (1)...(411): n = A,T,C or G
actttgggatagaaaagaatactcctacactctgtttaatgttactcaggtgagggattctgcagcgaaattggagaccttctggacgatagttgtgataatttatagtactttgatgtcatgcagccattggatcagtagaaggaatacttgcttactacaggagtgtgaacaaagcctttcctacttttttatccctttaaaagaaccaatgattctttaggaactatgaatactgaatgactctcaatcaccgtgagctctagaaaaaactctttcttatgctaacaagtgccttacttgggggaagaagaattaagagcgatggagatggcgtgcacgcttcattaatccaaccaaaaataatgatagaaaatttgagccacagtataccactccttgtgataaagn

SEQ ID NO: 32953 - DNA, 424 bp, Homo sapiens
cttgaagttttgacatagagacatttactctggagatagataggagaactcctggttgtaaaatatgtttttcagatgaggcatataaaaactaaaatggcaggattattgtatagtgtttggaatatgctttgataagttatgatttatatttctcaaggttaaaattctgagtaaaatggtctttgattaataaacttagtttaatctgaatatgtaaatgaatacattttaaagacaaaacttgaaaaatgtattcttgaatagtgaataatttgatcaatgttactgaaatgctgtctcaacttttgttttatgataaaggaagtgtgtgatttccctccctctgagaaatatactgcgcttaatatttgctgtctttttcttgcttcattagagtaagtctgtcagaaagcttgaatat

SEQ ID NO: 32954 - DNA, 412 bp, Homo sapiens
caagaggcgccatgagactcacaggcgccccagtccccagagaaacaccacaaatgatatcgctcacatccagaacgaagagatcatgtctctgcagatgaagcagctggaacacgatcacgagtgtgagtcgctgcaggcacacgacacactgaggctcacctgcccgccagactacaccctcacgctgcgccggtcgccagatgacatcccacttatgacgccaaacaccatcaccatgattccaaacacactgacggggatgcagcctttgcacacttttaacaccttcagtggaggacaaaacagtacaaatttaccccacggacattccaccactagagtatagctttgccctatttcccttcctatccctctgccctacccgctcagcaacatagaagagggaagg

SEQ ID NO: 32955 - DNA, 429 bp, Homo sapiens
tcgcagaaaactgctatgccttttatttgtttgcaaggatgtctttgtaatgtgtttcatgaatagaatatccaatagagataagctgacttgaatcattttgagcaattttgccctgtgttatatgtgtttcacgcacatatttgcagttggattttctccaacagaaagtggattcactactggcacattaacaagcaccaataggtttttattccaactccgagcactgtggttgagtaacatcacctcaattttttattatccttaaagatattgcattttcatattctttatttataaaggatcaatgctgctgtaaatacaggtatttttaattttaaaatttcattccaccaccatcagatgcagttccctattttgtttaatgaagggatatataagctttctaatggtgtcttcagaaat

SEQ ID NO: 32956 - DNA, 487 bp, Homo sapiens
  misc_feature (1)...(487): n = A,T,C or G
natagaacgcctgcggnaccggtttgatatgtcctgtcanaccgcccccgcattaccgggtagacccacgcgtccgcactcaccctctttgaactcagatcacaaacgctgcctagagttcttctacccagagctggtgaagaatatccgagggaaggtaaaaggccttcagcctggagataagaagaaagatctgtcagatcctttcaatgacgaagaaaaggaaaggcataaagtagaggcccttgcccgaaaatttgaagaaaaatacggtggaaagaaacgtagaaaagaccgaatacaggacttgatcgatatggggtatgggtatgatgaatccgactccttcatcgataactctgaggcgtatgatgagcttgttcctgcttctttgactacgaagtatggaggattttacattaactcgggaaccctgcagtttagacaagcatcagagtctgaagatgacttcattaaagaaaagaaa

SEQ ID NO: 32957 - DNA, 404 bp, Homo sapiens
actagttctagatcgcgagcggccgccctttttttttttgagctaaagccagggaatcaagccatgcttaatatttaacaatcacttatatgggggccaaaaagttggttttgttggccatgtatgggcccaagcagatccagtttaacctcacaaacccagatttgaaaataaggcccatagggggttaaaattggaacctttctaatggattttggggggggggcccaatagggggttaacattatataatccctgctggggcaagaaaagcacacttttttttttctccaaaaaggttttcccctgggaaccctataagggaaccgggtttggaaaataagaatccttaatttcctccccttttttaaggatataccagaatggcttttacggaaaggatt

SEQ ID NO: 32958 - DNA, 402 bp, Homo sapiens
aaacaatacaaattaaaaacaataccggatgtctcttttttacatagcatataaactcttacatagggtaggaattatatagaaacatgggagatgacttaaagtatactgaaggatatgcataggttatatggaaatactatgccattttatataatggacttgagtttccacaaattttgaatgctgaggggtgactatattctcaagaaaggctatattatatattctttagtgccagggtactttatagttacggcatattttgatttgctccacctatttggcaattcccaaatataactctgctcttcccattaagttcgagaatagagctctatcatctctttattaaactggtccagccttccttccacataggtatataggataaaggatgag

SEQ ID NO: 32959 - DNA, 401 bp, Homo sapiens
  misc_feature (1)...(401): n = A,T,C or G
aagctatattccttgcatctttgagcctactgaacaatgggtgctgaggcgacaggggaggaaccagtaggtctgtagcctaggaactgcctctgtgtctttgccaaaagaaggcaaagaggcggacagtgcaaaggatcctccctcctacctcaggcctgatacatcgtgcccttgactttgtcgtatcaaagcttcttagctgactttggctttcacattagatctttgcagagctaactgataagaacggaggaggaatgccttctccttggaggcagttgaaagaaagacaggagagtcacattttaacttttgcacaaggcattcgcggtcatgaataggtgagggaacgtgcacttctgatattccaacagttgatccttctctgaagagacctn

SEQ ID NO: 32960 - DNA, 405 bp, Homo sapiens
  misc_feature (1)...(405): n = A,T,C or G
ngcttgccttttattttctaatatatgataataacgagcaaaactggctacattttgcatgaaatggttctgaaaggtaagaggaaaacagactttggaggttgcttaactttgaatttctgacagagataaagcagtttaaaatctctcgtacactgataactcaagcttttcattttctcatacagtggcacagatttaactgggaccatcaatttttaactgctgtcaagctaactaataatcatctgctttaagacgcaagattctgaattaaactttatataggtatagatacatccgctgttgctttgtatttcaagaaaggtgatagaagctttatttgacactgataaatattgaattgactctttaattatgtcttatcattttttcaatggagtn

SEQ ID NO: 32961 - DNA, 401 bp, Homo sapiens
cccctgcacgccctctatgacaatgtggagaaactctttacagtttctatctcaaaacctggaaagagcttgtccacattgtcatagagggcgggcaggggtacatcccgacagtgatgatatggagaaactctttccaggttttgagacataaactgtgaagaacaacctcaggatcctttttaataatgctgtaaagaaacgtttgatgaccgacagaaggattggctgccttttatgaaggagcttggactccaacttgcttgctgacactctgttgaagctgttgaaagaagcccaagtacagtatcctctacatacatttgcaattggcatggaatacaggcccgctttactggctggtagaatggtgacatatcatattggaagggaacattatg

SEQ ID NO: 32962 - DNA, 475 bp, Homo sapiens
  misc_feature (1)...(475): n = A,T,C or G
ntttgatcaccctgcggtaccggtgcggaattctggggtaccgcgcaccgcgatcgccagttcgattcactgtcatgtgcgaacacagtgacacgtttggccagtgacatttcaatcactgaaaatgtgctctacatctcgcatggatttctaggcctgatatccaacagaacgcatagacgtctcacgctattcgttactctaaggtaaaaccatctaggatgactttcccccttgcaggtatgttatcattcttataacattgtatgttaatagaaaatatatttgcataatatgcatatatatgtatatttaccaagattttgtttcttacgcttgctatcatggcagcatgcgatgtcatattttcctttatgtgatgtaactactttctgttatctagaaattaagattgaagctaaaacacttctactgttcaatttcagaaactaagaatcatcctcatgcctttatt

SEQ ID NO: 32963 - DNA, 403 bp, Homo sapiens
tctgagcggacccgacccccaccagacgggactccccgcccccaattggcggccgaagagtcttctcgccccagagtcatcttcgggacgcccagggcccgggtgattttgggctcgccgcggccccggttgattgtttcattttcgtggcccgcggtggtcgtagcgtctccgagaccgcggactcccgtagggtccccgtggccccgagttgtagtcgggacaccccggccgcgggtgatcgtcgggtctccactgcgcccgggtcgctgacgcggatccggcctcggcgccttctcagggcgccctgcaaggccgcaggcaggatgaacattctggcacccgtgcggagggatcgcgtcctggcggagctgccccagtgcctgatgaaggaggccgcttt

SEQ ID NO: 32964 - DNA, 406 bp, Homo sapiens
  misc_feature (1)...(406): n = A,T,C or G
ctaaattaaaacttactgatatattggactttgagccttgggaaagaatgagtactatctttccagatatcttaagggtaaaagcttattctaagacagtctgtccattgagatatctggaaagaatgagtactatctttccagatatcttaagggtaaaagcttattctaagacagtctgtccattgagaatattagatttctgacttgcaaatatgtttgtactccagaagaattagaggaaaagcagatactagaattctaatttaattacatatacagccgtctttgtttatagtgtagaattctttatattttgtacaaaaactaattcttttggtaaaatgaaccatttacagttcggttttggactctgagtcaaaggattttcctttaaatgcttgcn

SEQ ID NO: 32965 - DNA, 436 bp, Homo sapiens
  misc_feature (1)...(436): n = A,T,C or G
ctcgctgcacacagaggaaagaaaatacaaatgccttttgtgcccctatgctgctaagtgccgtgcaaatgtgaaccagcacttgaccgtccggtccgtgaagctggtgagtacagacaccgaggacattgtcagcgccgtcacctctgaaggcagtgatgggaagaaacatccttattattacagttgtcacgtgtgtggatttgagaccgagctcaatgtccagtttgtcagccacatgtcactccacgtggacaaggagcagtggatgttttcgatctgctgcactgcctacgacttcgtcaccatggaggaagcagagataaagactcacattggcaccaagcacacaggggaagacaggaagacccccagcgaatcaaatagcccctcttcatcctccctctcagctctgagtgattcagccaacagcaan

SEQ ID NO: 32966 - DNA, 409 bp, Homo sapiens
cctatatgattgatgatgtgaaaacctaaattacttgcagcatagtattacttctttgatgttctcattagcataatgttatttttgaaaaggaaagatactatcacataagttttcctcatctgttgtgatatacaccaatggataaactaacggaaactgctttttgacattaaaagacaggagaaattatatttaactaagtaaaagttaagtcagaattacttgggtgatgtgattcaatttagttaaaggatgatatagagaaaatacattatttagcattatttcttcagctataatgaattgctatagaaatcaggcagatctttctaatgtgtattgattggtcttttcagctactctgaacagattactaaggccatctcctcatctctaagggagaaaa

SEQ ID NO: 32967 - DNA, 462 bp, Homo sapiens
  misc_feature (1)...(462): n = A,T,C or G
atttgtccccctgatggacaggcctcgaaanccccggncgacccacgcgtccggaaagatctagaagaggtaaaggtgttgctggaaaaggctactaggattagagtacgtgatgcccttacagctgaaaaatgcaagattgagacagaaatcaagaacaagatgcaacagaaatcacagaagaaagcagaacttcttgataatgaaaaaccagctgctgtggttgctcccattacaacgggctatacggtgaaaatcagtaattatggatgggatcagtcagataagtttgtgaaaatctacattaccttaactggagttcatcaagttcccactgagaatgtgcaggtgcatttcacagagaggtcatttgatcttttggtaaagaatctaaatgggaagagttactccatgattgtgaacaatctcttgaaacccatctctgtggaaggcagttcaaaa

SEQ ID NO: 32968 - DNA, 418 bp, Homo sapiens
cgaggtgagcgttccagcttccggagccggagggggcccggcgtacccagcccccagcccgacgtgaccatgctgtcccgcctcctaaaagaacaccaggccaagcagaatgaacgcaaggagctgcaggaaaagaggaggcgagaggctatcactgcagcgacctgcctgacagaagctttggtggatcacctcaatgtgggtgtggcccaggcctacatgaaccagagaaagctggaccatgaggtgaagaccctacaggtccaggctgcccaatttgccaagcagacaggccagtggatcggaatggtggagaacttcaaccaggcactcaaggaaattggggatgtggagaactgggctcggagcatcgagctggacatgcgcaccattgccactgcactggaatatgtctacc

SEQ ID NO: 32969 - DNA, 408 bp, Homo sapiens
  misc_feature (1)...(408): n = A,T,C or G
cccacgcgtacgacaagatgctgaatggtactggttatatatctcgagggaagaagggaacggaaaacttggagataccgccgacggtacctttttggtacgagatgcgtctactaaaatgcatggtgattatactcttacgctaaggaaggggggacttaacacattaatcaaaagatttcatggagatgggaaatatggcttctctgacccattaaccttcactgctgaggttgactgaataaaccactagcggaatgaatctgtagctcagtataatcccacactggatgtgaagttactttatccagnatccaaataccaacaggatcaagttgtcaaagaagataatattgaagctgtagggaaaaaattacatgaatataacactcagtttcaagaaaaaag

SEQ ID NO: 32970 - DNA, 399 bp, Homo sapiens
ggcgctgctgaaggaatctcgctgttctcgaggatttggctcgatggagggactggaggagaatggaggtgatgtccaaggtgtacaattgttaccttgcaagatttgtggaataacattctttccagtagcattaaaaaaacatggacccatttgccagaagactgcaactaaaaaacggaagacttttgattcaagcagacagagagctgaaggaactgatattccaacagtaaaacctctcaaaccgaggccagaaccaccaaagaaaccatctaattggagaaggaaacatgaagaattcattgctaccataagagcagctaaaggccttgatcacgccctcaaagagggtggcaaacttcctcctcctcctccaccttcttatgatcctgatta

SEQ ID NO: 32971 - DNA, 440 bp, Homo sapiens
gacgacgcctgcgaagatggccgctgcgtcctcatttgattcttacgcctgcggagctgagagcaatgaggccaattcgaagtggttggatgcgcactacgacccaatggccaatatccacaccttttctgcctgcctagcgctggcagatttacatggggatggggaatacaagctggtggtaggggaccttggccctggtgggcagcagccccgcctgaaggtgctcaaaggaccactggtgatgaccgaaagcccgctacctgctctgccagctgctgctgccaccttcctcatggagcaacatgagccccggaccccagctctggcacttgcttcaggcccttgtgtctatgtgtataagaatctcagaccctacttcaagttcagcctgccccaattgcctccaaatcctctggaacaagacctttggaaccagg

SEQ ID NO: 32972 - DNA, 407 bp, Homo sapiens
atattgggccatgttattcatggaggaattgttctgccacttatttattttcgctttcacacgaaaaaacccattcagattcctcctgggcctcctcgccccatttgcgacagcatttgctacctgctccagctcagcgacccttccctctatgatgaagtgcattgaagagaacaatggtgtggacaagaggatcagcaggtttattctccccatcggggccaccgtgaacatggacggagcagccatcttccagtgtgtggccgcggtgttcattgcgcaactcaacaacatagagctcaacgcaggacagattttcaccattctagtgactgccacagcgtccagtgttggagcagcaggcgtgccagctggaggggtcctcaccattgccattatcctggagg

SEQ ID NO: 32973 - DNA, 399 bp, Homo sapiens
tggggcttcaccagtctgtctactgtggtgatctgtagacttctggttgtatttctatatttattttcagtatactgtgtgggatacttagtggtatgtctctttaagttttgattaatgtttcttaaatggaattattttgaatgtcacaaattgatcaagatattaaaatgtcggatttatctttccccatatccaagtaccaatgctgttgtaaacaacgtgtatagtgcctaaaattgtatgaaaatccttttaaccattttaacctagatgtttaacaaatctaatctcttattctaataaatatactatgaaataaaaaaaaaaggatgaaagctaaaaaaaaaaaaaaaaaaaaaggggcggccgttttaaaggatccctggggggccccac

SEQ ID NO: 32974 - DNA, 421 bp, Homo sapiens
aaatttaacaagtgacagggttggtttcaaagaaaaaggtccatgctttgcttacaatggagtctgcagtgaggggagatgctgggatagccatttccatggctctgttatgcaagcacaaatttcatctcctagatggacttcctggttttctcttactgcagtaacactggccttcccttctctaattccttaccccagctgcggcatccctgtgttaactcaggatgccaagtggccctcagattacacttctccagatagctgaatgagtctgctttcactgtgactgggacctgaatgacctgcagtcagggcccagagttgggactctatactaccctgggctctggtctgtaggtttgtaatagccaccggtaataagccaagggctaggctcttgtttgagtttatggccacc

SEQ ID NO: 32975 - DNA, 413 bp, Homo sapiens
ctccaagaagttcgttaaaataagcagcagctaattaacctgaacttcagatgagacactgctgacatctcatatcattttacactatattaaatagatgaatatctttttcttgtttttaaaagatattttttcagaggccaaaaaggcattgggatcttctgtcttacactggggctacttacccagcaaagatgactatttccaagtactgtgcatggctgatgttgtcatctcaacagctaagcatgaattctttggagtggcaatctgaatatctgtattctacacctgaacagctttcaaaaaggctccagaatttctgcaagagaccagatattataagaaaacatctctataagggtgaaatcgctccgttttcttgggcagccctacatggtaaattcaggtct

SEQ ID NO: 32976 - DNA, 476 bp, Homo sapiens
  misc_feature (1)...(476): n = A,T,C or G
atagaacgccttcggnaccggttgagaatcctgcggcgacccacgcgaacgaaaaggttgatggcactacaaggtggcatctgaaaaaccatctctctagctaaagtccattcaccaatatctgttatgaatgactaaggctgtacttagtcatgatagccacatagggctatttaaatttaaataaatttctatatgttcataaatgctaagaaaaatgaaattcatagaggcagcatcttgtaactggatatactcatgaaggctgcatactagattaatagtattaatgcttactattcttctactgatttttactagattgagaatactaagggccccatgttggcttacttaggagagattagtagaaattttgttttcaccagtcattggaaaaatattaatggaaaacattaatatagatccttgaggattctgtcattggtggatctatcacaaataaccagtgatcn

SEQ ID NO: 32977 - DNA, 449 bp, Homo sapiens
tcatttcttccacctacttaatgttcaacatccattttctgaatctgccacaatcctctttactgacagcgaaagagaggaaatgagaagatatgctagcctcattgccactttacagccattgccagggaccctggaattggatcgttgttctggatagctctatatagcactgctcagccaggcgcctttattacagattctgcagaacacttgcttaaactgtgagaaaatggctgcgttgcactgagcgctctactgcggtcaaggtgcgcacttcctggaagcccagattattcaatggatttctgagaatgtctctgtctgccattcatttgacctcattcaggaatttataattgcttcttcatactggagtgtatattcagagacaagtaacatggacaaactatagccacattcctcagtgcttacttggaatacagaaa

SEQ ID NO: 32978 - DNA, 435 bp, Homo sapiens
cccacgcgtccggtacataataagcttaactgataaacagaatatttagaaaggtgagacttgggcttaccattgggtttaaatcatagggacctagggcgagggttcagggcttctctggagcagatattgtcaagttcatggccttaggtagcatgtatctggtcttaactctgattgtagcaaaagttctgagaggagctgagccctgttgtggcccattaaagaacagggtcctcaggccctgcccgcttcctgtccactgccccctccccatccccagcccagccgagggaatcccgtgggttgcttacctacctataaggtggtttataagctgctgtcctggccactgcattcaaattccaatgtgtacttcatagtgtaaaaatttatattattgtgaggttttttggctttttttttttttttttt

SEQ ID NO: 32979 - DNA, 405 bp, Homo sapiens
acaagttcagtgatatttcaagcatgatgttttgagtttgagaaatgtatttgtgaggacacatcactttaattaaaaaagtgtgagtactatggtcattaagttattcagagtgagatttctgagaggagaagagagaatgtagatggcagttattgagagtggggctataggacaaaaagaagaaaagtatggttaacattgccaaataaagggtcatacagccttgctttttgctggagttagcaaaaatcattctccatatgatagttttagatgttccccagctcatttgtattattgagttttcagctgggtatatattataataacagtcaacatgatgtaggggctcagtattacatggcagggctatactaattgcttcatatgccttatctcatg

SEQ ID NO: 32980 - DNA, 434 bp, Homo sapiens
attttatttagtactgccaacttcaagttttttagatatctatctatctagatttctgaaccaggatatatttatagttcactttggggtttttatacccacggtaggattctgcattccagcattaaatctgcttcattttagaacctttataaaagcaatagctggaatatactcccagttttaaaataaatgcctgattgatttaaagcaagtaggttatgctgaagtatataaagaagttttatattctctcaaaaatggtattatctttctttatttgctagattcttacaaatcttttaagagggctgtaacagttgctgctagtattagggttccacatcattctaatgtatagtttcaagtcttaatagacaatctgaattccactacatttcttttggctccaacattccttttaacttgaccag

SEQ ID NO: 32981 - DNA, 410 bp, Homo sapiens
tccaatgctgcatattgtggataaaaaggatggcaatgttggcagcagcaagggcagggcaggaagggagctgacatcaaggaaatgactgcagagtgcagtcattgacttagaaagtggcagaggagggagtggatgctgaagaagatactgaggatgctggattggatgattgggaagctatggccagtgatgaggagacagaaaaagtagaaggaaacaaagttcatatagaagtaaaagaaaaccctgaagaggaggaggaggaggaagaagaggaagaagaagatgaagaaagtgaagaagaggaagaacgtataaaacggcttgaagaattagaagccaagcgtaaagaagaggaacgattggaacaagaaaaaagagaaaggaaaaagcaaaaagaaaaagaa

SEQ ID NO: 32982 - DNA, 427 bp, Homo sapiens
cccacgcgtccgattctgcatctcttcatcctgagaaagaatttcttgttgcaggcggtgaagattttaaactttataagtatgattataatagtggagaagaattagaatcctacaagggacactttggtcctattcactgtgtgagatttagtcctgatggagaactctatgccagtggttcagaagatggaacattgagactatggcaaactgtggtaggaaaaacgtatggcctttggaaatgtgtgcttcctgaagaagatagtggtgagctggcaaagccaaagattggttttccagagacaacagaagaggagctagaagaaattgcttcagagaattcagattgcatctttccttcagctcctgatgttaaggcctgagcgtcaatcatatgttgcagttagtatacaactgactaaaa

SEQ ID NO: 32983 - DNA, 417 bp, Homo sapiens
actaactcagtatgtaagtagatgagacttgttgattttgcccctataacgggctttagccattttaggagtgagttgcacaaaaggacctaaaatgcattgttttttgccttcttttaagagatggggtctcgctctattgcccaggctggagtgcagcgtgctatcatacatagctcactgcagtctccaactcctcataccagaggcatgtgtcaccatgtcttactcctaaaatgcatttttaaaaagcgaatttttagattaaagtgcctagtttctgattaataaatagaagatgaaaaaagtgggcgggaaaagcataatcttttaagatttgtaattttctgtatgtgccacatttatgtaaattaactataaaatatggaattcaggatcatgcttgtttgcatgtat

SEQ ID NO: 32984 - DNA, 112 bp, Homo sapiens
attccccatcccagtggtggctcttctgtacaggggtgaaagaatgcggaccactgggatggggaataaagtggacaacatgaggttgggctgaagaaaaaaaaaaaaaagg

SEQ ID NO: 32985 - DNA, 410 bp, Homo sapiens
agcagggtcaacaaccctggcctctctctgagctcggtctagcatgccccagcctgcggttggagtgtcaggccagatctgaccctgggaggtggaccattctggctctgatataaatttttcgagtcagttcatggcctggactctccaggtggcctccaaaatcgattttgaccccctgaccctgtctcacggaggcatagcatccaccctaagtaaggatttagccaggaatgacagctttccactgagtgttattggggacagtataaacagtttggaaagcaagtaaggaggtgtgagggctagcaatcattaaaagcacattaaaaaacaatttttaaaaatctttattagagaaagttgtaaatgcatatctgttacagaattcctgtgatttgtagagtttt

SEQ ID NO: 32986 - DNA, 410 bp, Homo sapiens
aggttacagctggttctgtcgatagagggaattgatgattgtgacaattcatagcatacctcagatggcgagaaggcagcattatctctgtgcgatgctgatttcaagctgcccacagaactggtgcggatcagagctcggcgagtttgctgggagctgggagcaggcttgcctggcagagaacctgttcagatacaggccagtttcttcttcgaggaaagccaagctcctcaaacagggttcagtccacgttgtgttttcacacctttctccaaggatcgaaccaaacatgtgtctccagtattgtgtctgtgcccccgcgtgtgttttgtggacagccgtgttgtctgactgtatccagctggcacttgacagggcgcagtcattggtgagaagaatcagaaaaagat

SEQ ID NO: 32987 - DNA, 434 bp, Homo sapiens
tacatgttggattgcagcatttcttcatgttaaaaacatggaatattattcaaatatagtacttggggcctaaacaactaaaattagtcaccgcataactagttgaaaatggcataggcataaaatgttaataaagaatggcagttatatttatgctcacttcctggagtaattgggtaatattcagaaaggcacatcgtggtagtttaagtgtacaaggccttagggcagtatctagcccagtattattccagattctcctgagctctatataaagggcattttggaggaactcttctgggcaatatctttcccaatctcatctaaattctgggaaatattttccatagcagacaacccagctctgaaactaagcacctggtgatctttagtttgagatgtctatatggtacttttgagttatatcaattaag

SEQ ID NO: 32988 - DNA, 409 bp, Homo sapiens
tggtagagtatcacgttcttcaagtgccaaagtaaccataaatgtggttgatgtcaatgacaacaaaccagttttcattgtccctccttccaactgttcttatgaattggttctaccgtccactaatccaggcacagtggtctttcaggtaattgctgttgacaatgacactggcatgaatgcagaggttcgttacagcattgtaggaggaaacacaagagatctgtttgcaatcgaccaagaaacaggcaacataacattgatggagaaatgtgatgttacagaccttggtttacacagagtgttggtcaaagctaatgacttaggacagcctgattctctcttcagtgttgtaattgtcaatctgttcgtgaatgagtcggtgaccaatgctacactgattaatgag

SEQ ID NO: 32989 - DNA, 415 bp, Homo sapiens
  misc_feature (1)...(415): n = A,T,C or G
tgctttattctcccattgaaaacatccaaagagtatctgcagggttcctctgcgaacttgctcaggacaaggaagctgcagaagctattgaagctgagggagccacagctcctctgacagagatacttcactctaggaatgaaggtgtggcgacatatgcagctgctgctttgttccgaatgtctgaggacaagccacacgattacaagaaacggctttcagttgagctgaccagctctctcttcagaacagagccaatggcttggaatgagactgctgatcttggacttgatattggagcccagggagaaccccttggatatcgccaggatgatcctagctatcggtcttttcactctggnggatatggccaggatgccttgggtatggaccccatgatggaacatgagatggg

SEQ ID NO: 32990 - DNA, 411 bp, Homo sapiens
  misc_feature (1)...(411): n = A,T,C or G
cccacgcgttcggaaacaggcagggagatcttaatacctaatttcatcatttctgaaaatgtactgttttagaatgtattacaatatcaatgtgaatatcttgaatcctgttacaaatcctgcactgtattaaacatgtaaattaattgtttgtctgattagccaatctcaccacccaaatggggaggtatacatgtttgaagaactgtgtaactcagtaattgatttgttctgatgttgtaactcaatagaagtgttttggaaggaagcatggtgtgtgagacagtgtctgttcttttgtgccagctctgtatgatgtttgtaagaccatgtttgtaagacatgaataaattgctgcttttgcccannnnnaannnnttntcnntnnnnnnncancatacaaactttctc

SEQ ID NO: 32991 - DNA, 421 bp, Homo sapiens
acaaaaccggccatggcagcagcggaggaggaggacgggggccccgaagggccaaatcgcgagcggggcggggcgggcgcgaccttcgaatgtaatatatgtttggagactgctcgggaagctgtggtcagtgtgtgtggccacctgtactgttggccatgtcttcatcagtggctggagacacggccagaacggcaagagtgtccagtatgtaaagctgggatcagcagagagaaggttgtcccgctttatgggcgagggagccagaagccccaggatcccagattaaaaactccaccccgcccccagggccagagaccagctccggagagcagagggggattccagccatttggtgataccgggggcttccacttctcatttggtgttggtgcttttccctttggctttttcaccaccg

SEQ ID NO: 32992 - DNA, 412 bp, Homo sapiens
tggtcttgagcccagctgagaagcacttctcactcctctctcttgttctgaatggtgttcgtgtcagtctgcagctgtgtatggtattatgtcttataatcctgcatcacttctatcctatccagtcatatctaatgtagaaaattagtttccagtgaaagtaatatgtagggcttttatgatatttgtgtgcaatatcccctcttccattgaggatatttgatgtaaaggaaaaaaaaaaactcagttccacaataaaatacaaaagtggcaaaagttaaaaaaaaaaaaaaaaataccatacgggccgcccctttaaaaggacccctgaggggcccaaatctacccgggcatgcaaaaacttaaacttcttccctcatagggggccgttttaaccgcctcgcccctggcc

SEQ ID NO: 32993 - DNA, 412 bp, Homo sapiens
gctcttggcaaacttcttagtgcaagcaatggttagattaatttgtgaggcagctctttaagacgttcagaggtaagaaatactggatttataaagcaaatggctgtttgggggattccaaggatttacctaattgtccaattctacgtgctctctataccaaaacaaaaaaaaaaaaaaggggggcccgttttaaagaacccttggggggccccaacttaccccgggatggcaaagttatagttttttccttatagggggccgttttataacctggccccggcccgctttttaacaccgcgggaacgggaaaatctgttacttgggaatttttgaaaagaaccctttctttggggggggaacaaattggaccaacctccctacaaaaattaaaggctctagggaaaaaata

SEQ ID NO: 32994 - DNA, 429 bp, Homo sapiens
  misc_feature (1)...(429): n = A,T,C or G
aaataaaatctgtttttttgaaaagataaaaaaaattgatagaccattagtaaaaataatgaagaaaagaagagagaagatccaaataagctcaattagaaacaaaatgggagatattacaaccaatactacagaaatacaaaagatcattcaaggctaatatgaacacctttatgcacattagctagaaaacctagagtagagggataaattcctggaaatatacaaccctcctagattaaaccaggaagaaacagaggctctgagcagaccaataacaggcagtgagattgaaatggtaatttaaaagttacatacaaaaaaagtcaaggactaggcacattcacagatgaattctatcagatactcaaagaagaattgatatcaatcttattgacattattccaaaagatacagaaagagtgaatn

SEQ ID NO: 32995 - DNA, 412 bp, Homo sapiens
atggcggaggatgtttcctcatcggccccgagcccgcggggctgtgcggatggtagggatgccgaccctactgaggagcagatggcagaaacagagagaaacgacgaggagcagttcgaatgccaggaactgctcgagtgccaggtgcaggtgggggcccccgaggaggaggaggaggaggaggaggacgcgggcctggtggccgaggccgaggccgtggctgccggctggatgctcgatttcctctgcctctctctttgccgagctttccgcgacggccgctccgaggacttccgcaggacccgcaacagcgcagaggctattattcatggactatccagtctaacagcttgccagttgagaacgatatacatatgtcagtttttgacaagaattgcagcaggaaaaaccc

SEQ ID NO: 32996 - DNA, 415 bp, Homo sapiens
cttggcgggtgaaggtgtgtgtcagcttttgcgtcactctagccctgggcgctgcttgctaaagagccgagcacgcgggtctgtcatcatgtcgcgttacgggcggtacggaggagaaaccaaggtgtatgttggtaacctgggaactggcgctggcaaaggagagttagaaagggctttcagttattatggtcctttaagaactgtatggattgcgagaaatcctccaggatttgcctttgtggaattcgaagatcctagagatgcagaagatgcagtacgaggactggatggaaaggtgatttgtggctcccgagtgagggttgaactatcgacaggcatgcctcggagatcacgttttgatagaccacctgcccgacgtccctttgatccaaatgatagatgctatgagtgg

SEQ ID NO: 32997 - DNA, 424 bp, Homo sapiens
tcaaagggcctttgcccccacccttactaggccctctacctgcaggtgaccactggcacattctcctgcttgtgtcagcttcaggttcttcacctctaagatggggatgatgaaaacagtacctgccatgcagaattgttgggaggattgataatttagatgtttatacatgtaatgtacttagatcagcgtctgctcttttcacttgatatccagtactatgtaagatagaaggtgcatgtcttctgtattctgtatttcccatttcttttgcgtgcaggctttgattcgtacaatagaaggaacacgtagaatgtatatttgtacattcatgtcaacatagtatttgaaattgctaccaaactcatttaatttggcataagactaacagatgaagtctctcatttgcttgaagatattttac

SEQ ID NO: 32998 - DNA, 411 bp, Homo sapiens
actagttctagatccggaaaaactttgccaagagcaaatggagacaagcatttaatgccacggccgtcgtcagacatatgagaaaactacacctcggcagcagcctggacagttcaaatgcaagtgtttcgagcagcctcagtttggccagccaaaaagactgtgcgtctggcaccttccacgctctgtagtttcatttcttcttcgtcgggggtctcaggagttggagccgagcggagacccaggcccaccactgtgacggcagtgcactctggaagcaagtgactggccctggaggtggggcccggggtcggggctggggaaggggagccccagggtcgccagagccgcgagccactccagcgagaccccaccttgcatggtgccccttcctgcataggactggaagac

SEQ ID NO: 32999 - DNA, 417 bp, Homo sapiens
tgaggtcttggtgggctcaggccagctgtttgcgagtgtgggaactcataggttctgtctttgtctcttcctttcacctcattctggtagcagcataaaggttaggcaatcactgggacccgcatggtgttcctccaaagaatagggtaaaggagagctgggagggagccctctccgttgggtgactcttgtgtgccctttagacaggctggcctgccggttccacagggtacagttaggacttgagtctttctttttctgttttgagttggtgagtgagtgatagggtaacatgggccttcaggatgaccccttggaactgtgccgagttccttaaatctcagctgggatcctggacctgggaggcccctgtgagggccagctctggaaaaacctgggagttgatgccggaggctg

SEQ ID NO: 33000 - DNA, 504 bp, Homo sapiens
  misc_feature (1)...(504): n = A,T,C or G
ccaggcgccnatttgaagcctgaggacnctgcccagaanccccgggncgacccacgcgtccgagagcgagccaggcgaagggcgcctgcgcaggacattctggacttatgcgttgttcttgctgcctgctgtggcgggaggaggccttatgggggagggtcgcgaagtgactgggattttttttctcatttgtcatttagtgggctccgtggcttaagacttgaaccaagtaaacgaagttctcttactgagaagtctcagtttcaactgtcattcttctctacagaagagcttctcctcatcaactggggatgattacagttcttcctaaaaaaggatggctgctctttttctaaagaggttaacactacaaactgtaaagtctgaaaatagttgcattagatgttttggtaaacacattctgcaatagacagcaccagcacagttgtcccctattgcttctgccccaagactcttcttcctatttcatgcaaaagcctttag

SEQ ID NO: 33001 - DNA, 412 bp, Homo sapiens
ttcaaatgccacttcccctgctttagggatccaggtgttctgatagcgtgaccctgctgaggcaaggtatcaactccgagagtgactgagtcactgagcgtggcacatgaacaaacgtcatgacaaagattctctgagtgaagttaacaccacgtattttacctttgcaaaaaacaaactggcaccctgagttctaactacggacggacgatatctttgcctccacacccagattcctggaaatggctaacgtttcctttctaggggaagggtcgaggaatactcaagtgctagcttagcagctttgttcagtccagatcagagctgttaggtaaaggcctaaccacctccctgcagtctcttatatctcaagctttaggaacccatttctaaatgtacactagcggagaat

SEQ ID NO: 33002 - DNA, 432 bp, Homo sapiens
aagggggctgaggaaaggaggtgggtctaggcatgggaaattggggtgccaccagacggagacagcttggactaccagaatcaagcactcttttggaagagggtaatctctctccaaaaactgaggacacttaccttccccatatattgagtccagctgtgtttggtggcccaggtactaatttcaagatgccaggacgttccagttcaaattcaggttcaactggtttcatctccttcagtggtgtagagtctgctctctcctccttgaaaaacttccaagcctgtatcaactctggtatggacacagcttctagtgttgctttggatcttgtggaaagtcagactgaagtgagtagtgaatatagtatggacaaggcaatggttgaatttgctacattggatcggcaactaaaccattatgtaaaggctg

SEQ ID NO: 33003 - DNA, 406 bp, Homo sapiens
atataagctactgagtggaacatggagctgatcaagaggccgtaatggtcatggctgtttcccagacctgaatattggggtgcttcttgccagtattctaagacatttgagtaattgctgtttgcacttactgcatggtcagaccacgtcactacatttctatgcaaggggacagcaaggcagcgtggtggtcatggctcttagctaacctattcaaagaccttttcctgttgattaatctattttcatatttataaaggagtcttaatgttctgccccataagactttcaaccttgtggttgggagtggggctggttttgtaggccctagggcctgcttctatgtatttatcaacatgtgatacattcaattggttaaatggtttatacagggactgatttgctt

SEQ ID NO: 33004 - DNA, 434 bp, Homo sapiens
atgtgctggtcacactggttctccaggggtctgtgatggggcccctgggggtcagcttctgtccctctgccttctcacctctttgttcctttgttttcatgtatccattcagttgatgtttattgagcaactacagatgtcagcactgtgttaggtgctgggggccctgcgtgggaagataaagttcctccctcaaggactccccatccagctgggagacagacaactaactacactgcaccctgcggtttgcagggggctcctgcctggctccctgctccacacctcctctgtggctcaaggcttcctggatacctcacccccatcccacccataattcttacccagagcatggggttggggcggaaacctggagagagggacatagcccctcgccacggctagagaatctggtggtgtccaaaatgtctgtc

SEQ ID NO: 33005 - DNA, 406 bp, Homo sapiens
atttcctgctccagggcagtaaacacaaatatttcttcatggggtgatgaaaacctcggaagttttaatttgaggttatctgctacgaaacagtatttctaaaaggctaaagtgataagtctcttgcttttttttgatcctgctcttatattcttttttttcctcagagaaatcaggagggtagttagaggtataaaacaggaggaaatattatggaaaatgaaaatagggaaaataattgaatcattttagaagtagctaatttcttttctcaaaagagtgtcccttcttcacacctactcactttacaactttgctcctaactgtgggttgaaaactctagctaaagaaagttatcaaatcttaacatgcattcctactattatgatagtttttaaggtttcag

SEQ ID NO: 33006 - DNA, 407 bp, Homo sapiens
  misc_feature (1)...(407): n = A,T,C or G
atgaaatggggttgaagtgaacatgattttgttgaccatgttcgtgaattacagatgcaacatgcattggtagaatcgtgtgatggtcttttgtgatacttaatttttacatatcccagtctctgtatgtatctgcatagacaaagaaaaaacaaactcctgctttgcttttattgaagggtttccaggactgcgtgtctgctcctgagctctgttttaagtatgtgtatcctttgcttgtattttgtattaaaaaaataagaaaaagaagcctttattgttgagcatgttggcattgtcccctttatttttttctctttttgggacatatgaagcaagntattctttttctgtatctttttttcttttggaaactttttttttgttttgtttaaaaatggctttat

SEQ ID NO: 33007 - DNA, 402 bp, Homo sapiens
  misc_feature (1)...(402): n = A,T,C or G
aattccgtccgagatgtctcgctccgtggccttatctgtgctcgcgctactctctctttctggcctggaggctatccagcggactccaaagaatcaggtttactcacgtcatccaccagagaatggaaagtcaaagttcctgaattgctatgtgtctgggtttcatccatccgacattgtaggtgacttactgatgaatggagagagaactgaataagcgtagcattcaaacttgtctctcagacaggactggtccttatatctcttggactacactgaattcacccccactgaaatagatgagtatgcctgccgtgtgaaccatgtgactgtgtcacaggccaagatatgtaagtgggatcgagacatgtaagcagcatcatggaggcttgaagatgccgn

SEQ ID NO: 33008 - DNA, 409 bp, Homo sapiens
agggagactgcgagtgagtgcccgggaccacctcatcagagatgcttactgcagccctgcaggtgcctgtgcactgatggaatccacagtgtagtcagaaaagctgttgacttctcttaaatcagcttccctgctgggcccctgaaagtggactgggtgattctgtctggcagagagtggggaaaagacgcggtttccagcttgcagatttgttaagtttctcaggcagattttgactttcagcctttcatacttgtttaagcaactatttgtattaaatgaagttttttgaaaaaaaaaaaaaaaaaaaaaaagggggggccgttttaaagaatccttgggggggcccaattttaccggggctggcaaggaaatatttttttccttatagggaggcgattaaaaaccg

SEQ ID NO: 33009 - DNA, 405 bp, Homo sapiens
  misc_feature (1)...(405): n = A,T,C or G
atgcagttcaacgacatcctacagaacctcaagcgcagcaaacagaccaaggagctgtggcagcgggtctcactcgagatggccaccttctccccctgagtctttcacccttagggtcctatacagggacccaggcctgtggctatgggggcccctcacacagggggagtgaaacttggctggacagatcatcctcactcagttccctggtagcacagactgacagctgctcttgggctatagcttggggccaagatgtctcacaccctanaagcctagggctgggggagacagccctgtctgggagggggcgttgggtggcctctggtatttatttggcatttataaatatataaactccttttttactctaaaaaaaaaaaaaaagggcggccgctctaaagg

SEQ ID NO: 33010 - DNA, 408 bp, Homo sapiens
gagtgtcgatgacagcaccttggcatcgttgtgcctaacctgggagacggaagaagcacgccatgggaagtgtttacacttggggacaagtgctaagtattgtggagcccatagccccttgacatagatggctactttgcctttcttcttgaactgtcttgcagaatgtggatttggggtaagtggtcttgaaggattcatttagtcaccctcaaattaagatttttacttcatctttcttgggcctgcacctccaagataacaaagaagaagcaatggtcgtgccaaagaggtccacaaccaggtgtgcactgttcactgcagcccatttgctgtatgaactgtggttgttgtgtgcccaatgacaaggctactaagaaattcatcatttgaaacgtagaggccgca

SEQ ID NO: 33011 - DNA, 408 bp, Homo sapiens
gctgcagctctgctatcacatgggcaaaaccagctacataatttacaagatccagtgcaaaataaaaatgtgacatttcttgttaaaaatcattgtgaatttcaagatggcaacaacaaagcattaaaccaagcagggggcctttctaagcttgagcccccgtgtgactgcacaggtcatatgcccatgaagctggctctgcagagactagctgaccgttggactggctgtgtcctggattcttttagttaatgcattccgtgttctgacaatggacattcctgtctcagcctccacattggatctggtcccctgattctgcacccaacattcctcagccacattccctgctccaaagccagagctctatgtattccagcacaagcaaagtcccagggtccatgcctg

SEQ ID NO: 33012 - DNA, 416 bp, Homo sapiens
  misc_feature (1)...(416): n = A,T,C or G
ctttgggagggtgaggtggaagggccatttgaagcgagtagtttgagattagacagggtctccctgcctctacaaaaaaatttaaaaattagtgggctgtggcggcacgtgcctatagtcccagctacttaggaaactgaggtgggaggattggttgaggcttcaatgagccataattgcaccactgcactgcagcctgggcaacactctcaaaaagaaaatttacagaataagccaattcctggtagagagaagtattaagtttccatagagtttgaattaatatattttccttttattgccagggtgggtatctacagccattggttgctgttcaggtcagctttgctcctaacaacactgggaaagaagtaacagttgagtgcaagattgatggatcagcccacctaaaaagn

SEQ ID NO: 33013 - DNA, 409 bp, Homo sapiens
taggaaactaataaaatcctgctgcatattataactgtaaagaaacacaaagaggatagcagtgtcaaatgaagggtactctaaatgggagacatatgagcatatgtataagccaatatgaaaaaaatcagcagattgaatattattcaagagatgaaggctactctagaaaactgtgacaatgttacagcaatacaaattatcttgccacttcattttttatttaaatatgtgatagtttaagcagtagtgcctaagataatgctctactcagtagacactcatatgtgtgattattggatgaacaacaactctgagcttggaaagcctggttgaagctgccattgcaactggccgtattaagtcctttgtatcctcactgttccatactagctcagcctatgatgtg

SEQ ID NO: 33014 - DNA, 413 bp, Homo sapiens
cccacgcgtccggtggagattagtgtgagccttgccattgatgagtctgacacaaatctcgtggccttaatgaaggaagaaggggtgaaacttctaagagaagcaatgggaatttacatcagcaccctcaaaacagagttcacccagggcatgatcttacctacaatgaatggagagtcagtagacccagtggggcagccagcactgaaaactgaggagcgcaaggctaagcctgctccttcaaaaacccaggccagacctgttggagtcaaaatccccacttgtaagatcactcttaaggaaaccttcctgacgtcaccagaggagctctatagagtgtttaccacccaagagctggtgcaggcctttacccatgctccttgcacattaaaagcagacagaggtggagagtt

SEQ ID NO: 33015 - DNA, 225 bp, Homo sapiens
cggagctggctctgtggcgtcgtggccccattactgctgccttgcttcagccacctctcctgcccctccctagtccccactgctgtccaccatgagtaggagggaggtgcagtccccagcccccacccctcaggtctgtgttacttggtttttaagcgactggttgggatagaaccctaaagaaataaacttccagtggataccggaaaaaaaaaaaaaaggggg

SEQ ID NO: 33016 - DNA, 406 bp, Homo sapiens
  misc_feature (1)...(406): n = A,T,C or G
ctcccacctcagccttccaagcagctgggaccacaggcgtgcatcaccataactggctaatttttggatttttttttgtagagacagggtctctccatgttgcccaggcgatccacctaccttggcctcccaaagtgttgggattacaggtatcagccactgctcctggcctcataattcattttaaatctatttagaatgcaggaaaaacactatttatttagaccagaggtcagaaaaataaaatccacaggacaagtcctgcctgccacctgtttttctgttgtttttttgtttgtttttggaaataaggttatattagaacatagccgcgcccattcatttatgtattacctctggctgctattacactgcggnggcggaggttgagtggttgcagcaggga

SEQ ID NO: 33017 - DNA, 504 bp, Homo sapiens
  misc_feature (1)...(504): n = A,T,C or G
gaaggccccnntggagtcagtggctcccagaaccgcnccggaannncngggtcgagccacgcgtccggccttccactacttcactaaatgaattttttagtatttactgtgattctgcagagcggattcaggaggcttgtccaatgttttctggggctatggagagcctaccaccttgagggcacttcagtactagaggatgaaaactgaaacgttgttttgatgtttattgaataacgagattagagaatatttgatttttgttgtcagtgtattaaagaaattttcacattgataaatgttctctaggaatgtgtctacattcatcaggtgtgaactcttgtacatgaattttgtaccttgaatccacatatatattaagtgtatcatcaatataaaaataaacattatttgcttaaaaaaactacctttaaatataattcttaactttctatataaacaacttcattttttgtgtcctccgctgctgctcctcccgtcccg

SEQ ID NO: 33018 - DNA, 422 bp, Homo sapiens
cggacgcgtgggcaaatttgactttcattttgaacatattaaatatatcaaaaggtgttaaagaaaactgaattaaacccaaaattatgttttcatggtctcttctctgaggattgaggtttacaaagggtgttagcagatgcgaagtaaagaacgtcactttgaaacccattcatcacacagcatacgctacacatggaacacccaagccatgactgaacacgttctcagtgcttaattcttaaatttctttactcatgacatttcgcagtgcagagaaggcagaacccaagaaaaacgtcatctttgagactttgcttttgtaacgcagacatcagctttacactttacaggagattgatggcattgaggaagattgcaatggagatcatgacactactggtaataaggccaggaaaact

SEQ ID NO: 33019 - DNA, 413 bp, Homo sapiens
aattgtaggatggtctgaaatgtccacacactttctatgcatacaaattttgtgaattcccaaagtatgctttggaattggtcatagtcttttcgtatcatgagtgtgtatcccagaagatacagaatgcggtcattttacctgaaattatttgagaacactggatgtatctggtctgtgtaaaaagttagcacttaccctcttttcttcctggccaagccctctgaattcatctgttaatatcaaattgtatttttgccacatttctgtattggtgaaaagcgaatctgcagaataactgccaacgtttttcattcttggtttacaaacctattttttaaagtgaaaataaggctgggttttaccaaatatttgttcctccttgacaaaagtaactctgtgtggataatatg

SEQ ID NO: 33020 - DNA, 411 bp, Homo sapiens
tggataatgtacagatttaaaaacaaatcttgttgcttatttgtccatttctttccctgcactttgttacatctgggatacagtctaactcatctgatttaatatgcatttaaaaaaatgccataactattaaacaccttgtttacagacagatgaaataaatttattccaaccacctaaaaaaaaaataataaaaaaaagaaacaataataaaaaggggggcccctcttataaaaatcctatagggggtcccagttctccctggggggaaaagttatttttcttcttcttaggggtggctaattaaataaagcgcccggggcggttttacaaacccgaggacaggaaagaattctttatggggaacttgttagaaaaacccttcttttgggagggaaaaaataaaaaaag

SEQ ID NO: 33021 - DNA, 417 bp, Homo sapiens
gaggagatgagacagcccgaagttctctctgaaccctaactcgaatcagcctctggcaactgccttccctgccaaagaacaaaggctgagatggcagcgcacacaccctccccaccagtggggacctgagaatgcgtggggcctgctgtcctcgatagaccggaatggggttttcccacagatgcccgcctgtggcacaccccagaggcagaaatcgaaggtcacaggaaggcgtcactgaacttgggccgggtctgctactctgtaccttgatggcacagacaggggaggcgggcagacatgctctatgagtgggcccctagtgtcagctctgtacagggtcagatcccaggttctatgaccaaataagtaacttaagatttgagtggtgggatctaattccttggcctagaatcc

SEQ ID NO: 33022 - DNA, 409 bp, Homo sapiens
  misc_feature (1)...(409): n = A,T,C or G
tgttaagggaagctgatacagagagacaacttgctcctttccatcagctttataataaactgtttaacgtgaggtttcagtagctccttggttttgcctctttaaattatgacgtgcacaaaccttcttttcaatgcaatgcatctgaaagttttgatacttgtaacttttttttttttttgggtggcattggttaaaaaacaagggattaatttttggaaacttttgggctatggcccttgggaacccggacagccccttgtgtgccaccccttgtaaataaaaaggggggattataaaaggccaaactttaaaaaaaaaggtttggaaattcagggggaaaaaaaaggctgttttgggaaaaaaanaccactctnactatattaaaaacttcttttgaatggcgggg

SEQ ID NO: 33023 - DNA, 406 bp, Homo sapiens
atcatttgatggaatctaggctaacgagacaaaggaagtctgaaggctttgaataagaaattttctgttgctcttaacaattgatacaagttagggatttgccagcatccctcttctgcttctcagtgaagatatgtgatatggatgtttgaagctaatctgcaacagccttctgatggccatgaaaggacaagtatggagatgaaagctatcacactgagaatagtgggatgtagatagaaagcacctgaattgtgcttctgaattaaccaatccaggaactgctttacctttggactttttgttatgtgagatattctttatattgttccatttgctttgggtatatgtatattgttacttgtagccaaaaagaaacctctcttagtagaaacaaagggagagt

SEQ ID NO: 33024 - DNA, 504 bp, Homo sapiens
  misc_feature (1)...(504): n = A,T,C or G
caggcgccnttttgaatccctagagtacgangaacngcnncnnaanncccgggncgagccacgcgtgcgcttctgctatgaaatcttcccctcaaatttttcatcttacatacagcagcattctgaaacatctgaactagggcactcagcagacgagttatctttgtattcttcatgaaatgtgttttgtctttttttattactagtgtttaagtcattttttacttgaatcagatggtgtcatttagtaaggattttatgagttcttgttttttaaaatccagactttctttttctacatgtgagatagttttcattttaactggcatgtcatttgcacacaaaaataaagactatagcataataatgcaacgcaggaggagaaaagacatgcactatgacaagaacattctctcatagaacattgatctgttttacaggaaacaaaccttgccttgaatttacacagtgagactgttcattattgcatgacaatagctatct

SEQ ID NO: 33025 - DNA, 489 bp, Homo sapiens
  misc_feature (1)...(489): n = A,T,C or G
gggaagttgggcnnaggggnnnnnnacactgatcgccngctcagaccgccctcgaaancccgggncgacccacgcgtccgggccacattttttttaattgacaactcaatctctacttacatacagtattgcacgaattataagtggatcaacaattatattattgatacgggctcatgagcatttacataaaactaccgctctaggttttggtgtgttttgtgtcagctactttagtgaataaacgaaacataaaggaactcagctacttgaattcatgagaatcagctttcaaaaaaagcatatatatcatctcatagaatacttatgtcaaacccaggaaaatcagtaactaagtgacaaaaggaacacttttaaagaaaagttggtgataaatatgttaggctaaaatactaagaactttagcaactggaccgaggaaccagaaaatgtatgcacactgggaattttaacaaaagattacacatt

SEQ ID NO: 33026 - DNA, 416 bp, Homo sapiens
cacctgtcatggaacgttacacctctgcagtttccatggtcaaacctcacatggtcaaggctgtttgtactgatggcaagctcttcaaccacttagagactatttggcgattcagccctggtattcctgcctatcctcgaacctgcactgtggacttttcgatttcctttgaatttcgttctctgctgcactcccagctggccaccatgttttttgatgaggttgtcaaacagaatgttgctgcctttgagcgtcgggcagccaccaagttttggtccagaaacagccatcccccgtgaactgatgttccatgaggtgcaccagacttgaggcaagggattgctccctgacctcccttctaccccacttccctacacaattctcttatttatttgggttggctcctgttccaattg

SEQ ID NO: 33027 - DNA, 404 bp, Homo sapiens
catctccttcttactcatgtagattcaactatagagagttgaaacctaaacccgccttccttttatagaagctggactagagacggactgaccatcagctctgaactgtggctttttttgttcacctatgatgccatgtaccaaattcagaagctatcgttaataatttgttttataattgagtagtacaagcgaggaaaaaatacggaggataaccactatttttgtgcaaataatatgaaagtgaagtaaaagcaatagaagaaatttctataggatctgggtttagagagtgtatcattaataaatatacctttgctcttttcagggaaaataacaaccacccttactgatagttgggaaaagaagattgggttattttgccatatcatttagctggaagg

SEQ ID NO: 33028 - DNA, 416 bp, Homo sapiens
ttagcgaaccccaagagtgcagagtgtggagcgtggagcgccgggactgtgcacgcttgaccggaagcccagaccagtgcggtcctagccagagagaaaggacatttgccaacaatgagacacgaagcgcccatgcagatggcctctgcccaagatgccaggtacggccagaaagactcctctgatcagaactttgactacatgttcaaattactcatcatcggcaatagcagtgtggggaaaacatcttttctattccgttatgcagatgactcctttacatctgcattcgtcagcacagttgggatcgatttcaaagtaaaaactgtattcaaaaatgaaaagagaatcaagcttcagatttgggacacagcaggccaggaaagatacaggactatcaccacagcctattatcg

SEQ ID NO: 33029 - DNA, 411 bp, Homo sapiens
cggacgcgtgggcgctggggagtatgttggttgaacttttaggcgctgatcatcaccatgtccggagtcgggggaaccctcctcctgggcattgccatctgctgctgctgctgctgcaggaggaataggagccggcagccggacaggagtgaggagaaggccatgcgcgagcgggaggagaggcggatacggcaggaggaacggggagcagagatgatgactagacatgatgaaatcagaaaaaaatatggcctgtttaaagaagaaaacccgtatgctagatttgaaaacaactaaagcagctccagcacatcagtcccgacgcttcctgtgaggtgcacgctccgaagcccagcccagccgggagaccacgtggccattgcggtctactgaccttggtcagtgaacctg

SEQ ID NO: 33030 - DNA, 497 bp, Homo sapiens
  misc_feature (1)...(497): n = A,T,C or G
cgccccccctnnnatagaacgccttcagtaccggttcgaaatccctggggcgacgccccgcaattgctgagacgacccacgcgtgcgcttagagtttgactgatggcacaccagctaccatgtcccacatagtcatggatgtgtgcaccttcctgcgctgggcatctgagccagagcacgaccatcgaaaacgcatggggctcaagatgttgatgatgatggctctgctggtgcccctggtctacaccataaagcggcacaagtggtcagtcctgaagagtcggaagctggcatatcggccgcccaagtgaccctgtccagcgtctgcttgccatcctgccagaacaggccctcaagcccaagagccatcccaggcctgttcaggcctcagctaagcctctcttcatctggaagaagaggcaagggggcaggagaccaggctctagctctgggccctccttcagcccccatcatgggaataaattaattttctcaat

SEQ ID NO: 33031 - DNA, 422 bp, Homo sapiens
  misc_feature (1)...(422): n = A,T,C or G
aggaaatatcatcgtatttcttttttttaataaggaaaaaataatctccatacagtcaagatacatagtaaatggtatcatttggaaatcagcatcgtgggcactgctgaggaatgatcctagtggtaggtcagaagaagatgctgtgaacaccaggactttaatcttatgcttaaaatgccagatgttgttcgggggacaacttgtatctttctagcagcagatctgtagtttgtatagcctcaacaacaattttaaataagatggagaataaattattgaggggactaggctatatgcatttgccttcatccacccatgtttattaagaatcattgtgcttaataataccaagactaagcaccataaccaagaaatactaatgtaaagattgtttcttggttcaggaatggttaattctn

SEQ ID NO: 33032 - DNA, 436 bp, Homo sapiens
tgaagacacagtcagcacaatcagagacagcctgatggagaaaattgggcctaacatggccagcctcttccacatcctgcagacagaccactgtgcccaaacacacccacgagctgacttcaacaggagacgcaccaatgagccgcagaagctgaaagtcctcctcaggaacctccgaggtgaggaggactctccctcccacatcaaacgcacatcccatgagagtgcataaccagggagaggttattcacaacctcaccaaactagtatcattttaggggtgttgacacaccagttttgagtgtactgtgcctggtttgatttttttaaagtagttcctattttctatcccccttaaagaaaattgcatgaaactaggcttctgtaatcaatatcccaacattctgcaatggcagcattcccaccaacaaaatcc

SEQ ID NO: 33033 - DNA, 407 bp, Homo sapiens
ctttgcttatagcatttttctctaacctataacaaggagacattacattttactttagaacatgagcaaaactgctattctcatgttctaaagtaaaatgtaatgtctccttgttataggttagaacatgagaatagcagctttgctcatgacttaccattccagctgcatgggaaagcaaagcagaaaacagtgccccaaatggaaaaaagatactcacacagaacaaaacaggtcttggtcttgttcttggtcttgtcaaaccttgcctgatgctctttctaaagtcaaaatatgaatgctaagaaagcataacctacatccttctctgatttcttcagcagggtcaaaagacagttactagcaatggggaatgcttgtcactgtggagaaagagttttgtatag

SEQ ID NO: 33034 - DNA, 474 bp, Homo sapiens
  misc_feature (1)...(474): n = A,T,C or G
gaggtannnaattgatagcatgagaacgtcgcgaannccggacgacccacgcgtacgctccatctttttatgaagtaaaagaacctgtcgtaccatcatcatgttctggatgcaggagcccatggctgaaaggagttaaaacgcccagtggtcattaagtgaaacatcttttatcaacctgcaaaagctgcagcgttctctgccaggtcaaatgggcatgtttagaaaataagagaagatggctgagtatagctaatgaataaatggttgtttctttagaaaattaaacacacactgagtgtaagaggagaggatacggccctccctgaaggataaagaccacctggacggtgccctgccctcgcttctcacattaactgcccaggaatgtcatgctgtttggttcccggaagggtgtttggcaaggcgcagtgaatggagctacttgtataaggagagaaatttgtgtgtggc

SEQ ID NO: 33035 - DNA, 410 bp, Homo sapiens
ctaggctatttctgccgggcgctccgcgaagatgcagctcaagccgatggagatcaaccccgagatgctgaacaaagtgctgtcccggctgggggtcgccggccagtggcgcttcgtggacgtgctggggctggaagaggagtctctgggctcggtgccagcgcctgcctgcgcgctgctgctgctgtttcccctcacggcccagcatgagaacttcaggaaaaagcagattgaagagctgaagggacaagaagttagtcctaaagtgtacttcatgaagcagaccattgggaattcctgtggcacaatcggacttattcacgcagtggccaataatcaagacaaactgggatttgaggatggatcagttctgaaacagtttctttctgaaacagagaaaatgtcccctg

SEQ ID NO: 33036 - DNA, 121 bp, Homo sapiens
tacgtagcaaaacacctccctcgctgcgatctattgaaagtcatccctcaacacaagggtttgtctacgaatggtttagcgccaagttccccacgaacgtgcggtgcgtgacgggcgaggg

SEQ ID NO: 33037 - DNA, 410 bp, Homo sapiens
tctatgatgagagtactgatgaggaaagttaaaaccatattgatctctctgggatggcttcagctgctgcaagtaaagatgattccattatttctagtcttgatgtcactgatattgcaccaagtataaaaaggagacagtgaatgcaaagaaattttgggacagaacctataatggctcctcaggagaatcagcttcaagaaaaggaaaattctaggcctgattcttcactacctgagacgtctaaaaaggagcacatctcagctgaaaacatgtctttagaaactctgagaaacagccatccataagacctctttgatgagatttaacagactcttaacatactttgatgttcactaaactatcgtttctattcatttctttaaaatgaaaaaggagaatttctagtc

SEQ ID NO: 33038 - DNA, 421 bp, Homo sapiens
  misc_feature (1)...(421): n = A,T,C or G
aaagaaaagtcaggtcagtaatccaaatccaaatatgtatactgcaaatgctcaagaagtcacattttttgataaattgtattgagtacagaagaacttatatgaattttttatctgttaataacttagttttgacaacagaataacatttggaaattgtgagaataatcaagctgtttttccattaacagtgtaaattcataacatgtccttcaaaaggtgatattctaagctgtcttaattgtctacggttgataacttttaaataaagtacaggactttctgaaagtgtttggcatgttatgctgccaaaaacaatctgtgttttgaaataccaattaatcagttaatttctgaagactttgtataggacttgatatatgagtcagaatctgtctgcactcattctgtacattgtacn

SEQ ID NO: 33039 - DNA, 480 bp, Homo sapiens
  misc_feature (1)...(480): n = A,T,C or G
gggcgtgccccagcnnnnnnnaactgaaagccgctagatagccctccaaaccgcnncgacccacgcgggcggagagtcgcggcggttttcgtaacaccccagggcctttatggtttggtttttccctttcaagatgccactgtcagactttattctggctctggaggacaatgcctactttggggctggatttgggctggtgggtgtgggcacagccctggccctggcccggaagggtgtccaactgggcctggtggcattccggcgccattacatgatcacactggaagtccctgctcgagacaggagctatgcctggttgcttagctggctcacccgccacagtacccgtactcagcacctcagtgtcgagacttcgtaccttcagcatgagagtggccgcatttccactaagtttgaatttgtccccagccctggaaaccattttatctggtatcgggggaaatggattcgggtaan

SEQ ID NO: 33040 - DNA, 413 bp, Homo sapiens
  misc_feature (1)...(413): n = A,T,C or G
ctccaagaagttcgttaaaataagcagctgctaattattctgaacttcagatgagacactgctgacatctcatatcattttacactatattaaatagatgaatatctttttcttgtttttaaaagatattttttcagaggccaaaaaggcattgggatcttctgtcttacactggggctacttacccagcaaagatgactatttccaagtactgtgcatggctgatgttgtcatctcaacagctaagcatgaattctttggagtggcaatctgaatatctgtattctacacctgaacagctttcaaaaaggctccagaatttctgcaagagaccagatattataagaaaacatctctataagggtgaaatcgctccgttttcttgggcagccctacatggtanattcaggtct

SEQ ID NO: 33041 - DNA, 307 bp, Homo sapiens
  misc_feature (1)...(307): n = A,T,C or G
agggggnttatatatagcaatgttaccgtcgcggaanccccgggncgacccacgcgtgcgcccacgcgtccgggaagctggtttcagcccaggacccttcactgattagaggatctagacaggtgggcctaagtccaaggggcccttcctggcctggagaaggccttttacacacacacaacacatacacacacacacacacacacacatatcacagttttcacacagcccctgctgcattctctgtccatctgtctgtttctattaataaagatttgttgatctgtaaaaaaaaaaaaaaaagggg

SEQ ID NO: 33042 - DNA, 409 bp, Homo sapiens
  misc_feature (1)...(409): n = A,T,C or G
cccacgcgtccggtagactctaagatacactgcactttgtttagaaaaaaaactgaagatgaaatatatattgtaaagaagggatattaagaatcttagataacttcttgaaaaagatggcttatgtcatcagtaaagtacctttatgttatgaggatataatgtgtgctttattgaattagaaaattagtgaccattattcacaggtggacaaatgttgtcctgttaatttataggagttttttggggatgtggaggtagttgggtagaaaaattattagaacattcacttttgttaacagtatttctcttttattctgttatataggggatgatatacacagtggcaaaacaaaagtacattgcttaaaatatatagtgaaaaatgtcactatatcttcccatttan

SEQ ID NO: 33043 - DNA, 417 bp, Homo sapiens
acagtgaaaactaatgaaactggatatcaggaagcattagtgaaagaacctgaaattaacacaactcttcagatgcgtttctttggaaaaagaggacaaagaaaacttcattataaagaatttcgaagatttatggaaaatttacaaacagagattcaagaaatggaattccttcagttttctaaaggtttgagtttcatgagaaaagaagactttgctgagcggctactttttttccactatcactgaaaataaagatatttattggcaaaatgtgagagagaagctgtagcaggagagagcattagtttggatgaagtcaaggcattttgtcattgtacaaggcagattggaacactttgctatttgccatgcagatgttcacgttagctcatacggctgtcagaatataaggag

SEQ ID NO: 33044 - DNA, 407 bp, Homo sapiens
gcgccagcccaagaatggggaccatgggactcctccatcctggctcttcccactctttcatcgtcatggaaacttgtatcccatttgcccagggaactgccactcctggttgccatggaaatagcagccaacggacacctcccgatgccagtgctaaggctggaaatggccccctcttagttgccatgggaacctagtaacagactctgctgggcctcctttcctgcccctttcttgagcgcgggggggggcttctggaccccggggatgagccgggccaagtcccgccccttcgcgcaggccttcggggggccggggcttaccatggaagggaggggagaactatccacctaccttacggaacaaggaagtgcgccggtgggggggaggcctggccggaccaaagc

SEQ ID NO: 33045 - DNA, 406 bp, Homo sapiens
  misc_feature (1)...(406): n = A,T,C or G
agaataatggtcccaaagagatatttgcacaccgatgttcacagcagcattattcacaatagcctaaagagggaagcaacccaaatgtctatggagaaatgattggatagacaaaatatggcatatatacaatgaaatattattctgccttaaaaaagaaaattctgacatatgctacaacattgatgaacctggaggacattatgctaagtgaaataaaccagttataaaaggactaacacttgatgatcccttctacgtgaggtatctagtgtaatcaaattcatgagccaccgtgcccagcccaaaactgtgctttttaaaaacagtattttgttataattttccagaacttacctctgttttaaaagtgtgtaatgtttgattacaccctgggattcccttn

SEQ ID NO: 33046 - DNA, 408 bp, Homo sapiens
gtttctactttcatttcttaagcttttaaaattcatttaattaatattctgttgttgttttggggagtattcccaatgtatctttgatatttaacctggttaatttgtggacagtcacaacaatggatagaattatgtagtctccgttatcactaaaatgttatcttcaagagatgttaaatatttatatgctttgttgactagctgaaatgtgaattctgttagtgttgactaaagaatctggtagttgcttaattgggcaattaaacaatttatggctctattttgtaaaacaaactactggtaattatttttaatacctattttcattctgattactctttttttaagttaaagactatcagttaattaagattgagtttttatgatggttaaaaataattcttg

SEQ ID NO: 33047 - DNA, 404 bp, Homo sapiens
  misc_feature (1)...(404): n = A,T,C or G
gcgttctgggtttgatttgagttcacctttgggcagtgttcagtgggcagtgtcttggtgaaagggaacggagactactttttgcgctcaccgtagagtactcactagtaaatatttccttctctctttactcccactttttacgtttgcaggtgccaaagtaatgtccacttttccctttcatgctgcatattaactggttaattatactgcagaaaccttttcacctccactagtctgatacagtacatctgtacttccatataccttgcactgattttgtctgagtgccctgggagaagtagaaaatgattgaaagtgacttccgtatctcagcccatgactcagcaaggcagaatggccacccctgccaaagtttgcttctcttttcaacagtgcctcan

SEQ ID NO: 33048 - DNA, 415 bp, Homo sapiens
attttgtatggcaatagctgccatagatagcagttcttctcatggatctagggaaagtaaactgaaaaccttgtggaaaagattcagcattctagatgcaattaagaatacctgtgattcatgggaagaagtcaggtatcaacatgaacagaagtttggaagaagttaattccaaccctcacggatgactttcagaggttcaagacttcagtggaggaagtaactgctgcagttacttgtggtggaaataacaagagaaatagaattagaagtggagcttgatgatgtgactgaattgctgcaacctcatgatcaaactttgaatgggataagaatctactcctggtgaagatgctttgaacatttgctgaaggacgcggagtattaaaaattacctttaatttagttgataccg

SEQ ID NO: 33049 - DNA, 412 bp, Homo sapiens
agactctttacctagtcctaatgtgtcttgaagatcttctgcagttttttttctagaaattttatagttttatgttttacatttaagtctgtgattcatttttagttaattttttttgtataagatgtgaagcttaggttaaggttcatgtttttgcctatggttgttcaattgctctaatagcatttattgaaaaggttaatgatttatttgtacttctgccaaaattaattgatcatactcatgtggccatacttccgctttctctgttttataccacttagctttgtctatcttggctttcactacccacctgtcttgattactggaactatatattaactgtgctatataagtaactttaataaaaggaagatgaactttcttctttttttttcaaaattcggttggg

SEQ ID NO: 33050 - DNA, 404 bp, Homo sapiens
agaacgttcagctctctcctgtaatgtgtgcatcagtattacaactcatcaacaaaaggtgtatgtcagaagtctctaatatatcatttgtcttttttccagtgaggtaaaataaggcataaatgcaggtaattattcccagctgacctaaagtcaataaaacattctgtttaagtgtttttcttacgtttttctcaatgagttaatcaacaagtatttattatgtgctgatatctttgctttagatgctttaaaggagacaggaatataattattgagtatagaagcatcagaactattaaaattaaggctaagtggctatcggggtaaatagtgccagattactattggtggcgtttaagatgaaagcaagttcaaaatttgtcattttgggtgtcaacagc

SEQ ID NO: 33051 - DNA, 416 bp, Homo sapiens
aataaattaaatcaggggcgccactcctagtaaaatttattcttttcaaattattatctttggacttctgatcctactagtctatgaacttgaatttgattgagagatatggaaataggcaactaaatactctgcttggagactaagagggggagggggtaacactggaccatctttgacactgtcgggaagccaggtgccctctgaccttttccagttctggtcatggactatgtcatataggtttctttcatgaggaaattttgtacccaggttcaaggtgagttcagaatatactctgattcattcgatccttttttttttaacgcagggtggtacatatttgaatacttttactatggctgtggcatttaatgcggacaggattccagtcgctggagaggctatattgctac

SEQ ID NO: 33052 - DNA, 434 bp, Homo sapiens
  misc_feature (1)...(434): n = A,T,C or G
aaggttanaacccanaaaagaactaggaggtgcggatccttcattgcacacaatcctgtgctggaatccaggcatttcactgaagtccatttactccctggaatttctgctcctttctatcagtccctgaggcagaggctgtaaggacattgggagaggggactgacaataaggagtatttacaaagaaaaaccccatcatcctgagtcaagtgcattacagttaatgaagaatgtaaggaccactatcttagcccaatccccactgaaagttcagagtggatgcattggaagatttctcctttcttacagggcagtcctgcaactgaaaggccctgggagagagagccgtgagggcatggcagtgaggatggcagtgtggtggaaagggggagttttcaatcagacagccatgagctcaaatagctagttact

SEQ ID NO: 33053 - DNA, 407 bp, Homo sapiens
actggcaatatacaagcatgctgggggggtcttttcttttatccttttacaaacacttaatacatatggtccggggcaagataccaaaggttcagtgcttgcatactggcgcctgcctggtttatgcattatcatctacctggtgaaacagagtgctaaagacttcttcagctattatgacagtcttggacagagtgcctacaggctacaaaaggtatagcggcttcccccagatgagataaaagagttgcgtcaaactagcgatgcctgctggggtggataaaagctccactgatcaaaaatatgttataacaagacggtgctcggggaatggtataacaatcgagctaaactgctttccctttgttcttttatcatagagacctgcctatttattctttggcgcc

SEQ ID NO: 33054 - DNA, 419 bp, Homo sapiens
  misc_feature (1)...(419): n = A,T,C or G
gtggaaatgtacaagtagaaagaagaggcccagagtgaggcagaaggagagatgtgaacctaacanaagcaaggaggctctgagtgtgagacacagcctttatctctgggttttgatcccccactccaggctctgggccccttcttcccccttccctcaaacctggctgctataggcagcagaaccctgaccactgagtaatacagccccaggggagggaggagaccccaggcagggaggatgggggcagctctcttctctccccaggacccaggctgtggatcacggggcctgccagcttgagtgtagagggaggggggactctacccttctcagccccaccagcccccctctgcccaaccacaattttcccttcctccgccttcctctccctctcctgtttacactccccaaatgcg

SEQ ID NO: 33055 - DNA, 445 bp, Homo sapiens
agcaagaaaaatcatagcaagtttactcttgcccacttcaaacttcccggtaacacggcacccaacctgatcttcctggcagtgagtccagaagagaaggaatcgtggatcaatgccctcaactctgccatcacccgagccaagaaccgtatcttggatgaggtcaccgttgaggaggacagctatcttgcccatcccactcgagacagggcaaaaatccagcactcccgccgccccccaacaaggggacacctaatggctgtggcttccacctctacctcggatgggatgctgaccttggacttgagccaagaggaagaccctctccctgaggaaccaatctctttgtgctgacagctttcgggctgatctgtacattcctgtgtcaccaacattcatgcaagcccgctcgagaactgtattgatatcgtttcctccccttcag

SEQ ID NO: 33056 - DNA, 404 bp, Homo sapiens
ttcagtgcacacggtattatatcataaacatcctattttcaggacaccccagagcttctcaactggaatcaggaaggttgtttattccacacagcactatgagctccatttaagcaggcacctctggcctgcgttccggaactgcgttcccagaaggtactcctttggctcacgctgctcctgatcgccctgccctgtctgctgcaaacgacagaagatccacacccgccaataacgaacctataggatgaaatgaaaagctcaccagatgacctgggaccttaacagaaatgtgaccgatatcgagcgtgttaaagacgccgactattctatgacaggagtgaacaatagctatcgacagtttggatcactttccttatgggaagcgaccaactacaccgtcg

SEQ ID NO: 33057 - DNA, 416 bp, Homo sapiens
  misc_feature (1)...(416): n = A,T,C or G
caatatggcagtagccccgtgactgtttggggggctctgcttgcgttgccgggaccagaatccggaaggggctgttgaggggcgtcttccaatctcgcacagctgcgttggctgtagaagagaacggacggcgatggcgacggtcgcagcaaatccagctgctgctgcggcggctgtggcggcggcagctgcggtgactgaggatagagagccacagcacgaggagctgccaggcctggacagccagtggcgccagatagaaaacggcgagagtgggcgagaacgtccactgcgggccggcgaaagctggttccttgtggagaagcactggtataagcagtgggaggcatacgtgcagggaggggaccaggactccagcaccttccctggctgcatcaacaatgccacactctttn

SEQ ID NO: 33058 - DNA, 410 bp, Homo sapiens
atttgggagcaggatagagtgggatctcccctccgtatgggaaagggatgaaagccgtgaggccatactgatataatgatatatttattgtgttccgacagaggatgatgcatatgtacagacacaagcgggccaacaaatagttccagggtcacccccgagaggacaacaggcatctggaagtgctctctcgccactctgggtgctttactgtctctggcttgtttccatcactggaaatcacttagagaattgtagtgtttttggtccttgataaagcctacaagacatttgtgatgctacaaaatggaaggtttcttttgtttctgttttttaagatctaaaaagctgtgaatgttgttaatcatttagccgttgcacttaatgtagaggaaatgcaaaaaaaaaag

SEQ ID NO: 33059 - DNA, 414 bp, Homo sapiens
cttgttttctttttataactcatggcaggcatctgttttaagtatagaacccagatgatctcttaggaagccttttattcgtgggaactcgaacttgaagcacaagttcctggtttgaatcctggctctgattttttactggctgtgtgactttgaacacatctcttagtccctcttaggagtactttccttattggcaacttatggactcgctagtgattaaacgaggcaatgactgtgagcgagcctggcaggtgccccgtggtacattcacagcacgggcacagctgctgtgccaggactgtgactcattcccagtaaaaggcacttatcgaagctgataaccgtccttcatcaccgaagtgtgagtagagcatgacttatttagtattctgcctcaatggggaatttttg

SEQ ID NO: 33060 - DNA, 441 bp, Homo sapiens
tctgtattggctattactttgtataaacacacgatttttataaactttgtaccacaagagagagtgtagcacccattttacagtgccatgcgcatcagagaaagaaactgcatgtttgttgttgatgatgaaataaaaatgctagcgacagtcaaaaaaaaaaaaaaagggggggcccttttaaagggtcccttagggggcccaaatttaacgggggctggcaaggatatatttttttctttttggggaggcattttatacccggggccctgcccggtttttaacacctcatggtggggaaaatcaccactttgggaatttttggaaagaaccttttttttggggggggattatatgtgccaaacttccttcaagaatttaaagcctttagggaaaattaactttttttagggttttatgtggccaccctcctccatttgt

SEQ ID NO: 33061 - DNA, 408 bp, Homo sapiens
  misc_feature (1)...(408): n = A,T,C or G
agggattgtggggtgacagttttacatttactttttcttcttaatgcagctggatctaagtaaaatgttttgaagtttatcataaactaaatgtacttttaaaacgtatagggtcagggttgggggaaaaatacaggtatagtaagtaagaaaagtgacccatgaagaaagcatcgtgaggttgtatgttggttgactgtgattaaaatgcggggctggtgtaagttgtaagtggtggctgattgccgtgtaactatgtacatgattgttgggatggctgtcccatattttgtatattggaataaaaatttctataaattattgtaactaaaaggaaatattctaaattaagtcccactttttaagtcacatggcttctgtcttgaaaatttacctttaaaagaattn

SEQ ID NO: 33062 - DNA, 475 bp, Homo sapiens
  misc_feature (1)...(475): n = A,T,C or G
nttgatagcgtgtagtaccggataggaaatcctgcatggacccacgcgaactcctggccaccctcccctgtgcctcattgacatgtagatgactgactgccaatacttgtcaccattccctggaagcagctacctatgggaaacaagatgtagtgctattgccgataacaagtaagattttccacactacagctgggtgtttctcttttctaaagtgaggccagtgttatttcccgggagtgttcagacttgaccctaatcactgattttttctagttgataatagagcggttggcttttaaggatcagagactgtggcttggcacctgcgcccaggctttgtgggcctttgccccttagaaagtagctgtaggcaaagatttgtgattttccaattacagtctcagctctagatttagtatctctaattctttggttcccttctcttccctgaaatatattagcacctgccagc

SEQ ID NO: 33063 - DNA, 504 bp, Homo sapiens
  misc_feature (1)...(504): n = A,T,C or G
cgaaggggnnnatatgagntccgtagacnctgcncagaancnnngggncgacccacgcgtccgggagaggccatggccgtcccagccaagaaaaggaagttgaacttctcagagcgggaggtggagatcatcgtggaggagctggagctgaagaagcgcctgctggtgaaccacttcaacgccggggtacccctggccgccaagagtgcggcctggcacggcatcctgagaagggtcaacgccgtggccacctgccgcagagagctgcctgaggtcaagaagaagtggtctgacctcaagaccgaggtccgtcgcaaggttgcccaggtccgggccgccgtggagggtggtgaggcgccggggcccactgaggaggacggagctggggggcctgggacaggcggtggcagtggcggcggtggcccagctgtatccccagtactgctgacccccatgcaacaacgtatctgcaacctgctgggcgaggccaccattattagcctg

SEQ ID NO: 33064 - DNA, 488 bp, Homo sapiens
  misc_feature (1)...(488): n = A,T,C or G
tggaagttgccccnagcnnnnnnnnaccttgatagccttgctggaccgccntcgaaancccgcgncgacccacgcgtccgccatttcttggacaccatatgagacattccccctcgtattagagatgctcaacctgcatcaacaaatctaaagcctgcatctggctaccctggggcgagtcctgtttacagtgcctattcctggagctcgcctctttttgccttttgtttgattatgtgatgtattacttttcccagcaggccagtgctagcatactggaagagggatttaataagctggcacccttgatgctatgctcctaatccaaccttatttgcctcattggccatttccattatggtggcagccctccattccagccacagcagcccctcagcgtcccccagtcacactgtccccattgctgctcatctgtgcctttgtccatctacaatgcccttatttcactctgcctgtgggagtcctgg

SEQ ID NO: 33065 - DNA, 417 bp, Homo sapiens
  misc_feature (1)...(417): n = A,T,C or G
atagtttgaatagtgtgtgctctgactcatccatgacccctaagctcccaagatctcccaaatccgcaggccccgtttggcagagttgtggctcatggggatgacagagcagaatgtttagggtttctgcccaagagggagaccaataaaataggatgacaagtcttacgatgtccctacttctaaagagaaggtaagaaatcccgtgctgaacatccactaggttctgggtatatactttatacacacatggcccctttattcctctcagtgaccctcagggtaggtctcactacccaagtgttagagtgaaggacgctgagaccaagaagaggaacaggtcagggtcagacagagctggaatttggacacagttctgtctgactccagatattccttgtatcacacaatactgtn

SEQ ID NO: 33066 - DNA, 403 bp, Homo sapiens
  misc_feature (1)...(403): n = A,T,C or G
catttttcatgaatcatgataaaatttccacagatacttcccttagaaaatttgctataaactctgtatcattggtagcacaaatttgagcgaggccttgtcaattttaaggtggaaataggaaggaccacaacatgacccgtaagtcaagaaggtagacatttcatatccagcttccttgcttagtctcctttcagtatttggcaataaaagaaagaagaaatagaacagctgaagtctcaaatcattgtctggaattttcctcaccttggctagctccacctgctctttgtctaaggcccttgcctcatcagggattagaactggcccatatgccagaacctgtactaaatgcctaatttgtatggaagagngcatatttaatctcttttctatactgctc

SEQ ID NO: 33067 - DNA, 401 bp, Homo sapiens
ttgtaagttcctaaaaacattttattaaacaagtagacattttgttattaaaaaaaaaaggaaaaaaaaggaaaaaaaaaaggaaaaaaaaagggggggggggcctttttaaaaaaaccctgggggggcccaaattaaccgctgctcgaaaaagtaaaatttttctcctaaaaggggggttataaaaacataggacctgccccgcttttaaaaaactggagaagggaaaaattttttcttgggaattttttaaaaaaaacccttttttgggggggggcaatattgggaccaccccccccaaaaaaattaagtttcgagaaaaaaaaaaaaatttttaaaaaaataaaggggaaaaccgccccttatccctttatgtgggaaaaattcttttaacaattaat

SEQ ID NO: 33068 - DNA, 415 bp, Homo sapiens
gacagctagctttcctcacctcaggattctaggtaggcagataatcactccaagtgaaggttatagattgtatcctagatccccttctgctgtttccgcttcatatgaaacaaccttgtctcaagaaagagattctactatatttggtataaggggaaagaagttacatttttcatcttcttatgctcataaagcatcttccattgccaaatcctccagcttttgttctatggaaagagatgaggaagactctataatcgtctcagaaggaataattgaggaatacctagcattcgatcacatagatatagaagagggatttcatgggaagaaatcagaagcagctacagagaaacagaaattagggtatcctcccattgctccattttactgcatgaaagaagatgtccttgct

SEQ ID NO: 33069 - DNA, 149 bp, Homo sapiens
  misc_feature (1)...(149): n = A,T,C or G
gnggccgcannganaagtgtgggncnttaagcacataaatacaacagaatagccacccaatttcttgctgaaatctaaattggatggatttgaccatcattctattatctttgatttctacaatgcctatatcttattacctataactg

SEQ ID NO: 33070 - DNA, 411 bp, Homo sapiens
  misc_feature (1)...(411): n = A,T,C or G
ccaagcggaagatctccagcctgtccttcaccctggaggaggaagaagagggaggcgaggaggaagaggaggcggccatgtatgaggaggagatggaaagggaagagatcaccacgaagaagagaaaactggggaagaacccagacgttgacacaagcttcttgcctgatcgagaccgtgaggaggaggagaatcggcttcgggaagagctgcggcaggagtgggaagccaagcaggagaagatcaagagtgaggagatcgagatcaccttcagctactgggatggctctgggcaccggcggacagtcaagatgagaaagggcaacaccatgcagcagttcctgcagaaggcgctcgagatccttcggaaagacttcannganctgaggtccgcaggggtggagcagctcn

SEQ ID NO: 33071 - DNA, 406 bp, Homo sapiens
cccacgcgtccggtgaaatgttaaccctctaaactttttctgttcagagcatcagatgaggacttcattgggttttatagcggctgatttttggtagtccattgaagaagagagtttgaaagttgtatactgttaatgactgtctgcccatgtcctgcctgaaataccatgattgtttatggaaagtatctttaataaagctggatacagtttgaaagaaaaaaatactctaaaataaaaaaaattcgggggggcccttttaaagaacccttttgggggccaaagtttttcctgcgtgtgccacgtataacttttttccttatggggggcggtttttaaactaaggctcggggcgtttttttacacgggttgaatggaaaaatctctccctttggattttttggaa

SEQ ID NO: 33072 - DNA, 415 bp, Homo sapiens
aacaagctcatttcagtttctggcaaccccgtgtatttccgttttccccctaaagaacatatcataatcattgcacaaataaccatgttctttggtaatgaagccagaaaagaaagcgcaaaagaatggtgactcatttggactcttatctgtcttggaatgtcactgcttcattgccttctctgattgccttttgcatgtaaaactatgtgtctggagtcttttgccatctggatcttagtacctctttattatgtgcaatttattcctcaggtgtggaaatttctactgcaattgactacgtttgattattttgagcttgtgaaagatttctgaacagtgattgtcccgttaatagcccctcagaagatgttccctgctgataacagcatcctattttacttacttttatagc

SEQ ID NO: 33073 - DNA, 432 bp, Homo sapiens
  misc_feature (1)...(432): n = A,T,C or G
ctctgtggccgntagcacggttttctttccgcgttcccgagaaaccaacggattaaaaggacgtttaaagatgtgtgaggaaagagctcaccgctgaagaaggctgctgcatcactgaacttcttatcactaacatagcgagattttagtttggacgaatttgaggttataggggagatagcgatggcagaagactaggtggaaatggcacatctaggttggctgcagtcgaaacggtttgagcgtggtcgctgtggctcatcgtcggcaccaattaacgaagcgatgacatctgcgttgttaggggtttcttaaactgagttggtataaatgcgaagcgtcagggttcccgccggcttcgagcctttcttggcggatttgtatcttgagctgatttctgcggaagcccacatctcgctttgatccgcaccg

SEQ ID NO: 33074 - DNA, 409 bp, Homo sapiens
ataaacttgaagtttttagttttaagttacattcattgcactagcaagaacctgaagatattaccaacatagaactcgcggatgcttttgaacaaatgtggcagaaaagacgctacaatgagctactgtttattattgatacttgccaaggagcatccatgtatgaacgattttattctcctaacataatggctctagctagtagtcacgtgggagaagattcactctcgcatcaacctgatcctgcaataggagtccatcttatggatagatacacattttatgtcttggaatttttggaagaaattaacccagctagccaaactaatatgaatgacctttttcaggtatgtcccaaaagtctgtgagtgtctactcctggacatcgcactgatctttttcagaggga

SEQ ID NO: 33075 - DNA, 408 bp, Homo sapiens
attctgtaatacagatattattgcattttacaaattatgaaactgggactcagcatgattaaagctctaggtcacagagctactaagcgtaaactagtaaactaggaatcaaacccatgcagtccgactccagagcctcaccattactatacctcctatatctgagtaaggaggaggaaaagccatttttagctgtacttctttgaaacagagggaactccttccaaaggtcctagagcaaagttgctgtaattattatcccataattttctaagatccaagcaatactactgtggcacgttacttggcatgtggtatctgacttgccaacagcttcaggctaaagagttagttaacctcctaaggccagtttgtctaatgtacaacctcagatgcgatgatagaatg

SEQ ID NO: 33076 - DNA, 407 bp, Homo sapiens
gttctctcattgaattatcagaccccaagaggagatattggaacaggctcccttcatgccaagggtctttctaagttaatactgtgagcattgagcccccattaaaactcttttttacttcagaaagaattttacaggttaaagggaaagaaatggtgggaaactctccccgtaatgcttagccaactttaaagtgtacccttcaatatccccattggcaactgcagctgagatcttagagaggaaatataaccggtgtgagatctagcaatgcattttgaatcttcactccctaccaggctcttcctatttttaatctcttcacctcagaactagacatatggagagctttaaaggcaagctggaaggcacattgtatcaattctaccttgtgctatacgtaggag

SEQ ID NO: 33077 - DNA, 399 bp, Homo sapiens
aggatattgtgattcagcaggacgattagatccgcttaaagattgtggggacccgtgtggacaagaatgacatttttgctattggctccctgatggacgattacttggggcttgtaagctgagcctggtggcctcctacccttggtcctactctaggaagtgggattgtcacacttatcatgttgtccagaggtccagtctggctgctgttgtggaggcaaggaaggcaactcatcccaaaaggcatctggtgcttcttgtaacttaactactgcctcctcatttttcagtatgtgttctaagtataaaaagtccttggttctcatgaaaaacaaaaaactttacccaaaccatgaggtaggggcggaacccctttgaaacctacctacccccgtcccc

SEQ ID NO: 33078 - DNA, 480 bp, Homo sapiens
  misc_feature (1)...(480): n = A,T,C or G
cggggcncaatgatacgccgtagaacccctgcganaccccgccggaattcacgcgtccagctacacgtccgctggcagcattntgaactgcatcttttttggtaccttaacctgcagaaacagtgtgagaaattaagtcctggttcactgcgcagtagcaaagatggtcaaggccatggaaaaagcagaaatttaccaagaaagctgatacccatgtatagttcccactcatctcaaatacatctgctatctttttaagctaagtcctagacatatcggggataacatgggggttgattagtgaccacagttatcagaagcagagaaatgtaattccatattttatttgaaacttattccatattttaattggatattgagtgattgggttatcaaacacccacaaactttaattttgttaaatttatatggctttgaaatataagtataagttgctaccattttttgataacattgaag

SEQ ID NO: 33079 - DNA, 409 bp, Homo sapiens
cggacgcgtgggttctccctatgtttatttttgtacatttgagccatgtcacacaaactgatgatgacaggtcagcagtattctatttggttagaagggttacatggtgtaaatattagtgcagttaagctaaagcagtgtttgctccaccttcatattggctaggtagggtcacctagggaagcacttgctcaaaatctgtgacctgtcagaataaaaatgtggtttgtacatatcaaatagatattttaagggtaatattttcttttatggcaaaagtaatcatgttttaatgtagaacttcaaacaggatggaacatcagtggatggcaggaggttgggaattcttgctgttaaaaataattacaaattttgcacttttttgtttgaatgttagatgcttagtgtg

SEQ ID NO: 33080 - DNA, 416 bp, Homo sapiens
cgctgccatatcagttattattggatctgaattggttgataagactttttttatagcagccatcatggcagtgcgctataaccgcctgaccgtgctggctggtgcaatgcttgccttgggactaatgacatgcttgtcagttttgtttggctatgccaccacagtcatccccagggtctatacatactatgtttcaactgtattatttgccatttttggcattagaatgcttcgggaaggcttaaagatgagccctgatgagggtcaagaggaactggaagaagttcaagctgaattaaagaagaaagatgaagaatttcaactaaccaaacttttaaatggaccgggagatgttgaaacgggtacaagcataacagtacctcagaaaaagtggttgcattttatttcacccattt

SEQ ID NO: 33081 - DNA, 415 bp, Homo sapiens
ggaaagaagtcctttttgcatttgaagagtctattggttttctctgtggaacttcagttttggataaagatggggtgagtgcagctgttgtggttgctgagatggcatcttacctggaaaccatgaatataacattgaaacagcaactggttaaggtttatgaaaaatatggttatcatatttcaaaaacttcctatttcttgtgttatgaaccacctaccatcaaaagtatatttgaaaggcttcgtaattttgattctccaaaagaatatccaaaattttgtggaacatttgctatattgcatgtacgggacgttaccactggatatgacagtagccagcctaataagaaatcagtgctgcctgtgagtaaaaacagccaaatgattacatttacttttcaaaatggctgtgg

SEQ ID NO: 33082 - DNA, 408 bp, Homo sapiens
aaagtaattaaagatgtcaatcagaaatgtcaatgagactaaagtggttttgtaaatctcagctatatttagcaacactccatgtagctaatattttttggtagcatctggtagaccttagaatgttacatagccagtaggttctttattcaaattttaagtatcttaagaatagtagggcagtaacagttacttttgagagttttctggtcaagcttttaccaggcattctctagccttggtacaaaaaaaaaaaaaccggcgggtggcgcaaatacctaggctggcccattttatgcttttcagcaaagccttgggatactatggcacctgggaaatacgggtcggcatcaagttaattcggaagttggaccgctagtatgttgaaagttattgggatggttttgg

SEQ ID NO: 33083 - DNA, 460 bp, Homo sapiens
  misc_feature (1)...(460): n = A,T,C or G
actgataccctctggaccgccnctgaaancccgggncgacccacgcgtccgctggttcactgagacaaaaacacagagatggctagattgtgagagtttgctgcttacacctcatcaccaaggagaagcatttttgaaacattgagctaaaggaaaaggcttggctttttccattcctgctagactctttctccaaaccactcccccatccaggctggcacggctgctagaagatttggtaggaggcttattaccccctccaccctccaactattccagtatcttcatctcgggtcttaaaataaaattcaaatgtatagaaaactgaaggagtcacattttaaaaattaagtcacatttttaactttttttgtgtgaattttttctacagttctcaaaattttcagtaagtttctgccccttgtcagtttatctggcagcaaaaaaaaaaaaagcctan

SEQ ID NO: 33084 - DNA, 406 bp, Homo sapiens
ctcagatttctgctcatgatctacatagatttggaaactgttttcctctgttttggtctcttgggcaacatttttggcccaagtttgggcaacatttggcccaagtttgggcattttggcagtagctgtatgggagaaaaagagtaagaggaaatattcccacagccatgaagggtgaaagggcaccttgtgcctagactagggctgcctggtcagtcccaggtgaggccaagggctttctggccatctcagggaggggccaccaggttcctcccctcaccccatattccatcaccttcctcctctgctctgggtggtaagggaagccctcctggttcccacaggctatgatgctgcatggcagaggcaggtataacacagcactacatattggaaattttttatt

SEQ ID NO: 33085 - DNA, 488 bp, Homo sapiens
  misc_feature (1)...(488): n = A,T,C or G
gaggtccgcnnttatgatgntccatgagngacgtgcgcgaaannncccggncgacccacgcgtccgcccacgcgtncgctcagaacccgggctctccccctgcttttggggttaacaaaacaccttttcacagaagctggggtccctcccccatccctgataccatcacccagaagctgggtggggaatgggaagctggaggagggggttagagttagaccaatgcgaggagctagtatgagctcgcctctccgtgacttccccccatgcaagggcggcccaaggcttcccctgatatccaaagcaggacagcagccccttggtgggattctaactgctgctactctgtttctttcctcactttgctttccaaggcggcatgtgaaccccagctcaggcctgtgcagacaggaaattctcccctgcagcaagtactgggaggtggtttgcggtatgtgacctccttccatatttgacggcattgagtg

SEQ ID NO: 33086 - DNA, 414 bp, Homo sapiens
gagccgggtgacagcactaaccagacctccagccacttacagctctttttaaaaaacagcttcaaaatatgcagcaaaaaccaatacaacaaaacgagtggcacgatttatttcaaactaggccagctgggattccagcttttcttctactagtctgatgttttataaatcaaaacctgggtttccttctctgacatttttttttggtttatgatctttggcttttttttttttttggcccaatcctgggggggttgcggaaaaaaaaatcacaaaaatttacagggcgggggatgttccttttttgacagcgaattttaaaaacattttttttttgcaggggttttttttgaggcggcctggctgcgtgaaaaagatttttttggacaaaagtccttttctgttcaaaaaaaa

SEQ ID NO: 33087 - DNA, 475 bp, Homo sapiens
  misc_feature (1)...(475): n = A,T,C or G
gaggtcanntttggagagctcganancgtcgcggaantcccgggacgactccacgcgtccgagctaattttgtatttttggtagagacaggggatctctatgttggtttggctggtcttggattcccgacctcaggtgatccgcccacctcgggctcccaaagtgctgggattacaggcgtgagccaccatgcctgcccagcaataccaaccattgtcttttaaattcgtgttggcttctcagacagggagatcactggaataaaataaccgatggtcttattttgtcacacgtaaatcaaaagaaatgtcctctttgaagttgtaagactccaccaatgacagacacccttttcggaggactctgagtggtgagaagtgtttttatatgcttggaaactaggagtatctcacttttcactgagaacccctggccccaatccctcttaaaatagggagtgccattggactgcgga

SEQ ID NO: 33088 - DNA, 407 bp, Homo sapiens
tgacctcaaaaaaaatttgaaaagatagaagacattattagttcttatcctcttttgtaggaaaccaagagtagccattgtggcaataattcatcagttgattttaaagcttcatgttatgcaaaaaagaatcctgctgttatacatgtgacagtgactttgtgctgaaatttcagctattccagataaacattgtatatcttgtaaattaatgtttaaaggtagttttgttcttacagaaagtgttgattgccaggttgcttatagcactttaagttattctaaaaatgaaattataagccaaatatttggcttaagtagatttagttgcatagcacttacatatttagttcttttgaaagcttagataattatttaaagaaagcataatgctaatggaaaagaaa

SEQ ID NO: 33089 - DNA, 408 bp, Homo sapiens
ctttggtgaagtacctttaaatctttagtccattaataacaatttggttagtttatcttattgctgacttcaaagggttataatatatgctgcatagcatatcttcatcagttatatgatttgcatatattttcttccattctgtggattatctttcaatttgatgacattccatttttaatttttttaaatggattgtgcttttgtcttcttatttaacgaatatttctgtaacttaagggcataagagcttatcctattccttcttctaaaaggtgggttttaatttttacaattcagactataatccatttttagttatttttgtatgtcgagagatacaggtttacacttaattatttattttcacatatggatatctaactgtaccgcaccatgtattaaaat

SEQ ID NO: 33090 - DNA, 413 bp, Homo sapiens
actgtgaacaaatcattcacaaacagaataaaacagatccaacaactgtattttaagggtcacttgcctcctgttgacacaattgttgctaaatcaaaagaagcgttgtccaggtgtgtctacatctagtgttacttttaatgagaatttgaatgtttattgaacaatagtacttgaatgaacatttataaatgtaattattgcgatcactggttaagaatgctttatatatccttataatatttttcactgatcaaaatgttgctctgctttttcatttcttaaggaatacatgtttgggatttttattttttacgtgtccgaagataagctccaggtcttatcgtatcccttgccatctgaacttagttgcactgcttctgtttgaaagagcatcttgaataactttcccg

SEQ ID NO: 33091 - DNA, 472 bp, Homo sapiens
  misc_feature (1)...(472): n = A,T,C or G
gctcgtgncttcatacagcctacagataggcctgcaaaaccccggncgacccacgcgtgcgcccacgcgtgcggatgttttaaaggcttctgggctttttttcttagttttatgctgtggtacttggcattgaacaactagaattcataatgcagatttttagaggtgaattattttaaataactgagttgtaatagagaagtaatttatttgaaattattttaggaaatggaagataaagtgactagtccagagaaagcagaagaagcaaaattaaaagcaagatatcctcatctgggacaaaagcctggaggttcagatttcttaaggaaacggttgcagaaagggcaaaaatattttgattctggggattacaacatggctaaagcaaaaatgaagaacaagcaacttcctactgcagctccggataagacggaggtcactggtgaccacattcccactccgcaagacn

SEQ ID NO: 33092 - DNA, 415 bp, Homo sapiens
  misc_feature (1)...(415): n = A,T,C or G
ttgtctagcccccctgctgggtgcttgttcagcccccactctgggctgtggagtgggtgggcaacgggcctgggtagctgggcccaggcaacccacccctccacctctggaggtcccaccaggctattaaaggggaatgttactgcnnaaaaaaaaaaaaaaaaaaaaaaaggggggggcccttttaaaaaaacccttggggggcccaaatttaccgggggggggaaaaaaaaaatttttttctttaaggggggggttttaaaagggggggcggggccgggtttttaaaaccccgggaagggaaaaacctcttcctggggatttttggaaaaaaacctttttttgggggggggaaattttgggcccaccccccccccaaaatttaaggcttttggggaaaaaaaaaatttttaag

SEQ ID NO: 33093 - DNA, 411 bp, Homo sapiens
gcaaccaaggactccctggccatggacccaccagttgttaaccggtctaagaaaagcaagaccaagaaggcccctataaagactattactaaggctgcacctgctgcccctccagtcccagctgccaatgagattgccaccaacaagcccaaaataacttggcaggctttaaacctgccagtcattacccagatcagccaggctttacctaccactgaggtaaccaatactcaggcttcttcagtcactgctcagcctaagaaagccaacaagatgaagagagttactgccaaggcagcccaaggctcccaatccccaactggtcctgagggtggcactatacagctgaagtcacccttgcgggcctaaagctaccagtcatctcacaaaaaatcacgctccatttggcag

SEQ ID NO: 33094 - DNA, 409 bp, Homo sapiens
ttcctcctccaccacccaggcctgagatactgatgtagcagttcttaggaagaccccttgggaaagaatctttctttagacccatacttactgttcctcaaatgcctgcagcttgcccgggagtcgtctctgcaactggccaacctagagcccccctgatgactggcatagcctgggctctgccagcgcctgtgggagacgctgtgcctcccagtgcaggtctgcggagtgatccctccatcatgaattgggagagaattacagacaggctgaaaactgcctttccacagcaaaccagaaaggaacttacagatttcttacggaaattgaaggatgcttatggaaaatccttgtctgaactgacatttgatgaaatcgtttgcaagatttcccagtttattgaccccag

SEQ ID NO: 33095 - DNA, 414 bp, Homo sapiens
gaggtaacaacagtgggagaacaaataggaacagttcactgggatgttggtccccagaaattggctttcattgaataattcctaaagggtgtcgtgtgctgaattgctttttcatagtgatgtgctgcttcttgttcatactcttatgactttaatttcacctttatctactcccagcctctgtatatgcctacgtttttaaaaataatttttggcactgaagatctgattaccatattttttcagtttaaaaattaaatcctcgcaaatagatctttggtatagttgcattctaccctaggttattttctaggatcaagaatagaacaatttctgttctttccagcattactctttactattcatatgttcttgttcagtgttttgttgttctcatattctaggtggaaatga

SEQ ID NO: 33096 - DNA, 408 bp, Homo sapiens
tgttataaatctagctttctttatgatgtttctgataatacgagaattgaaaactttaccttctcttgtacatagtcagactatttgtattaaatttacatttcattctaagttcaaaagtttgaaaattattagttttgcaagatcacacactaatgtaaccattttatgaaggttgaagtggatttatgcaggcagttctatatatagaaatacaattctttttaaatttttaggaccaatacaaaataacaaaaatgtaatggaatcagactgaattaaagtaaggctgtatattgaaagtcatattataaaaggtttgctttctttaagtgttatttatcttaaattataatcgttaaatgtttggaagataatttttgaatcataacgtcagcataacttcat

SEQ ID NO: 33097 - DNA, 409 bp, Homo sapiens
gctccgggagaggaagcgcccatctctgtactcccattcatccctatcctgtcctttcccccttgccagacaacaggagaacccgtgaactgtgtaaataaaagtctgctttttctattctgaaaaaggacttacctaggaccatggcaaataatctctaacaatttacctggaaattaaggaattgggggtattttgttctggcaacaggaaatttacccttctgctgaaatccaagatattcagtgctctgcagaagcctctccccctcacagatctctgcggctgctgattggtaaaggaagcttgaggagggaactgcagccctaggaatctgggtgaatggggttccaagggcccctgggctgggaggaacttggtatgaatgtgcatgaacacataatagctc

SEQ ID NO: 33098 - DNA, 417 bp, Homo sapiens
agttatcctgcgacctccggttgttcatgttgatccttatatactttaagcagaagaaaaaattgaagtagaaactcggtctttgtaatttttaggatgtagagagttctaatgaggaatcattttcatgtgccctgacatgtacacatgcgaaaacattcctaaaagcgtgtttatttgctttattttttttcatcatttatcccatttatttcttcttagtgggcattatggaagaatatattaaaatgtgtaatataccacaggttggtatatttagttttaaatacttaccataaagtctttcagtgtaatttttttttgagacagagtcttgctttgtcacccacgctggagtgctgtggtgttacctcaactcactgcagcctccacctcctgagttcaagcgattctccg

SEQ ID NO: 33099 - DNA, 415 bp, Homo sapiens
cctttgggttatccactgccttaaaattatacctatttcatgtttaaaaagatatcaatcagaattggagtttttaacagtggtcattatcaaagctgtgttattttccacagaatatagaatatatatttttttcgtgtgtgtttttgttaactaccctacagatattgaatgcaccttgagataatttagtgtttttaactgatacataatttatcaagcagtacatgaaagtgtaataataaaatgtctatgtatctttagttacattcaaatttgtaactttataaacatgttttatgcttgaggaaatttttaaggtggtagtataaatggaaactttttgaagtagaccggatatgggctacttgtgactagacttttaaactttgctctttcaagcagaagcctggtt

SEQ ID NO: 33100 - DNA, 402 bp, Homo sapiens
aggtgacctgagcatctctgcagaccgcctgagtgataagcgctctcccaacgactttgccttatggaaggcctctaagcccggagaaccgtcctggccgtgcccttggggaaagggtcgtccgggctggcatatcgagtgctcggccatggcaggcaccctcctaggggcttcgatggacattcacggaggtgggttcgacctccggttcccccaccatgacaatgagctggcacagtcggaggcctactttgaaaacgactgctgggtcaggtacttcctgcacacaggccacctgaccattgcaggctgcaaaatgtcaaagtcactaaaaaacttcatcaccattaaagatgccttgaaaaagcactcagcacggcagttgcggctggccttcctcat

SEQ ID NO: 33101 - DNA, 479 bp, Homo sapiens
  misc_feature (1)...(479): n = A,T,C or G
natagatcaccgtgaggtaccggatagaaatccctgggacgacccacgcgtncgaaatccttgtgacagcaggagcatatggatctctttttaacaccattcaagcatttattgatgagggagaggaagtcatactaatagggcctttctatgactgctatgagcccatggtgagaatggctggagcaacacctgtttttattcccctgagatctaaacctgtttatggaaaaagatggtctagttctgactggacattacatcctcaagaactggaaagtaaatttaattccagaaccagagctattatactaaatactccacataacccacttggcaaggtgtataacagagaggaactgcgagtaattgctgacctttgcatcaaatatgacacactctgcatcagtgatgaggcttatgaatggcttgtatattctggaaataagcacttaacaatagctacttttccaggtatg

SEQ ID NO: 33102 - DNA, 441 bp, Homo sapiens
  misc_feature (1)...(441): n = A,T,C or G
agcatacgttttgcaagcgatgtttgctggggatcgtaggttctcgaaatgaactcagatgtcccgagtgcaggactcttgttggctcgggtgtcgaggagcttcccagtaacatcttgctggtcagacttctggatggcatcaaacagaggccttggaaacctggtcctggtgggggaagtgggaccaactgcacaaatgcattaaggtctcagagcagcactgtggctaattgtagctcaaaagatctgcagagctcccagggcggacagcagcctcgggtgcaatcctggagccccccagtgaggggtatacctcagttaccatgtgccaaagcattatacaactatgaaggaaaagagcctggagaccttatattcagcaaaggtgacatcatcattttgcgaagacaagtggatgaaaattggtaccatggggaan

SEQ ID NO: 33103 - DNA, 434 bp, Homo sapiens
cacgagagaggatttggcgccctcctctgtggattctggccaggccgggttcggcggttgctgtgagagcgggcttcccaacaccatgccgtgcgccttctctgtcagctctttccccgtcagcatcccagccgtactcacgcagacggactggactgagccctggctcatggggctggccaccttccacgcgctctgcgtgctcctcacctgcttgtcctcccgaagctacagactacagatcgggcactttctgtgtctagtcatcttagtctactgtgctgaatacatcaatgaggcggctgcgatgaactggagattattttcgaaataccagtatttcgactccagggggatgttcatttctatagtattttcagccccactgctggtgaatgccatgatcattgtggttatgtgggtatggaagactt

SEQ ID NO: 33104 - DNA, 427 bp, Homo sapiens
tcgcttagaggttgacgatggcaccccaactaccatgtcccacatagccaaggatgtgtgcaccttcctgcgctgggcatctgagccagagcacgaccatcgaaaacgcatggggctcaagatgttgatgatgatggctctgctggtgcccctggtctacaccataaagcggcacaagtggtcagtcctgaagagtcggaagctggcatatcggccgcccaagtgaccctgtccagtgtctgcttgccatcctgccagaacaggccctcaagcccaagagccatcccaggcctgttcaggcctcagctaagcctctcttcatctggaagaagaggcaagggggcaggagaccaggctctagctctgggccctccttcagcccccatcatgggaataaattaattttctcaatgtaaaaaaaaaaaaa

SEQ ID NO: 33105 - DNA, 418 bp, Homo sapiens
cactgatgagcaaactactgtggaacagcagtctgtattcactgcacccactggcattagccagcctgtaggcaaagtatttgtggaaaaaagccggagattccaggctgctgatcgttcagagttgataaagaccacagaaaacatagatgtgtcaatggacgtgaagccttcctggaccaccagagatgtggcacttacagtgcaccgggctttcaggatgattggtctcttttctcatggattcttggctggctgtgctgtgtggaatattgttgtgatatatgttctagcaggagatcagctatccaacctctcaaaccttctgcaacaatacaagaccctagcgtatccattccagagtcttctgtacttgcttttggctctgagtacaatttcagcttttgacaggattgac

SEQ ID NO: 33106 - DNA, 419 bp, Homo sapiens
  misc_feature (1)...(419): n = A,T,C or G
cccacgcgtncgaaggtgtcaacaggaaattgggaaggacgggcctatatccctcctacaaagttcgagagaagatagaaacggtcaagtaccccacatatcctgaggctgagaaataaagctcagatggaagagataaacgaccaaactcagttcgaccaaactcagttcaaaccatttgagccaaactgtagatgaagagggctctgatctaacaaaataaggttatatgagtagatactctcagcaccaagagcagctgggaactgacataggcttcaattggaggaattcctctttaacaagggctgcaatgccctcatacccatgcacagtacaataatgtactcacatacaacctgtttgcatgttatatgnnnnnnnnnnnnnnnncnnnnnnnnnnntanaatattttttt

SEQ ID NO: 33107 - DNA, 405 bp, Homo sapiens
ccacaaactaatgagtggacacagatggctttcttgaatattgggagagcaggtgcctgtgtggtagtcatcaagcaaccttgacttattgatattttacttggaaagattttacttgctggagtggttatttttatattgaatggcaagaatgagaacttccagagatgaaaactcttcaagaacaaggatctctgtagcgttacctactgatgttgaaagagttagtagatcaaacagaatagtaggaaacaagaaaacattaaacttatacaggaaaaatgtctggccatatgttagttagttcgggaatggttattggtaatttgttttgtattatagcatacaataactagagttaccaaaggcttgttttttcttgagcagttgaaaggagagaccaat

SEQ ID NO: 33108 - DNA, 418 bp, Homo sapiens
aaaaaatggacaaagatgaagaggctttgtaggcagctcaagctgaactcaaggaggcccgtcgccagtggcaccacctggaagtgaaaggatgaatctctccatgctgtggcacggtgccatgaaaactcattacatgccagcgagcagcattaccagatgcagctgcaagacctagagactgtgattgaaggactagaaccagagctaccggaagtacggcgcgtgatctgaaagcatattcgagagcactagatgcttctcaacacgatgatgaggctggaacaagaaatagcaacttatcgccacctcctagaaaaagaagaaatcagatattatggttgtatccacggtgggaaaaaaagacaaaaagcctaccacaagtagagttggttttgttttaccatcagccattata

SEQ ID NO: 33109 - DNA, 407 bp, Homo sapiens
agcaatgttaaatcattcaggttttattttctgccctgttgcagaaatttaaaaaatgatattgggacctggaaggtttaatatagttcacagtgcctgaattacacctgctccgaaaactagctttgtatttcttatgactttgcataagaactgttcatctttggatcttgagcaccttacagataaaactttttatggcatctctttcatggacagtgattgatcttttcacaatgtatgtagcctctaaaatttcgtacataagtttgctctttttttgtacagactatttagttggtgagaaaacaggggcggcttcctaatttggcctttatcctgcgacaacacttttagaagactaggctcttcttatcttaccgattaccagcacccctagatagttg

SEQ ID NO: 33110 - DNA, 414 bp, Homo sapiens
  misc_feature (1)...(414): n = A,T,C or G
agaaggaacagggagcagagagacccaactgggagccagagatggaacttcaggtcttaagtgcaaatcaaagcaaaaaacaaacaaaacttacatggaaaaactgtaagtgctgaaagcaagtttagccatgacaaaccaaagagtgcccaggtcagccaagaaagatacataatctcatgggacttcagtgggagttacacaggaatgttgaagaatcattcttctttttcatgcatttgtccttctcccacccccttactacaccctagcagatcagctgagtgtactttattccaagaacttactggatctctggttttctcctgaagttggggcaggtgcaattccaagcataaccaccagatggcagagtgaccgcgcatacctgcttncaagaataaaacaagtctg

SEQ ID NO: 33111 - DNA, 417 bp, Homo sapiens
  misc_feature (1)...(417): n = A,T,C or G
agcccgggccgggcagacaccgcgccctgccgagcggtttcccccagtgcggcttttcaccgaggaggagctggcccgctatggcggggaggagagttttatggacgaggagccccctacaatgccttgacggggaaggactccactagaggggtagccaagatgtccttggatcctgcagacctcacccatgacactacgggtctcacggccaaggaactggaggccctggatgaggtcttcaccaaagtgtacaaagccaaataccccatcgtcggctacactgcccggagaattctcaatgaggatggcagncctaacctggacttcaagcctgaagaccagccccattttgacattcaggacgaattttgatgttccccctgcaagaacaaggttcttgggagcgtgaggcag

SEQ ID NO: 33112 - DNA, 415 bp, Homo sapiens
aaatttaaaatgctagctgctcaagagttttcagtagtatatttatgaactaattttctgcagcttttagtttggaaaaaatattttaaaaacaaaatttgtgaaacctatagacgatgttttaatgtaccttcagctctctaaactgtgtgcttctactagtgtgtgctcttttcactgtagacactatcacgagacccagattaatttctgtggctgttacagaataagtctaatcaaggagaagtttctgtttgacgtttgagtgccggctttctgagtatagttaggaaaaccacgtcaccgaaccatatgatgtataatagagtattcccgttacttaaaaagaagttctgatatgttcgttctgtggaaaagaaactagtaaaattactatttctaaccccaatgaaag

SEQ ID NO: 33113 - DNA, 500 bp, Homo sapiens
  misc_feature (1)...(500): n = A,T,C or G
agggcccaactgtagctgagggcntgcggcggaagccccgggncgacccacgcgtccgggaagatgtatcaagaaaggtgttgggaatttttcccagcaggggattgcttccggaaacagtatgaagaccagctagagtaaactcagacccagtcacctctaaaaaccaaaaccctacccctctctctccctctctcaatttctctgctctcttggaaacattttgctgattttgtgaattgccagcgttgtgtgttttctgggagcatcgaagctctgtttcggaagagctggttcctccccccaccttttgtatttactttgagactaaagactgaagaataatctaaattcatactcagacaaaaaaaggaattctggaaagaaaaccattctggacactgtcataacacacatagatagattttcttctgagactcccggagtcttctcgagctacgagaccttcacagagacacgtggcagccacactcacccan

SEQ ID NO: 33114 - DNA, 408 bp, Homo sapiens
acacggacctcactgaacatcctttagtgaggggctgtgctgtagtttaaacaaaacccaaactcctcatctggctttgcctgagtctcttgagctcccctctcccacttgccaccctgcgagctctgctctagcacgggggcctccctcctctgttcctgacacctccacaccctctcctatcttaaggacgtcgctgctccctttgactgctccagcctcttctgtctgagttgccttctcctgagttcagactgagcctacggcctctgagaggccttcgttgacaagcctgcctagtgtaggctcctgatcagcctgtctcgagccccatttatttttccattcatttctctgttttacttactggactctgaaattaccttgcttatttatttgttggctaat

SEQ ID NO: 33115 - DNA, 418 bp, Homo sapiens
acacggacctcactgaacatccattagtgaggggctgtgctgtattgtgaaacaaaacccaaactcctcatttggctgggactgagtatctggagctcccctctacacacttgccaccctgcgagctatgctctagcacgtgggcctccctcctctgtgcctgacacctccacaccctctcctatcttaaggacgtcgctgctccctttgactgctccaccctcttctgtctgagttgccttctcctgagttcagactgagcctaccgcctctgagaggccttcgatgacaagcctgcctagcgtaggctcctgatcagcctgtctcgagccccatttatttttccattcattggtctgatttacttactgagctctgaaagtaccttgcttatgtatttgggggctaatttattgag

SEQ ID NO: 33116 - DNA, 409 bp, Homo sapiens
gctgccaggtggtcagcgtgtttacggaggaagaggacagctttgatttcattggtggatttgatccatttcctctctaccatgtcaatgaaaagccatccagtctcttgtccaagcaggtgtacttgcctgcgtaagtgaggaaacagctgatcctgctcctgtggcctccagcctcagcgaccgaccagtgacaatgacaggagctcccaggccttgggacgcgcccccacccagcaccccccaggcggccggcagcacctgccctgggttctaagtactggacaccagccagggcggcagggcagtgccacggctggctgcagcgtcaagagagtttgtaatttcctttctcttaaaaaaaaaaaggaaaagaaaccttccaaaggaaagggcaaaaccccacatg

SEQ ID NO: 33117 - DNA, 407 bp, Homo sapiens
taagaaaccatacaagaaaaagaagtccctcatctatctgcatacacgcaatgtgggagaagtggggtggctaggaaactctgggcctgctgcccccttcgattctttttttttttctttgggaatggaaggtacgatacaaagggtaggccttcatgtgagccagttactacatgaatcttcatttcccacaggggttggttcattcatcagcgttaggctgggtcctggctccacctttttcctctccgggcactgaccccacctttccgggtatttactgtaggctattaaatatgatcatgacccgccttgcattttcattcatcacctgtttatgcccaaatttaaaggaagtttgtctcattttgccagaaaaaaattgtaatagtcggcacgctggattg

SEQ ID NO: 33118 - DNA, 408 bp, Homo sapiens
atgtcttttaaaaaattgaaaaacaaagtgttagactgtgtgcgtgagaggtgatgggcactcaagagtcccgtgagtcatccagccctgcctttcccctgcgcccccatcctctcacgtcccgccctgcctccacttggggaccctgcctcgtgtcgtctttatctgcctattactcagcctaaggaaacaagtacactccacacatgcataaaggaaatcaaatgttatttttaagaaaatggaaaataaaaactttataaacaccaaaaaaaaaaaaaacgggggcccgttttaaaggacccctgggggggccaaagttaacgcgggcgggcaaggttatagttttttccttatagggggccgaattaaaagcagggccgggcccgtcttttaacaaggccgggg

SEQ ID NO: 33119 - DNA, 408 bp, Homo sapiens
tatgcacagctactgattgatttattcaaatatttagcgcctttccttagaaatgtggaactcaccaaacctatgcaaatcctctacaagggcactttaagagtgctgctggttcttttgcatgatttcccagagttcctttgtgattaccattatgggttctgtgatgtgatcccacctaattgtatccagttaagaaatttgatcctgagtgcctttccaagaaacatgaggctccccgacccattcactcctaatctaaaggtggacatgttgagtgaaattaacattgctccccggattctcaccaatttcactggagtaatgccacctcagttcaaaaaggatttggattcctatcttaaaactcgatcaccagtcactttcctgtctgatctgcgcagcaac

SEQ ID NO: 33120 - DNA, 474 bp, Homo sapiens
  misc_feature (1)...(474): n = A,T,C or G
nttagatcaccnttaggnaccgtagaggaactttcgggtcgacccacgcgttcgcgctcactacctaccagagaacactggttggattctttaagaaaacagctcgaatgatgtcccaaattcatgaagcctgtattggctttcatccgtatgattttgtagctctcaagcaactacaagacacgccaagcaggattagtgaagacaatatagatgaacaaataggcggttttcttactgaacagctcaataagctagtgtctgctgatgaggaagcaagctttgagagtgaacaagcgaacacagatcacaatgaaaaacattctctgatgagagaatttggagcacctcagttttctaactctgagaatgttgcaaaagatctacctgtagatgcattggaaggagaagattttgagaacgaattctcatttctgaacaacctcctaaggtctggttcttcaagtactagtg

SEQ ID NO: 33121 - DNA, 415 bp, Homo sapiens
gcgtataagacttacaaggagaactttctgaagtgcttccattttaccaagatgcctccatatctaatcttttgtatcaagagattcactaagaacaacttctttgttgagaagaatccaactattgtcaatttccctattacaaatgtggatctgagagaatacttgtctgaagaagtacaagcagtacacaagaataccacctatgacctcattgccaacatcgtgcatgacggcaagccctccgagggctcctaccggatccacgtgcttcatcatgggacaggcaaatggtatgaattacaagacctccaggtgactgacatccttccccagatgatcacactgtcagaggcttacattcagatttggaagaggcgagataatgatgaaaccaaccagcagggggcttgaa

SEQ ID NO: 33122 - DNA, 471 bp, Homo sapiens
  misc_feature (1)...(471): n = A,T,C or G
ggcagtccatacctaaagcttcggtaaggacctcgaaancncgnncgaaccacgcgggcggtcttctgccttcctcttggggaaaggcgccttgttgtgatgaattatctcactgttagggcagggtggagaatggtacggcttccttctgctgtccactgggggggaagcttggcaggtatattatatttcatcatttacgaggctggcatgaccaggacttatgggtgggaggggagcatttttagtgaagcaagaaaggagtttgccaagaagtgatctgttttaaaggtcatatttggagaaagggcaaggaattgggtctgctttatttttgggggtattttgtttttgttctcacctgctgcccccccaccccaccaccccagggataaattggatataaacactaaatactaatcagttgaacttaacatttaataaaaagaaagggtgaaataaactgaagag

SEQ ID NO: 33123 - DNA, 435 bp, Homo sapiens
ctggattgtatatctcggtagtaaagcacatgctcttcacggtctaaggctcctgttaggggagggagaaatgttgaatcaagagggaaaacaactactatgatttataaacatattttaatgtacaaatttgcatttaaaaggagtggccctgatttctgcgctaaaaccccatttggtgctattgagattgttctttattcttttatcccagcgaacattgtcgatcttgctgtagggaaaaattagactctttgaatctccaaacacggaagttccagcattcccttatggatcataggaaccttataggcctgaaattgttgcttacagtgtacctgcccctcagattcaagtgaatatacccccttctccctttacccttctccagagataaagcaggtgacagggttttcagaatcttacaaaaataag

SEQ ID NO: 33124 - DNA, 419 bp, Homo sapiens
cccacgcgtccgctcagaacccgggctctccccctgctgtgggtggaaacaaaacaccttttcacagaagctgttgtccctcccccatccctgataccatcacccagaagctgggtggggaatgggaagctggaggagggggttagagttagaccaatgcgaggagctagtaagagctcgcctctccgtgacttccccccatgcaagggtggcccaaggcttcccctgatatccaaagcaggacagcagccccttggtgggattctaactgctgctactctgtttctttcctcactttgctttccaaggtggtatgtgatccccagctcaggcctgtgcagacaggaaattctcccctgcagcaagtaagggaggtgggttgtgggatgtgacctccttccagatatcaggcagtgagg

SEQ ID NO: 33125 - DNA, 479 bp, Homo sapiens
  misc_feature (1)...(479): n = A,T,C or G
ggcagttgccnaggnnnnnncactgaaaccncctagatagcctccaaaacngcgncgacccacgcgtccggtcaccagtaattgtgcttttcagacagtagtgcattttcaaaatcgttgccatcactgggctgatgggctgggagaaccttgccatgtgcgtgcctgtttcctgcccccttagtcactgcccatttcctgcccccttggtcgctgacacaccttcacccaaagtgccatggttctgatggtggcagttccatctccctgacatcaggaagcttttctcgatcagagcagagcggggcctgcctgccctcgtgtcactggatttctttctcttataatcagctgaaacagagttctcaaagaacagtaaactcaggttcagaggtattatggaataagaatggtttcatagtttggcttttctatataattcctccctctcaaactgaaatattcatttttttagtggg

SEQ ID NO: 33126 - DNA, 408 bp, Homo sapiens
gcagttccttacagccctgctgctggggttgatttttaactttagtcattttctgaaaggaaagaacaggagaaggaagaattgatggaatggtggaaaatgatgtcagaaactttaaatttttaaaaaggcttctagttagctgctttaaatctatctatataatgtagtatgatgtaatgtggtcttttttttagattttgtgcagttaatacttaacattgatttattttttaatcatttaaatattaatcaactttccttaaaataaatagcctcttaggtaaaaatataagaacttgatatatttcattctcttatatagtattcattttcctacctatattacacaaaaaagtatagaaaagatttaagtacttttgccatcctaggcttaaatgcaatatt

SEQ ID NO: 33127 - DNA, 442 bp, Homo sapiens
  misc_feature (1)...(442): n = A,T,C or G
ctggattgtatatctcgttagtaatgtacatgctcttcaggttctagggctcctgttaggggagggagaaatgttgaatcaagagggaaaacaactactatgatttataaacatattttaatgtaaaaatttgcatttaaaaggagtggccctgttttctgtgttaaaaccccatttggtgctattgagtttgttctttattcttttatcccagtgaaaattgttgatcttgctgtagggaaaaattaaactctttgaatctccaaacaaggaagtttcagcattcccttatggatcagaggaaccttacaggcctgaaattgttgcttccagtttagctgcccctcaaattcaagtgaatattttcccttctccctttacccttctccagaaataaagcaggtgacagggttttcagaatcttaaaaaaaaaaaaaaaaan

SEQ ID NO: 33128 - DNA, 441 bp, Homo sapiens
tcgccatggcccggggccccaagaagcacttaaagcgtgttgcatcgccgaagcattggatgcttgacaaactaacgggtgtatttgcacctcgtccatcgacaggtccccacaagctgagggaatgtcttcctctgatcgtcttcctcaggaatagactcaagtatgcgttgactggagatgaggtaaagaagatatgtatgcaacgtttcatcaaaattgatggcaaggttcgagtggatgtcacataccctgctggattcatggatgtcatcagcatcgagaagacaggtgaacatttccgcctggtctatgacaccaagggccgttttgctgttcaccgcatcacagtggaagaggcaaagtacaagttgtgcaaagtgaggaagattactgtgggagtgaagggaatccctcacctggtgactcatgatgctcgaa

SEQ ID NO: 33129 - DNA, 420 bp, Homo sapiens
cccacgcgtccgtcaaccccgagatgctgaacaaagtgctgtcctttctgggggtcgccggccagtggcgcttcgtggacgtgctggggctggaagaggagtctctgggctcggtgccagcgcctgcctgcgcgctgctgctgctgtttcccctcacggcccagcatgagaacttcaggaaaaagcagattgaagagctgaagggacaagaagttagtcctaaagtgtacttcatgaagcagaccattgggaattcctgtggcacaatcggacttattcacgcagtggccaataatcaagacaaactgggatttgaggatggatcagttctgaaacagtttctttctgaaacagagaaaatggcccctgaagacagagcaaaatgctttgaaagaatgaggccatacaggcagcccatga

SEQ ID NO: 33130 - DNA, 440 bp, Homo sapiens
ttatttttaatattaagaaattcaatataacttttatcacactctgtggaacattaaaccgtataaaaatgtagttataactatttttaattgccaaggtgttgtttgcttttttcttttaaatattttcttaatattttgtcagattaactagatgaataaataaatctagtattaaccgcattatgaattaaataattttgatttaatgaaagggataatatgatttccagtgtttactgtagtgtatcttgtacagataacatgtatttttaaaggaaaaaaaacggaattgaagctattttttcttgcatttctaattgacctgagggacattccgtttgaaatgtactgaagttacagcttctggctttttctccttatttttcttataatgcttgaaatgtctaactattaaaaaagacaattggaaaatgtta

SEQ ID NO: 33131 - DNA, 434 bp, Homo sapiens
tctccttggcgaccagcagccaaataattctgggaatggaggagggaagggagctctcagcagggcggccaagagaggcagccctcacttcccagaaaacttcaattcctcattacctgtgtcagctggggttcaatcaggagacagaaaccacaccagttagtttgaaaagagaattcagcataaggaactgataatgaggtatgaagttgttaattaggtaaggagagggtaaggagagagaagagtaagctttcatgggggttgcacctgcaggagcagctaccactccagggctggagaaccctaaggaagagttttgaaggagggttccagagcctgtgacccagacatctgaggagggggctcaactcagcgggagctggggtctccgggtgtgaagaaaggactcctgcacccagacctctgcggag

SEQ ID NO: 33132 - DNA, 405 bp, Homo sapiens
  misc_feature (1)...(405): n = A,T,C or G
acccattctccctgagagcgtagttactgcttcccattccttgttggcagcctcgagtgtagtccattagtgatcagattccagtttggacagggtggctggattgtatatctcgttagtaatgtacatgctcttcaggttctagggctcctgttaggggagggagaaatgttgaatcaagagggaaaacaactactatgatttataaacatattttaatgtaaaaatttgcatttaaaaggagtggccctgttttctgtgttaaaaccccatttggtgctattgagtttgttctttattcttttatcccagngaaaattgttgatcttgctgtagggaaaaattaaactctttgaatctccaaacaaggaagtttcagcattcccttatggatcagaggaacct

SEQ ID NO: 33133 - DNA, 441 bp, Homo sapiens
cggacgcgtggggatatccaaagaatgagtaagaatgaggtaattgagcaagaaaacattgcttcaggcaaaggaatagtatgtgcaaaagccctggggtttaagaatatgatgtttttagagaactgcaaataattcagtatggttggagcagagggatgtggaatgattattgattctgttggagagtagacagaggccagattgctatgcttagatacaatttcaaccacctacaaatccatctaattacctacatgaccatcatcatctggtcatgtttctccattttatcattatgtataccttaaagacttgctcacattacttaaaattgagataggttaggcgtctatccaatctcccatgccagtaattctacagaaacagattaggttagctagataagcatgtttacaattaaatttatgctgtatcctt

SEQ ID NO: 33134 - DNA, 417 bp, Homo sapiens
agttaagtcaatctatcttcagtttttctctggcctttttggtcaaacacaagaggcttccctagtttacaagtcagagtcacttgtagtccatttaaatgccctcatccgtattctttgtgttgataagctgcacatgactacatagtaagtacagaacagtaaagttaaaacggatgtctccattgatctgccaaatcgttatagagagcaatttgtctggactagaaaatctgagttttacaccatactgttaagagtccttttgaattaaactcgactaaaacaagtggataactaaactaacaagattaaatatcccgccacgacagtgttttttaaggcaaataaggatgattagcttaccctgagataacacatcagtaagaacattaacaatgtctcatgatgtaaaaa

SEQ ID NO: 33135 - DNA, 416 bp, Homo sapiens
cctgtgaccctattagtggagcccaccctctaagcttgtgcccctctcagggccttggcactggcagctcctctgagtccctggggtccttgggaaggggcctagtagcctgggattacaggcacccgacaccatgcctggccaattttctgtatttttagtagagatggggttttgccatgttggaagcttctgcctggcctggcgtcattacctctagaacttgggttctggctgggcgtggtggctcacgcctgtaatcccatcactttgggaggccgaggcggctggatcatgacgtcaggagttcaagaccagcctggccaagatgctgaaaccccgtctctgctaaaaatacaaaaaaattaggcgcggtggcgggcacctgtaatcccaccgactcgggaggctgaggg

SEQ ID NO: 33136 - DNA, 407 bp, Homo sapiens
atttctgaaatgtaaatattctctttttataaaaattattatcacagctaaacaaattaccagtagttcttttatcctcatatacccggtgttcagattttctagattggctcctaatttttttacagattatttgaatctgattcaattcatgtactgtaatgtttgataacttaagtaccctttataggttctcttttacctcttctttattaaattccttgtaatttgttgtactaaatagattgccttctagaatttcctgtagtctgaattatgtagtattgtttcacatgttccagcggcctcttatttcctgtggagttgagagttagatctagaagcttgaattaaatccagattttttttctttagatcatcaactttagaccatcaacttggatcat

SEQ ID NO: 33137 - DNA, 417 bp, Homo sapiens
  misc_feature (1)...(417): n = A,T,C or G
aacttcttttctacagatgtttgacttatgagatgaattaattgaaaaagtcaaagcctatcaggagctatcttatatgatgttggtagcctgtgaaaaaataaatgtcttttttcttatacaaactgataacaagacttgctttcacaattactatttacatttttgtgcatataatgcctgtatattatactcatatttgaaagtgatcagaaagtgttatttaacagaaactacatacattttttatgtctctctggaccctttgattctaagtaaatttacagtaagttagcagtaatagactattcttttcaactatgaataaaaatgtacactgaagtaccnnnnaaaaaaaaaaaaaaaaaaaaaaaaaaaaaaaaaaaaaaaaaaaaaaaaaaaaaacgacgcgccccg

SEQ ID NO: 33138 - DNA, 406 bp, Homo sapiens
tgattttaaaatgttttggtgaatgtgaaaactaaagtttgtgtcatgagaatgtaagtcttttttctactttaaaatttagtaggttcactgagtaactaaaatttagcaaacctgtgtttgcatatttttttggagtgcagaatattgtaattaatgtcataagtgatttggagctttggtaaagggaccagagagaaggagtcacctgcagtcttttgtttttttaaatacttagaacttagcacttgtgttattgattagtgaggagccagtaagaaacatctgggtatttggaaacaagtggtcattgttacattcatctgctgaacttaacaaaactgttcatcctgaaacaggcacaggtgatgcattctcctgctgttgcttctcagtgctctctttc

SEQ ID NO: 33139 - DNA, 459 bp, Homo sapiens
  misc_feature (1)...(459): n = A,T,C or G
gggggggtnntttgattcatcgcatcgccacacatccagtcaccacgcgtcgccgagatgccgtgaaatgaacatgacatacgggcttttgcttttgaactacagatgcaacatgcattgggggaaggcgagcatggtcttttgtgatacttaatttttacatatcccagtctctgtatgtatctgcatagacgaagaaaatacaaactcctgctttgcttttattgaagggtttccaggactgcgtgcctgctcctgagctctggtttaagtatgagtatcctttgcttgtattctggattacaaaaataaaaaaaagaaacctttattgttgagcatgttggcattggcccctttatttttttctctttttgggacatatgaagcaaggnattctttttctgtatctttttttcttttgaaaactttttttttgttttgtttaaaaatggctttatg

SEQ ID NO: 33140 - DNA, 400 bp, Homo sapiens
ttactcacattttgtgtggaacatcacacatatcacataaaaaactatattatgaacaaggacttgctaagaagagtcttggtcttgatgaattcaaagcacacttttctggccttgtgtgcccttcgctttatgaggcggataattggacttaaagatgaattttataatcgttacatcaccaagggaaatctttttgagccagttataaatgcacttctggataatggaactcggtataatctgttgaattcagctgttattgagttgtttgaatttataagagtggaagatatcaagtctcttactgcccatatagttgaaaacttttataaagcacttgaatcgattgaatatgttcagacattcaaaggattgaagactaaatatgagcaagaaa

SEQ ID NO: 33141 - DNA, 567 bp, Homo sapiens
  misc_feature (1)...(567): n = A,T,C or G
ggagcgcngnnnaattgatcngatcgatggacccgtcgcagaannncccgggnnncgacccacgcccgtccgaagaaaggaagaaannactcaagggccaagaagganngggtgatgtatagggggagctcannagggaccanctcctgnctctcanngaaaggacncnnccacttggttgggtnntctagcgccgcgactctgtgcccanncctcctnnttggttcccttaagcccnncagctccccttggtttttcctgggggccttcaacagaaatcccccactgggtcccctcccttcnttcccctggttatcctggtctaataanccccccacacatacancctctggtgacctatttgcacagaccgtcgtcttccctccagtcttctgagggataggggacattccatcccaagcttctcccttacccacacctatccttttgaggggctttggggtggggctggggcaagcagagggactgggtcttcacttcttgggctaataaaattgtttctttgtggactaaaaaaaaaaaaaaaaaaagggcggccgctttaan

SEQ ID NO: 33142 - DNA, 414 bp, Homo sapiens
gcctggcgctgctgctgctgctcggcctcggactaggcctggaggccgccgcgagcccgctttccaccccgacctctgcccaggccgcaggaaccaatgagatcctcccggaaggggatgccacaaccatggggccccctgtgaccctggagagtgtcacctctctcaggaatgccacaaccatggggccccctgtgaccctggagagtgtcccctctgtcgggaatgccacatcctcctctgccggagaccagtctggaagcccaactgcctatggggttattgcagctgctgcggtgctcagtgcaagcctggtcaccgccaccctcctccttttgtcctggctccgagcccaggagcgcctccgcccactggggttactggtggccatgaaggagtccctgctgctgtcag

SEQ ID NO: 33143 - DNA, 422 bp, Homo sapiens
atcttgcccaagaagagctggcacgtccggaacaaggttaatgtcgtccgcgtgcggcgtgacgaggcccaggcccgggaggaggagaaggagcgtgagcggagggtgctgctggctcagcaagaggcccgtacagaattcctacggaagaaagccagacatcagaactcactgcctgagcttgaagcagcagaggcgggagccccaggttctggccctgtggacctgtttcgggagctgctggaggaagggaaaggagtgatcagaggcaataaagagtacgaggaagaaaagcgacaggagaaagagaggcaagagaaagctctgggcatcctgacatacctgggccagagtgcagcggaggcacagactcaaccctctttgtaccagctacccccagggcgagggggcccctcgcccgg

SEQ ID NO: 33144 - DNA, 405 bp, Homo sapiens
caaaaataaagagatttgaatgcaaaactttatacattaatgtacatttctaatgatggtacaaagtgccactttataataaaaaagaaacaggtgggaataataatcaaagcacgtgttccttcagtactttggtgatttttaatcccccttgtgatgcacaggaaattattttttagttacaaaaagttatcttagaaatctatacttcccaatacagatttcatgataagtcatatcaaattgagaatttgtggtgaaagaataggaaaaggatgctagatgctgatctttctttttcaggatttttcctggagcccaagttaaaaattcaatacttaaatctaagttaagcgaaaattaataatgttcagaatgatgtattgagctttagtaacagacgga

SEQ ID NO: 33145 - DNA, 443 bp, Homo sapiens
  misc_feature (1)...(443): n = A,T,C or G
attggatacatttggcattgggctgagtgtggtggctcatgcctgtaatcccagcactttgggaggctgagacaggcggatcatctgaagtcaggagttaaagaccagcctggccaacatggcaaaaccccatctctaccaaaaatacaaaaattaaccatgcgtggtggtacacgtctgtcatcccagcagctcttaaggctgaggcacaagaattgcttgaacccgggaggcagaggctgtagtgagccaagatagcaccactgcactccagcctgggagacagagtgagactccgtctcanannaaaaaaaaaaaaaaaaaagggggggggccttttaaaagattccttgggggggccaaatttaacgcgggatggaaaggaaaaatttttttctttatggggagggtattaaaaacctgggcccgggccgggttttaan

SEQ ID NO: 33146 - DNA, 413 bp, Homo sapiens
agctcagatgcacaaagattcacaccatattggccaatttatagaatcccccaaccccaagacactgcaccctatgggctataccctcaggcagggccctgcttttctaggaattgactccaatgcagaatagtgagaaatcaacaaaaagcaaaataagacaattccagacactcctgaatttacttggatttaaagaggttaataaaaacaaactataaactctctagactgggctgacagtaaaagcacagaatacaaaacccaagggatggggctgggaggggctgtgaggggctggcacctcagctcagaaaaggtagcagcaatcccaaagcagcagaaggcaggggttaaatcaggataaaaacagacatcagtggaaatcgaaaccaatagttagttaatataaa

SEQ ID NO: 33147 - DNA, 412 bp, Homo sapiens
atggaagacattgaaaccatcctgaatacactcatttatgatggaaaagtggagatgacgattattgctgcaaaagaaggcacagttggcagtgtagatggacacatgaaactgtacagggcagtcaatccaatcatccctcccacgggtttggtccgggcaccctgtggactctgcccggtttttgatgactgccacgaaggtggtgagatttcaccatctaactgtatttacatgacagagtggctcgaattttaatagagagctatgaactttattgacattttgcaaatgaagttacttagggagcagataatttaattcatgatggaacacgaaatctccttgaaagcaaacttcacaataatggacgtagacttgctgctatgaaaacatattttttttatttatg

SEQ ID NO: 33148 - DNA, 405 bp, Homo sapiens
ggtggcgcgcgcgccatttctagtcgttttcaaagcgcctcgcgctgattctcacgggcccggctgccggcccccgctctgccctggattggtagcttatgtcgatcttgatgaaagagcaattgatgctctcagggaatttaatgaagaaggagctctgtctgtactacagcagttcaaggaaagtgacttatcacatgttcagaacaaaagtgcatttttatgtggagttatgaagacctacaggcagagagagaaacaggggagcaaggtgcaagagtccacaaagggacctgatgaagcgaagatcaaggccttgcttgagagaactggttatactctggatgtaaccacaggacagaggaagtatggtggtcctccaccagacagtgtgtactctggcgt

SEQ ID NO: 33149 - DNA, 412 bp, Homo sapiens
  misc_feature (1)...(412): n = A,T,C or G
cccacgcgtncgaatgagtaactctgtaaggaggaccatgtcatactattgtaagctaagcattaggactgatacaaataatatatgctcctggcatagaaaaataaaccacagagaacgagttcaaagaatagcaaagaaagaaagaggacccagtgggcgaaagatgagagtgtacttttaccaaaagttatctaagcctgagcacttgaagtctgcacataaataaataaatgacaaaagaaagaaaaaaaggccaaaaagtctacattgcgtgtgtggatggatgaatgagcagtgggagtgcagcgccaggtgacaagatgttgggaggggttttgagtcatccagtcctgggcactgaggtctgttagatgaaaggatatgagaaaggtaatattggtaaataaag

SEQ ID NO: 33150 - DNA, 477 bp, Homo sapiens
  misc_feature (1)...(477): n = A,T,C or G
atttgagtccgtaacccatacacanancnnnngnangagggtccgaaaccacattttccagtgcatatggtgcagcttttaatttctaatttagctttttaattaaaaactcaccttttgctcctaatacctataggggttggtttccaattctgcttttctggcgggaactgaatctctgttctcccagtgatgagtgtaaccctctgtgtacaagtaggaacatcatgactgccatgcttgggccattggtataattatttctgctacctctgaagactgtggtgagggtagaatcaaagtggtccctagccatcgtcccccttttgaattggtagtcatcttgaatgtcacagcaacctatacttgtagaccatatcaggaaagtagaagcaagaattctgtcgtgtgctactccactccaagatgctgtaggtcatcaaaagctctgtgacttcacatgtgcaagtgaggcct

SEQ ID NO: 33151 - DNA, 423 bp, Homo sapiens
ggatttattcttgatggggttcctggaacatgctctggttttattaatcctattgcttaaatatagcctaccctatgaaactgtttattgggtacaatgtctcacctaatacccacctttttaatggtgagaatgggtaggaaatatgactgacatttttttctgcattcccatcacctacaaaaagggctgacctggagcccgcattaaacattttcccacatattgtggcattaacaatttttacttcatattcctttggaagaagacatataccggtaagctgaactgactttcctttagggagaaaaaattctattttatcacacgagagaatatttcacaataatttctatagacggacttctgatgtcgttcctaattataccttaggagaagctaaagtatctaagaaaacaaatt

SEQ ID NO: 33152 - DNA, 497 bp, Homo sapiens
  misc_feature (1)...(497): n = A,T,C or G
agagcacgggaggttttnnncttgatnaccgtcttggaatgcctacgccaagcttggcacgagggggcagcttattcataaggaagcccctcgtacttcatggtaaaccaactagaaagatacagctcctgacttttccaaacctaacaaaagaaaaaaacactgagggttttcttcactgtgtcagtgaaaaagaagactattacctcgacctggtaatatgcagcttatagagatgtttttcacctatagcatctccttgcactatcaattattttacctggtggttctcaattataattactggaaggcacttcaaaaaaagagatttttttaaaaagcagaaatggaaatatattaatttgccatgagagctataattgccaaatagactagatattcacatcaacctgaccagtacttcctctcatgtgggcatcctctgtaggaaaccaaattatcaggaagtcatgtggtagccacagaatcagaatgag

SEQ ID NO: 33153 - DNA, 423 bp, Homo sapiens
  misc_feature (1)...(423): n = A,T,C or G
gggtatttttcttgatataatagttaactgtatctttgtttcatactcattttgaccaagggcattagttgcatggtttaacaaatagtagaaaatagcctaaacttcacatctagaaaggcttaaagagggaagtggttattcctgagatcacgttgctagtaagtggcagaaaaggacaagaacccatgtgtcctgactccagaaggttggccagctatcttcatttatatgggactttcctggtttttgcactgaaagtctagctttcaggaaacccctcagtcctagacaaactggaacaattggccaccttgctcctataaggaacccacagaaagtctgtgtgtaggtatctgggatttaaagactcattctttctttaagataattatcaaatccataggcatgtactggcactan

SEQ ID NO: 33154 - DNA, 490 bp, Homo sapiens
  misc_feature (1)...(490): n = A,T,C or G
agaaacttgaaatccgttaaacctctcaccangnacacgccaagcttgggacgaggcgctaattagacgaatgcacagccttggacgtggagaaggcatagcgggtttactgtcaaacagtaaatacatgcattgacttcaagacagaattggccttggaagcctttttgaatgaaagctgagccggtgggcagtgcacctttctgagactgtctttggacagatctcgaagggtgggttttgaggtgccactgaagctctccttacattactatggtgggtgtgttttagatttggtctatggaggcctgctacccgaaataaaaaagaaaagaaagaatgaagaccagaaagaaaacagaagccaaccacaagagagagagagagagagactccaccaccactatggacaaagatatttctagagacctgatgcaaaagacattaaatgacattcttagattcccttttcccttataaacataaaaag

SEQ ID NO: 33155 - DNA, 419 bp, Homo sapiens
  misc_feature (1)...(419): n = A,T,C or G
ggcacgagctcatttgtattattattattatttttttgagtcacgggcttgctcttttttccatgctggagagcagtggcatgatcttggctcactgcagcctccacctcctgagctcaagtgacccttccacctcagtctcttgagtagtcatttgtaaatatttacacgctgtaaatattaaaacagtaatcctgcttctccactaaagtcagctccttataaaatcagatgttggatgcaaactgggttagatgtgggctgcatctagtttatcagtcatgtatgtgaccaacatgcagagcaatcaaaataaactttgattaaaaagcttagctgggctgggtatagtggcttacgcctgtaatcccagcactttgggagaacaaggcgggcagatcactcgaggtcaagagttn

SEQ ID NO: 33156 - DNA, 402 bp, Homo sapiens
ggcacgagctcatttgtattattattattatttttttgagtcacgggcttgctcttttttccatgctggagtgcagtggcatgatcttggctcactgcagcctccacctcctgagctcaagtgacccttccacctcagtctcttgagtagtcatttgtaaatatttacacgctgtaaatattaaaacagtaatcctgcttctccactaaagtcagctccttataaaatcagatgttggatgcaaactgggttagatgtgggctgcatctagtttatcagtcatgtatgtgaccaacatgcagagcaatcaaaataaactttgattaaaaagcttaactgggctgggtatagtggcttacgcctgtaatcccagcactttgggagaaaaggcgggcagatact

SEQ ID NO: 33157 - DNA, 489 bp, Homo sapiens
  misc_feature (1)...(489): n = A,T,C or G
gagcagggggttcnggttgaaaccatnttgaaatgcttacgccaagcttggcacgagggtctcaggatctgtcatatgtcatgttgcttggtgtgaagatggaagaacaaagtccacatcagtttctgctccttcaaacagtgtgtcgatatgaaacattgagatttggcagaaacatgtgcctagtttgcagcaccaaatactggtcttctcagaagtgtttctggtttttttttttgggtttgggtttgggtttgggtttggtttgggtaaattccctcttcgggcatcccaattggaaaaatttcctctttttttttccgggaaaaacaggagggcaggggctggaccccaaaaaggctaaaggacttttaccccccgcctaaaaggatttaatgggaagggaaaatgacagcaaacccctccgggaactttattgaccttataaaggacctttactaactgactttgggcacccggattgttgaa

SEQ ID NO: 33158 - DNA, 418 bp, Homo sapiens
ggcacgagcaggatgttctaccgggactggtggaactcaacgtccttctccaactactaccgcacttggaacgtggtggtccatgactggctgtacagctacgtgtatcaggatgggctgcggctccttggtgcccgggcccgaggggtagccatgctgggtgtgttcctggtctccgcagtggcccatgagtatatcttctgcttcgtcctggggttcttctatcccgtcatgctgatactcttccttgtcattggaggaatgttgaacttcatgatgcatgaccagcgcaccggcccggcatggaacgtgctgatgtggaccatgctgtttctaggccagggaatccaggtcagcctgtactgtcaggagtggtacgcacggcggcacttgcccttaccccaagcaactttctggg

SEQ ID NO: 33159 - DNA, 401 bp, Homo sapiens
  misc_feature (1)...(401): n = A,T,C or G
ggcacgagcaggatgttctaccgggactggtggaactcaacgtccttctccaactactaccgcacttggaacgtggtggtccatgactggctgtacagctacgtgtatcaggatgggctgcggctccttggtgcccgggcccgaggggtagccatgctgggtgtgttcctggtctccgcagtggcccatgagtatatcttctgcttcgtcctggggttcttctatcccgtcatgctgatactcttccttgtcattggaggaatgttgaacttcatgatgcatgaccagcgcaccggcccggcatggaacgtgctgatgtggaccatgctgtttctaggccaaggaatccaggtcagcctgtactgccaggagtggtacgncggcggcacttgcccttaccc

SEQ ID NO: 33160 - DNA, 407 bp, Homo sapiens
gggtttgaagggaggagtgaaggtttgaaatgttctgaagccttgcattgtccaggaaatggtaaagcactactttattttcaactataatgtgacaaggatacagtctgtagtaaaaaaacatagttaacaagacatagaggggaaaaaatggaataattttaaaataaagaaatcaagaaaggattttttaaaagtacagagaacagatgagataaatagaaaataggataacttcagcatgtctattattatgtgaaatgttaaagactaagcactacattaaaaaaaggaagacaatttcagattggtactgttccttgtggatcagggctaccccatgggcactgtgtctagagtagcagctcaaaggcagttctgcactcatacctacttttaattatatg

SEQ ID NO: 33161 - DNA, 423 bp, Homo sapiens
ggatcacttgaggccaagagttcaagactagcctgtgcaatatagtgataccctgtctctataaaaactaaataaggaaacagtgcagtcatccctttttgtccatggggtgttggttccagaacatcccatggataccaaaatccacacatagtcaagtcccttaggtaaagtcgtgccgtatttgcatataacctatgcacatcttcccatgtactttaaataatctatagattacttttaatacctaatgcaatttaagtgctatgtaaatagctattatactgtattgggttttttatttttttcttggtttgccctttctaatattttcaatccgaggttgattgactctgcagataaagtagactggaaaagtacagtcgtccttaggtgtatgagggagattggttctaggaccct

SEQ ID NO: 33162 - DNA, 403 bp, Homo sapiens
gggttccctctgaaggaatctacaccattttttaatatggagaataactgtaccccatgttagaagggctctttaggcatatttcaagatccagatctgaacccatactgggcagaaaaggacaagagcgcttacagccaagagccctgggaggaggtgagtaacaggctgagatccgggcaccaagcatcattagttagcactgaaattctcccaggacacaaaacaaatgtatggaaacatcgcaatacactatcatttactcacatgggacaaccacctaagtccatagcaaaactttacagatctagatgttatctcaagtcaggattccagatcaacatcctccatgtggagatgagacaactgagggtcagaaaggtggagtgacttatttgcccag

SEQ ID NO: 33163 - DNA, 560 bp, Homo sapiens
  misc_feature (1)...(560): n = A,T,C or G
gaatagtgggctaataatctgcgagtgcatattctaattacttcatacctatttcgtagttttacttgttatagaagaaagaaanagannnaccggttgataccgtttgaccagctacgccagcttggacgaggatttatattcagcataaaggagaataaattccattttacacatattctgaaaatggagtggttggtccctgccatttttcacacctctcttaattttagatctgttcacgcgagaggctgtgattttactcttgcctgtgaacctcatgcatgaaagcagcacattaaattgtaaaaatacaaacagatcgtgtgatcattcaaggagccagacatgaggtcctgcacgagggtgttgggaggacaccacagattcatctcagacagtgatcaggactgaggatggagttaaatcactcaccccctgggtggggtgggggggttcaaatggatgactgatctcctgagtacactgaagccacaggctggtggccatgttctctgaattgggtgcagaaaacaagggcagagtggctgcggccccta

SEQ ID NO: 33164 - DNA, 447 bp, Homo sapiens
  misc_feature (1)...(447): n = A,T,C or G
aaaagttgactggtggagccaactggcagcctaaagtagctccagcaacctggtcagcaggcgttccaccaagtgcacctttgcaaggagctgtacctccaaccagttcagttcctcctgttgccggggccccatcggttggacaacctggagcaggatttggaatgcctcctgctgggacaggcatgcccatgatgcctcagcagccggtcatgtttgcacagcccatgatgaggcccccctttggagctgccgctgtacctggcacgcagatttcttcaagccctacacctgccagtcagagtcccaagaaacctccagcaaaggacccattagcggatcttaacatcaaggatttcttggtaacaatttaagctgcaatatttgtgactgaataggaaaataaatgagtttggagacttcaaataaagattgatgctgagtttn

SEQ ID NO: 33165 - DNA, 387 bp, Homo sapiens
ggcctcgtgccaagcttggcacgagggaggttgtggtgctagtttctctaagccatccagtgccatcctcgtcgctgcagcgacacacgctctcgccgccgccatgactgagcagatgacccttcgtggcaccctcaagggccacaacggctgggtaacccagatcgctactaccccgcagttcccggacatgatcctctccgcctctcgagataagaccatcatcatgtggaaactgaccagggatgagaccaactatggaattccacagcgtgctctgcggggtcactcccactttgttagtgatgtggttatctcctcagatggccagtttgccctctcaggctcctgggatggaaccctgcgcctctgggatctcacaacggg

SEQ ID NO: 33166 - DNA, 423 bp, Homo sapiens
gggtgacaaacaaaaaacagctgggatatgtgcgttcttattgaaataaataggggcacttgaactgaggtctaaggaaacgaacattagtgttgtgctttgtagagaagagaccctagagaaagaccccaaggaagtgcctccgggtcgggggaaggtggtctctcgacagcactggaggctggctgaaggttttctagatgttctccaggcatggatgaggttctcttttcttccatcaatccagatggacagctctctgctccttttccaaactggaaagcctaaaccagttactccaatgaatgaagacgtctactaactgactcataagcacactgggtatttacaccggtaatctactaaagaaaatcgatgagcttgtggacgagctggaaacagccccatgaaggtgagcacagc

SEQ ID NO: 33167 - DNA, 475 bp, Homo sapiens
atagataccgtatgatttgattaacctcagcttggcacgaggcctcgtgccacgctccgctgatgcctgtctgcagaatccgcaccaaccagcaccatgcccatgactctggggtactgggacatccgtgggctggcccacgccatccgcttgctcctggaatacacagactcaagctatgtggaaaagaagtacacgctgggggacgctcctgactatgacagaagccagtggctgaatgaaaaattcaagctgggcctggactttcccaatctgccctacttgattgatggggctcacaagatcacccagagcaatgccatcctgcgctacattgcccgcaagcacaacctgtgtggggagacagaagaggagaagattcgtgtggacattttggagaaccaggttatggataaccacatggagctggtcagactgtgctatgacccagattttgagaaactgaagccaaaat

SEQ ID NO: 33168 - DNA, 381 bp, Homo sapiens
gggtagacttggaacccacagtcattgatgaagttcgcactggcacctaccgccagctcttccaccctgagcaacttatcacaggcaaggaagatgctgccaataactatgcccgagggcactacaccattggcaaggagatcattgacctcgtgttggaccgaattcgcaagctggccgaccagtgcacgggtctccagggcttcttggttttccacagctttggtgggggaactggttctgggttcacctccctgctcatggaacgtctctcagttgattatggcaagaagtccaagctggagttctctatttacccggcgccccaggtttccacagctgtagttgagccctacaactccatcctcaccacccacaccg

SEQ ID NO: 33169 - DNA, 437 bp, Homo sapiens
  misc_feature (1)...(437): n = A,T,C or G
ntttgaaaaccgctatgaccttgattaccccaagcttggcacgagggttggggtcggcttgcagtttggggtaccccgagggcggtgtacgtcggtaagattgtaacagtattactggaagacttattcgactgtcctgatgatacttgtaataggaagtgccgtcagaagcgataactgacgacgtctaatgtctatctgaccgcagtcgctgaaacctctacaacttaattgaccgtaactgccagagccctgccctgaattcctgtccttactccctctttaagattgcgtacccactgcagagtgctgaagacggggtagccacgaggtgagaggctctctggtgtagggtttaacatggaacgtagttttgtcacttgaatgcacggaaattggcgttttgacagttttctacgtttaggtgttttatacan

SEQ ID NO: 33170 - DNA, 381 bp, Homo sapiens
gggttggggtcggcttgcagtttggggtaccccgagggcggtgtacgtcggtaagattgtaacagtattactggaagacttattcgactgtcctgatgatacttgtaataggaagtgccgtccgaagcgataactgacgacgtctaatgtctatctgaccgcagtcgctgaaacctctacaacttacttgaccgtaactgccagagccctgccctgaattcctgtccttactccctctttaagattgcgtacccactgcagagtgctgaagacggggtagccacgaggtgagaggctctctggtgtacggtttaacatggaacgtagttttgtcacttgaatgcacggaaattggcgttttgacagttttctacgtttagg

SEQ ID NO: 33171 - DNA, 481 bp, Homo sapiens
  misc_feature (1)...(481): n = A,T,C or G
nttgaaaacgttnttagatgaccactccaagcttggcacgagggcggcccggcccgagccatgacggacgggatcctagggaaggcagccacaatggagatccctatccacgggaacggcgaagccaggcagcttcctgaagatgatgggctggagcaggacctccagcaggtgatggtgtcaggacccaacctcaatgaaaccagcattgtgtctggtggctatgggggctctggtgatggactcatccccacagggtctggccgccatccatctcacagcaccactccttctggccctggagatgaggtggctcggggcattgctggagaaaagtttgacatcgtcaagaaatggggcatcaacacctataagtgcacaaagcaactgttatcagaacgatttggtcgaggctcacggactgtggacctggagctagagctgcagattgagttgctgcgtgagacgaagcgcaagtatt

SEQ ID NO: 33172 - DNA, 413 bp, Homo sapiens
gggtatttacaaatgacatgatcttgtatacagataatactaaggaatctctaaaaactattagaactaataaacaaggtctggatgtttacagatgtaagatcaataaggaaaaatcaattgtatttctgtatagtatcaattaagtgaaattaagaaaaaaatccacctataataacatcaaaaagaataaaatactttggaataaatttaataaaagaattttaaaacatattctgaaaactacaaaaatatctcaaatagacattcattttcatgaatgagaagacttgttaagataacaatactctacaaattgatctatagatttagtgcaatctctatcaaaatttaagccatctttcttccacaaatggggacatgtcgctaaaattcatatggaattgcaaagg

SEQ ID NO: 33173 - DNA, 487 bp, Homo sapiens
  misc_feature (1)...(487): n = A,T,C or G
cctcgaacaccctntgttattaacgctccgaccangcntacgccaagcttggcacgaggtaaatgcaggggacgctggagtccgactcacctacaccggcttccttccagccgctggtgtgcggcacacacaacatctgcattaggcagaggtgcaagtgggctgattgaacttttccttcaaaacctgcttgtctgtcctggacctttgatgaaatgggatcctggtcacgcaggctgagacagtggggaccgccgaggccagagtgggctatgcttgagcagggatgagaagggccgcggcagcacgcagccttgacccacgcctgcgtcttgtggtgcaaggccagagggctctctctagaacctgaccgtgcactccatctcctgggagccacttttggcaagagtgagtgtggggggaaaaagtgtgcacaagagatacggaaccctgagctagggtttcctgtcaccaaagagtgagctgg

SEQ ID NO: 33174 - DNA, 398 bp, Homo sapiens
  misc_feature (1)...(398): n = A,T,C or G
ggggtgacaaggcccgcgttctctccttgaatccactcgccagcccgccgccctctgccgccgtaccctggacacccgcccctgtcctgggccaggaacttgctactaccagcaccatgccctaccaatatgcagcactgaccccggagcagaagaaggagctgtctgacatcgctcaccgcatcgtggcacctggcaagggcgtcccggctgcagatgaatccactgggagcattgccaatcggctgcagtccattggcaccgagaacaccgaggagaaccggcgcttctaccgccagctgctgctgacagctgacgaccgcgtgaacccctgcattgggggtgtcatcctcttccatgagacactctaccanaaggcggatgatgggcgtcccttc

SEQ ID NO: 33175 - DNA, 467 bp, Homo sapiens
agcggttttgtagcagtcgatctgactacgccaagcttggcacgaggggaggttgaagactcttgggaaagcctctcctggggccactgttgtgggtgggagtgagcccaccacataggccacaggcgggcccccactttaggcccaaggcctggggcggggggaacagtcactgggtctcatattctgagactgttgtttagcttacctttctgctaggattggcttcccgcagagggcagggcccatcctaagcagcttccaagtcccacaaaggtggcttgtgggaggatttggaaggagctgcattgtgggctgggagtgtgtggtttgggttcgtaccagcaagttgactatgaactgagcccatgaaagggggatgttttcctggtgtttggatggtcagctgggagtgtccatcatcaggggaagatcaaacacaggtgcgctcagctgcccagggcctg

SEQ ID NO: 33176 - DNA, 391 bp, Homo sapiens
ggaagagtccggctctgggacagctggagacagtggtggtgactgaaataactttaccaaaggaaagctattttgcgaactatcttctccagcggaaatggccaatgtgctttgtaacagagccagactggtttcctatctcccaggattttgctctttaaataaaagggttgtcaatcccaaagcctttttgactgcaggatcatcaggttcggatgagtcttatgtggctgctgcacctccacagatatgctctcgaacagtgcggcctgatgaaactatgggaccctttggacctcatgatcagaggttccagcttcctgggaacatagggtttgatcgccacctcaatgggactgcgtcacagaagaacaagcttggtcattaaaat

SEQ ID NO: 33177 - DNA, 391 bp, Homo sapiens
ggggaataatggcccttttaaccatgggcttcactgggaggtcatgatgcttcaagcccctagcacccagtgatacccccacaggtaagccctcagcatgctgaatacatcatgcgcagcctgggaaccttttccctcggacagcacaggaacctggctcatagtaggcacacagcaaacatttgtgaatgaatgggagtcatccacgcctgactcttctggctattgagggcccttgaatcttccgcttcctccccacccgagtcagggtgtccacatcacaaatacctccagatcatggagattcaaggccctagcacccagacacaaaaggggctttactcatatcttattgcttacgcgaccttatgagaggaatcagctagctcct

SEQ ID NO: 33178 - DNA, 418 bp, Homo sapiens
ggctaccttccaattcgagaagccctgaaggacaaagacgttggcatcttggtaaataacgtgggtgtgttttatccctacccgcagtatttcactcagctgtccgaggacaagctctgggacatcataaatgtgaacattgccgccgctagtttgatggtccatgttgtgttaccgggaatggtggagagaaagaaaggtgccatcgtcacgatctcttctggctcctgctgcaaacccactcctcagctggctgcattttctgcttctaaggcttatttagaccacttcagcagagccttgcaatatgaatatgcctctaaaggaatctttgtacagagtctaatccctttctatgtagccaccagcatgacagcacccagcaactttctgcacaggtgctcgtggttggtgcctt

SEQ ID NO: 33179 - DNA, 372 bp, Homo sapiens
ggggcttggccagacacatcacttacctccaggaatgtacaggcccccgggagcccacgtatcagctcgacatccacgacatctaactgctcttgctgcgcttcaccatggatcaggcgttcatcgcatacactggcgggggcgggcgggataacaacatccacctgaacccgtacatcattaacactgtgctttacgtcctgaacacaacccgagcaagtttccgagaagagaaaaacctcccaggctttctggaacaacccaaggagaaacggggggtgagtgcctttcaagcggaccggccctactattttacagttttggacctttacatcctgccccctgagcaccggagagccacacgtgtggaaa

SEQ ID NO: 33180 - DNA, 379 bp, Homo sapiens
ggtgcttggcaagacacaacacttacctccaggaatgtacaggccagcgggagcccacgtatcagctcaacatccacgacatcaaactgctcttcctgcgcttcgccatggagcaatcgttcagcgcaaacactggcgggggcggccgggagagcaacatccacctgatcccgtacatcattcacactgtgctttacgtcctgaacacaacccgagcaacttcccgagaagagaagaacctccaaggctttctggaacagcccaaggagaagtgggtggagagtgcctttgaagtggacgggccctactatttcacagtcttggcccttcacatcctgccccctgagcagtggagagccacacgtgtggaaatcttgcg

SEQ ID NO: 33181 - DNA, 441 bp, Homo sapiens
ggacaggagtttgtttcctgagtgtggagtgaggctgtcagtggatccgtgctttgtcggccagcgtttctgcagtctttgtaaaggccccacgagagcgggccaggccgtgtgcctcaggcccttctccctgggtgtgcttaagggggctccttgggcccgcctccccaggaggtagaaaatgagtggcaggctagagatttcacccattttgtgggctggagttaccagtagctccagcagttaccctgaagagagattgggcttcagccttcagcaggtggttctctcccatgcctggccttggtgtggaggggctgtactctgagcccaagtgagtcagctataggaagaggccatacctagagccaagaaccatgaaggcctgagagacggcagactgagcaaaattccttttttgagcacgagagcattactaga

SEQ ID NO: 33182 - DNA, 500 bp, Homo sapiens
  misc_feature (1)...(500): n = A,T,C or G
cgcgccccgcacgngnnntttgaatacgtgtacatctcaaacncganacgccaagcttggcacgagggaagatgctgccaataactatgcccgagggcactacaccattgtttaggagatcattgacctcgtgttggaccgaattcgcaagctggccgaccagtgcacgggtctccagggcttcttggttttccacagctttggtgggggaactggttctgggttcacctcgctgctcatggaacgtctctcagttgattatggcaagaagtccaagctggagttctctatttacccggcgccccaggtttccacagctggagttgagccctacaactccatccttaccacccacaccaccctggagcactctgattgtgccttcatggtaaacaatgaggccatctatgacatctgtcgtaaaaacctcgataatgagccgtcaacctatactaacctgaatagggtaataggtcaaattgcggccttcatcaatgctg

SEQ ID NO: 33183 - DNA, 379 bp, Homo sapiens
gggccgatgctatgaccaaaataaaggcaaatcccgacgggcccgaggctcatgcggaggcgtgttccggggagcgcacctaccaggagctggtgggcaaccggaaccccatcgcgcattccctggcttgttaccgcctcgcgctgaagctgtacaaatggattaagaaagcggcgaaacataaacatattcggcgcggggtgaaagaggtgcaaaaattcgtccacactggagaaaaagggatcatggttttggcacgagacacactgcccattgagggatactgtcatcttccagtcatgtgtgaggaccgaaattgggcctatgtgtatatccccactaaaactgacctgggtgcaagccgaggcttcaagcgccc

SEQ ID NO: 33184 - DNA, 372 bp, Homo sapiens
gggccggtgccatgaccaaaataaaggcaaatcccgacgggcccgacgctcaagcggaggcgtgtggcggggagagcacctaccaagagctgctggtcaaccagaaccccatcgggcagcccctggcttgtcggcggctcacgcggaagatctatgaaggcatcaagaaagcggtgaaacccaatcatagtccgcgcggggtgaaaaaggttcataaatttgtcaacaaaggagaaaaagggatcatggttttggcaggagacacactcggcattggggtgtactgccttctaccctgcatgtgttaggaccgaaaattgacatatgcccatatcccctctacgacggacctgggtgcaggcgcaggctacc

SEQ ID NO: 33185 - DNA, 370 bp, Homo sapiens
aagatacagaaaacaaactgaataaaattacaaaatttattgaggagaataaagaaaaatttacccacctagatttggaagatgttcaagttagagaaaagttaaaacatgccacgagtaatgccaaaaaactggggaaacaacttcaaaaagataaagaaaaggttgaagaatttaaaagtatacctgccaagagtaacaatatcatttatgaaacaaccaccagaaacaatgccctcgagaaggatttagagaaagaagaaagaaaattaaaggaagttatggatagccttaaacaggaaacacaagggcttcagaatgaaaaagaaagtccagagaaagaacttatgggtttcagcaaatcggtaag

SEQ ID NO: 33186 - DNA, 431 bp, Homo sapiens
  misc_feature (1)...(431): n = A,T,C or G
agtgggggncngcctgaaaacatgatgacatcattacgcccagcttggcacgaggggaagggtaggggacgcgagcctgcttccatctgacgctggacgcttgtccctgccccgcgttgccttttaaattttagctcattccgagacacctgccgtcagacatttatgcagtgtgtgattctttctaaaacaactccctggaagagaggacatttaattcaacaatttattggccacctactgtgcaccaggcagtgaacttggaactggggctactgggttacagcagtgaccaagacagaggtccctgttcttaaggagcaagtgagggcaacagaaaagagcagtcagctgtcatgcgagggcactcaagcagccctgtggaaagctctacgtggtgagaaactgaagcctcctgccaacaccaacan

SEQ ID NO: 33187 - DNA, 371 bp, Homo sapiens
ggtgcttggcaagacacaacacttacctccaggaatgtacaggccagcgggagcccacgtatcagctcaacatccacgacatcaaactgctcttcctgcgcttcgccatggagcagtcgttcagcgcagacactggcgggggcggccgggagagcaacatccacctgatcccgtacatcattcacactgtgctttacgtcctgaacacaacccgagcaacttcccgagaagagaagaacctccaaggctttctggaacagcccaaggagaagtgggtggagagtgcctttgaagtggacgggccctactatttcacagtcttggcccttcacatcctgccccctgagcagtggagagccacacgtgtggaa

SEQ ID NO: 33188 - DNA, 379 bp, Homo sapiens
ggtgcttggccagacacaacacttacctccaggaatgtacaggccagcgggagcccacgtatcacctcaacatccacagacatcaaactgctcttcctgcgcttcgccatggagcagtcgttcagcgcacacactggcgggggcggccgggagagcaacatccacctgatcccgtgcatcattcacactgtgctttacatgctgaacacaacccgagcaacttcccgagaagagaaaaacctcccaggctttctggaacaccccaaggagaagtgggaggagagtgcctttgaagtggaccggccctactatttgacaatcttggaccttgacatgctgccccctgagcagaggagagccacacgtgcggaaatcttgc

SEQ ID NO: 33189 - DNA, 375 bp, Homo sapiens
gctcgtggctacgggtggtgaatgcagccattgccacagcgtcttctgcctctggagagcctgaagagccggtggtgcccagcaccacccggggcatgacccgggccatgaccatgcccccagtgtcacccgtcggggctgaggggcctgttgtgctccgcagcaaagacggcagagaacgagagcgagaaaaacgcttcagcttctttaagaagaacaagtagttgggggcaaggtcccaggccaactccctcccttcgttcaggaaactgccagggacagtcgacagggaccgccctcttgtcaggacaactgcctgctgctagggtctgttgccaaggtcaacccatcaccaggaactgtcactggggacga

SEQ ID NO: 33190 - DNA, 432 bp, Homo sapiens
  misc_feature (1)...(432): n = A,T,C or G
ggagggnnccgcctgatnacatgangacctcgaagacccgattacgccaagcttggcacgaggaacaaaatggattccactgagccaccctacagccagaagagatatgaggaaattgttaaggaaggcagcacttacattaagaaaattggctacaaccccgacacagtagcatttgtgccaatttctgggtggaatggtgacaacatgctggagccaagtgctaacatgccttggttcaagggatggaaagtcacccgtaaggatggcaatgccagtggaaccacgctgcttgaggctctggactgcatcctaccaccaactcgtccaactgacaagcccttgcgcctgcctctccaggatgtctacaaaattggtggtattggtactgttcctgttggccgaatggagactggtgttctcaaacccggg

SEQ ID NO: 33191 - DNA, 429 bp, Homo sapiens
  misc_feature (1)...(429): n = A,T,C or G
gggcgggccccccatgatnnacctgagatcatcgacgcccgctnggacgaggggcttggcaagacacaacacttacctccaggaatgtacaggccagcgggagcccacgtatcagctcaacatccacgacatcaaactgctcttcctgcgcttcgccatggagcagtcgttcagcgcaaacactggcgggggcggccgggagagcaacatccacctgatcccgtacatcattcacactgggctttacgtcctgaacacaacccgagcaacttcccgagaagagaagaacctccaaggctttctggaacagcccaaggagaagtgggcggagagtgcctttgaagaggacgggccctactatttcacaggcttggcccttcacatcctgccccctgagcagtggagagccacacgtgtggaaatcttgcg

SEQ ID NO: 33192 - DNA, 476 bp, Homo sapiens
aatgatacccttatgactttgattaacctcagcttggcacgaggccttggtgttgttaaatatcaggagaaactctacataatttaaagtgtatgtagggcatattgatgatgggaattgtgtgatgtttaacaggaggatcttaaattttgtgatatggagccctgtaatttttttcttatataaaaatgggtatctatattcataagactaggtcttcaatctctttgtactggtctcaaatgtactggtatctctgctttttgccacagtttgtccctgaaaactttatcagtgaggagaaatacagaattttccttttggttcccctgtaataccacaactaatagtattttcagctaacatttattgaccaggcagtgtgataaattttttgaatgaccatcttgtttaaccccctaatcacactatctgaagtaggtgctatagtgacccccaaccgaagatgaggaaat

SEQ ID NO: 33193 - DNA, 442 bp, Homo sapiens
  misc_feature (1)...(442): n = A,T,C or G
ggtaattatcctggtttgcaaaagagcctcccatgccagtaccgcccagccttggaggccggaatgctcatggcccctgtgggctgcttgtccttcagcccatgcccagcagatacctctctgactggagacgggctcaaagctggattagaaaggggagaggcacttgtgactttgtttgactctgtgactcacttcctcgctcacaccttgtttgaactactggactttcaactggctttccttaggtcaggcaagcagacagctccccactgaagaggtctgtacagtgacaacccgggccggcagcaaggacacagatgcagccacagtaaggctccatcaggactgggtcagtgatggcaacaggatggccaaggatggctctagaacactctgtccatgcgtcactccccccagntttatttttagctttggcttn

SEQ ID NO: 33194 - DNA, 498 bp, Homo sapiens
tgtggttttgagaccgatggaccatctttacgccaagcttggcacgaggggcgtctggaagtccaatgtggcaaggaaaaacaggtcttcatcgaatctactaatttcacaccttttattgacacagaaaatgttgagaatcccaaatttgattgatttgaagaacatgtgagaggtttgactagatgatggatgccaatattaaatctgctggagtttcatgtacaagatgaaggagaggcaacatccaaaatagttaagacatgatttccttgaatgtggcttgagaaatatggacacttaatactaccttgaaaataagaatagaaataaaggatgggattgtggaatggagattcagttttcatttggttcattaattctataaggccataaaacaggtaatataaaaagcttccatgattctatttatatgtacatgagaaggaacttccaggtgttactgtaattcctcaacgtattgtttcgacagcactt

SEQ ID NO: 33195 - DNA, 494 bp, Homo sapiens
  misc_feature (1)...(494): n = A,T,C or G
ccgcccccgcnnnnnttgganacacctatgactttgattaccctcagcttggcacgaggaaaatatgtcaggattggaagaaggcatggataaagaacaaagttcagttaggaaagagaaacacagaaggaagagacacaataaaagtcattatgtattctgtgagaagtcagacagtaagatttgtgggaaatgggttggtttgttgtatggtatgtattttagcaataatctttatggcagagaaagctaaaatcctttagcttgcgtgaatgatcacttgctgaattcctcaaggtaggcatgatgaaggagggtttagaggagacacagacacaatgaactgacctagatagaaagccttagtatactcagctaggaatagtgattctgagggcacactgtgacatgattatgtcattacatgtatggtagtgatggggatgatagaaggaagaacttatggcatattttcacccccacaaaaatcagtt

SEQ ID NO: 33196 - DNA, 391 bp, Homo sapiens
ggcaaatgtttttttctgccacagacttcgttgtcaattcctcctcatcctaccccaccccattctacatttttccctgagaagcttcagaaatacatcttgcaatatcccatggctccaggttagactgccaatgagaagcactcataggcaattccaaaggtagaagaggagatgccattcatttgctgttggtagccttatacagatatgtgggcatctgcagacagcagatacagcccttttccagcaacttccaggcattctcctgagaaagacctctttggtgtacaagcagcagagatcattgacagactctgcccttcactccccagccctctgaaaggttacctaagcctccaattccctgtattaaatgtcttgctgggtg

SEQ ID NO: 33197 - DNA, 498 bp, Homo sapiens
cggggtttgagaccgattgatgatcattacgccaagcttggcacgaggacaatatcacttataaacttataaatattgaagtaaaagtgctaaacaaattattcgtaaactaaccaataccgcaataagaaatcaatgcaccatgaccaaatggtgtctttttcccaggaatgcaaggttggttcaacatgaggaaatctattagtgtactatattaaggtatctaaggaaaaacataatgattatctccataaatactgaaaaccctttgaaaaaattcaatatgcattcctgatatatcattgaagaaaataggaataaatagatgcttttttaacctgaaaaaatatttgaatcctaaagtcaggatgcttgttgatgggaaaacactagaggcatttccacttaaagaccaggatcaaggcaaggatattcattatctctgctactatcccacaattgtactggaggtattagcaattaggtaagataaatcag

SEQ ID NO: 33198 - DNA, 406 bp, Homo sapiens
ggtcctgccttagggctggtgctcctgctatttcctcttcccaggtaaccatgtgaagtgcctccctctgccctctttccagcctttacttgagtgtcaccttctcagtgaggcctgccctcattcctctttcgctgtttgcaacccatctcctgtcccccttcccagaactccctttcctacttcgtttttcttcacagtacttgatactgcctaacacactccatgggttcttacttgccctgtttattattttcccccaatagacagaatgttccatgatggcagaattctctgttttgtttccttccatgtccccagcacctagaacagtgcctgacgcatctcctaagcaatacgaccaataagtatgtgtctggctgccttccggctgccagtgtctgcc

SEQ ID NO: 33199 - DNA, 497 bp, Homo sapiens
cgtggtttgagagcgatggaccatcatctacgccagcttggcacgaggtatagtttgtattcaatttgagaccttttctatgggaagctcagtaatttttattaaaagattgccattgctattcatgtaaaacatggaaaaaaaattgtgtagtgaagccaacagtggacttaggatgggattgaatgttcagtatagtgatctcacttaggagaatttgcaggagaaagtgatagtttattgttttttcctcgcccatattcagttttgttctacttcctccccttccttccagatgataacatcacatctctacagtaagtgcctctgccagcccaacccaggagcgcaagttgtctttgccatctggtctatagtacagtgcgcggcgttaggccacaactcaaaagcattatcttttttagggttagtagaaattgttttatgttgatgggaggtttgtttgattgtcaaaatgtacagccacagccttttat

SEQ ID NO: 33200 - DNA, 392 bp, Homo sapiens
ggcctcgtgccaagcttctgctggcagctcgtgcaattgttgccattgaaaaccctgctgatgtcagtgttatatcctccaggaatactggccagagggctgtgctgaagtttgctgctgccactggagccactccaattgctggccgcttcactcctggaaccttcactaaccagatccaggcagccttccgggagccacggcttcttgtggttactgaccccagggctgaccaccagcctctcacggaggcatcttatgttaacctacctaccattgcgctgtgtaacacagattctcctctgcgctatgtggacattgccatcccatgcaacaacaagggagctcactcagtgggtttaatgtggtggatgctggctcgggaagatctg

SEQ ID NO: 33201 - DNA, 480 bp, Homo sapiens
  misc_feature (1)...(480): n = A,T,C or G
ggggggnacttganaaccgctgtgacancgattacgccagcttggcacgaggtggatctctgaaaaccagcccagaatttggaagctggaaggaactttagatcgtccattctgagtgtctctcttcgctggcgttttcccactgaggttatgtaaacatgaagaggagcctacaagtgtcaaggaaaaaacgacagctaaccacagggcaggccatgggcaagatatctcagtgttctccgctctcataggtcaggtcacgacccccaggagacctggaggactgaatgctgctgcccccaaggaggaggctgctgtcttatcccaggagggagagcaggtgaagtccccaggggaggaagcacctagccccattcctgctgagcaggaggtggcaggtaccccagactgggaggtaaggacagcccggggcttcgactgaacgtctccagcgtgggtccaactgagcagccatggagc

SEQ ID NO: 33202 - DNA, 396 bp, Homo sapiens
ggccattaggggaggagatgattccttcaacaccttgtttagtgaaacgggagctgtcaagcatgtgccccgggcagcgtttgtacacttggaccccacagtcattggtgaagttcgcactggctcctaccggcagctcttccaccctgagcaacttatcacaggcaaagaagaagctgccaataactatgcccgagggcactataccattggccaggagattattgacctcgtgttggaccgaattcgcaagctggccgaccagtgcacgggtctccagggcttcttggttttccacagctttggtgggggaactggctctgggatcacctcgctgctcatggaacgtgcttcagctgattatggcaagaaagccaagctggagtctctatttac

SEQ ID NO: 33203 - DNA, 479 bp, Homo sapiens
  misc_feature (1)...(479): n = A,T,C or G
ngaggagggcggccnngnnattgatnnnccttgattaacagtcatgaccatcattacgccaatcttggcacgaggtggcacgaggtggcactaggcagataatctgtctatcttaaattggaccgatttgggatctcgattacatctgttaacttgtttttgccataaattgtaacacaatcacaggagtgacatctcctcagtagctttgtctacactcaggaggaagtgattatataagagcaaagatcactgggggtcatcttaggattctgtctaccataatattataaagacacagtaattaaaagagtataacagatttctgcttctgtctgttagaataaatcatatcagactaaccctgcctccataaacaaacgtaaaattgttttcagcagtgtacaacaggcagtccaagagaaaacttaagggggaagccccatgatttcctagttgtttggggagaatttctcacn

SEQ ID NO: 33204 - DNA, 414 bp, Homo sapiens
  misc_feature (1)...(414): n = A,T,C or G
gggtcctaatgcctgtcacttcccaggacgctggcagcagcagcagcccggagcccccgagccctcggcaggtttgcgtgtccttccccgcgatctgattggataaagtgggggctcgacggtggccgacgtgggacagtctggctgtggcaggggtctcggaaaccatgggttattgcagtggcaggtgcacgcttatctttatctgtggcatgcaactggtttgtgtgctggagaggcaaatatttgacttccttggatatcagtgggcacctatcctggcaaattttgtacatattattatcgtcattcttggtttgtttggaactattcaatatagacctcgttacataacaggatatgctgtctggctagtcctctgggttacgtggaatgtgtttgttatctgcttcn

SEQ ID NO: 33205 - DNA, 400 bp, Homo sapiens
ggcttttcataaagacattatgaggttttaactccgtgcaattatggactagagaactaattgtgccaatgcgtcttaaaggaaaatctaatctttactcctgcttatgggacattcggtctattaactgtcagacacaatttctagttttcatctgacagccagttctcctttatttctacatctaaaataagaacatattggacactattatataatacagaattgtcttaaactttaataaattcgcattttaaaggtgttcacagactattttttatatctggagctgaatttgttcaagtctaaaaagctcaaggactttatgaacatctcattatatgaggaaaatcataggttaccattttataactctattgccataacaaaatacactcta

SEQ ID NO: 33206 - DNA, 443 bp, Homo sapiens
  misc_feature (1)...(443): n = A,T,C or G
ntagatttcgattacaaccatgaccacgactacgccgagcttgggacgaggcccgggtctgtgggccagggctcccctgacccccagtttacccccagcaggatgggtagggaaggggaagggactcatagcatcctgtgatgctcctccctcggcatgggtgtcatcgcagacctgagcacagaccccactgagctggaaaagagggctctggaggtggctgggcccgatgggcaggccagtgccatatcacctgcctctcccaggaggaaggccggtgatggaggccacaggagggccttgccaggctgcacctcgctcactggggaaaccacaggaaaaagtggggaggcagggcaggatggcaagccccccggcgatgtcctattgggccctacagccttcctggctctggacctgggagcggagagtccatgatgggg

SEQ ID NO: 33207 - DNA, 434 bp, Homo sapiens
ggatttttgtacatttttgtatatactgggacagcgtgaaacactggaatccttgatggacgagggcatataccatgatgggacagtgccacactccttcaataaacgtggctgctggccataggacgcgagcgtgagacgggcgccttggcgccacctgttgggtgctcactgcctctgcaggtgcaaaggggtcagcagcatgagaagcgtgttgaacacgtggctctcagacacttcttgtttttaacgggaaactctttgcatttgcatttcctcaacaaaggagcaaaccagaggaagctgagagtctgggtgttcttgacgctttggtcttcagccttgcactggctcttataaaggacttttggagggcagatactttcatctgttgaatccaacacacatctttttcagggaaaaacaatgtcccc

SEQ ID NO: 33208 - DNA, 424 bp, Homo sapiens
ggtacaggcccatggatgagtacagcaaccagaacaactttgtgcacgactgcgtcaatatcacaatcaagcagcacacgggcaccacaaccaccaggggggagaacttcaccgagaccgacgttaagatgatggagcgcgtggttgagcatatgtgtatcacccagtacgagagggaatcttaggcctattaccagagaggatcgagcatgggcctcttctcctctccacctgtgatcctcctgatctctttcctcatcttcctgatagtgggatgaggaaggtcttcctgttttcaccatctttctaatctttttccagcttgagggaggcggtattcacctgcagcccttttagtggaggagcctcactctttcttctctctttgtcccggataggctaatcaatacccttggcactgatg

SEQ ID NO: 33209 - DNA, 417 bp, Homo sapiens
gacgaggccagagcctaagtgcttaaccaccagactagctcatttttggatttgagattggagaataaccattcaggagtgaaggtggcagaactttttgaaagattggcaagagtgggcaagaaagagggtaaagcataggatactctcacctttcttttccaaggcctgcaggtcctgagaggcacattcaagactttaacccagttttggctaatgacaaagcactttctcttttcatagcctcacaaaattttaccttagaccttagcgagttacagatctgtaccttccccagaattttgtcattcctttgtttaaaccattataccatgacttgccttccttaagatgtccagggtatatatttccttacagagggacctattatgaattacaaagaaacattgacaggag

SEQ ID NO: 33210 - DNA, 420 bp, Homo sapiens
  misc_feature (1)...(420): n = A,T,C or G
tcttatgaatcgtagcatccaaacnccagcnggacgagtagttttgagaacatgaagagaacagaacacttgaaatggacgccgtcatctcttgttcccactactgggttcttataaagtggtggcaagatagggaagggataatctgagaatttttaaaagatgatttaatgagaagaagcacacttttgattttgatgagtcactttctgtaaacaatcttgggctatctttacccttataccttatctggaatttaccatttattggatttgcaaagctagtatggtttttaatcacagtaaatcctttgtattccagactttagggcagagccctgagggagtattattttacataacccgtcctagagtaacattttaggcaacattcttcattgcaaggaaaagatccataagt

SEQ ID NO: 33211 - DNA, 427 bp, Homo sapiens
ggaggaaatatttactgtaccaaaacctattgaatgattggtccagaggttctcaactgggcacagttttagccccccagggaaaatctggccatgtctggagacatttttggttgtcacagctgggacactgctactggcatctggtgggtagaggccagggatgctatgaaatgtcctacaatacccaggccagcctcctacagcaaagaattacagcccgagggtcgccagtgctgaggtcgagagtccaggacggatctcatagctcccaacaagatcagccatggagaattggtttgttttggtttttctctgcccccggggtccttcccatgttttaaaagattttttgtctactaagtgaaacgcctaagtcaccatatattttacatttaaaaacattaaaactaaccagaactttcta

SEQ ID NO: 33212 - DNA, 419 bp, Homo sapiens
gggtccagagagagaatgagagaaccatttaagatccagaggatgctctacttaattttggtattgagctgctgaattcatttgaagtttgtacagtgaccttcagaggttgagactgcaaaggcaaattgtgctccccacccacctaaccccacccctgcccagaactctttcctcaaggctagcctaggggagcacaaccttgggctgcttcccctgcatgcttagatccagccagagcccccctgctgggccacagacctccatccccatagcggcttcttttccaaagtgcattcacctcattgagaacagcctctcccctcctgaacattccagacattccactcaggctgacttaatgccacctggccagaaaaaaacagtggccattcccccttttctaaaaccttgatttt

SEQ ID NO: 33213 - DNA, 481 bp, Homo sapiens
  misc_feature (1)...(481): n = A,T,C or G
ntttgacaacgctagtagatgacatgcgcagcttgcgacgagggtttccgacccttgaaggtcaataccacatctgttatcaagattgctgtggagccagttaacccctcagagctgcccaagatgcttgatggcctgcgcaaggtcaacaagagctatccatccctcaccaccaaggtggaggagtctggcgagcatgtgatcctgggcactggggagctctacctggactgtgtgatgcatgatttgcggaagatgtactcaaagatagacatcaaggtggctgacccagttgtcacgttttgtgagacggcggtggaaacatcctccctcaagtgctttgctgaaacgcctaataagaagaacaagatcaccatgattgctgagcctcttgagaagggcctggccgaggacatatagaatgaggtgggccagattacgtggaacaggaagaagctgggagagttcttccacaccaagt

SEQ ID NO: 33214 - DNA, 469 bp, Homo sapiens
  misc_feature (1)...(469): n = A,T,C or G
ntatgaaatactanngacagttcggaccatcattacgcgcagcttggcacgagggttaccaccgtgttagaaagcaacctcaggaccggccatctccatcactggcgtcaccatgggggctgtgctgggtgtcttctccctcgccagctgggttccatgcctctgcaacggggcctcatgtttgctgtgtagttgctgtcctaacagtaagaattccacggggactcgcctcatttatgctttcattctcctcctgagcactggcgtatcctatatcatgccgagaaaagagatggaaacttacttgaagaagattcctggattttgtgaagggggatttaaaatccatgaggctgatataaatgcacataaagattgtgatgggctggctggttataaagctgtgtatcggatcagctttgccatggccatctttttctttggcttttctctgctcatgttcaaagan

SEQ ID NO: 33215 - DNA, 417 bp, Homo sapiens
gggtctagctcatctagttcctcttcttaaggggatgggggtcaggggctaggggagggggctgagtttccccactttaggaggaggtgggggctatttctatgcaaatagaaatcagcacattcctcctacttccctttcctccactccccccatatctttaaagtgtggaagcagaaaggacctgcattttcctacattgaggagctgacataggggtaaggtatgggagaggtaggtggatccagggaaaagcagtggggacggaaggcaaaaagaccactcaacccccacctggaaggggcaaagaaaagccagaggtccatgtttgtactcctgtgctggactgtttcctgagtaccagcaggtccctttttgtctctcatgggcctagcataggtatgagccaaggattct

SEQ ID NO: 33216 - DNA, 430 bp, Homo sapiens
ggagatgtggctgtgtctagtacaacttttagacacagaaatctgaatgacatatattgttctgtgtcaagaaacttaaattttttttttaactatttaaaaacgggaaacctattcttagctcacaggccatggagaagctggtggggaccaaacccagctccttaactggctgggctggggagggggtagtgacagtggcagctgctactcactgctcagtggggaaaacacaggacttggcaatcacagcccgcaaaaccatcatgtgtggcagaagcctgagggatgcggtttcttgcccacgggctctggtcattttctgttggttttctgcacttaaagaattcacatggaagcatgttttataaaatgaattaccagagaaacagagatgggccgagattttcagaaatggtcccatgtgacg

SEQ ID NO: 33217 - DNA, 423 bp, Homo sapiens
ggcaatatgattccacccatggcaaattccatggcaccgtcaaggctgagaacgggaagcttgtcatcaatggaaatcccatcaccatcttccaggagcgagatccctccaaaatcaagtggggcgatgctggcgctgagtacgtcgtggagtccactggcgtcttcaccaccatggagaaggctggggctcatttgcaggggggagccaaaagggtcatcatctctgccccctctgctgacgcccccatgttcgtcatgggtgtgaaccatgagaagtatgacaacagcctcaagatcatcagcaatgcctcctgcaccaccaactgcttagcacccctggccaaggtcatccatgacaactttggtatcgtggaaggactcatgaccacagtccatgccatcactgccacccagaagactt

SEQ ID NO: 33218 - DNA, 416 bp, Homo sapiens
ggggggggtttttgttatattttacacaggcttggtatcatatatacaatccacagtcaacccatgtataaactcacacttgattcaccagttgatgaaaaatattatctattcttgggatagtatgacaatataatatatgtaatacgatattataatatcatttatataacataagaatacctgttgctaaactgatatctacaaggctcatacattattagtcatattacaagaatttcctgtacattatagcgtgttattgtcctttatactttctatttcacattaagaaggttatttttttccgtcactttcctgtataggcatcactcactttgaaatggataaaacaaatcctgcaagggcatcaattgctcaccatgggctagccaaatttcacacaggtatactct

SEQ ID NO: 33219 - DNA, 487 bp, Homo sapiens
  misc_feature (1)...(487): n = A,T,C or G
ggggaggcggggccnnnnnntttgattatcgatatgcacctgcattacgccaagcttggcacgaggaaatcagtgtatattatttgttaatgtccattaaagccagtttttaaaaaaatcactggacttttgtgtttaccatttaaaacaaccattttaaacaaacttagaacgatgccttagctgtttataggtaacagaatgtaaactcccaccacctggagactaggccatatccagggacctcacactgactttcctaaaggagagaagcagctacgctgttcatactgatagagaagagggcaagaaaagatccagagtggctgttactttgaaaattaaacgaaagatgaaattctgaacttaaaacacttctgtttggccttctataactgatcacccttctttgctctgttttccagataaatggagacaccagatctccctaacctctgacttctgccgttagccatactctgtgtan

SEQ ID NO: 33220 - DNA, 412 bp, Homo sapiens
ggagggaagacagggttaaggaactttatttaaaaaaaaaatatttttttcctaaaaactataaaagaggaagggtttcttgtcccgggaagcaacggacataatctgttcccagccatggccttccagcttgtgtccctgattcagggagctctcccttcctcctcctcctcctcctccggaggggggatcccaaagcctgccagtggaggcttatctgttgggaggaagacagctcttcacagaagcaaagaacaaaatggcatggagatcagctgcctgagcacctgcgctgtagcttatctgacaacgcttaggccacgagctcctgggtagctgtgatcagggacatgataatctgagctatgcagaggagcacatctgttgtcaactgctgtacccagaaatctag

SEQ ID NO: 33221 - DNA, 449 bp, Homo sapiens
  misc_feature (1)...(449): n = A,T,C or G
ctcccttggaaaactctcgnttttgatcaccntcccancncgcacgaggctccccgggttgaggataagggctggattttggttatatgactaagggcgacagatgctgctggcatctctggccaccgtcccagaggcttaaggttggaggcttcactggcaaaacaatggcactgtttaactagctcgtgttaaccattcatctacagcaagtaaaatcatcacctttgcactgagcaaggaagcacatgggtctcctatgagagctaatgccagaattcacatgctttgtaaaatataggatgaggtttctttctttcttctgccccctccagaggccaaatgggtagggtggttcctttgccttctgagtgcctggatgcccccagccctcacaagaccctgctaagacactggcagtgtgccaagccttgggtgggatgggtgaa

SEQ ID NO: 33222 - DNA, 415 bp, Homo sapiens
gggttcttcacgatgcctcccaggacttggtttatgagacagttgcaaaggatgtggtttctcaggccctcgatggctataatggcaccatcatgtgttatgggcagacgggagctggcaagacatacaccatgatgggggcaactgagaattacaagcaccgggggatcctccctcgtgccctgcagcagggtgagaccaacaggattatagcctcccacactatgaacaaaaactcttccagatcacactgcattttcaccatctacttagaggcccattcccggaccttatcagaggaaaagtacatcacttccaaaattaacttggtggatctggcaggctcaaagaggctggggaagtctgggtctgagggccaagtcctgaaggaagccacctacatcaacaaatcgct

SEQ ID NO: 33223 - DNA, 418 bp, Homo sapiens
acaaggttttttaaacagtctgatttaattaggaagttaaataagttgaggtggggtggagtgggatcatcaaaaggctgacatgggaccgctggagttggcaatcatagcagtgtgaggttggcaaggggagcaacccccttcaagacaaggcacaaactatttggcaaggagagatgaggggtgggacctcactgtcaatggacatgctcagggaggccagtgggttacatgcaacaggaggatcattcaggcaacttcagctatgaggctgggcatctgtgagggctgaaggctcaggctgttctcaaaggcttgtgattcacctgggagatgctcacgcctgtgagtctttccacactctctggcaggcgagttagaatgtccagtacttccccagtcactttggctgccccca

SEQ ID NO: 33224 - DNA, 475 bp, Homo sapiens
  misc_feature (1)...(475): n = A,T,C or G
ggnagcccnnnttttgagtacgtatacgtccgaccngcntacgccatgcttggcacgaggcccggaggctgtgaccattgtagagacaccacccatggtggttgttggcattgtgggctacgtggaaacccctcaaggcctccgtaccttcaagactgtttttgctgagcacatcagtgatgaatgcaagaggcgtttttataagaattggcataaatctaagaagaaggcctttaccaagtactgcaagaaatggcaggatgaggatggcaagaagcagctggagaaggacttcagcagcatgaagaagtactgccaagttattcgtgtcattgcccacacccagatgcgcctgcttcctctgcgccagaagaaggcccacctgatggaaatccacgtgaacggaggcactgtggccgaaaagctggactgggcccgccagaggcttgagcaacaggtacctgtgaaccatgtn

SEQ ID NO: 33225 - DNA, 415 bp, Homo sapiens
ggaacaccctgggagttttagtagcttgaggcaaggtggaggggcaagaagtccttggggaagctgctggtctgggtgctgctggcctccaagctggcagtgggaagggctagtgagaccacacaggggtagccccagcagcagcaccctgcaagccagcctggccagctgctcaaaccagcttgcagagccgcagccgctgtgggcagggggtgtggcaggagctcccagcactggagacccacggactcaacccagttacctcacatggggccttttctgagcaaggtctcgaaagcgcaggccgccctggctgagcagcaccgccctttcccagctgcactcgccctgtggacagccccgacacaccactttcctgaggctgtcgctcactcagattgtccgtttgctatgg

SEQ ID NO: 33226 - DNA, 466 bp, Homo sapiens
  misc_feature (1)...(466): n = A,T,C or G
cttgactacgtggactgttcggaccancannacgccatgcttggcacgaggccgggggtgcttgcttatgcggagcctgtgaccctgctgctcattatgggaggctaaaggggcgctcaccaggatggccagaggaaggggcaggatgcaagaaggacatttcaggggaaaagaattgaatttgccaatttacattaaagtttctggcctctgattgggtctgcatggtttcctgtcctgtagcagtcttctataaaaggctggagaggaggtatgttaggcttcatgggtcgtgtgggttctcctgaactacctacctctcccagttcagggcaaatgcagccattccaaccaatgaacttgactgtgttccgataaaactttatttacagaaagaggcagaggatcagatttggccgacatgtgggagcttgccggccccagtcccgtaagatccccaacgctg

SEQ ID NO: 33227 - DNA, 450 bp, Homo sapiens
  misc_feature (1)...(450): n = A,T,C or G
ggacactgtgttctataacactgacctgttcgagtacaagtttgtgatcagccgtctgataaacagtacattcctgcacaacaaggagggctgcccgctagacgtgacagggacgggcgaaggtgcctacatggtatactttgtgagcttcctggggacactggcagtgcttcctgggaatatcgtgtctgccctgctcatggacaagatcggcaggctcagaatgcttgctggctccagcgtgatgtcctgtgtctcctgcttcttcctgtcttttgggaacagtgagtcggccatgatcgctctgctctgcctttttggcggggtcagcattgcatcctggaatgcgctggacgtgttgactgttgaactctacccctcagacaagaggaccacagcttttggcttcctgaatgccctgtgtaagctggcagctgtgctggggatcan

SEQ ID NO: 33228 - DNA, 406 bp, Homo sapiens
aggcttggttagaggccagaaaggactggattctggtgctccaatcaaaattactgttgggcctgagactttgggcagaatcatgaatgtaattggagaacctattgatgaaagaggtcccatcaaaaccaaacaatttgctcccattcatgctgaggctccatagttcatggaaatgagtgttgagcaggaaattctggtgactggtatcaaggatgtcgatctgctaccttcctatgccaaggggggcagaattgggctttttggtggtgctggagttggcaagactgtactgatcatggagttaatgaacaatgtctgcaaagcccatggtgggtactctgagttcgctggcgttggtgagaggacccgcgaaggcaatgatttataccatgaaatgagtgaa

SEQ ID NO: 33229 - DNA, 465 bp, Homo sapiens
  misc_feature (1)...(465): n = A,T,C or G
ctaganaccatcttanctcttgataccgtttgacctgattacgccgagctctggcacgaggggcctatttcaccatgtgtccaactttgcataacagacatttttttaattcaggttcttctccaactgcagcaaaaaggcaaagagtagtctgtttcaggagtctgcatcgggtcctgtgagagccttgtccacttagaacaagcctttaacttgttctgtttcgggatcaagatctatgtcataaaagcagggccgggtgggcagtcctggcatggtgctcatcgttccgaccaaagggtaaatgaacccagcgcctatgctggcccggacgtcactgataggtaagatgaagtcccttggcacaccttttttgtcaggttggtgagatagagaaaggggggtctttgccatgcagatgggcaaatttccaaaaccctgttgagtgtaacgatctattttggg

SEQ ID NO: 33230 - DNA, 413 bp, Homo sapiens
ggggcttggaccctgtagcaaagacagcgattcgccagctgacagagcccagtgggcgggtggccaagaagacacccaccgggcgcagcactctcatcatctctggtgtttccaaggggcccattgctcaggacgagttggcgctatccctgggctatgcggcatccctggaagcctcagtgcaggatgatgcagggaccaccggaggcccctcttcacctccctcagacccaccagccatgtctccaggaccgctagatgccctctctagtcccacaagtgtccaggaagcagacgagacaacccgttcggatatttctgagaggccatctgtggatgatattgagtcggaaacggggtccactggtgccctggagacccgcagcctcaaggatcacaaagtgagtttcctg

SEQ ID NO: 33231 - DNA, 396 bp, Homo sapiens
ggagaagatgctgccaatatctatgcccgagggcactacaccattggcatggagaacattgacctcgggttggaccgaattcgcaagctggccgacccgtgcacgggtctgcagggcttcttggttttccacagctttggtgggggaactggttctgggttcacctcactgctcatggaacgtatctcatgtgattatggcaagaaaaacaagctggaggtgtctatttacccagcgccccaggtttgcacagctgtatttgagccctacaactacatccttagcacccacaccaccctggagcactctgattgagccttcatggtagacaatgaggccatctatgacatctgtcgtataaacctacatattgagcgttcaacctatactaacctg

SEQ ID NO: 33232 - DNA, 411 bp, Homo sapiens
gggcggcgctgacgagagtcctggtcagctgagtggaaatagaaggatttctgctgccatcatcttccatgggctttccaggtcacacgacctacaagtagggagcagggaaagaagagtgagcctgcatgccaattctaagctcttcaggatcaaatgtcgttcgtcctgtccagaatggcagcctgtggaggcacctgcaagaacaaagtgactgtgtccaagcccgtgtgggacttcctgagcaaagagaccccagcccggctggcccggcttcgggaggagcaccgtgtgtccatcctcatagatggcgagacttctgacatctatgttctccagctttccccacagggtcctcccccggcccctccaaatgggctctacctagcccggaaggctctcaaggggctg

SEQ ID NO: 33233 - DNA, 413 bp, Homo sapiens
ggtggagggtgtggaattcgccgttcgaaagcagggactaaaagccccacttcgtcttacgttccgaaaggaaggcgtctggtgagcctttctctcagtcgtgagggaggcgtcgacggcgtgcggaagtcctgagttgaggcttgcgggatcctttccggagaaagcgcaggctaaagccgcaggtgaagatgtccaactacgtgaacgacatgtggccgggctcgccgcaggagaaggattcgccctcgacctcgcggtcgggcgggtccagccggctgtcgtcgcggtctaggagccgctctttttccagaagctctcggtcccattcccgcgtctcgagccggttttcgtccaggagtcggaggagcaagtccaggtcccgttcccgaaggcgccaccagcggaagtat

SEQ ID NO: 33234 - DNA, 410 bp, Homo sapiens
ggtggaggttgtggaattcgccgttcgaaagcagggactaaaagccccacttcgtcttacgttccgaaaggaaggcgtctgttgagcctttctctcagtcgtgagggaggcgtcgacggcgtgcggaagtcctgagttgaggcttgcgggatcctttccggagaaagcgcaggctaaagccgcaggtgaagatgtccaactacgtgaacgacatgtggccgggctcgccgcaggagaaggattcgccctcgacctcgcggtcgggcgggtccagccggctgtcgtcgcggtctaggagccgctctttttccagaagctctcggtcccattcccgcgtctcgagccggttttcgtccaggagtcggaggagcaagtccaggtcccgttcccgaaggcgccaccagcggaag

SEQ ID NO: 33235 - DNA, 413 bp, Homo sapiens
ggcgcctcagctgggattacaggcacgtgccaccatgcccggctaattttttgtatttttagtagagacaggggtttcaccatgttagccaggctggtctcaaactcctgacctcaggtgatccgcccgcctcatcctcccaaagtgctgggatgacaggcctgagtcaccgtgcccggcccctgactagaaatatcttatttgcttgctcgttgcctctctacagtaggatatgtgctcagggagagctatatccccagtctgagaatgatccctgatactgtgacactagaagcacttgttgaataaacagtgctatcaagagtttctatcacattgcattgcagttttatatccccaaaggtcgtggattggtgaacagggctgccatttttgtaatggatgccaatgcg

SEQ ID NO: 33236 - DNA, 378 bp, Homo sapiens
  misc_feature (1)...(378): n = A,T,C or G
ggcctcgtgccattccggctgtaaagatggcggcttcctagtgagtcggcggctgatttagaaggaggttcaggctacggtgagccgaagccacacaggagccatggaagtggcagagcccagcagccccactgaagaggaggaggaggaagaggagcactcggcagagcctcggccccgcactcgctccaatcctgaaggggctgaggaccgggcagtaggggcacaggccagcgtgggcagccgcagcgagggtgagggtgaggccgccagtgctgatgatgggagcctcaacacttcaggagccggccctaagtcctggcaggtgcccccgccagcccctgaggtccaaattcggacaccaagggtcaactgtcn

SEQ ID NO: 33237 - DNA, 411 bp, Homo sapiens
ggcaaggtctttttttttaaagcactttgtatataaaaatttgggttctctattctgtagtgctgtacatttttgttcctttgtggaatgtgttgcatgtactccagtgtttgtgtatttataatcttatttgcatcatgatgatggaaaaagttgtgtaaataaaaataattaaatgagcaggaatttttgtgtccacttgacttggtcttgcttcttattctaatgatgcaaattatacttttgtgaatatatcacggagtcattaggcattcagcttcatcacagcaggtcaggggtctcactgatggcatacaatatagtgatcgggtactctgacttggtagcacagtaagacagacttgccttaaactcctaattcaaccacttacaaagtcattgtttgaactt

SEQ ID NO: 33238 - DNA, 459 bp, Homo sapiens
aattgaaaacctctgatagaacggtgtgaccaccactacgccaagcttggcacgaggtgctgagatgggaaagggctccttcaagtatgcctgggtcttgttttaactgaaagctgagcgtgaacgtgggatcaccattgatatctccttgtggaaatttgagaccagcaagtactatgtgactatcattgatgccccaggacacagagactttatcaaaaacatgattacagggacatctcaggctgactgtgctgtcctgattgttgctgctggtgttggtgaatttgaagctggtatctccaagaatgggcagacccgagagcatgcccttctggcttacacactgggtgtgaaacaactaattgtcggggttaacaaaatggatttcactgagccaccctacagccagaagagatatgaggaaattgttaaggaagtcagcacttacattaagaa

SEQ ID NO: 33239 - DNA, 426 bp, Homo sapiens
ggctcacgctgactgtgctgtcctgattgttgctgctggttttgttgaatttgaagctggtatctccaagaatgggcagacccgagagcatgcccttctggcttacacactgggtgtgaaacaactaattgtcggtgttaacaaaatggattccactgagccaccctacagccagaagagatatgaggaaattgttaaggaagtcagcacttacattaagaaaattggctacaaccccgacacagtagcatttgtgccaatttctggttggaatggtgacaacatgctggagccaagtgctaacatgccttggttcaagggatggaaagtcacccgtaaggatggcaatgccagtggaaccacgctgcttgaggctctggactgcatcctaccaccaactcgtccaactgacaagcccttgcgcct

SEQ ID NO: 33240 - DNA, 387 bp, Homo sapiens
ggaagagaagtgttgaaatatccatctataattgtggatgtatctattgctcctttcagttttgtcagttttgcttcatgtactttgaagttttgctattgcttgcatgcagttttaggattggtatgacttgttcatgatttaacatattattatgaatatccctttttattcgtagtattaactcatgttctgggctatttttatgatattaatggagccaactagctttttatgcttaatatttgcacaacatatcatttttctttctttctaacttggctgcttatttaatttaaaagtagtttcttatagacagcatatagttgtaactctttcgttattccagcacagtaatttcttcctgcatttctaattgcaggtttt

SEQ ID NO: 33241 - DNA, 459 bp, Homo sapiens
  misc_feature (1)...(459): n = A,T,C or G
taaaatttgatnacagttgagacnctctttacgccaagcttggcacgagggaattccctgctctgcttttctgctcgttgctggcatagaaacatctagaacataaagtatccactctggggcagatgggagagctggaaaagtagattcaagatgccttttagtcttggaagtttcttccaggaagcaagaccagctggtatgtttacacctgcactccagtgccctggggaggtgaccaggtggagggggatggctcatggaaatctgtcccgcacagctggcccccttttggctgccactgtctagactgttggcctttgacctctctgcctcttgtggcgtctgaacctagacgtcccttttggagacagctggacaaagccctattctccgcagccccagcctctatcctgaggcctctgggagctgcgtgacggccagcatggggtgctgatc

SEQ ID NO: 33242 - DNA, 570 bp, Homo sapiens
  misc_feature (1)...(570): n = A,T,C or G
cttcactcacgtatcgtatacgtattacgtctatctattagctccgttatacgtatgtactatattgttcgtatctttcactccantattaaggtgtgcggnnnnnnnnnncctggaagacactcgagancnctatacgccacgcttggcacgaggagcaggagaaatttctggactgttaggatgaatggacgccttttccccggtatttaagatttgtgaccttgtacataaccctgggggacgtgcacattgcttggggatggaacggtaaaaatttgggtgtttttaaaaccttgtttggggttgttcctgtccttgttgagaatcatagagatgtctgtgttcttggagtatttcacactgaggactaatctgctatcttcattccagtccctacccctcagtgcctgctctcatccaaataacctgggaggtgacaatcaggatatctcaggaggtccaaggtggaacagacctctttgcctttcccagcgtctcatacccccggtagtgcacctgtgggtggaggctggggtgtctgcacgaagacaggccagcgtcctcctg

SEQ ID NO: 33243 - DNA, 401 bp, Homo sapiens
ggccagagggaggagaggaccggaagtccttcttttcaagctttcaatgctgaaagcggcctgattgtctctaccggaagcccttttccagaggctgggaacacggcccacctagcaggaagtcccacctccttgagctccgccacccttcccgaagtttttctgtcacctgtgttaggctccgtcccctttccgcgttttatccccgtaccagaaaaggatacatttagtgcctcccacccagctccactaaacgggttggatatctcattctttgagttggtgttccttccccggcgcccccatgtagctgggaagtgggacctgggggtggttggacccctgggatcctaaaggaggggcagggagggcgcagaactccgcttctgcttcttgctacg

SEQ ID NO: 33244 - DNA, 431 bp, Homo sapiens
  misc_feature (1)...(431): n = A,T,C or G
attgagactgtcttgaacgtgantcctctcagcttggcatgagggagggcagctttgtctacaaggggggcaagatctacaaagtgccgtccactgagactgaggccttggcttccaatctgatgggcatgtttgagaaacggcgcttccgcaagttcctggtgtttgtggcaaacttcgatgagaatgaccccaagacctttgagggcgttgacccccagactaccagcatgcgtgacgtctaccggaagtttgatctgggccaggatgtcatcgatttcactggccatgccctggcgctctaccgcactgatgactacctggaccagccctgccttgagaccgtcaaccgcatcaagttgtacagtgagtccctggcccggtatggcaagagcccatatttatacccgctctacggcttgggcgagctg

SEQ ID NO: 33245 - DNA, 481 bp, Homo sapiens
  misc_feature (1)...(481): n = A,T,C or G
nctgaaaaactgttgagaatccttatcgccaagcttggcacgaggtgcacggcagacattggttggatcactggtcattcctacgtcacctatgggccactggccaatggtgccaccagtgttttgtttgaggggattcccacatatccggacgtgaaccgcctgtggagcattgtggacaaatacaaggtgaccaagttctacacagcacccacagccatccgtctgctcatgaagtttggagatgagcctgtcaccaagcatagccgggcatccttgcaggtgttaggcacagtgggtgaacccatcaaccctgaggcctggctatggtaccaccgggtggtaggtgcccagcgctgccccatcgtggacaccttctggcaaacagagacaggtggccacatgttgactccccttcctggtgccacacccatgaaacccggntctgctactttcccattctttggtgtagctcctgcan

SEQ ID NO: 33246 - DNA, 391 bp, Homo sapiens
  misc_feature (1)...(391): n = A,T,C or G
ggtggacgtgtggaggaggcgctggagctgaaggaatggacgagccctgggaggagggcagaaggctacgcagggctgaggatgaagatgcagcccctggatggtcccagactctcaggacatgcccagctcaggggcttcgagccacaggcctggcctcatatggcatgagggggagctggcataggagccccctccctgctgtggtcctgccctctgtcctgcagactgctcttatccccctggctttgtgccaggcctggaggagggcagtcccccatggggtgccgagccaacgcctcaggaatcaggaggccagcctggtaccaaaaggagtacccagggcctggtacccaggcccactccagaatggcctctggactcaccttgn

SEQ ID NO: 33247 - DNA, 442 bp, Homo sapiens
tttgaaaacgtttgacttgattacactcagcttggcacgaggggctagcgggcaccacagggagaaaggcgctagtgcctaacctttctggtccctctcccggaggcccttgtagaggggcacgtccataaatgttcttatggaactctcccacatgctcttccccaacttcatttgcttctctcaacaacctcatctgcattttctatttctatatgaaacagactctatattgctatatctctgtatatactttcccagccctgtctgtctccaccccatcccctcttgtctctgagaaccattctcccaccccaagttccaccttctatgtttctactccctccctgggctctgaatgccttcgcctgtataaagagctggactctctcccctggcgtctgtactgtgtacacacatacctctgagaagcacaaggaga

SEQ ID NO: 33248 - DNA, 445 bp, Homo sapiens
  misc_feature (1)...(445): n = A,T,C or G
tccctttgaaactcttcgaacctaatgaagacctcggcacnancggncnctanttgaatgttttggcccatgactttggaacatggctgttagcttccagcagaatttacgctccccatccggcaggggacataggagctttttcctgcttcctgggcactttcaaagaactatttgcgcaatctgtgggtctgtggattcacggggctttctgtgtgggtgctgcagttgcttttgtctgcagcagcaggacacatctttcctcttactcagccctttatggcccatggggaactccgtggctcagggagagctgaactccaggggtgtgacctgggacgggtgggcctgaggtgcccagctcatggcagccaggtggctcatgggctgtagtgagccagctccctgggggaaaaggctgtgggccgttaagaccatcctccag

SEQ ID NO: 33249 - DNA, 405 bp, Homo sapiens
ggacagttctatgttagaccatgaaacatttgcatacacatcgtctttaatgtcacttttataacttttttacgggtcagatattcatctatacgtctgtacagaaaaaaaaaagctgctattttttttggtcttgatctttggggatttaatctatgaaaaccttcagggccaccctctcccctttttgctcactccaaaaaacttcttatgctttgtactaaagtgcgtgactttcttcctcttttcccggtaatggatacttttatcacataatttgccatgaactgttggatgcctttttataaatacatcccccatccctgctcccacctgcccctttagttgttttctaacccgaaggctctctgggcacgaggcaaaaagcaggccgggcacccatcc

SEQ ID NO: 33250 - DNA, 404 bp, Homo sapiens
tcctggagcttccataggcattttacccgaagctccagcacctggcccaaggctgggctgtgctgtgtcctcagtgaaagaatggatgagtcacagctgaatgactgaagagctgaaccagtaggtttccctggggtttccacaggcagtttcagcccaggggaagacccagggagatgagggccaccttgcaggacgctgtggtgtggaggcagcagcctggggcagggactgtgctgagtgtctgaggccgagccacccctctgtaacctccataatccatcaggtctcagagggccgtcctatgttcagtaagccaatgctagcaccatgtgacgaggacacagcagtgagcatctgcccaggccccttgcactgtgttttgaaaaggaaagctggcttgt

SEQ ID NO: 33251 - DNA, 452 bp, Homo sapiens
tgcagggcccggggggttcccactgggacgtccttagcaccttacgccaagcttggcacgaggcctcgtgccagctgttgtgcacatatatacaaaatacacgtactaacacatattacacatctcacagctcccaagatgtcagttaaagaaattgtgcattaaacaaataccaaaattcttcctgaaatctcaagacagtatcacattgctacacacagtaaaacaagtagtgagatattttctatttttccctttttgtcagcatataatgcttattcatttatgatgattcagggatgataacaataaacagtataatatgaacagcaaaatttttatggaaaactcttaagataaaatatagacatggaccttaatccagttgaggaaatctatccctttcaatgtttgctctcatcggctatttgaaagtatttttatataatgct

SEQ ID NO: 33252 - DNA, 427 bp, Homo sapiens
ggctcaataaatagttatttttcctgagaaggagaagggcgaggcacctttacatatctgggcaaaaacacctttaagcagcagtaaaacctaaaggaagaacagcacactagcacatgcagatgaaggaaagaaagctttgtgcggcttgcttgtgtgaacgacaagcccaggggttttgttttcttgtgtttacgtaggaaaatcacagacagggacttcccaagagactgtttctcttagccactgtctgctcctaacagttacaagaactgttcttcctcccacagctgtggcagaagcctgcttctgcagggtctctgatggggaagaactgagctgtttaggattgaactgcccacctactggtaagtaatgttctgtctgtaacacaggatttccacttaggaaaatgtgctgtacactg

SEQ ID NO: 33253 - DNA, 368 bp, Homo sapiens
ggcatgaaaccacacgccggagggttttacgcgggttccttttgtgattgctggagttgggtattgccaggaggctctccgagattggggtcgggtcactgcctcatccaccggagcgatggcgtttctccgaagcatgtggggcgtgctgactgccctgggaaggtctggagcagagctgtgcaccggctgtggaagtcgactgcgctcccccttcagttttgtgtatttaccgaggtggttttcatctgtcttggcaagttgtccaaagaaacctgtaagttcttaccttcgattttctaaagaacaactacccatatttaaagctcagaacccagatgcaaaaactacagaactaattagaagaa

SEQ ID NO: 33254 - DNA, 441 bp, Homo sapiens
  misc_feature (1)...(441): n = A,T,C or G
gcgcgttcctttgaaaccctcgatgagcacatncagacctcattacgccagcttggcacgaggcttcagctaccttcttacagactttggctgtgttggtacccttttgtgctctgagctaagccacatactaaactgactttttgggttgtatacccttgctcccgccttctgatgaaaacaccttaccctcacaaccaccatctttcctctcctttccaaagctctttccaccttgctgcactaagataaagggacacttccactatatgtcaattccacacacatttattaggtacctgtgagggaggatcctatcctctcaaacttccatttctcatgctacagagaaagataaggaagatgagcaagtgcctggaatggggcaggctgagcagtcacacaggcatataggcacgctgagaacctggaggggagacg

SEQ ID NO: 33255 - DNA, 477 bp, Homo sapiens
  misc_feature (1)...(477): n = A,T,C or G
aagatgaaaacttgaaaccatatgagaaagcgttcgccaagctcggcacgaggctgcgagccacgattcccgatccagagacaatggccccgatgggttggagcccgattgcgtcatcgagagtaactggaatgagattggtgacagctttgatgacatgaacctctcggagtcccttctccgtggcatctacgcctatggttttgagaagccctctgccatccagcagcgagccattctaccttgtatcaagggttatgatgtgattgctcaagcccaacctgggactgggaagacggccacatttgccatatcaattctgccgccgattgaattagatctaaaagccacccatgccttggtcctatcacccactcgagaattggttcagcagatacagaaggtggacatggcactaggagactacatgggcgcctcctgtcacacctgtatcggnggcaccaacgtgcgtgctgn

SEQ ID NO: 33256 - DNA, 435 bp, Homo sapiens
ggtggcacgagggattcaatggctttatgtcactgacaaattttcattttggacaacatgctagtgtgagtagtttctggtccagtgaaatccagttttcagatattcctatttttggattctcagctgtgtatttgaaatcatcacatttgaaatttgtttgttccagaacatatatgttctcattcttgtttgtacttgagtcatgtttaatcacatatatctgtagtatgcttagatgtagtagtttccattttcataactacttttctgttgatccattatggtgaattgcagctacaaagtcatactgtgtagtagcgaaaatgctaacataagaagtaaatagtagcaagcaaaggatttttaaaatatccaacctagtcatatatacccgtttagctcagtagttctcagctgtggaataccattctg

SEQ ID NO: 33257 - DNA, 437 bp, Homo sapiens
  misc_feature (1)...(437): n = A,T,C or G
agccccccacgccccttttgagnacttcgaatagacgactatcgccaagctcggcacgagggatactcgtgtccgaattccaaaacacaatgcacaagtttaacttgggcttttcgtggcgtgttgagatttggaatgagggtgctaagagccgtggtcttcatggaattttccacgccacttggcaacttggcttaccgatggatgggctaaagatctttgtgtttcttggaagtcacagggaatattgaagagaacgcttgagcatccttggcaacagcccaggtgggacctggatgaagctttgcactcaagtattgtcaagggaagcttcctgtgaaccaaagttctcaggccaaggtctcgcccaccaaagccagaaagtgcaagcacccgtctacccagctctaacttgtatgtgtgagacagaccaagct

SEQ ID NO: 33258 - DNA, 380 bp, Homo sapiens
gggcagatacagttccaccactctacattaagtatgtggaaaacagaagatatccttttggttcctgggtctccagaacagtaggagcaaacatccaaatctgatatagcacttccagagagcctggtcttggaggataaaactttaccttgatgggacttttggccccggtcccttaagagttgggatttggggttgtactgcagcacaactcagcctatcctaatacatatgggaatgcaaacatctcagatatttcttcttgggtgcaatttaaaatacgtatgaaatggcttcagaagtgtccatgaaccttctaaattacatacaagaattagggagatacatttttctgggaacatacagatgttaagacttcc

SEQ ID NO: 33259 - DNA, 493 bp, Homo sapiens
  misc_feature (1)...(493): n = A,T,C or G
gggagggcggcggattggncctgatttcgtnagcatttcacctgatacgccagcttggcacgaggcaccaactgaaggtacattggacataaaagaagatatgtttgagcctcaggagaaaaaactctcaaagaacactgattttttggctcctggtgttagttccttcacagattctaaccaacaagaaagtatcacaaagagagaggaaaaccaagaacaacctagaaattattcacatcatcagttgaacaggagcagtaaacatagccaaggcctaagggatcaaggaaaccaagagcaggatccaaatatttccaatggagaagaggaagaagaaaaagagccaggtgaagttggtacccacaatgataaccaagaaagaaagacagaattgcccagggagcatgctaacagcaagcaggaggaagacaatacccaatctgatgatattttggaagagtctgatcaaccaactcaagtaagcaagatg

SEQ ID NO: 33260 - DNA, 421 bp, Homo sapiens
  misc_feature (1)...(421): n = A,T,C or G
ctttgagactatcggatagacgaccatgccaagcncggcacgaggatctgagtgggaagctgcaagctcttaaagagctgatttatgtccagcacttttgggtggacgtgatgctgaatcctggcggggccacttcgaatgttgctatttctgtggatcaaaaacaagtgaaaactgtacgcacctgcacatttaagaattcaaatccatgtgatttttctgcttttggagtcttcggctgccaatatttctcttcggggaaatattactgggaagtagatgtgtctggaaagattgcctggatcctgggcgtacacagtaaaataagtagtctgaataaaaggaagagctctgggtttgcttttgatccaagtgtaaattattcaaaagtttactccagatatagacctcaatatggctg

SEQ ID NO: 33261 - DNA, 398 bp, Homo sapiens
  misc_feature (1)...(398): n = A,T,C or G
ggaaaaagaaagctgtgaaattgaagtcccaatttaagagtcctgaggcagaacctggtggctggaggcattcccagaggtggggaagagagcctgcccggccggagaacatctgccttgctgcacctgaggcccagcagagccgttcctgggactgtcagataatcggtgcagcggtggaaggagcctgcggctgctggcacagacttcacacagcacctcctctctgctgggtttccacacagcctgtcttcagatcctgctgccgcgtgcgaccagaggtgggaggcccctggtggcatggaagagggagggtcagtgccaagtctcatgaggagggcgcatgtgtgtatcaccctcagctggcggaacctggctgcgaactgtgcagttacgtn

SEQ ID NO: 33262 - DNA, 392 bp, Homo sapiens
ggaaaaccttcagcattttgcagagcttagcttttcattccttttcattatgtagaacaaactgtggggagttcttatgggcctatttttggtgatgcctgagcaaacaacctgcttactcttgtgctctgcagggtttgatggagcctcatttccctttgggaacacacaatgcaaaatgaattctttttaattgtaggaatttttaccaaggggatttaatggcgtttatttcttggtttctttatgagattatcatttgattcattctcacattcttttgctttaaatatttttaagcgaccttttttctttggctttcaaatgttcgacatgaatcaaaattgtggaacacccaatgataacatgtgttttaatagaggggatgaagg

SEQ ID NO: 33263 - DNA, 387 bp, Homo sapiens
gggccaagtaaggcttcgtgcataacgtcttcatgtcgcgtatagttgagcgcgttcttagcagctggcttcatggacaactcattaatggtttgacttttcttacccaccggtaattgaattcttgcttttaaacaacttcctttttgtagtggggaaccttgccctttagtacacctcaagggaatctggataattgttcatctttgctttagcttacataccatgtaccggtctgcggctacaggaagctggttctgtctgcttccacagtctgcttaaaaaactgtctgacttcgtgaatatagagaccaagtttaccacttctgatgaagagaccaactaagattcattcctcattctgtttctttccagagggagaagaga

SEQ ID NO: 33264 - DNA, 434 bp, Homo sapiens
ggagcaactatgttttgtctcgctacatttaatgcaatgagacacctttgttcatttttttaaatctgaaatatactttacctgacccactttgattgcatactatattctttgttaattttaattttgccctgttcctagactgctagaatctggcccctggccatcttatagtgccaacatatgcctgcagggtttataaaaaatggcctggagtgacacattttattatacctaatattcactgcatcaatatcacatctagctcccttacttgtccacagataatgtgaactaaggagggaaaaacctattaaattctccttcgctgatggcttggactggaatagagcccgtgtccctggcagtgtacagtgagctcacttccagttgaaagatccatgcgtttctgggcaggtattctgctcactggg

SEQ ID NO: 33265 - DNA, 447 bp, Homo sapiens
  misc_feature (1)...(447): n = A,T,C or G
tgagggtttttttgattacgtctacgtcctcgannacgccaagcttggcacgaggattttcgccattttacaatggagagttgtgacaagtacatgttatttagtttgcacttaactatgccaaaaaaagtttgaagcgctctattctcagacatgctgtattattacttctcattcaagattgaaaaatataaaggtatccaaactctgtcttaatggaaatgtaactatttttccttcaagggttgactaaggagtcggcttctctcttaaagacactcactgtacaactgaaagcagctgtcatatttctggcaaaatgtgtttacgtatctgacaagctgtacatttgtgtatgaactgacataaaatgtgaaagcctgtaagtgtacatgtagtggtgtggtgttctgtctagaggatacaactgaatgcttttaatttgct

SEQ ID NO: 33266 - DNA, 443 bp, Homo sapiens
  misc_feature (1)...(443): n = A,T,C or G
ttttgattagcgtncggaccancannacgccaagcttggcacgaggctttgtttcccatttatttattacccttttgcatgtatttgcgtgacagggaactctgcagcagggggtgactgacacaccaaacaagatgtttcactgggtactctgtcatataaatggcagattaagaagattgactataccaaacattatattaaaaacacacaataaaaactataaaaatgtactttaggacattaaagaaaactcaagttagaagcataccattttcctttcatggaagggtacaatattacaaagataatttgtttaacttgatttattaaattctagatatgtgccctataatgatgtttcaatcagggacagacctcatatatggcagtggttccataagattacaatactggatttttactggaccttctttatgttt

SEQ ID NO: 33267 - DNA, 401 bp, Homo sapiens
ggcacgagccaccatggtgctgtctcctgccgacaagaccaacgtcaaggccgcctggggtaaggtcggcgcgcacgctggcgagtatggtgcggaggccctggagaggatgttcctgtccttccccaccaccaagacctacttcccgcacttcgacctgagccacgggtcttcccaggttaagggccacggcaagaaggtggccgacgcgctgaccaacgccgtggcgcacgtggacgacatgcccaacgcgctgtccgccctgagcgacctgcacgcgcacaagcttcgggtggacccggtcaacttcaagctcctaagccactgcctgctggtgaccctggccgcccacctccccgccgagttcacccctgcggtgcacgcctccctggacaagttcc

SEQ ID NO: 33268 - DNA, 442 bp, Homo sapiens
agggagaatttgatccgtgtcactcgcaaccacgatacgccagcttggcacgaggattttcgccattttacaatggagaggtgtgacattttcagtttatcaagcttgcacttaactatgccaaaaaaagtttgaagcgctctattctcaaacatgctgtattattacttctcattcaagattgaaaaatataaaggtatccaaactctgtcttaatgtaaatgtaactatttttccttcaagtgttgactagggagtcggcttctctcttaaagacactcactgtacaactgaaagcagctgtcatatttctggcaaaatgtgtttacgtatctgacaagttgtacatttgtgtatgaactgacataaaatgtgaaagcctgtaagtgtacatgtagtggtgtggcggtctgtctagaggatacaactgaatgtctttaat

SEQ ID NO: 33269 - DNA, 398 bp, Homo sapiens
ggcaaaatgggaataataatgcctactttatatagtgattgtgttgctagtagatgaagaaaatacctggcctggcttggcgttcaatcactagtgattggaataaattctgataccatgtgttgagtgtcagattgaagtaggagagtgtggcgatccaggctcttaaccttgttctactgactcaaacctgggaaagcattttatacctgggcctctttttcctcagttctacaaacagggaatgaggtagaaagttggtctgtaattgctgatgtttcttcctgttctgtgtctccaaaggcgcattggtctgtggtccaaggagattaaagagtcaacagggacctaagagaagtctcaacttcggtcctgcttaagcctgcagcaggaacagt

SEQ ID NO: 33270 - DNA, 493 bp, Homo sapiens
  misc_feature (1)...(493): n = A,T,C or G
nctcgagaccgtttgacctgattacgccattgagcacatggttttccttgtgacagagacaacgaatacaattgtttcttttccggatgaacaaggatctgttttgcaaatgtttgtaagatattatgacatttccaagattttctttgcattctggaaagcaggaggtaaacatttgtagtcattaaggtaaagtctgttgataaaccatcttctgtttactgacaggtaaattgtaactttccctagcttttgaaatgagtaacttctatacaccacaaagtgaggcacagcctgggaaaggtggctagacaaggggcaagccaggctttctagcttctggaaggatcgagtggcctatcaggcatctaagataaagaaagcaatgattcggaagtccagtagggcccatttgaccggtagcaaaatcgaaagcacgaaatagatcaagggtagggagccagacaaagcccttggaaaagaggcagattgc

SEQ ID NO: 33271 - DNA, 442 bp, Homo sapiens
gaagaggaagatgaagaggaagaaatcgacgtggtcactgtggagaagcggcgttcctcctccaacaccaaggctgtcaccacattcaccatcactgtgcgtcccaagaacgcacccctgggtcccgggagggctcagtccagcgagctgatcctcaaacgatgccttcccatccaccagcagcacaactatgccgccccctctccctacgtggagagtgaggatgcacccccacagaacaagataaagagcgaggcgtccccacgtccgctcaagagtgtcatccccccaaaggctaagagcttgagcccccgaaactctgactcggaggacagtgagcgtcgcataaaccacaacatcctggagcgccagcgccgcaacgaccttcggtccagctttctcacgctcagggaccacgtgcctgagttggtaaagaatgagg

SEQ ID NO: 33272 - DNA, 460 bp, Homo sapiens
  misc_feature (1)...(460): n = A,T,C or G
ntttgatnacagtcttgaccatgcattgcaccaccttggcacgaggcctcgtgccaagcttggcacgaggtggattttcaagtactggttggggatgggaatcgtgcttttctttaaacttcagtttacgagatgctttgagagcgttaggcaaaagcagaaataaatatcaggagcaacggggaaagctttataaaagatcatgggggccactgttgcagctttgaagaatgagtgctggcttgaacagttctttgcctgcatcattggtagctgcactgaaaggaaaaaactttcaccttaagaatttgaaaaggaagaaacctgggctctggtcttcatggcatttagactgagatgcttaaacagaacagaagtaatacgcatttcctgccataggatagggaaaatgtaacaagctggttgctcttgaggttagaaaattgtctgtttctctgtg

SEQ ID NO: 33273 - DNA, 435 bp, Homo sapiens
ggccttcaagagccccgcctccaaaggacctttggcctccacagaccttgtgaccgactggacttgtggcctcagcgtcctgggacccaccgatggcggggacatgtgagcgcctccagccccatagcccctgccggccgcacgtgtaaaaagccccgtgtgcaggcagcagggcggcgtggaagcttcaggcagacgcgggacggggagaaccaaatgtccaagttgctgaactgatgatcactggagaaagagaaactatccaccaggacagctgccacctctaaaccaagtagaattctctgtgaaatgggagcgccgtagaattttaagtaatttaattgcaaacccggtttggtttttggtttttggttttttttaattcttgaggaaaaagctggaaaatagtaatagggctatttaaattttgtaggg

SEQ ID NO: 33274 - DNA, 465 bp, Homo sapiens
tcgaggcacgatgcctcgtgccaagcttggcacgagggaagagtgtgcttgtcatctgccactttcgggagggtggatccactgtgcaggagtggccggggaagctggcagcactcagtgaggccgcccggcacacaaggcacgtttggcatttctctttgagagagtttatcattgggagaagccgcggggacagaactgaacgtcctgcagcttcggggcaagtgagacaatcacagctcctcgctgcgtctccatcaacactgcgccgggtaccatggacggccccgtcagccacacctgtcagcccaagcagagtgattcaggggctccccgggggcagacacctgtgcaccccatgagtagtgcccacttgaggctggcactcccctgacctcacctttgcaaagttacagatgcaccccaacattgagatgtgttttaatgtaaaatattgattctacg

SEQ ID NO: 33275 - DNA, 444 bp, Homo sapiens
  misc_feature (1)...(444): n = A,T,C or G
ggtcagagagggatctaggctttgctcagagagggatcgaggcttagcttatagagagatctaggttttgcttagacagggacctaggctttgcttagggagaaacctaggctttgcttagagagggatctatactttgcatagagagggaaccaggctttgctaacatatattgcttttgtcccttctatgggtctaatgcagaatgtggcatggtctgtaagtgaaatctgcgagtttatatctttaaaagttaaaagtcttttaaaaaagtcaacgctgtataatttagagatttaagatacaccttttggattattttatcatcttggatattttactgtaatttgaactttctgctatatgtgggcaaccctgctaaaaaaaaaatcttgaagccctgggataaaangagggttccttgctactcttatttttggggtt

SEQ ID NO: 33276 - DNA, 400 bp, Homo sapiens
ggtggcacgaggcctcgtgccaagcttggcacgagggaccacttctaacatcaccgagaagatcgacgtggccttcgtggacagggctgacatcaagcagtacattgggccaccctctgcagcagccatcttcaaaatctacctctcttgtttggaagaactgatgaagtgtcagatcatataccctcgccagcagctgctgaccctccgagagctagagatgattggcttcattgaaaacaacgtgtcaaaattgagccttcttttgaatgacatttcaaggaagagcgagggcctcagcggccgggtcctgagaaaactcccctttctggctcatgcgctgtatgtccaggcccccaccgtcaccatagaggggttcctccaggccctgtctctggca

SEQ ID NO: 33277 - DNA, 401 bp, Homo sapiens
ggctgggactttccgggggagtgaggaacccagcaacacgctcctgacttcccttcccaaggactcgacctgagaaccggcatgttctcggagatccagagggagcgggcagacattgggggcctgatggcccggccagaatacagagagtggaatccggagctcatcaagcccaaaaagctgctgaaccccgtgaaggcctctcggagtcaccaggagctccaccgggagctgctcatgaaccacagaaggggccttggtgtggacagcaagccagagctgcagcgtgtcctatagcaccgccggcggaaccagctcatcaagaagaagaaggaggagctggaatccaagcggctgcagtgcccctttgagcatgagctgctgagacggcagcagaggct

SEQ ID NO: 33278 - DNA, 400 bp, Homo sapiens
ggtggcacgaggtgctgatgaaacttgggactctgcaatagatacatggagcccatcagaatggcagatggcttatgaaccacagggtggctccggatatgattattcctatgcagggggtcgtggctcatatggtgatcttggtggacctattattactacacaagtaactattcccaaagatttggctggatctattattggcaaaggtggtcagcggattaaacaaatccgtcatgagtcgggagcttcgatcaaaattgatgagcctttaaaaggatccgaagatcggatcattaccattacaggaacacaggaccagatacagaatgcacagtatttgctgcagaacagtgtgaagcagtatgcagatgttgaaggattctaatgcaagatattt

SEQ ID NO: 33279 - DNA, 463 bp, Homo sapiens
  misc_feature (1)...(463): n = A,T,C or G
nttcgannaccagcttgaccatgatttatcgccaccttggcacgaggtaaaaatctttcagaatacaattcagttttagtttcaaaatgttaacaacttgaattacaaccggttatcagttggacagtaagattttatccctttctcttctgactggtatacctatttcattagtagctaggtgcacatctacatctagcacagctgtgaggacagacagaaggcaaagtttccatgtggccttgagcaagtcccatctcacctctaggcctcagtgtcctcatctataaaatgagggacttccctagaagtcttcatggtctcttccagcccagacatcctgtgatgtcatgaaagcacctgccctctgtttcccctcagaacaccctgtaccatccatggagcacgaggccttcagaaaagacacttcaatgggagtgaacatttctaactaaggacaggg

SEQ ID NO: 33280 - DNA, 423 bp, Homo sapiens
  misc_feature (1)...(423): n = A,T,C or G
ggcacgagccccagccagggctgtggctgaagaggctctgggtgctcttggaggtggctgtgcatgtggtcgtgggtaaagtgcttctgatattgtttccagacagagtcaagcggaacatcctggccatgggcgagaagacgggtatgaccaggaacccccatttcagccacgacaactggataccaacctttttcagcacccagtatttctggttcgtcttgaaggtccgttggcagcgactagaggacacgactgagctagggggtctggccccaaactgcccggtggtccgcctctcaagacagaggtgcaacatttgggagtttatgcaaggtaataggccactggtgctgaattttggaagttgtacctgaccttcatttatgttcaaatttgaccagttcaagaggcttattgaan

SEQ ID NO: 33281 - DNA, 399 bp, Homo sapiens
ggcacgagcaggatgttctaccgggactggtggaactcaacgtccttctccaactactaccgcacttggaacgtggtggtccatgactggctgtacagctacgtgtatcaggatgggctgcggctccttggtgcccgggcccgaggggtagccatgctgggtgtgttcctggtctccgcagtggcccatgagtatatcttctgcttcgtcctggggttcttctatcccgtcatgctgatactcttccttgtcattggaggaatgttgaacttcatgatgcatgaccagcgcaccggcccggcatggaacgtgctgatgtggaccatgctgtttctaggccagggaatccaggtcagcctgtactgccaggagtggtacgcacggcggcactgcccctta

SEQ ID NO: 33282 - DNA, 447 bp, Homo sapiens
ggggtgagggtaaagcttttctataatcaagctcaatacaccaaggaaactggatccagaattcctaaactttaaaatggtactgtctgcggagtggagtatggatggttatgtcaaagtcatacttcatcctatccagatgtagcattcatggtaaacttttaagtgctaagcaaggaattatttactgattgggtttaaagagagcagaaaacacccacgtgtagaatgtctactggttgctacctacaaaacttttccattcctctttcatacattccaacccactggaagtctttagaggtattttgatttaaagcatacttaaattacgatttcttaaagaaaacatagggagaaaactttacatgcgattaaaaacggactttcctgtgaattgattttaatcattcattcggagaagacgcatgacctttgtatttcact

SEQ ID NO: 33283 - DNA, 454 bp, Homo sapiens
ggggaaattgttaaggaagtcagcacttacattaagaaaattggctacaaccccgacacagtagcatttgtgccaatttctggttggaatggggacaacatgctggagccaagtgctaacatgccttggttcaagggatggaaagtcacccgtaatgatggcaatgccagtggaaccacgctgcttgaggctctggactgcatcctaccaccaactcgtccaactgacaagcccttgcgcctgcctctccaggatgtctacaaaattggtggtattggtactgttcctgttggccgagtggagactggtgttctcaaacccggtatggaggtcacctttgctccaggcaacggtacaacggaagtaaaatctgtcgaaatgcaccatgaagctttgagtgaagctcttcctggtgacaatgtgggcttcaatgtcaagaaatgtgtctgtcaag

SEQ ID NO: 33284 - DNA, 417 bp, Homo sapiens
ggccgccctccttggcctcccaaagtgctgagattacaggtgtgagccaccgcgcctggccttttttttttttcccgaaacaaagtttaatttttttgcccaggctgaagggcaggggcccaatcttgactaattgaaacctttgactttggggttaaagaaattttcttgtttaagtttccgaagaattgggaataacaggccccccccaccatgcccagttaaattttgggtttttttgaaaaaacagggtttttccacattggccgggcgggtttgggactcctgacctaagggaatccatccttttcaccctccaagggggcggaaattataggcatgaaacaccttgcccggcccctgggactaatttttaaaaaggattttgggataaggggtttccacttttgagggaaa

SEQ ID NO: 33285 - DNA, 436 bp, Homo sapiens
  misc_feature (1)...(436): n = A,T,C or G
ggcctcgtgccagtctcttagataataaaacatatggggagtggaatagtcatttgcttcaagttatacagctaggaaatactcaagccaaatcttgaacgcagctccccctaattctgtggacaggcactttgtaccacacaccatggtccacctaaaaacagaaggataaaaagacttcaggttttcccactgtgtgctgaccatcccaatttatgaatcttcttcaaaatgacatttcacagttatagttagggctcagaaatggcattgaggtagccttatttctcccctttagcagatgctttaagtacacattgctgacttgagcccacccccaggagttaggagaacatttcctttttcatgccatcttccataaataaggcgcttcttggccttcaaagatatagaactttgcagcagtagtaaaagn

SEQ ID NO: 33286 - DNA, 492 bp, Homo sapiens
  misc_feature (1)...(492): n = A,T,C or G
gccnatggcntggtccggggaatgaaaactgaatgcnctgccnacgccaagctnggcacgagggcaggatcttgcttgcctcatttgtttcctggttatgttcttaggattctgactaagaggcaaaagagaaaagactcgggaaactgatcctggagatcgagaccatcctggctaacatggggaaaccccgtctctactaaacatacaaaaaattagccgggtgtagtggtgggcacctgtagtcctagctactcgagaggctgaggcaggagaatggcgtgaacccgggaggtggagcttgcagtgagcggagatcgcgccactgcactccagcctgggcaacagggcaagactctgtctcaaaaaaaaaaaaaaaaaaaaagcgggtccttttttttggggcaaaggggggaattaaggccttggttcaaaattttaaaaatttttggggggggtgggaaaaaacaaaatttggacaaaaccttttgn

SEQ ID NO: 33287 - DNA, 427 bp, Homo sapiens
ggcacaacaatacaaggcagagaagcagaagggccggttccgaatgaaggaaagggaagagatgtggcaaaaaatcgaggagctggcccggcttaatccccagtatcccatgttccgagcccctccaccactgccccctgtgtactcgatggagacagagacccccacagctgaggacatccagcttctgaagaggactgtggagactgaggctgttcacatgctaaaagacatcaagaaggagaaagtgctgctgcggaggaagtcggagctgccccaggacgtgtacaccatcaaggcactggaggcgcacaagcgggcggaagagttcctaactgccagccaggaggctctctgacccctcacgttcctaccacagggccacagcccacacagccctgggacactgccctggccctccatactt

SEQ ID NO: 33288 - DNA, 421 bp, Homo sapiens
  misc_feature (1)...(421): n = A,T,C or G
ggcagaaaagctcaagggcagctagcttgcctcttccctggaagaaaggtgctctgggactcaccaaccctgagaaagatagctttcctggccaccaccattccccaccaccctggagaagccaattcccaggcttgaagggcactggctggcaggaggcctcttcattctgcaggaggtggaaaggacacctgtagacaggtgatgctcacccctcacctggcgccatggggctgggaggtgagcggctggcatgtttgttcctagggagcaccatgtgagcttaaggctcccctgaccggccccaccacatggcccagcctcctagcacagcagcgctgacctcagtgcagtctgaggattggaatccaccatgagatgatgtgagagctgtgtgccccaggatcaactttttctccan

SEQ ID NO: 33289 - DNA, 391 bp, Homo sapiens
ggggtgagggcggcttgcactttggggtaccccaagggcggagttcgttggtcagattgtaacaggattactggaagacttattcgactgtcctgatgatacttgtaataggaagtgccgtcagaagcgataactgacgacgtctaatgtctatctgaccgcagtcgctgatacctctaccacttacttgaccgtaactgccatagccctgccctgaattcctggccttactccctctttaagattgcgtacccactgcaaagtgctgaacacggggtagccacgatgtgagaggctctttggtgtatggtctaacatggaacgtagctgtgtcacttgaatgcacggatattggcgtgttgacaagggtctaccactaagcgtattatag

SEQ ID NO: 33290 - DNA, 432 bp, Homo sapiens
ggggatttgatggcgggatgtctcacagaaaggactccgctcccacacatgggtccctcggcttcctgcctcggaagcgcatgagcaggcatcgtgggaaggtgaagagcttccctaaggatgacccgtccaagccggtccacctcacagcctttctgggatacaaggctggcatgactcacatcgtgcgggaagtcgacaggccgggatccaaggtgaacacaaaggaggtggtggaggctgggaccattgtctaaacaccacccatggcggttgtgggcattgtgggctacgaggaaacccctcgaggcctccggaccttcaagactgtctttgctgagcacatcagtgaagaaagcaacaggccgttctataagaattggaattaatgtaagaagaaggcctttacacgagacttgaagaaatggcagg

SEQ ID NO: 33291 - DNA, 414 bp, Homo sapiens
ggctgaaatttgtatcaattgttggttccctgaagattgtgctggacagagtatgccataaattggtatgtttggggtgatcttttttagttttgaaaagcatttgactggacctaaagttataattattttcaagagtattgactgtcattcagttgtctattaatggaattcccagataaattttgcataatattaaaatacggcaaaataaagttagtcaggtcctgaatgtgagaaaatacaacatactttccagaagatcgggcttcttttcctcaagatggtgacctgcttctgttacacattcttgtctttcactcgggcctgttttctctaagcaaattaataggcttgcatcttttaagaaatgatttgattcctacaatggccataatttaagatccactgccg

SEQ ID NO: 33292 - DNA, 415 bp, Homo sapiens
  misc_feature (1)...(415): n = A,T,C or G
gggcggcgcttaccagagtcctggtcagctgagtggaaatagaaggatttctgctgccatcatcttccatgggctttccaggtcacacgacctacaagtagggagcagggaaagaagagtgagcctgcatgccaattctaagctcttcaggatcaaatgtcgttcgtcctgtccagaatggcagcctgtggaggcacctgcaagaacaaagtgactgtgtccaagcccgtgtgggacttcctgagcaaagagaccccagcccggctggcccggcttcgggaggagcaccgtgtgtccatcctcatagatggcgagacttctgacatctatgttctccagctttccccacagggtgctcccccggcccctccaaatgggctctacctagcccggaaggctctcaaggggctgctan

SEQ ID NO: 33293 - DNA, 411 bp, Homo sapiens
ggctggggagcccacgctgcctggcgactcgggccaccgaatgtgagaccgagtccctttatgtcactagcgcacacgctgatttgaaccctgcttcgacgtgtgtgtcatggcttaaaaatagctgctaatctgtcaacctgtcttgggcagaaacagcggcggcgacagcagcaggagcgtcatggccgtggcgctgtctgcgccggcgatccgcctttcggactgaggcccagcgcagcgcttgcaaagagcagctacctggcaactgaacccatcatcaccacagccactcctgcagctgccacggtttctgccacctctaagatgtgccctggtaactggctttgggcttctatgacttttatggcccgcttctcccggagtagctcaaggtctcctgttcgaacc

SEQ ID NO: 33294 - DNA, 420 bp, Homo sapiens
ggaaacaataaaaaggaagattgcaccagtcaagaggggagaagacttgagcaagtccaggaggagcagaagtcctcctacatcggagctgatgatgaaattctttccttctttgaaaccaaaaccaaagtcagattcacacttgggaaatgaactcaagttaaacataagtcaagaccaaccacctggtgacaatgctcgatcccaggttttgagagagaaaattattgaattggaaacagaaatagaaaagtttaaagctgagaacgcatctttagctaaacttcgcattgaacgagaaagtgccttggaaaaactcaggaaagaaattgcagacttcgaacaacagaaagcaaaagaattagctcgaatagaagagtttaaaaaggaggagatgaggaagctacaaaaggaacgtta

SEQ ID NO: 33295 - DNA, 476 bp, Homo sapiens
  misc_feature (1)...(476): n = A,T,C or G
cggaccnattgaaaacctatcggtagtaacgttaggaccancannacgccaagcttggcacgaggcaggagaggatatcgtgattttccccccttgttcccaggctctgttctctgggggggtggggggcgctccaagccggggagccgtgccagccgagtcttgcgggctgtggcagggaaggggccaccatgggatgtactctgagcgcagaggagagagccgccctcgagcggagcaaggcgattgagaaaaacctcaaagaggatggcataagcgccgccaaagacgtgaaattactcctgctcggggctggagaatcaggaaaaagcaccattgtgaagcagatgaagatcatccatgaagatggcttctccggagaagacgtgaaacagtacaagcctgttgtctacagcaacactatccagtccctggcagccatcgtacgggccatggacactctgggcatcgaatat

SEQ ID NO: 33296 - DNA, 411 bp, Homo sapiens
ggaggcacgaggttcacatgcacattgaagtttgagaagcctggctccaactgtctaaaatgtcctggcctcagcaattagcctaaacagctgggactccatgtgtccctgtatatgtctgtacccctttcatgtgcctgctatcttgtactgcctgaccaagctatgtgcccttagatttgggaaatatgtatctcctgaaaatcaagactgtgctttgtctttattgagcaagcagccctgtttcaacagaggtagctgccttcatctgcgcgctagagggctgggctggacttcagctttcacctaggaaatgagtcttgctgccctttccagaaagtgacacaaacttgggcactcaaacctgggcatacagaattctcattttactccatacccaacccacagagt

SEQ ID NO: 33297 - DNA, 414 bp, Homo sapiens
gggcttgtcggggacggtaaccgggacccggtgtctgctcctgtcgccttcgcctcctaatccctagccactatgcgtgagtgcatctccatccacgttggccaggctggtgtccaaattggcaatgcctgctgggagctctactgcctggaacacggcatccagcccgatggccagatgccaagtgacaagaccattgggggaggagatgactccttcaacaccttcttcagtgagacgggcgctggcaagcacgtgccccgggctgtgtttgtagacttggaacccacagtcattgatgaagttcgcactggcacctaccgccagctcttccaccctgagcagctcatcacaggcaaggaagatgctgccaataactatgcccgagggcactacaccattggcaaggagatt

SEQ ID NO: 33298 - DNA, 479 bp, Homo sapiens
  misc_feature (1)...(479): n = A,T,C or G
acggaganncctgataactgataacgcttcacatgactacgccaagcttggcacgaggactcatctttggaggtgagcagagagagctctgaggagtttccttcttgcaactcaggcggagctttctttaactcaggagcagcctccattgctcccgccaacccctcaccatggccccttgtccccttgtcccaaccatagcatagagatgacaagagagaggcagtcctatttctgagactggaccaattaaaatgactgcactggctcaaggactctgaacctgtcttgtcctgggtcctccagttgttggaagccactcttttccccaaccatgctgaaatgccacctttaccacacactgatgtcttacatagacttagatctatttctggaacttctcttctcttcgcttacttgggtgtctcatctggcaccagccatacaattttaactattgtcaatttctaatgtctaag

SEQ ID NO: 33299 - DNA, 468 bp, Homo sapiens
  misc_feature (1)...(468): n = A,T,C or G
ccccccctaatgatagcgctccgannatgataaccctcgcnaggcacgaggngcgcttaggagcaagcagggggacttaccagccttcatatggttttgtttgagaaccttttccctaagccactcaggaggcccaactcccagccctctggctcgacacagtgcggcccctttctccaaatcttctacgttctatagaaacagcccagcaagggaattgcatcttcctataagggatggtaatactttggaaatgcatggggacacctgccaacctggcattttcaactatgccacaaggctgggaaggagaagcaagagtcctcaggccatggcatcacatggttctagaccagggagtcgcctaaagcagccgattgggcagattccactggaatcttctcctccagtcggactttctattgaagaagtggagaggctcaacacacctcgccctataaacccaag

SEQ ID NO: 33300 - DNA, 441 bp, Homo sapiens
  misc_feature (1)...(441): n = A,T,C or G
gcccccagcccccattgaaaacatcgaanatgatgactatcaagacccgactacaccaagcttggcacgagggtggaggtggattcccagtggtgtttggacgctaactttggagcttaagccactgcctctccctctgggcccacaaatgggcgccccccctccccatgcagggggtgtcgggcccttcttgctgccctgccccaagttgggggtcagagctgcctgtccccatgcttaacatacccgcctagctgctgtcacatttttcttgttttggccttttatttttttctaataacctaaaaactggcaaaataattctgcaggttgaagccatgtctacatgaaagtcctcagtaagtgttagagggaacagggcggagatatccttatgccacccccgctggaggatgtgggcagcttagggccctggaggcg

SEQ ID NO: 33301 - DNA, 423 bp, Homo sapiens
ggcaaataggccctgaagatctcagcttcaatacagatgaaaatagtggaaggtaattgccaaatcaagagaactgacttgcaagctaccttgaccctgaattttgctgtagttggtgctcaaatttgtcatcagtcagataatcagatttggtcttatttcttcattatctcgacctgaaatagtaatttggaaactgttggaaggtggcacagtttagtctaagacagcagtagtacatgggaaaaacagtatgggaagagttctttgtaatgtaaggaaataacaatgtagttctctattaatttagcaaatttgtacattcacaaaaggcagtttgtctactacagcagaaggctggttaactgccagaaaatgtacctccaggccctgcatgccgtcagtaacccgcccggcattggg

SEQ ID NO: 33302 - DNA, 380 bp, Homo sapiens
ggaactggaagaattcgcggccccaggaggtgatgagccactggcccagacagagagtgaaagcgaggcagagctggctggcttctccccagtggtggatgtgaagaaaacagcattggccttggccattacagactcacagctgtcagatgaggaggcttctatcttggagagtgggggcttctccgtatcccgggccacaactccgcagctgactgatgtcttcgaggatttggaccatcagagcctgccaagtgaaccagaggagaccctaagccgggacctatgggagggagaggagggagagctggcccctcccgaagacctactatgccatcctcaagctctgtcaaggcaagccctggactcggaggaagagg

SEQ ID NO: 33303 - DNA, 425 bp, Homo sapiens
ggcctcgtgccaaacaaatcaccccaaaacttaatgacttaaaacaataattatttattctctctcattgggtcaaggaatttgggagaggcttggctaaaaggctctggcttttctcatgtgggtgcaaacagatgtcagccagggctattgttatctaaaggactgaaggggtttctctcatattgttggcaaggtggcattggctgttggcaaaagacctcagttctccacgtgggtctccacaggcctcctgtgggaggccttcgcaggaatgcatcttaatagtatggagagtggcttcccccatagcatgccatctgggagaccaaggcaaatattgccaagccttgtatatgtgtgatgcagccttggaaatctcataaacagaagagtagccagattttgagagactgctgcggctg

SEQ ID NO: 33304 - DNA, 386 bp, Homo sapiens
caagtggcgttcagccacccgagattgagcaataacaggtctgtgatgcagccccagtaagttcctggcggggaagctcacggctgtcaaaagaactcttcgctccagccggcgcacgaaggggaggagggcaggaggctgccgcccgcacaggtcatctgatcacgtcgcccgccctagtctgcttttgtgaatctccactttgttcaacccccacccgccggctctccctccctgcgccttccctctaaccttaaagacccagctacctctacgcaaatggtagctacctctgcgcaggtggaagttgagttcggttcacgcgggaccctcttccctgtggcaagctgctgaaggagacctgctgttactgctttagctgctgg

SEQ ID NO: 33305 - DNA, 492 bp, Homo sapiens
agaggcaggaagatttttttgataccgtttgagaatgcctacgccaagcttggcacgaggggcgacgagtttgaactgcggtaccggcgggcattcagtgacctgacatcccagcttcacatcaccccagggacagcatatcagagctttgaacaggtagtgaatgaactcttccgggatggggtaaactggggtcgcattgtggcctttttctccttcggcggggcactgtgcgtggaaagcgtatacaaggagatgcaggtattggtgagtcggatcgcagcttggatggccacttacctgaatgaccacctagagccttggatccaggagaacggcggctgggatacttttgtggaactctatgggaacaatgcagcagccgagagccgaaagggccaggaacgcttcaaccgctggttcctgacgggcatgactgtggccggcgtggttctgctgggctcactcttcagtcggaaatgaccagacact

SEQ ID NO: 33306 - DNA, 380 bp, Homo sapiens
ggaaaaatagtagaaaggatctttaccagacagtaaggtcatggtacaaatcaggtgagtgaatggtggtcaaaggtagcctgacactctgatgaggacttccagatgagaatgagaaaaatgtctattaaaatcactacctttgataatatctcagatttagaatctcttttgggattcagatagactgattattccaattcaagcgttcacgtaagttttagctactattcctataatacccacctcactaatatcatatcttctgtggaatattcattggcgcgatggcctcatccccttttttactttttattgacatggcggttataaaatgaagagacttactctattggaattttcatctacgtagtatttgg

SEQ ID NO: 33307 - DNA, 434 bp, Homo sapiens
ggcctcgtgccaagcttggcacgaggaacaaaatggattccactgagccaccctacagccagaagagatatgaggaaattgttaaggaagtcagcacttacattaagaaaattggctacaaccccgacacagtagcatttgtgccaatttctggttggaatggtgacaacatgctggagccaagtgctaacatgccttggttcaagggatggaaagtcacccgtaaggatggcaatgccagtggaaccacgctgcttgaggctctggactgcatcctaccaccaactcgtccaactgacaagcccttgcgcctgcctctccaggatgtctacaaaattggtggtattggtactgttcctgttggccgagtggagactggtgttctcaaacccggtatggtggtcacctttgctccagtcaacgttacaacggaa

SEQ ID NO: 33308 - DNA, 421 bp, Homo sapiens
  misc_feature (1)...(421): n = A,T,C or G
agcaaggaataggccatttccatcactacagaaagcttccttatgctcctttccaggccacctcacccacctccaggctcanggcgccaaagatctggtgtcaggccctgctgtttaatttagacttttctagagttttctagagttatgactggatcatacagtatggctcctttttggggctggcttttttgtgcatggcaaagttgggggcaggcatcctgatatgtttgagattcaaccatactggttgctatggtttgaatgtggccgccagagttcatgtgttggaaacttaacccccagggcatcatagctgggtggtggggtctgataagaggtgactaggtcatgacagctctggcctcatgaatgaattaatggtatttcaagagtgggctttttgtaaaggggactctgg

SEQ ID NO: 33309 - DNA, 497 bp, Homo sapiens
  misc_feature (1)...(497): n = A,T,C or G
cgccgcccccgcgnntngnaattgagaaccgttaatagcatgactactccaagcttggcacgaggcccaactatagtgccggaaccttttcatcattctgaggctttgccccacacatgggcctcactcatatctgtcaccttctgaagcctagatcttgttaacccatcaggtgcagtgtcagtttcaaatcaaattatctaagaaaacaagaaaacaaaggcagcagactattggtacacattatagtccaaagtgcttagcgaagtaaaaaaaaaagctttttaaaatttctattgttgtctattgggaatgcttttgatcagaataaagagggtaaagggaaaaagttactacacatgctaggctttctcagtggggaaaaaaatggctggatagaactgggacaaacacagacccatctttaggggtctggattttgtaggtccgactacacagcagnggtaactcatttctcatgccattagctctctacn

SEQ ID NO: 33310 - DNA, 428 bp, Homo sapiens
ggaagtcaccctcaagggcgccaaggactgtgtggaggcagccaagaaactcattcaggagatcattgaggacctggaagctcaggggacattagaatgtgctataccccagaaattccatcgatctgtcatgggccccaaaggttccagaatccagcagattactcgggatttcagtgttcaaattaaattcccagacagagaggagaacgcagttcacagtacagagccagttgtccaggagaatggggacgaagctggggaggggagagaggctaaagattgtgaccccggctctccaaggaggggtgacatcatcatcatctctggccggaaagaaaagtgtgaggctgccaaggaagctctggaggcattggttcctgtcaccattgaagtagaggtgccctttgaccttcaccgttacgtta

SEQ ID NO: 33311 - DNA, 422 bp, Homo sapiens
ggttgacctcgtgttggaccgaattcgcaagctggccgaccagtgcacgggtctccagggcttcttggttttccacagctttggtgggggaactggttctgggttcacctccctgctcatggaacgtctctcagttgattatggcaagaagtccaagctggagttctctatttacccggcgccccaggtttccacagctgtagttgagccctacaactccattctcaccacccacaccaccctggagcactctgattgtgccttcatggtagacaatgaggccatctatgacatctgtcgtagaaacctcgatattgagcgtccaacctatactaacctgaataggttaataggtcaaaatgtgtcctccatcactgcttccctgagatttgatggagccctgaatgttgacctgacagaat

SEQ ID NO: 33312 - DNA, 470 bp, Homo sapiens
  misc_feature (1)...(470): n = A,T,C or G
cgggctttgatacgctacatctgacnacgccaagcttggcacgagggttccctgcaggctgtatcatttgcaaatattttctcccattccaaaggctgtctgttcactctggtaattatttctcttgctgtgcagaagctttttagtttagtcccatttgtctatatttgtttttgttgcctgtgctttgagatcttagtcaagaattctttgcctagaccagtatctagaagaagagttttctctaggttttcttctagtattttcatagtttcagggcttccttttttctttttttttttttttaccctgaaggggcattaattttttgggggaataaaccctgggccaaaagttttggttttttcagttttttttggaaaatcttttttggaacccaccctccttttttgttttagaaacaatttgttctttttcagaagggattttttcaggggggcggggagagc

SEQ ID NO: 33313 - DNA, 420 bp, Homo sapiens
acaggcaaagaagatgctgccaataactatgcccgagggcactacaccattggcaaggagatcattgacctcgtgttggaccgaattcgcaagctggccgaccagtgcacgggtctccagggcttcttggttttccacagctttggtgggggaactggttctgggttcacctcgctgctcatggaacgtctctcagttgattatggcaagaagtccaagctggagttctctatttacccggcgccccaggtttccacagctgtagttgagccctacaactccatcctcaccacccacaccaccctggagcactctgattgtgccttcatggtagacaatgaggccatctatgacatctgtcgtagaaacctcgatattgagcgtccaacctatactaacctgaataggttaataggtcaa

SEQ ID NO: 33314 - DNA, 471 bp, Homo sapiens
  misc_feature (1)...(471): n = A,T,C or G
gcccccatagatanccgttatgaccttggatacgcctagcttgtcacgaggcatgttacacttaaagcacatctctgtttggactcaccatcttttccgcatacaatagccacatgtggctagaaccatagtagtacacagcacaggtctagagactaaggagagatttattctgactggtggtcttatccctggtgaaggatggctggggtttaacaggcatcccaggtagatggaatagcatggaaaagtgaactggagtgatagtatacagtgattggtgtaggtgtggggatgctaagaacaggatacggatggtaagaatgggataagagtgtggaaagccttgaatgccattttatggagtccccactttaggcagtggggaacctgtcaggacttctgatctatgagtaaccctatcagacacctggaggtagtttgaaggatgagctggaggaggtggaaagg

SEQ ID NO: 33315 - DNA, 396 bp, Homo sapiens
ggtttttcactggtttcatggtctgatttattggtggggaatacacaggggcaggcccaggacaagcagcttggctactccccctctgctggctgcccgaccggcagagggggctccatgtggcaggagctaggctcccaacgcccactgttcttgccaccctctgggctcccaggctgggctccgctaggctcctgtctcccctgccagttagttaggcaagttcaggtgtggaggccgcagggatagatccaggtggctctgggctgggccctcttctcttcccaacggggaggtgctgttggcctggctgggctggcctgaatctgtttcaaggtctcccttcctgcccagctcagttcaccagtgctggatccaggttcaaatgacagggac

SEQ ID NO: 33316 - DNA, 455 bp, Homo sapiens
gaacaaactgaaaccgtctgactttgataacctctgcttggcacgaggcacaggtgtcgtgaaaactacccctaaaagccaaaatgggaaaggaaaagactcatatcaacattgtcgtcattggacacgtagattcgggcaagtccaccactactggccatctgatctataaatgcggtggcatcgacaaaagaaccattgaaaaatttgagaaggaggctgctgagatgggaaagggctccttcaagtatgcctgggtcttggataaactgaaagctgagcgtgaacgtggtatcaccattgatatctccttgtggaaatttgagaccagcaagtactatgtgactatcattgatgccccaggacacagagactttatcaaaaacatgattacagggacatctcatgctgactgtgctgtcctgattgttgctgctggtgttggtgaatttgaa

SEQ ID NO: 33317 - DNA, 398 bp, Homo sapiens
gggttgtagaggagtctatcaaaacaatccctcctagactttgtggtcagtcagcaagcgaagaatgtgggggcctgtgcagctgggcacctgaccgcgtttgctgcaaaggagcagcccccgtctggaggggtaggcactgtggggtgggggcctggctttcttggctgtgagagagaaaatggcagaagcattatggaaagacaaccgtcactctgttacaagcagagaccaaggacttggaacgtcctccaaactctgggcttgagaaatgaaggccgaagtcgctgctgagaaagccactaagaaaggagtttgggagatgccaccaggcagccgtcgggggaggcaaaagcgcctcacgcattctgttccttgttgcttctcggtttgtagaa

SEQ ID NO: 33318 - DNA, 481 bp, Homo sapiens
  misc_feature (1)...(481): n = A,T,C or G
agcacgtgnttttgattgatagcatctgcanacgccaagcttggcacgagggttaggtgaaataagcctggcatagaaatataaacaccacataactatgttttctcacttatggatggaagctaaaatttttaatctcgtagaggtagatagtagagttttggttaccatatcctggaaagagtaggagaaagaagagtataagaaaaatgtggttaatacatacaaaattacagctggagagaaggaagaagttctagttctctacagcactgttgggtgactgtagttaacgggaatttattgtgtgttttcaaataactaaaataaaagattttgaatattctcactgcaaagaaataatacatgatttaggtaatggatatgataatgactctgacttgatctttacgcattgcataaatatatcaaaatatcactctgtaccccataacatgtacatttattatatgtcaattag

SEQ ID NO: 33319 - DNA, 396 bp, Homo sapiens
ggatttttttttcaaatatgcctgaacagttaaaaaaatattttgcagcttttggtttcagaatattatttctttctggtgtattatgataattttgaaatgtaaaagaactgtgcaatgggccaggcgcagtggctcacacctgtaatctcagcactttgggaggccgagacaggagcatcacttcaggctaggaatttgagaccagcctgggtaacatagtgagacctcatttctacaaagaaatttttaaaattagccaggagtagtgatgtgtgcctatagtcccagctcttcaggaggctaaggtgggagaattgcttgagcccaggggtttgaggctgcagtgagctctgattgtaccactgcatgggccaactgtgcagttccacttaa

SEQ ID NO: 33320 - DNA, 397 bp, Homo sapiens
ggtggcacgaggctgaagacagagaccatcctcaagacccgcagcctggactatgccggttacaacaacatgtaccactacgcctggggtggccactcggacatcgacctcatggtggacgaaagcgggctgtgggccgtgtacgccaccaaccagaacgctggcaacatcgtggtcagtaggctggaccccgtgtccctgcagaccctgcagacctggaacacgagctaccccaagcgcagcgccggggaggccttcatcatctgcggcacgctgtacgtcaccaacggctactcagggggtaccaaggtccactatgcataccagaccaatgcctccacctatgaatacatcgacatcccattccagaacaaatactcccacatctccatgctgg

SEQ ID NO: 33321 - DNA, 458 bp, Homo sapiens
ccaaaccctgataacgctagtgacctgattaacccttgcttggcacgagggttgaagagcccccagaggagtgtgagtcccaggggtcccgccagctccactcccaccttccaaacctgtgaaagtcaggtgcctgagtcgcacagtctctcccacccgaatgccatgagctgcagcgacccagcctgtctctgcaggagggccagacatgccgtgacatcaccagctcctctaggaatatgggatacaaggagtggctgagatcggctgatcaccagctcactccgctgcagccgccccagagcagtggctccccgaagccgtgttctggctgtcttggccgctttctgtttgtgactctccctgcctccactccccccaccaccccatgaaatgatctcatttggtcatttaaacggaaaactaaaaagttttaagtgactctaggagagcaggag

SEQ ID NO: 33322 - DNA, 396 bp, Homo sapiens
ggaggcgccctccacgaagttcttcgttgggggaaactggaagatgaacgggcggaagcaaagtctgggggagctcatcggcactctgaacgcggccaaggggccggccgacaccgaggtggtttgtgctccccctattgcctatatcgacttcgcccggcagaagctagatcccaagattgctggggctgcgcacaactgctacaaagtgactaatggggcttttactggggagatcagccctggcatgatcaaagactgcggagccacgtgggtggtcctggggcactcatagagaaagcatgtctttggggagtcacatgagctgattgggcacaaagtggcccatgctctggcagagggactcggagtaatcgcctgcattggggagaagct

SEQ ID NO: 33323 - DNA, 456 bp, Homo sapiens
  misc_feature (1)...(456): n = A,T,C or G
agacccactgataccntatgacctgattaccntctgcttggcacgaggtggcacgaggctgaagacagagaccatcctcaagacccgcagcctggactatgccggttacaacaacatgtaccactacgcctggggtggccactcggacatcgacctcatggtggacgagagcgggctgtgggccgtgtacgccaccaaccagaacgctggcaacatcgtggtcagtaggctggaccccgtgtccctgcagaccctgcagacctggaacacgagctaccccaagcgcagcgccggggaggccttcatcatctgcggcacgctgtacgtcaccaacggctactcagggggtaccaaggtccactatgcataccagaccaatgcctccacctatgaatacatcgacatcccattccagaacaaatactcccacatctccatgctggactacaaccccag

SEQ ID NO: 33324 - DNA, 396 bp, Homo sapiens
ggaaacaggccactgagaatgcaaaggaggaagtgaggcgaattctggggctgctggatgcttacttgaagacgaggacttttctggtgggcgaacgagtgacattggctgacatcacagttgtctgcaccctgttgtggctctataagcaggttctagagccttctttccgccaggcctttcccaataccaaccgctggttcctcacctgcattaaccagccccagttccgggctgtcttgggcgaagtgaaactgtgtgagaagatggcccagtttgatgctaaaaagtttgcagagacccaacctaaaaaggacacaccacggaaagagaagggttcacgggaagagaagcagaagccccaggctgagcggaaggaggagaaaaaggcggctg

SEQ ID NO: 33325 - DNA, 397 bp, Homo sapiens
ggaaggtggcagagatgccatggactacaaggtgatgaataccactatgagctcactacaagatctcaaagatttcaagccactggctgttacaaagcataaagccacccttctggagcagcggcgggaggcaggctgggaggaggccccaagttttggccagacgatagaccacctccttaggtgtccggggagctgctgaaacataatgaggaagatgctgctgatccaaaggataaaaacacagaaactagaactaagaagcacctaaagtggactcatgcccagcatccctgcagactgactttctctgagctatagttctgcattggactgtttttcctttgctatcacctgcccaacacacaatcctggatgcttttgattggttggattt

SEQ ID NO: 33326 - DNA, 452 bp, Homo sapiens
ggcgaggtctcgggtatcctttcaaagatagtgaaaagcagacactgctccttgtgcagctctggtacctgctgcccactgctgtcacttcaagccactggcaatgcttctgtcctcgtgtcttggaggaaaatcacctggggggaggggacttcttgtggtaagagcaagtgcaggtatgaaatgcgaagattgccccagctaaaagtggacaagtccgctttgtgagatgaatacttcctgagaaacttgacaagtatctctccattttaccattatgaaaactatcattaaaaaaaacagtttagatgccttctccttttgagggaaaaagggtgctttttattgtataaagcagcgtcttatgtattttgatataccattgtttgaacttccgtctttagctgatagattctcaaatatccttgattttggatgttcagtatgtttgg

SEQ ID NO: 33327 - DNA, 391 bp, Homo sapiens
gggttggggtcggcttgcagtttggggtaccccgagggcggtgtacgtcggtaagattgtaacagtattactggaagacttattcgactgtcctgatgatacttgtaataggaagtgccgtcagaagcgataactgacgacgtctaatgtctatctgaccgcagtcgctgaaacctctacaacttaattgaccgtaactgccagagccctgccctgaattcctgtccttactccctctttaagattgcgtacccactgcagagtgctgaagacggggtagccacgaggtgagaggctctctggtgtagggtttaacatggaacgtagttttgtcacttgaatgcacggaaattggcgttttgacagttttctacgtttaggtgttttatac

SEQ ID NO: 33328 - DNA, 407 bp, Homo sapiens
gggcggaacagaacccgagctgagcttgtggatgcggctgctaactggctgcgcacagaacctgagagaagagggtggcaataagtacttttgcctcattctgaagccttggaaggagctgacaccatgcctcactcgtacccagccctttctgctgagcagaagaaggagttgtctgacattgccctgcagattgtatccccgggcaaaggcattctggctgcggatgagtgtgtgggcagcatggccaagcggctgaaccaaattggggtggaaaacacacaggagaaccgtcggctgtaccgccaggtcctgttcaatgctgatgaccgggcgaaaaagcgcattggaggcgtcattttcttccatgagaccctctaacagaaagatgatgacggtgttacctt

SEQ ID NO: 33329 - DNA, 417 bp, Homo sapiens
  misc_feature (1)...(417): n = A,T,C or G
gggtgaaaagcaacatggacatttccttctagtccttccaaggaggggagagaagtgtatgtgcatttgtgtgtgtgtgtgtgtgttgtgtgtgtgtgtgcgctaagtgagaaagagagcaggctcgggaggccctgcccagggtaggaggagctttctgctttgcaccatctggtggtcgcacgccctgagggcaccccgactctgtctccaggagtctcatcagcaaaccgctgacaagtctttctagaaattctactgcactgcctggctcaactgcagctgcagacatttctgcaggaggagcaggggtttctgtcttctgttccttctagggccacctgtccccttaaacacaggtccacgttgtgtcaagaacctagtgcatctgtgtgtgtctgtcagtgtctctgtgtn

SEQ ID NO: 33330 - DNA, 404 bp, Homo sapiens
  misc_feature (1)...(404): n = A,T,C or G
gaagaactagtgtgctttctcccctttttcaggtgtgccatccatatacaatctcctcttggccaagttcaacaaatgtttccagggaaccccgtgggttgaggcaaagtagccaagatgtattgagttaagtttttctagaggacaaaagtatttcttggcccttttccctcatgctcatatgttttagctgaggcgtaaatggccaagttgagtaatatctgtggaactgagacagagagccagggacccatgtacccagggaccagtcccctggggaatcacacagtggctcagactagactgctctatcccaccagaactctgctgctgttcatttccatcaggaccacccaggaaagcaaataaantagccttctcatcattaggtcacctaatctctt

SEQ ID NO: 33331 - DNA, 446 bp, Homo sapiens
  misc_feature (1)...(446): n = A,T,C or G
nttgaaaccgtgagaccntcttacaccncgcttggcacgaggggcccatctctccatggtcgttgggctttccaaagtctgcggctgactggctttgggctgggccgggctcgggggccacaagcggggtgcgacgaagccgcatctctgcttcatcacatgggcaggtgggctggaggcctaaatgcgggtggacgaggtgctgcccgagctgatggggagcctggcgctgtctgagttgctcttcagaggggaggggccaccccgggcctgcagccgcatggaccagtaccagatgaagatgaggaagccttggaaggaggtgatgatgctgaaaaggtacaggacgacaagctggaaggtgccagaagcaaaggagaagaagatcaaggcccagggcatgccaaggaccaggctgaggcccaccagtgtcagcacatgtgacc

SEQ ID NO: 33332 - DNA, 417 bp, Homo sapiens
  misc_feature (1)...(417): n = A,T,C or G
ggatagaaatagatatgattgtaggaaaagaccgggaaggtttctttaccaacggtttgactcttggcgcgaagaaatgctcagtgatcagagatagtctatacgtcgatggtgactgcacaatggacatccggacaaagagtcaaggtggggagccaacatacaatgtggctgtcggcagagctggtagagtcttggtctttgtaatgggaaaagaaggggtccatggaggcggattgaataagaaggcatactcaatggcaaaatacttgagagactctgggttctagctgctaggcagactgttaagtattaggggaaaattgctcttaaactttcctagctataagcttaagtcttaattctggaaattttattancaatgcagggtgatggggtatgaacctgtgtctcctt

SEQ ID NO: 33333 - DNA, 480 bp, Homo sapiens
  misc_feature (1)...(480): n = A,T,C or G
cccccccccccccccccgttgaatacagataganaacatttctcaccacgagtaccccaagcttggcacgagggcggatcagaacccgagctgtgcttgtggctgcggctgctaactggctgcgcacagaagctgagagaagaggggggcaataagtacttttgcctcattctgaagccttggaaggagctgtcaccatgcctcactcgtacccagccctttctgctgagcagaagaaggagttgtctgacattgccctgcggattgtagccccgggcaaaggcattctggctgcggatgagtctgtaggcagcatggccaagcggctgagccaaattggggtggaaaacacagaggagaaccgccggctgtaccgccaggtcctgttcagtgctgatgaccgtgtgaaaaagtgcattggaggcgtcattttcttccatgagaccctctaccagaaagatgataatggtgttcccttcg

SEQ ID NO: 33334 - DNA, 409 bp, Homo sapiens
ggggtgaaggtcggagtcaacggatttggtcgtattgggcgcctgggcaccagggctgcttttaactctggtaaaggggatattgttgccatcaatgaccccttcattgacctcaactacatggtttacatgttccaatatgattccacccatggcaaattccatggcaccgtcaaggctgagaacgggaagcttgtcatcaatggaaatcccatcaccatcttccaggagcgagatccctccaaaatcaagtggggcgatgctggcgctgagtacgtcgtggagtccactggcgtcttcaccaccatggagaaggctggggctcatttgcaggggggagccaaaaggggcatcatctctgccccctctgctgacgcccccatgttcgtcatgggtgtgaaccatgaga

SEQ ID NO: 33335 - DNA, 409 bp, Homo sapiens
ggcagcatttctttctaatctggctgaggccatgggggggaatgaggggaaaatatgcttccgggccaaggtcaccgagggggaccttgggatttgtgtcctccccagtgcttaaagtagagatacctgcaaattcatggcaaacagttggaagagttacttgactgaaacaacccaatcttactttctttcgtaagttgaacctctgatttattgtggggttcaggctctcctcaatagaaggccagagttggacaggtggactaaggtcaaggatgaggagtctgcagtggggactaccacagcaaactgccttccttccgtggagtcctaactcagccatgtggtccactcacccaggggcccgggggctcagacaaaccccatggggaacatgctgccatgctct

SEQ ID NO: 33336 - DNA, 445 bp, Homo sapiens
  misc_feature (1)...(445): n = A,T,C or G
nttaaacctggtaatctngtanaagcnnacnnnnagnnttggacgagggcggggggtctgtgtcctggtgttgagtttctgcaaatttctgggggtgatttctgtgactctgggcccacagcggggaggccaagaggggccctgtggactttcacccagcactgtgggggccttcagactctggggcagcagacatgctgcttcccatcagccaaagggggtcagggctgccctgttgccaaacaactccctgaggcctctccgcaccacctcagcgggcaggaggtcccaccatgtggacagacatagcccaaggaggcaccacaggtctatgtgtgctgggggatgtcaggtgccacccaacgctgtcctggtggtatttacaatgacatcctcctcctccatcactccaggggtggtgtctcggccgcccctaccagctggc

SEQ ID NO: 33337 - DNA, 421 bp, Homo sapiens
ggcgggaggaacgccgccgagagcgcaggattgagatagaggagaataagaaacagggcaagtacccagaagtccacattcccctcgagaatctacagcagtttcctgccttcaattcttatacctgctcctctgattctgctttgggtcccaccagcaccgagggccatggggccctctccatttctcctctcagcagaagtccaggttcccatgcagactttctgctgacccctctgtcacccactgccagtcagggcagtccctcattctgcgttgggagtctggaagaagactctcccttcccttcctttgcccagatgctgagggttggaaaagcaaaagcagatgtgtggcccaaaactgctccaaagaaagatgagaacagcttagttcctcctgcccctgtggacagcgacgg

SEQ ID NO: 33338 - DNA, 441 bp, Homo sapiens
  misc_feature (1)...(441): n = A,T,C or G
ncctgcagatacagtaggacncncannacgncaagcttgggacgagggaaatcacccgtcttctgtgttgctcatgctgggaggggttttagaagtttaacgaatttttaaatgagaaaggggagtttggtagtctacttgaaaatgtttctgggaaattccctaaaaacataggattttggggaccttagcttctgtgttcctactgccacccagaaaaggggcagggctctgcaacccccgggacaaatgggcaccccatgcctatacctccctccccgagctaagtcccagggcatctgggccttgcctggagactgggctagctctgtaggctcggagagcctggggagggtgttaccccacctcttgtattttgggagacagggaaagtgaacagacttccccttcccatacccctcagggtggtttccctaccag

SEQ ID NO: 33339 - DNA, 485 bp, Homo sapiens
  misc_feature (1)...(485): n = A,T,C or G
nntgataacgttattagatgaccactccaagcttggcacgagggttgttattaggaattgaatcaagaaaattacaggcaaacagttttgactattggctgctttacaaacatgtttgatacagcattctcatttccatttctaggcaaaatgatttgatttagcaactttaaaatgcctcttccattattccttaggctatcgaagctgtgctttggctgttatgtttatttgcttaagggaaaatgtctatacacaatgaggcatcacctgagttttccattcactgctggcaagaggagctgacagaggcaggcaagtgacagtcttcacactcgccacagtctatttttaggttgttgactttgtggctgacttcagccctgatgggatggattgacattcgaagacaatgaaatgttttattatgaagatttgcagatctataaaactggatggtattgtgaaagtgataaatttaattc

SEQ ID NO: 33340 - DNA, 412 bp, Homo sapiens
gggctcactcaaggacaaggcccaggccacactgggggatctcaagcaatcagctgagaagtgtcacgtcatgtgaccacttccccggggttacccactgggctgggcccccatgagggctaagagtgtgtcaacttccagggacccatactccatttggggctttgtttcccttgccccatcctagttccaagacctttcccatccatgccccaagcctatcttctgggttcttcctctccgctgggagtaaagtccccatcttcactctacccttcaggaccctccccaccagctcagcctgtggaggcctcccaagattgtaggaataggcccatccctctctggccatggccccaagttcctgcacacaggagcacccacagagagacacacacaggacacaaaaccc

SEQ ID NO: 33341 - DNA, 408 bp, Homo sapiens
agttctaagtgtcttctcgaattaggagatagatgatctttgatggggatctcctccgtcaccacaggccagtcacagaaccaactagccacgtgctgccagacctcagtgggcccaagcaggagcaatctcttctatcccccatctcccccaggaccatcccgcccattgtcaacgtcatccagggctcttctggtagtgagtgacttttctgcacatgtttagggcttgggggagctagaacacaggaaacatgaatgcaaaaggcatggaaaacactgttttgctttgggttagtaaaatgtgggcaggacaaagattactattggtctgagctttgccaagtgagatagaatcaactgtcaccccattcctttcccagaaggtcttatggtattaaggatacat

SEQ ID NO: 33342 - DNA, 418 bp, Homo sapiens
ggataatttctaggcaagtccttggtatgtctttttgttgctgttggaaactccaggacccaaggacattcatcactggagaagtgggtgcgcgcgcacacacacacacacacacacacacacacacaccagtgttagcagctggcatttctgcctcgaggattttacatttacaaggtaataataaaaatggtattaaaaacctgcagacggtctgtcctatagagataaatgtggattgcaaactcccacatgaaagtagaattgactaaaagagttaccaggtaatttaaggcccaacagttgatgtccctgcagataccttggcaagtcaattctgttttatttcagagaggaaataaaacttgcctgagtggactttctttcccctgatagaaaagaggagttgtcacagaga

SEQ ID NO: 33343 - DNA, 441 bp, Homo sapiens
  misc_feature (1)...(441): n = A,T,C or G
naacctaggacatctttgacctgcattacgccaagcttggcacgaggtgtcttttgaagctgaatagcaatattatttaaaattgatattagttcagtgttttggtgactgagtaggaaatgggtggggtgttttgcaggctgaattggccagtccactgaacgaggctgatgggcatcggggcataatcccagccaataccaggctccacaccacgctctcagtcagcctggggaatgagacccaaactgctcatacagaattacgcatttccacttctaatggtaagacagtactcacagctggtatttagaggcacctgtgccatcttggagtcattcttttttttttttttgaaaaaaagtcttcctttgtttgggctaacgtgaagctttgcctccggggttaatgcctttttcttgtttaaccctcccaggaagg

SEQ ID NO: 33344 - DNA, 412 bp, Homo sapiens
ggcaaatacttatagtccagccacaggggatatactgataaactcatctcaaatgtcacctcctcagagatgctttctcaaccacccttagttccatgaggactgcatcattgtttaggccactcctgtatccccagagcacagaacattgtctggctcatagtaggtgctcaaaagttttgttgaatgaatgaacaaataaatgtgtaaggaagtcaggcacagcacttgcccacaggaagcttataagatgagcggcatgccattgggagtttgaatgatatatggagatccaaacagggcatcagaggactgctcagaggagtcagggaattaagaaaaaattgggagccagtgagccaagatgtgttaaaagcaagtgatcaagcttagattgcagtgttagttaata

SEQ ID NO: 33345 - DNA, 438 bp, Homo sapiens
  misc_feature (1)...(438): n = A,T,C or G
ggggctccctttgatagcgtctatgacagcctacgcaagnccggcacgagggagcattgcatctttgctgaatccacatgggttagcagaggttacattggagttttcctttgaggaaatgttcggaattgagcggggagtccctctccccaaagactagacgtgacctggcagattaacaggatcctcttggccttcttttttggggatggtgggagtgaagggggtgaatcttaaaagcttatcaataaagctcctgttctgcaggcatcaggaaagttgagtgtaagatggaaaaagcaaacagcctatttacaagtggaaacacattggttctgatcactcctaacttgctgggtgatcatacatacatcaacatgaaggcgtgacatcagaatcatgagcaccatggctgcacttgtgggaaccaaagctact

SEQ ID NO: 33346 - DNA, 426 bp, Homo sapiens
ggccagtgagtcagatgatgattctccaccccgtccggcagctgtggctgtgcataaacgagaagaggatgaagaggaagatgacgagtttgaagaagtagcagatgaccccattgtcatggtggctggccgtccgttctcctacagtgaagtgagccaacggccagagctagtggcccagatgacaccagaagaaaaggaagcatatatagcaatgggacaacgcatgtttgaggacctctttgagtgagctttccctaattctttctcctttctctaatgctcagttcaaaaaggaatgtctcatctttgaagaaaagtatttaagtggctttctgcccctcttgatgtaagcaactgtccatccttgtgcaaagattgatggtagagagtttgacttttatgccagaaactttcccagcaagg

SEQ ID NO: 33347 - DNA, 475 bp, Homo sapiens
  misc_feature (1)...(475): n = A,T,C or G
gagggaanntttgaaaccgtatagaatgctttcgccaagctcggcacgagggacaaggcggcggccgagcgctctaagatgatcgacaagaacctgcgggaggacggtgagaaggcggcgcgggaggtgaagttgctgctgttgggtgctggggagtcagggaagagcaccatcgtcaagcagatgaagatcatccacgaggatggctactccgaggaggaatgccggcagtaccgggcggttgtctacagcaacaccatccagtccatcatggccattgtcaaagccatgggcaacctgcagatcgactttgccgacccctccagagcggacgacgccaggcagctatttgcactgtcctgcaccgccgaggagcaaggcgtgctccctgatgacctgtccggcgtcatccggaggctctgggctgaccatggtgtgcaggcctgcaccgctcaagggaataccagctcaacga

SEQ ID NO: 33348 - DNA, 477 bp, Homo sapiens
cgaaaaatttgataaccgtttgaccacgactacgccaagcttggcacgaggagacgccaccgccgaggaaaaccgtgtactattagccatggtcaatcccaccgtgttcttcgacattgccgtcgacggcgagcccttgggccgcgtctcctttgagctgtttgcagacaaggtcccaaagacagcagaaaattttcgtgctctgagcactggagagaaaggatttggttataagggttcctgctttcacagaattattccagggtttatgtgtcagggtggtgacttcacacgccataatggcactggtggcaagtccatctatggggagaaatttgaagatgagaacttcatcctaaagcatacgggtcctggcatcttgtccatggcaaatgctggacccaacacaaatggttcccagtttttcatctgcactgccaagactgagtggttggatggcaagcatgtggtgtttgg

SEQ ID NO: 33349 - DNA, 369 bp, Homo sapiens
gggcttgtgaacgagctaagcgtaccctctcttccagcatccaggccaggattgagatcgattctctctatgaaggaatcgacttctatacctccattacccgtgcccgatttgaagaactgaatgctgacctgttccgtggcgaccctggacccaggagagaaagcccttcgagatgccaaactacacaagccacagattcatgatattgtcctggttggtggttctactcctatccccaagattcaaaagcttttccaagacttcttctatggaagagaactgactaagagcatcaaccctgatgaagctggtgcttatggtgcagctgtccatgcagccatcttgtgtggagacaagtctgagaat

SEQ ID NO: 33350 - DNA, 436 bp, Homo sapiens
tggcccagcccccaatagaaaacatctaatagatgactatcgccaagcttggcacgaggggtaatgggaatcgatggttatccttgaacagcttgtttttgcataaaatttgccaggtgtggtggatcacacctgtaatcccagaacttctggaggtcgtggttgggcaaatcacctgaggtcaggagtttaataccaacctggtcaacatggcgaaatcccatctctactaaaaactcaaaaatttgctacgtgtggcagagcatgcctgtaatcctagctactcaggaggctgaggcaggagaatcacttgaacccaggatgcggaggttgcagtgagccgagatcgtgccattgcactccagcctgagcgacaagatgaaactctgtcgaatatataaataaatagcacgaattattataactctattggaag

SEQ ID NO: 33351 - DNA, 468 bp, Homo sapiens
  misc_feature (1)...(468): n = A,T,C or G
gggttgacgccccttttngnaactgagaccctgatnacacatgaccntatangcaaactcgcgcgaggtgatcagcataatacatcccactggttaagatttagaggctatagttataccgatcatttggagcggaattagttctacaaaaagcagctgtaatcatgaatacaaagagctccttgacttcaaatgattgtgtgataagtaaacacagccttaatctctctttacattttacagtcctgacaactgtgtacacctaatctgcaacgaacgggctaaaggtgcaaaatatgtaacaaaaatacccaagtgtattcccagtttcccgagagatatgacctgaaacatgagactgtggactggactgggacaagaactaactaccactatcatagggctactgaacatggagagtcagtctttattataagacagttgcaacaattgcatgcgagggtttct

SEQ ID NO: 33352 - DNA, 402 bp, Homo sapiens
ggcacgagaaaggacagcgtgtaggcgtgtttcaaaccatttcattttcttgggtgaaatgttgcttttttgctaaaactgaggcaaacgttgatcttgagagcttgcagtttgggggcagtaaagttgagaaaggatcatattctgttattggtttgtgggactgcaggtgaagctgctttgtttccctaaaagatactttttggggacaataatttgggagtaaagcggcaagttctaatacccgatttacaattacattgaactacaaggatcccctcactggagatgaagagaccttggcttcatatgggattgtttctggggacttgatatgtttgattcttcaagatgacattccagcgcctaatataccttcatccacagattcagagcattctt

SEQ ID NO: 33353 - DNA, 481 bp, Homo sapiens
  misc_feature (1)...(481): n = A,T,C or G
cccgccccccnttgatnttatnacagtctgcaccacgatacgccaagcttggcacgagggccagtacatggcgagctgggatttgctcctggctggttggttctggcagcggctgctctcactccttctgatgcgccttgcagttaaaatcaggctggctctccattcaagacactttttttgaggttttcctctggaaaatgagacagttggacaagtcactgatatttaggtggctctttggggaacccgtgggttctccccacctttgcttaaccagagtcagcctcttttgttgtctgcatgggtccctgggtgaacaggctggaggaaaggaggtgtcaaaaccgctgaactacgtgagctctgtggccccttcttactgtgaaaccctatgacactacagtcatgggccacacaaccctgatcagctgttcctgtagatacccatttatgttttacaaagcccgggaaaatgtga

SEQ ID NO: 33354 - DNA, 423 bp, Homo sapiens
ggcacgagaactggaggatttaatttcactgtggcagtatgatcacctcacggctacctatcttctgcttctagccaagaaggctcggggaaaaccagttcgtttaaggctttcttctttctcctgtggacaagccagtgctaccccattcacagacatcaagtcaaataattggagtctggaagatgtgaccgcaagtgataaaaattatgtggcgggattaatagactatgattggtgtgaagatgatttatcaacaggtgctgctactccccgaacatcacagtttaccaagtactggacagaatcaaatggggtggaatctaaatcattaactccagccttatgcagaacacctggcaataaattatagaacaaagaaaatgatatactcctaagtctgctgtaaagatgaagagactt

SEQ ID NO: 33355 - DNA, 401 bp, Homo sapiens
  misc_feature (1)...(401): n = A,T,C or G
ggcacgagcaggatgttctaccgggactggtggaactcaacgtccttctccaactactaccgcacttggaacgtggtggtccatgactggctgtacagctacgtgtatcaggatgggctgcggctccttggtgcccgggcccgaggggtagccatgctgggtgtgttcctggtctccgcagaggcccatgagtatatcttctgcttcgtcctggggttcttctatcccgtcatgctgatactcttccttgtcattggaggaatgttgaacttcatgatgcatgaccagcgcaccggcccggcatggaacgtgctgatgtggaccatgctgtttctaggccagggaatccaggtcagcctgtactgccangagtggtacgcacggcggcacttgcccttacc

SEQ ID NO: 33356 - DNA, 468 bp, Homo sapiens
  misc_feature (1)...(468): n = A,T,C or G
agacgcccatagatnacattgtatgacattcttaaccatgacttggcccagcgtggcgcgaggcattgactcccccagcgaaaagtttccagattctattaagttttcgctctttccaaagcttttcctcttcagcctataaaaagcaagcagctatttgcttcattcccaggggtacttctaccaattggagctgggctgttggagtcatctccactgcctaccaccaggacaagcagagaagtgtgagtggaagagagagaggtggcagggaaatctcccttagtgtgagctgtgtggtcaggggtcccaggtgcccacagtcatagaggaggtaggggcccacttgaaaatcaccagatgcttttttcagaccaggcctgagtggttttttgtctcccagcctgggttgcttatatctccttcctccctgcccctgcaccctctgtcttggtgcctattctcatt

SEQ ID NO: 33357 - DNA, 415 bp, Homo sapiens
ggaaaaggtcagccatgtggctgatacaaaggtcaatacaaaggctcaggagactgaggctgcaccctctcaggccccagcagatgaacctgagcctgagagtgcagctgcccagtctcaggagaatcaggatactcggcccaaggtcaaagccaagaaagcccgaaaggtgaagcatctggatggggaagaggatggcagcagtgatcagagtcaggcttctggaaccacaggtggccgaagggtctcaaaggccctaatggcctcaatggcccgcagggcttcaaggggtcccatagccttttgggcccgcagggcatcaaggactcggttggctgcttgggcccggagagccttgctctccctgagatcacctatagcccgtaagggcaaggctcgccgtaaagctgccaag

SEQ ID NO: 33358 - DNA, 410 bp, Homo sapiens
gtttcagaggtgattcagtagtaaatgtatggggagaagaattagaaaaacccatctctttttaagcagtcatcattcttaaacatctgaattgttttacaacagagtcagcaaacctttctagcatttctaaaagatggcagtttcttggagaccacatctttgcaaggcagtattttcaaaatataaaatagcccccaaaccaaacctttaaacatgaagggcaaatgggtaaagacttaatattctttttgtgtcaagtatacttaatgtaaatctagttgcttgtgaagtagtaatagtaatagctcctattattttgagcactgactatatgtgctcagcctctgtgcttggatctgacatcactatctcatttccttctctcacagttctggaaggagtaccta

SEQ ID NO: 33359 - DNA, 409 bp, Homo sapiens
  misc_feature (1)...(409): n = A,T,C or G
gggctgacttcactgctcaggtgattatcctgaaccatccaggccaaataaacgccggctatgcccctgtattggattggcacacgggtcacattgcatgcaagtttgctgagctgaaggaaaagattgatcgccgttctggtaaaaagctggaaaacggccctaaagtcttgaagtcaggtgatgctgccattgttgatatggatcctggcaagcccatgtgtgttgagagcttctcagactatccacctttgggtcgctttgctgttcaggatatgagacagacagttgcggtgggtgtcatcaaagcagtggacaacaaggctgctggagctggcaaggtcaccaagactagccagaaagctcagaaggctaaatgaatattatccctaatacctgccagcccacn

SEQ ID NO: 33360 - DNA, 415 bp, Homo sapiens
gggtcgcgctgtaagaagcaacaacctctcctcttcgtctccgccatcagctcggcagtcgcgaagcagcaaccatgcgtgagtgcatctccatccacgttggccaggctggtgtccagattggcaatgcctgctgggagctctactgcctggaacacggcatccagcccgatggccagatgccaagtgacaagaccattgggggaggagatgattccttcaacaccttcttcagtgagacgggggctggcaagcatgtgccccgggcagtgtttgtagacttggaacccacagtcattgatgaagttcgcactggcacctaccgccagctctttcaccctgagcaacttatcacaggcaaggaagatgctgccaataactatgcccgagggcactacaccattggcaaggagat

SEQ ID NO: 33361 - DNA, 480 bp, Homo sapiens
  misc_feature (1)...(480): n = A,T,C or G
cggtagcccnnaattgatnaccgatagaccaccattacgccaagcttggcacgaggcagggttaattcgcaaagttcccccaaggtgaggctttgaggacagtatcattgcccaggtgagccttgtggtattgaaaacccgcccaagctgatcattgaaggtgggcgcccatcaaggctggctgtttccagagaaaaggccgggcccaggattaatgttgcattgcagacgcatctctgaacaatcacatgctgttctgcaccagggaagctggggtttttaacatccttttgtggtccctgcttacgatgcatactgtcctgtgggagaagcttcctacccgcgtggagtacaggggctgcttcctgacctggctctggatgttcccctctcgcttattatacttcctgctgaagggccccttcttaagggggttgagagaaggccttgcctttgtatctcctctgagactctgaccac

SEQ ID NO: 33362 - DNA, 405 bp, Homo sapiens
gggtgctgaattaacacacgcacgtgcagcgcgcacagacgcgcgcacacacacacacatacacgctctgctgcatttggacaaaccatgcctgccagagtgtagcagaggtgaggaagcaggtgggcagcttgcctgacccggcttttcaggagagcgtgtctccaacagagagtctccacactctagttcaggggtatcgacctgcctcaatgagatgacagactcatttgggaggggtgttgcaaacaagttttcagtgagaatagttaagttccacagcttgtaaaggattcagtgactgacacttcagtaaattaggccaggcacattggcttatgcctgtaattccaacactttggaaggccgaggtgggcggatcatttgaggtctggagttcgagac

SEQ ID NO: 33363 - DNA, 405 bp, Homo sapiens
ggtgccctccctgcctaagagctactgggatcacgttagcgggcatttaggctttgatgagagggcacagtttgagttaggtttacctccccctttctgtgcctgggaactgtttggtccagctttaaaactgtgggtttgacttccttatctcttgggagaagcttctgttttaaggaatttctcttccttcttctcctgcctctagcctctcctggaaaggcctggatatggtttctaaaatctcagctgagaacttcagaaaacagcagcagtattttccttttcctagtgctaaaatccctttccctagaaattggctcaccttgggaaacccagggaaagaatcagcaggttctctgccctccctatgggttggggaaggacccaccccggtcagcacag

SEQ ID NO: 33364 - DNA, 477 bp, Homo sapiens
  misc_feature (1)...(477): n = A,T,C or G
agagcctccnatagaaacctttgagancattcttacgccaagcttggcacgagggaggtggtaaagcaggtggagcaccctttgctgagtggcctcttataccccggactgcaggctttggatgaagagtatttaaaagtagatgcccaatttggaggcattgatcagagaaagattttcacctttgcagagaagtacctccctgcacttggctattcaaaacgggtccatctgatgaatcctatggttccaggattaacaggcagcaaaatgagctcttcagaagaggagtccaagattgatctccttgatcggaaggaggatgtgaagaaaaaactgaagaaggccttctgtgagccaggaaatgtggagaacaatggggttctgtccttcatcaagcatgtcctttttccccttaagtccgagcttgtgatcctacgagatgagaaatggggtggaaacaaaacctacacagct

SEQ ID NO: 33365 - DNA, 410 bp, Homo sapiens
  misc_feature (1)...(410): n = A,T,C or G
ggtggcacgaggcgtcggttggcccgcaacgggttcttgtctgcattcagctcgaggacccgcggccccgccgcggcttggtctggcagatagcagaggcagcaggccgtgccgggggggcatgttgctgtaaccagtggcccaggggatgttacggtggacagtgcacctggagggcgggccccgcagggtgaaccatgctgcagtggctgtcgggcatcgggtatactccttcgggggttactgctctggtgaagactatgagacactgcgtcagataaatgtgcacattttcaatgcagtgtccttgcgttggacaaagctgcccccggggaagtctgtcattcgtgggcaagctcctgtggtaccctacatgcgctatggacactcaaccgatctcatcgacgacn

SEQ ID NO: 33366 - DNA, 430 bp, Homo sapiens
ggctttaaagggattttagaatatcttactttgcatagtttcatgagcactggccaggaggttataaactggcatttaggcctctctgccatttagtagcagtatagtcattaagcaaagcattactctggactttattgtcctgtttctatcaaattggactaataaaaattgatataatacattcatcacagtattgttaggagatttaaatgaattagtgaatgtaagatactttagaaagcatgtaaagtactagaaacaatgagggggcttcaattagtgctcattctgagacctaaatttaaagggtcaggcattagaaacaaaagtgtttcttcatatctaggagatttggaaattctgaactaaggtcttataagaacaagaaatgagcaaagtgttcattgtagatactagggaaaagctt

SEQ ID NO: 33367 - DNA, 400 bp, Homo sapiens
ggcaaaaataatgatgatgcccagcttcccatgtgtgatgagtacttcttggtatgatgcatgtacagggcttatcaacgtgtccagcactaacaaagtaaccattctagagtattttgaagaacagaattgagtccagtttaattgttacatataaggaagagtaatggaaaatgagtctacaaataaaacaggaactagagttaagcagaatatgaaacatcagactatttcataatcaggagaaaatccttgcactcctttaagcagggaagtgatgtgtcagcagtaaactttgggtagattaatatagcaattgttgacaaagtattttggatattggagataagaaaataagcagtttggccgggcgtggtggctcacgcctgtaatcccagca

SEQ ID NO: 33368 - DNA, 447 bp, Homo sapiens
  misc_feature (1)...(447): n = A,T,C or G
nttgaaaacactgtgacattattacgccacgcttggcacgaggctagaagctgctcctctaattgcccagatagtcctaacgccccattaaacatcacccaccggccttatggctttcagtgcaggcttgagggcagccaggagttcgtctgggtgccctgtgctcctgcaggtggctcagttcaaccccggagggtgtgagtgggaaggaaggaaaggtggccctccgctcctgggcaggtctctgggatatgggagaactcacatgtttccagctgttgttatggtgaccatccaggcccctggctcctccttcgtcacggccagtggccttggctggggtctgagtgagggtcgcgctctcaggagcagcagcacttgtgggacctttgcgcctcaggcacctcacttgccccaccctggtcctgtcccaggtctcattctcac

SEQ ID NO: 33369 - DNA, 439 bp, Homo sapiens
  misc_feature (1)...(439): n = A,T,C or G
tgatgagccccaatgagacatcgnattgacgaccncgccaagctnggcacgaggcaggatttcccctagcaagctaccttctgttcaaatcattaaaaaagactatttccccttagaatagggaagcttgctattttaaagctcttgtagtgcttttcttttaagggagatgtagtaaaagggaaaatgtagctcttagtttacacttcaaagatgtgcgggtctttcagagaactaagaataacagttttatgtgcagagagagtttgccagatctgaagcatatacctcattgactaggctgttactttgggataggttgcagtaccagccacagccagcagatagaggaaaagacacacataaactcgcttctgagcgtccacttctgcactctctgctctgctgttactcagcccctgagtctgactcatctctg

SEQ ID NO: 33370 - DNA, 397 bp, Homo sapiens
aaaagaaaggaaaggaggaagaggaggaagagcaagaacaataaggaggatacagcagagactttatgtgccttggaaagcctaaatgtttcactactcagccttaacagaaaaagtttgctgactccaggctagaaagtggaaagattgggctgataggagaaacgtggtctgtggaataccaagatcttgctattaactaagccacaagggtatcccctaaatggaggtgggcctggggcagctcaaccatgagtacatatgctcatggcatgtagtgccttcatacccagtccccatgtggtgggcccagtgaggtcacacagagcgccctgccccaagagacagtgcatacattcctattttcggtgggtagacatcatatttgtaatgggaa

SEQ ID NO: 33371 - DNA, 397 bp, Homo sapiens
agtggcccagccagaagttaaagggctgagggttgaggtgagaggcacctctgctcttgttgggaggggtggctgcttggaaataggcccaggggctctgccagcctcggcctctccctcctgagttgccttctgttggtggctttcttcttgaacccacctgtgtaaagaggttttcagttccgtgggtttcccctttgattctgtaaatagtcccagagagaattcgtgggctgagggcaattctgtcttggaggaagaagctggacattcagcctgtggagtctgagttttgaaggatgtagggagccttatttgggtctcagaccataagtgtgtactacacagaagctgtgttttctagttctggtctgctgttgagatgtttggtaaatgc

SEQ ID NO: 33372 - DNA, 490 bp, Homo sapiens
  misc_feature (1)...(490): n = A,T,C or G
tggaagtnccaaggccgcccccactgattaccgcangatnacgtcggacctcatacgccagcttggcacgagggggacagctaacctttattgacaatctatattgtttaagtcacgtaagaggctgtgagctgattggattaaagacctggcactttaataactcagcgcgcttccacttcactcaacttaacagagttcattgacagtgttaggatgggaacgctgggaaacacttattttgcttcaagaggtccacttggctctcccaaataggtacctcaaaaactgttagcaagcggcatttggatgtcttgacaggggctttgcagggatttttaggggtttttccacattgcccacattaatggttggcatgattgtgcttgcaggccaagaaatgatcataccccttgcccaaggtaaaaaaaaaaaaaaaaaaaggaggtggaaatggaagtggcctttttccatttgaatggggggctta

SEQ ID NO: 33373 - DNA, 422 bp, Homo sapiens
gggtacagtgtttcaccagaatgatgtgaagattccagatgctaaacttgtatttaccacattttatgctaaaacaaaatcactggtagttaatccagtgctctttccaaaccgggaagactatatccatctaatgggttatgacaaagaagaatttattttgtatatggaagaagccagtgaagagaaacggcataaagatgagaaatgagcctatttgttagtgttcgtgcttaaatgtgatttacgttttaatgtataataataaaattgccttttgcattccgttagtgactgattgttaaaaataatttgaaattatcaaagcttttaatttccagagaatgatgtttgtttataataaaacaagctatgtttggaaaccaaaatgtaggatctaccattcgtgttttagaaaggga

SEQ ID NO: 33374 - DNA, 405 bp, Homo sapiens
ggcacgagcgaaagcgaagaaggaagctcctgcccctcctaaagctgaagccaaagcgaaggctttaaaggccaagaaggcagtgttgaaaggtgtccacagccacaaaaagaagaagatccgcacgtcacccaccttccggcggccgaagacactgcgactccggagacagcccaaatatcctcggaagagcgctcccaggagaaacaagcttgaccactatgctatcatcaagtttccgctgaccactgagtctgccatgaagaagatagaagacaacaacacacttgtgttcattgtggatgttaaagccaacaagcaccagattaaacaggctgtgaagaagctgtatgacattgatgtggccaaggtcaacaccctgattcggcctgatggagagaagaa

SEQ ID NO: 33375 - DNA, 407 bp, Homo sapiens
ggcgcctcttgataagtataaaaatttgacacctcttttaatttcaaaataaattaagtattctgaccaaaagcaaacccagtatttcacatagtattaaacataaattaaacttggacaagaaatttggattgtgtctctcagaccagtgattttcagatttgagtgagcatgagaatcacctggaaaacttaggaaaacacagattgctgggctctacttccacaatttgtttttcagtaagtctggggtggggcgtgacaatgtgaatttctaacacattcccaagtgatgttgatgctctcctttggggaccactgccctggagtctcatcctttcctctatcttagttgttgagaaaagtgtgggcacctttgaggtctagattcagaagcccacatcatag

SEQ ID NO: 33376 - DNA, 471 bp, Homo sapiens
  misc_feature (1)...(471): n = A,T,C or G
gcncacatttttagatcaccgttgtagaataacctcgccaagctcggcacgaggnggcacgaggagggaaagggctccttcaagtatgcctgggtcttgtataaactgattgctgagcgcgcacgaggtatcaccattgatatgttcttggggaaatccgagaccagcacgcactatgtgactatcattgatgccccaggacacagagactttatcaaaaacatgattacagggacatctcaggctgactgtgctgtcctgattgttgctgctggtgttggagaatttgaagctggtatctccaagaatgggcagacccgagagcatgcccttctggcttacacactgggtgtgaaacaactaattgtcggtgttaacaaaatggattccactgagccaccctacagccagaagagatatgaggaaattggtaacgaagtcagcacttacattaagaaaattggctacaan

SEQ ID NO: 33377 - DNA, 467 bp, Homo sapiens
  misc_feature (1)...(467): n = A,T,C or G
cattgaaattagataggcncatcannacgccaagcttggcacgaggcattttaagagcaagcaagacacatgaaattaaacctacacggaggtatttgtggctggggccaaagcattctgacactttggggtgtcattttaatcaaagaaatcaccccgccacctcaccgggattctccataacttccctctgcagaactaattatgttgattttggtcaagttcaacatgttagctaaaagaactatggcggggttttttttcccacttcccacaaacctcaacatgggccaggcaccctaaaatgcttcacacggttaaaaacaagcacaattttgaatcctacagcgaggatgaaaggcccctaaccgagaaaacagtgctttggggagcacttgtcagtctaagtgatgctatttcaagagaaggatatgctgtgggaaaatgcccacatgacctgttcccat

SEQ ID NO: 33378 - DNA, 419 bp, Homo sapiens
ggcaaaagcctgttccagagaccctgggaggaccccaggcagggagagcccggctgcctccaccctttgcaacgaggcatgttggtaactgggaacaaacacaccccaccccgttattccttaaaagaggccttaatccccgagcccccgctgccataggcagagggaggagggggcacaactgtgccaagcccggccccactggggtgtcctcacaatgtgaccccagaaatgccagaagggaacggaggctgatgcatagacacagccccaggcagccggggctcctaagctggcgcctatggtggggttaaacgggctgagcggtccatgcaaactgaggctcggggaggggaaggacaggctggcctctccttaactgtccacagggccttgggttccctgagcttgccaaaccc

SEQ ID NO: 33379 - DNA, 468 bp, Homo sapiens
cgccccctcctttgataacgttatagaataacaacgccaagcttggcacgaggaaaagaaagtaagatttacccagttaatatttaaaatcattgttcagtgattaggcattttctgccttttagaattatttgactggagaaagagtttcaaaaatagcagagccctaaaccataaagaaactactactggataatgaacttttgtttgtttttggagacagggtttcactctactgcctaggcaggtcttgaactcctgggctcaagcagtcttcctgcctcagcctcccaagtagctgggattacaggtgtatgccactatacccagctttaacttttaaatccccaaactatgtagattggcatattaatattactttttttttggtattttgaagaagtgagtaatttgaagagatagaaacttagggagtggtgtggtgtttcttttttgagacagagtcac

SEQ ID NO: 33380 - DNA, 504 bp, Homo sapiens
  misc_feature (1)...(504): n = A,T,C or G
cgcgcccctttgaatcattgcacatgacacgccaagcttggcacgaggaaaaacaaaaaccaacagcaattagccatagttctgaatgcacttcaatttagcctaaacagacagctagtgagctttttatatgctctttttacttaagatttaatttgtcctttaaaaaaaggggaaacaaaccaagaacaagttctagaaaactgaagcaacctcttatgtatactagatgcttgatttaggaggagtttttaaacgttttcaatgttattatgtagtaaatgacactattatgaagctactagtcattccataagagtcttaaaggactgctctgtgtaacactgtgactgccgtgtgtgcttagacccgcaggttcctcagtggatagcactcaatttattccgtagtgatattggaacaatactgccattcccttctactgcactgcccaaggtgtgtgtagcacaaacagttctcattacaaaggaccaattctaaacn

SEQ ID NO: 33381 - DNA, 478 bp, Homo sapiens
atttgaacctgatgaccattacacgccacgcttggcacgagggccacatttctcttaccaaccatctgcatctcccactggcttttctttctgatgctaattccttccacgggatgcttcttttttgttttcagacagggtctcgctctgttgcccaggctggagtgcagtggtgtgaacatggttcactatagcctcaacctccctggctcagtcaatcctcccacctcacctcctacaggcgtgggccaccatgccaggctgattttttaattttttgtggagatggggtctcactatgttgcccaggctgatcgtgaactcctgcgttcaagcagttctcttgcttatcctcccaaagtggtgagattagaagtgtgagccacctaaagcaggcccttttttattttcagagacggggtcttgctctgtcctccagcctggaagggagtggtgcaattaccgttcactgaagctt

SEQ ID NO: 33382 - DNA, 441 bp, Homo sapiens
ggctcccatcacatgggtctgtgggtgagatatgttatgctgttccttcctcgggaaggttggtattgaggggtgccttgctccagaggcgccagcccagcatctgtggtgagttggctaaaatccagagtgacctgctcagagctccccagaggccttcactctttggggcagtctctctagggtcactttctgaatgtaccttctacctaaagtatacaaacacaaagagccagctgagctggttctagtgtgaaagccgtaagtgccacccagcaggcgtttgaaaacaagaaatcattcttctgtggaaggagaatgtgccatctcagctaccctcagtccgccaggcagcccagtctgtgtattcatatgaagttgtgaaaaccatgagtgtgtgccatggccatcgtgtctacacacagccactattgttcctgg

SEQ ID NO: 33383 - DNA, 464 bp, Homo sapiens
  misc_feature (1)...(464): n = A,T,C or G
tatgttgaacttcggccctgcanacggcaagantggctcgaggcctacaaccacgcgactggcaaaacacggccttctctctgctagtgttgccgttcagaggcttcagcctgacttccagcgggcccaagaacacctactaattcctctgcactccttcatggctgggacaggtactggttcatatgcaagtaaagatgacaatttactctacaaatatttatcgagcaccttttatgtaccaggcactcgcgtaggtgcttaagatattctcatgtttctgagggattacagcctgggaggattccaccgatcttcacttctagcagggtttttaaacgtgacccttggctggatttcccattttcacagttcaagcaccccaaacctgccctttcttccctgcagactggcaagtgggattggctcccagggcatttcctctttttcttttttttccaagg

SEQ ID NO: 33384 - DNA, 411 bp, Homo sapiens
  misc_feature (1)...(411): n = A,T,C or G
gggttattttgtgttttgttgtcataaatgctttttgctgtcactctagtggttactatcctctgccttcctctcctcccctactcccccagagaaccaaggcgtctgggggattgactggggggcagagggggtttccccagcaaaatcaaacacctgtctccagagtagccactcaaaaactgggggtctctatgtgtctaactttttaaatgagagtgtttatgaacaaaaaaatttaccaacgtgtgagggagttgctgagttgaaaaatgctcgcttgaggagcttcagaggaatcttaacaaaagccnagtcagttccccaaagcctcctagagcctctggtaagacttttgggttcataagtttcggcgagccgggtcagagagaggccggtggcctggccaaa

SEQ ID NO: 33385 - DNA, 428 bp, Homo sapiens
ggccaaactgtcagcattacagaggtcttcgtgttccaccccactgtcccaggccaaccgttacaccaaagaacaagattatcgacctaaagcaactggaagaaaaacacccaccttggcatccccagttcctacaacaccttttctccgccctgtccaccaagttccccttgtcccccatgtccctatggttaggcctgctcaccagcttcacccagggttggtacagaggatgctggcccagggagtacatccacagcatcttccaagtttgctccaaactggtgtgcttcctcctgggatggacttgagtcatttacagggaatatctggccccatcctgggtcagcccttttaccctttacctgctgctagtcaccctctcttaaaccctcgtcctggaacacctctgcatctggcaatggtgc

SEQ ID NO: 33386 - DNA, 466 bp, Homo sapiens
  misc_feature (1)...(466): n = A,T,C or G
agggagcaatacaacgtttgaataaattaatcttctcaccngcanacgccagactgtggacaaagngggggttcccaaataatacctacatgatttttgattccacattattgattgttctcncagggctgctttaaagaagcccaggtgtcagcctaccctgctggttgggatcttactgtattcttgaatgcactgaattaaaaatatgccagacttcagcccccaaggaaacaaggctgcaagaatttatgaactccatctggaaaaggtaaaggtgacctttggctagccacatactggaccttaccccactgacgtctttcataacattccaagggttttcctcaaggaacatttttgagctaaaaattaaaatgggttctctggcagactgcaccccttgagtcaaaattaacagtattcctttgaatgcaataatagaggcttttcttcgttaaaggag

SEQ ID NO: 33387 - DNA, 469 bp, Homo sapiens
tagaattttgaaaaccttctgtgaacatgattacccctaacttggcccgaggggcatctggatcttaaagatgtatagatattttgcagctctgtttaatcataaataatagatttgtctgattcgctaataccagaggcatgtttttttcttccaatgaatatgcttatcatccgtgactgctaataataaaacctatacccttatatggaaataaaccatttcataaaaataggaattcatttgccattttccattactgctgactaattactacggtgttgaaaagtaccttcagattgaagagtgtcttcagattgagttcataaaagctatatttctcatgtgtttgggcagaaattttcaagaatatcatatttcagatttagggaaaactcaaaagttttatcataaaatgaacatattaagactcaaaagacacttaaatatggcattacaaatatgaagg

SEQ ID NO: 33388 - DNA, 434 bp, Homo sapiens
  misc_feature (1)...(434): n = A,T,C or G
ggggggnnncggncactgannacttgatgacctgattaccccaagcttggcccgagggacatattcagacatcaacgttatccttctttttcatatttctacctgagtgaagttcatccttagtattgagtaggaagttacagtaaatggtagttcattcttacttacacacatagctaatcttttttttttcacttggaattatgttgaatgtttcattttgacaaaaaagtagactaaaagggatgttctttaagttggcttgcatccattatataaaaaagaaacaggtgagaggaaaagcaaaaagctgaaactggctgatgttcaaagcacttactcctctagagggaaagcatgacaccgaacactaagcacacagctttttgttggtttggttttttctcccgcaaatcttaaagggattcccatga

SEQ ID NO: 33389 - DNA, 372 bp, Homo sapiens
ggaccaaacaggttgcaaccccaaaagcatgtttgttttacaccgggggatgatatgccacgggtgtattgtgttgaagggacacctataaacttttccacagctacatctctaagcgatctaacaatcgaatcccctccaaatgagttagctgctggagaaggagttagaggaggagcacagtccggtgaatttgaaaaacgagataccattcctacagaaggcacaagtacagatgaggctcaaggaggaaaaaccttatctgtaaccatacctgatttggatgacaataaagctgaggaaggtgatattcttgcaaaatgcattaattctgctatgcccaaagggaaaagtctcaagcctttccgtgtg

SEQ ID NO: 33390 - DNA, 416 bp, Homo sapiens
  misc_feature (1)...(416): n = A,T,C or G
ggccagagcatgaggcccacagtgttgtgccaatggaggatgttgcctgggagtacaagtgggaacttcatgaggccctcgaacatctgaagaaagagcaagaagaggcctggaagcttgaagttggtgaaaggaaacgaactgccacctggaagatacaggtggaaacccgaaaacagagtattgtatgggagtttgaaaaataccagcgattactagagaaaaagcagccaccacatcggcagctgggggcagaggtagcagcagctctggccagcctacagcgggaggcagcggagaccatgcagaaactggagttgaaccatagcgagctcatccagcagagccaggtcctgtggaggatgattgcagagttgaaagagaggtcgcanaggcctgtccgctggatgttgcag

SEQ ID NO: 33391 - DNA, 493 bp, Homo sapiens
  misc_feature (1)...(493): n = A,T,C or G
gcactgggtttaaatgaaagcgtatgaccnatagacgcctatcttggcacgaggggacttaaggatctgtaaattgtggttggctctatttgtgaaagaaaaatccagttatgtgtcttaccttgatcctggaagtggccaaggctcaggtatcttgacccggtgctcccaccaatggctcagggagttgcctgaaactaaaacaatcccaaacagaatcttttgtaaacatccacttcatcctgtgtacacagtaagactttggaaaatactttggttggggttcttcccagtgttaatgtgaccatgcattccctggcccaaagcacactctcagtttatcatttacaacctccaggccaaagggagtcagtcagcagatgagaggaaacgctttcataaaaggagaggaaagacagggcccatatatccccagcctcctgtgggctggctgcttacatgggggttctttcaaggtaactgaaggctgctg

SEQ ID NO: 33392 - DNA, 431 bp, Homo sapiens
  misc_feature (1)...(431): n = A,T,C or G
gatattcacaccaagcattgatgttatggaagaaagaaagaaacctacctgacatatatatatatgtccgaaaacagacaaaggcaagggtgtgaggtaagcaagtgtctgcatttacattccacaaaacccaaatccatgttgaacaaagttaactccgtacacagcgactttttgggtgagccgcgtgtgtatgtctggtgggtgcgtgcctcaagccctgttttcctgtgaagatacttttagagagggacattctctacacgtgaaccacacgtttggagcacagacacggtctctcaaggaaattgatcttacgcatttactgtttaccgaacaaatgtctgactgtgttagcctaagatactgtgctctaaatagaggttttactctactcatcactgcgagtttgacattgctacgtgtgcatn

SEQ ID NO: 33393 - DNA, 475 bp, Homo sapiens
  misc_feature (1)...(475): n = A,T,C or G
tgcacgggtggttggaggcatgtannatgatacatttgaccgcatacccgctggccgagggaaggactcgtctttaaaccctgttggaatccctgacgcccgccgtgatgcccagggagacagggcgacctggaaggcaactacttccttaagacatccaactattggatgattatcccaaatgtttcattgtgggagcagacaatgtgggctccaagcagatgcagcagatccgcatgtcccttctcgggaaggctgtggtgctgatgggcaagaacaccatgatgcgcaaggccatccgagggcacctggaaaacaacccagctctggagaaactgctgcctcatatccgggggaatgggggctttgtgttcaccaaggaggacctcactgagatcagggacatgttgctggccaataaagggccagctgctgcccgtgctggtgccattgccccatgtgaagacactgtgcc

SEQ ID NO: 33394 - DNA, 427 bp, Homo sapiens
ggcgaaataatggagagaaaattgttgattatttgtttatgaaattgttaatacatagtcccaatctttttcattgcacaaaaatctagggttgacttggtaaatgcagtgacattttctcatggagttcctttatttaatatgtattctaagtaggtacgtttatttttacttttttattataattttgatattaaaaagaacagagatggggtcttgctttgttgcccaggctggtcttgaactcctggcctcaagcgatcctcccacctgtcctcccagagtgctggggttacaggcgtgtgtcactgtgctgggcctattttatttatagaactcatttaagctgtttttattttaatatgccctataaacatttttatattttttgaaattgggtcttagtgttcacaacttccataagata

SEQ ID NO: 33395 - DNA, 432 bp, Homo sapiens
ggttcagcttcaggctctgaagggttaaatgtcagctctgggacaagagaccatttcaggaaatggaatttgattcttggttttgttgccccctcccctccagcgtaccatactttccccgcatttacttacgtttcaggtgtcaacatggtgactcacccaccctcagggcagaagggctacccgctgccccagtgaaattcggtttgaatagggataacctggtccctccatgcagcccggaaatggctgtcaggacctgccaagggcttattaagttggaatgctagtggacgtggccacatctggatctcatcccccagcccccgtcagaggggattggagagatgagggcagctccccaagagtcagtgccgcctctggtctggccacgccttgctaccctcccagccttcccctaccatgctctga

SEQ ID NO: 33396 - DNA, 422 bp, Homo sapiens
ggcgaaaaaaacagtgcaacaaaacacaaatagcattccaacagtttggcaagtgatgcgttcacctgagattaagtgattttaggcagtcagtaacaaaatgctgctttgctgtaatagtagaaaggcaacaaattcttaaaagaaaccaagaaggtatacaatcttgacagtctcttattagcttcctcctcttatctctttttttcccacattatctgttgcgtatctactacagtaggctgcaaaacatacagcaaaaaggattggcttgaaggcatttgatgtttgtaaataaatccacaattggatccaagctgaagaggtgatacatagtcagcctagtagacaattctgagcatgtgcctacgcaggtaaagtccaggctatattaaataaaaaaaaatgtcggtgcgttgttt

SEQ ID NO: 33397 - DNA, 467 bp, Homo sapiens
  misc_feature (1)...(467): n = A,T,C or G
taggagaactgaaggcacttcannacgccaagcttggcacgaggggcccataccctttgtcctcccagcctggcatccaggcagggacatccttacaccaccagccccagggagcttccctgctataaacacagacccccttgtctttgcctctgatttttacacagtgtagagtggccagcagtgaacaggttgaggatgtgcgggtagatagataactttgggtctggtttgtgtctgtgttcatgtttgtttaagggatatgtgtgactgtgggtggggacgtgtgcttgtggggcacaggtggcggcccctgctggagcccggctgggcgcagcgcctatgtaggacgggtgttctcagtgacctacctcccaggctcctctgcacctgcaaaggaacaggagtgagtcttgactgacaggggtggttgagactagactaggtagagtagttaccaggagatg

SEQ ID NO: 33398 - DNA, 420 bp, Homo sapiens
gggcaacagacccaacattggtatcaagcgggcctgggatgtggccaggcttcattcactggacacaagctttctggagcaaggggatgtgacaacacccaccttagagcaagtggataagctaaaggagggggcaggcttgcctgacgactgtgttgtcaccgaacgcctggctgtgctggcctttctttacttatacctgtccatttgccggaagcatagggccctcccgagcctggatatcaaagtgtggtcggagctgcccccctgggcgggcttgggctacaacgccacctactaagagtgtttggcaccagccctcctgagtgtgtgcgaggagataccaaatccgctgaaggacggggattgcgctcaccggtggaccaccgaggatttggagctaattaacaaaatggcctt

SEQ ID NO: 33399 - DNA, 549 bp, Homo sapiens
  misc_feature (1)...(549): n = A,T,C or G
actgtatttatcttaattgtattttcttattattaaattaataaaataactacatggttggcgggggnttttnaatgagnacgttttgaccattatacgccaagcttggcacgaggctttgccaaaagatttaagagaaaaaactaccaccactcattaaaaaagtatatgcaaaaaacctcttcaatcccactaaatgagctggacccaccactcattaacctctgggaaggtgacagcgagaaagacaaagatggttctgcagacaccaagccaacccaggtcgacacatccagaagctattacatgtggtaactcagaggatattttgcttctggtagtaaggagcacaaagacgtttttgctttattctgcaaaagtgaacaagttgaagacttttgtatttttgactttgctagtttgtggcagagtggagaggacgggtggatatttcaaatttttttagtatagcgtatcgcaagggtttgacacggctgccagcgactctaggcttccaggctgtggttgggttttattcttatcattatg

SEQ ID NO: 33400 - DNA, 465 bp, Homo sapiens
  misc_feature (1)...(465): n = A,T,C or G
ntttgattcgtttgnaccancgatgtgctnacangcncacgncaatttgggcacgagggcagcagaacccgagctgtgcttgtggctttttctgctaactggtttcgcacagggagctgtcagcatgcctcactcagacccattcctttctgctgaggggaacaaagagttgtctgacattgccctgcggattgtaaccccgggcaaaggcattctggctgcggatgagtctgtaggcagcatggccaagcggctgagccaaattggggtggaaaacacagaggagaaccgccggctgtaccgccaggtcctgttcagtgctgatgaccgtgtgaaaaagtgcattggaggcgtcattttcttccatgagaccctctaccaaaaagatgataatggtgttcccttcgtccgaaccatccaggataagggcatcgtcgtgggcatcaaggttgacaaggttgtggt

SEQ ID NO: 33401 - DNA, 469 bp, Homo sapiens
  misc_feature (1)...(469): n = A,T,C or G
agggccgnggnctggccctgatantcatgaatatcgtttacgccagcttggcacgagggcctggaattgctacagtcattttgctataggactttgaggatgaagccaaaagactgaagagggtggaataaaagaagggctgtgaaggcgagtcaatctctgatggttgggggctggtgctcctccatctctggacctcatgtagcatgcggtagtttcctaattatttaaatgtatgggaatgtatgttttctgctacttgctcctgaagcatcctaactgatacaagcatatgagattttaacattaagaaaacaggatgtggctggagaagtattaactaacgggaaaggaactgacctactatagaacctccaagaagctggccacctctaggacattcctagagctgcaaaagtcataggtgaggtgaggactaaatacagctcaagagttaaaggtcttaata

SEQ ID NO: 33402 - DNA, 422 bp, Homo sapiens
gggtaatcttaattatagcttgggtgtgctttaaactgcaagctggcagtggagggcacgattcctctgatttcagctttctccttatacttttctggagctgtgagctgcaagttaactcagtgggattaaagtgtagactggaggtacaaaaggtgaggagtgaggagatagggtagttcttccttggctggctggcttcataatccctgggccccgcagataattaaatcgactttttctgtctcaggcatttgtatgacctctttggaggttccctgctgggtagttatccttgtatctgatggacccatctcaatttaaaatactctgccaggttcggaggttcatgcttgtcatcccagcactttgggaggctcagaggtgccattggcttgagcccaagagtttgagaccagcct

SEQ ID NO: 33403 - DNA, 422 bp, Homo sapiens
  misc_feature (1)...(422): n = A,T,C or G
ggcggatggggaaacaattgagattgagggaggcaggcagagcggagcgaaaacaggaggacagaaatagcgaagcaaggccaagatcgggacccccaccagggaggtgcccagtacagacatgaaagtaaggcggggaagcagctcaagcctcacccaccggcctggccccagacccggcaattcccaggattctcgggactcggcgggtcctcctgggagtctcggaggggaccggctgtgcagacgccatggagttggtgctggtctttctctgcagcctgctggcccccatggtcctggccagtgcagctgaaaaggagaaggaaatggacccttttcattatgattaccanaccctgaggattgggggactggtgttcgctgtggtcctcttctcggttgggatcctccttatacta

SEQ ID NO: 33404 - DNA, 426 bp, Homo sapiens
ccggagaagctgtgaggttctttatcgtcacctccctcactgggcagcatgggggagaagtcagagaactgtggggttccagaggatctgttaaatggtttgaaggttacagatactcatgaagccgagtgtgctggccctccagttcctgatcccaaaaatcagcattcccagagtaagctgctcagggatgatgaggcccatctccaggaggaccagggagaaaaggagtgttttcatgactgcagtgcctcatttgaggaggagccaggagcggacaaggttgagaacaaatctaatgaagatgtgaattcctctgaactagatgaagaatacctaatagaactggaaaaaaacatgtcggatgaagagaaacagaaaagaagagaagagagcgcttgactaaaggaggagggaaatgaaccg

SEQ ID NO: 33405 - DNA, 421 bp, Homo sapiens
ggcccaggccagtattgagatcgattctctttattaaggaatcgacttctatacctccattacccgggcccgatttgaagaactgaatgctgacctgttctcgtggcaccctggacccagtagagaaagccctttgagatgccaaactagacaagtcacagattcatgatattggcctggttggtggttctactcgaatccccaagattcagaagcttcttcaagacttcttctatggaaaagaactgaataagagcattaaccctgatgaagctgttgcttatggtgcagctgtccaggcagccatcttgtttggagacaagtctgagaatgttcaagatttgctgctcttggatgacactcctctttcccttgggattgaaactgctggaggagtcatgactgtcctcattaagcgtag

SEQ ID NO: 33406 - DNA, 429 bp, Homo sapiens
  misc_feature (1)...(429): n = A,T,C or G
ggattttatttttatgtctttaatagcatttgtataaatgtacaatattcgtttacaatgttagctcaggatcttgtttacctttggacagggagggagggagaaatttattttctgggtaggagtaaagctggttctattcctcagttatgtaaattatctgttataatccaaaaagctttacatgaatgtttctgtatgtaatgtggtatatcaataaaaaattaaatattacatatttgcaccagaatcctaactcactatctcagaatgttagcagcattttcttttgttgtaaagtggaacacaatctcatggcattagcagatgggtttgaatattctaaagtatcaacgtcctaatctcatgggcacctcttgggtctttccatttttgccttcatttgctaagnggcatgcttttgatttt

SEQ ID NO: 33407 - DNA, 474 bp, Homo sapiens
  misc_feature (1)...(474): n = A,T,C or G
attgaaaactgatgacattaccacnccaagnttgggacgagggacaatacacacagttctatgtttataaataacagggtgcaaaagaaactcaggacagtatttaaaacaagttcttaaactattaattgaacaatggcatttttaaatatgtaaacacagcggaattcgtgtatacactaacagaagctttaacaaaacatgtagcggggggggacactctgccacagcttaactgattggtatcaagccttgtctttggtttctgaggcctcctgagcccttctgtactgggagaccgcactccacagtctgcacaggagaccacccctgggaaacaaacacaggtgtcttcatagtcagtgcttcaagccaacagagcttaaaactgcagtccctaatttaaaaacctaatgaaaataaaaacattctcctcacatatggaggtgacgctcgtgtcccaacagtagtagg

SEQ ID NO: 33408 - DNA, 416 bp, Homo sapiens
ggaatttaacattggtgtatctaactctgacatttttcacgaagtgattttttaaaatatggtaaaaaagacaaaatatagttcaaacatatgcattatatgtcaaagtatgcttcgctggcatcaagtagactcaccttgagatgcaatcttggacaacctccatcttaagaatatctagtttttcaaaccaaaactctccaaccaaaaatcaataacatcaaaagtttgcaactacaagccgacggaaaataaatacatgaattctaccacagtgaattggactgcactgggaaacacagatgaagaaagccaacaccgctttgtccttcagtacctggctcccttttcagctcgtcttgcgactccaggcattatgcctgaaaagtctcctggacgcctgtgaggctctaatt

SEQ ID NO: 33409 - DNA, 424 bp, Homo sapiens
ggcagacacaaagggaagctggtttgaaaaaactgttgagttggcatgctccctccgtcgtctaaatatttgggctgagaaaataatttcaagcaaggctgggaaacacaaaagtaaatagtatgaaatgatgtcagcaaaaaatgggaaaaaagtagggaactcaaaaatgaataagctggcaaaactgtcaggagcaccttttttggaaactctgaaactgataaaaaaaactcacaaaatccaggggaacatgtaatgaagaaaaaactgctgaattttggtaagagagttctgtggtcattttctattctccaagttgtcagtggccttgaagatggcagccacattcctggtgtgggttgctggcaccagagggagcactatggaccttatcctcaaagaattgtaagtgtgttttgac

SEQ ID NO: 33410 - DNA, 405 bp, Homo sapiens
gacgaggcagaattataggctttggtgctctgttttcaatggggcatattacataagggtggttctttcaccccggagagactactaggttaccagtgtgggcattgcctttccacctaacccctcaaccagtaagactctacaccatattgtagccccactattctcctctttatcacagatgaagtgccagagcatcagagataggtagctcccaacctcttgctctggatttgcagaagagggggagatgtacttacccaggataagaaaaatctagtcaaatccaccccaaatcttccatttaacaggtaggaccatcgaggctggaccaaaccactttttccactgcccttggtgaatctattcctagtggaccccatttgggcatgtgcctagctacct

SEQ ID NO: 33411 - DNA, 400 bp, Homo sapiens
ggatagcgggcatctgtctcatcttgatagtcattttcatgatcacaaaagttgtccaggatagacatggggctagaagaaacagacttcgtagagatcaacttaagaaacttcctgtacataaattcgagaaaggagatgagtatgatgtatgtgccatttgtttggatgagtatgaagatggagacaaactcagaatccttccctgttcccatgcttatcactgcaagggtgtagacccttgggtaactaaaaccaaaaaaacctgtccagggtgcaagcaaaaagttgctccttctcaaggcgagtcagactctgacacagacaggcgtccagaagaaaatgaagtgacagaacatacccctttactgagacctttatcttctgtcaatgcccagtc

SEQ ID NO: 33412 - DNA, 473 bp, Homo sapiens
  misc_feature (1)...(473): n = A,T,C or G
tgggtcggggntttgatcctanacattgcaccncanacgccagcttggcacgagctaagccttgttttcagactttgcattgaatatatttattttatatatacatgcttcttgtaaatatcccattttgaatgcatacctgtggggggtctgtccgggctaatccccatgctataatgccctttccagctacgtgaataaaaagtcccatgcccgcacccaccggaagcagaagcctggtggatgcctggttcgttccgcagcaccagggccttcaccgtgctgtggcagcaccccccatgtcggtacttctaaataaccttatttatacctgcagagatacacttcagacccattcagaagtcttctcttaaagcagcattacagtcccagacctgcgggtttctgagggcagcttgctggctgacagactccgtcttgacctcaaggaaggcccatacgggactgccgca

SEQ ID NO: 33413 - DNA, 483 bp, Homo sapiens
  misc_feature (1)...(483): n = A,T,C or G
cgatgcgaattgannnccccttactgtcaccgtacgganntcccggaccccaagcttggcacgaggatttccgtgaaggagtaggcggaaatcaccattgtgcggctgaaattttcgcgcgtggtgacgtctgcgtagcgacccttcagttcggtcttgtcggagaagccgatggcgtgaacgatgaaatcgagcttgccccacttcttttcgacttcggcaaagaccgcatcgaccgactcgatatcttcaacatcgcaaggcagtacgaaatcggagccgacctgttcggccagcggctttacgcgcttgccgagtgcatcaccttgataggtgaaggctagttcggcgccctgtgctgcgagttgctttgaaattccccaagcgagtgagtgattattcgcgacccccatgatgaggccgcgtttgcctttcatcaaaccttccatattttccctctccctcagccctgatagcgctggg

SEQ ID NO: 33414 - DNA, 421 bp, Homo sapiens
ggcgatgttagaaatggttccagaaaaacgagcctcagctggcgaatgccttcggcatccttggttgaattcttagcaaattctaccaatattgcattctgagctagcaaatgttcccagtacattggacctaaacggggactctcattctttaacaggattacaagtgagctggcttcatcctcagacctttattttgctttgaggtactgttgtttgacattttgctttttgtgcactgggatcctggggaagggtagtcttttgtcttcagctaagtagtttactgaccattttcttctggaaacaataacatgtctctaagcattgtttcttgtggtgcgtgacattcaaaagtcatttttttgaatgaaaaatactttcccctttgcgttgtggccggctcttgaactatttatga

SEQ ID NO: 33415 - DNA, 415 bp, Homo sapiens
ggaaatgattgaggaactccagaaacgttgcatccacctggagtaccctctgttggcagaatatgacttccggaatgattctgtcaaccctgatatcaacattgacctaaagcccacagctgtcctcagaccctatcaggagaagagcttgcgaaagatgtttggaaacgggcgtgcacgttcgggggtcattgttcttccctgcggtgctggaaagtccctggttggtgtgactgctgcatgcactgtcagaaaacgctgtctggtgctgggcaactcagctgtttctgtggagcagtggaaagcccagttcaagatgtggtccaccattgacgacagccagatctgccggttcacctccgatgccaaggacaagcccatcggctgctgcgttgccattagcacctactccatg

SEQ ID NO: 33416 - DNA, 454 bp, Homo sapiens
  misc_feature (1)...(454): n = A,T,C or G
cctcgacnatcgattacgaccatgaacacgccaagctcgacacgaggaacgacaggggaggactacatactttccatgtttaatgcttccttcaagagctcttttacggcaagcctggtggtgacagaatctctcaccatttgcttggctgtaaagtattttatttctccttcacttatgaagcttagcttggctggatatgtgattctgggctgaaaattcttttctttaacaatgttgaatattggtccccactctcttctggcttgtagagtttctgccgagagatcagctgttagtctgatgggcttccctttgtgggtaacccgacctttctctctggctgcccttaacattttttccttcatttcaactttggtgaatctgacaattatttgtcttggagttgctcttctcaaggagtatctttatggcattctctgtatttcctgaa

SEQ ID NO: 33417 - DNA, 407 bp, Homo sapiens
  misc_feature (1)...(407): n = A,T,C or G
ggaagacagggaaggatgacaaaatggaaatttaaatgacatcctataggtagagaaaccgtggagatcgcttttctcagactcaccaacttttaatgggatttcatggggtttggttgtgctcatagggtaaggggaggctgctttctgcccttctccccactcccatctgatttacttaattcagtctcagctgctgaaatttggaaaggaccaaattgctttacagtttttttctttgtgtagcatcttgaaatcctggaaaattctatggaataggtctgtatatagggcacaagtaaaggcattgtccaaagcttatttatttatttattaccctaagaatgctttgccataaccacatttaatgggaaaaacggcagtatcacagatgtaaattaactcan

SEQ ID NO: 33418 - DNA, 422 bp, Homo sapiens
atcctaatgtacctggctagctggtggtgagtaggggctttggggccaacttggtgggctccccaaggaaacccctttgaaaccaatggatgcattcacgggctcgggtctcaagaggaagtttgatgatgtggatgtgggctcatcagtttccaactcagatgatgagatctccagcagtgatagtgctgacagctgcgacagcctcaatcctcctaccactgccagcttcacacccacatccatcctgaagcggcagaagcagctgcggaggaagaatgtacgctttgaccaggtgactgtatactactttgcccggcgccaaggttttaccagtgtgcccagccagggtggtagctctctgggcatggcccagcgccataactctgtacggagctatacactctgtgagtttgcccagg

SEQ ID NO: 33419 - DNA, 404 bp, Homo sapiens
ggcctcgtgccacgcctgaggaagtggaggtgctggagcccgaggaggatttcgagcagttcctgctcccggtcatcaacgagatgcgcgaggacatcgcgtctcttatacgcgagcacgggcgggcgtacctgcggaccaggagcaagctgtgggagatggacaatatgcttatccagatcaaaacgcaggtggaggcctcggaggagagcgccctcaatcacgtgcagcacccgagtggcgaagccgacgagagagtgtcggagttgtgcgagaaggctgaggagaaagccaaggagattgcgaagatggcagagatgctggtcgagctcgtctggcgaatagagagaagcgagtcttcttgaaaggaggagatcggtggttcacagctgaggactgtagtc

SEQ ID NO: 33420 - DNA, 470 bp, Homo sapiens
  misc_feature (1)...(470): n = A,T,C or G
gggcggngncnnnccctganacattgtgaactgattacgccaagcttagcacgagggaaagatgtggaatacagattgccattcaccataaacaacctgacaattaacattaatatattgcttcctccacagtttcctcaggaaaaaccagtgatcagtgtttatccaccaatacgacatcacttaatggataaacaaggagtgtatgttacctctccattagtaaacaattttacaatgcactcagatcttggaaaaattattcagagtctgttggatgagttttggaagaatcctccagttttagctcctacttcaacagcatttccttatctatacagtaacccaagtgggatgtctccttatgcttctcagggttttccatttcttcctccatatcctccacaagaagcaaacaggagtatcacttctttatctgatggtgacactgtttcttcttcaacaacaag

SEQ ID NO: 33421 - DNA, 402 bp, Homo sapiens
gggggacaacttaatgtcctaaagcattttggtgacttttaaggaatagcaaagacctatttcattgtccccaagtaagtatgtgatgagcaatgaggaggaatggaaaacaaaacccagaaagtgcggcaggaccagcctgacgcacacgctcctgttgtcatgggagacagacgccttgggtgggcaccaccctggcagttccaccctgtatgggagtgaagggacatggctgagctgggcatgtgctgaggttgacttagggaacaagccctgggattggacaaaagggcccatgctgcatccactgtatgggggcagagctctgggtggaagagggaagagatcctaatggaggcgcctccatctgcaaccacagttgtgaggctcatggcacctctg

SEQ ID NO: 33422 - DNA, 464 bp, Homo sapiens
  misc_feature (1)...(464): n = A,T,C or G
ntttgatnacccagtcttgaccatgattgacctaccttggcacgaggggaactatgagctaaatatacttatggggggggggccgcgggggccagggacactctcccagacagccctgacccgccaggcaggaccccgtcccctgctcacacagctcttcaaacttaccaaggacaggcaggaccccgtcccctgctcacacagctcttcaagcttaccaaggacaggcaggaccccgtcccctgctcacacagctcttcaaacttaccaagtgccctctcccctgttgagggcacagcaaccccaagccctccctcccacctcagatgaagccccaatctttcaaatcggaaccagcaagtcttatggctggcacgcatctgggcctctagctgagaacccggactctcaagcacctcagtgcccctgccccaaggcagaggcccaccccgcgggttggtgcg

SEQ ID NO: 33423 - DNA, 452 bp, Homo sapiens
  misc_feature (1)...(452): n = A,T,C or G
nttganaacactgagacattattacgccaagcttggcacgaggcctcgtgccacttacaccaatggcattgacatgaacatggtcctaaagggtttcccagaatgcttacaagcagacatttgtctacatctcaaccagacattgctgcaaaactgcaaagcctttcggggggcaagtaaaggttgccttatagctttggcaatgaagttcaaaaccacccatgcacctccaggagacaccctcgttcactgtggggatgtcctcactgcactttatttcttatccagaggctccattgaaattctcaaagatgacattgtggtggctattctgggtgagtgttttataagtgcatggtgacagattcagttattagcttgtaatgcatagattaaaatgattaggaaaaaaagactgatgtatgtattcataagaacagcttaagatggtg

SEQ ID NO: 33424 - DNA, 420 bp, Homo sapiens
ggactggatgtttgtttgtataattttgaacactataatagcaattcagagacagacattgttaaaggtttgatgtatatagaaattccatgtttgattttttaaaatatgtgtataagtctgtcatgtgctaaacaaaataatatgaaagacctagttaaaaattctaaccaatgtaaaatgaccatttttctgttgcattagacctttacaggtaatggaacatgagcttcacccatattaaatattttggcccctttaaggtcaaaatacagatcatctagaagttagattcaaaatggaaaacctattcatggctcagatttttcattgtgggttaaaaatgggtgtctctgtactagtattgtatttattcaattgaacttgtattctgatttctaaccttgctacctatcgctg

SEQ ID NO: 33425 - DNA, 401 bp, Homo sapiens
aacaacagcatgacttggcaagtcactgaacttctcccttgtttcactatattattacttatcttctttgagagcattaagcccttcttccgtaagtcagtttcgctaaaagaagagcctgagacaaggattcttgagcaagtgatttatggagtgattgctctcaactgaatccagtacaggagcaggtaataggattgaactgaggaagaaactaggcaaagaaatgggctcagctgaagtctagcctgatcgaacagggctttctggagtataactgacactagagagctgtctcaacttgatgaaagaggggtgactatttgtacccagtatctattaaaaactggctatcagctgtctctgaggaaaggctttactcctctgacatgtctgggtgg

SEQ ID NO: 33426 - DNA, 385 bp, Homo sapiens
ggggagtaacaattgatgagcaatattcagagtgtagtaaatctggaaatggtagactgtgttgggattggggggagggccatgggaggggtacatcgtcaacatagccgatcctgttacatttaagagtagcctcgtaggttgaatttcttctggtagcttcatggtaaatgcatccgaataagccatactggattgcagtgtttgtttctgtagggtgtttaaggacttgacttcctttctcccatgattcctctggactgcacacagcacccacaaccagccccatgcatgctgctgcctctgggcagtcgtagaatctcccacttcagtttctcgttgattgtactcacctttatggaatccaaatacatccaaaagggta

SEQ ID NO: 33427 - DNA, 495 bp, Homo sapiens
  misc_feature (1)...(495): n = A,T,C or G
aggcgggcgggttgccctgtctcgatacatttcacctgcctacgccgagcttggcacgaggcgatggagcaatgaatatcgaaaaaggttctcttgaaattttagcctagcatctgagagagaaagcggacaataggcaggcacccccgggctccatcgctcaggactgcaagaaatcaaactcggccgtctagcagctcccagaacccgcggctgccaccgcatccttataaacctgtcagcacgcatgagggtgtctgtgttcagggaaatgaatgactaataccattatttgagtcttatgtgaagacaacactattctaacacgagagataatatacatggtactgtttattcaactggggaaaaataaaactttgagcatttcccttggaactcgagatcagatcataactcatttgcctagaggcagcagaaatctgatcctgctactggagcttanaataacaagtaaagaaaagtgttagaaacaaa

SEQ ID NO: 33428 - DNA, 438 bp, Homo sapiens
  misc_feature (1)...(438): n = A,T,C or G
ctcntttcgatncatctcgaagcatcctgancnccccngnnantagggggaacgaggctaaggagcaggtgctgcaccgggtagctttttttgagattttagcactagagcaccagctgggggaggatgggcacactcccgaggcctgctgtattgaggcacctatccaggagctcaagactcgggaagaggctctgtcgggattggccggaagcagaagggaggtcactggtgttggggctgctctggaacaactggtgctgatggctcccttggcgaaggagtctgtttttcaacccaggaagggtgtgctggagtatctgtctgccttcgatgaagaaaccacggaagtttggtctctggacactccttctagacctcttgctctccctctgggagaagcggaggaagccaggtctgaaccagagcctgaggggg

SEQ ID NO: 33429 - DNA, 439 bp, Homo sapiens
  misc_feature (1)...(439): n = A,T,C or G
tcnaactgaaaacagctgatagacttcgcaccacgctnggnacgaggggagactttctttgaatctatagaatctcatcaaagcaacttattgtgatttgcttttttaaattcctgttttcttattgtgaaactggtatgtggtttttgcacaaaatgcatacaaacaaaaataagagtacaaaaattacctgtaatgcaaccaccaagaaataactcctattggcatattactggttctccttgagtttttccatggctgtttacttaatttacagaaatggaaacatattataaatatgggttataacttgctttttttcctcatcatcctatattgtgggtggcttttcatgtctttaagtgtgcatcttcaatattattttgaatggcttaataatgtttcaatgtgtacatacatcttagtttatttagccaan

SEQ ID NO: 33430 - DNA, 443 bp, Homo sapiens
  misc_feature (1)...(443): n = A,T,C or G
tcggtctgattcctcatcgagctagtcgcaacacgacnacnnnttgntggggacgaggggggcacaaacgactatttgcaactcacctttttagcctactttctggacaacaaggatctgttgggcaagtcggaccctttcatgggaatctataagaccaacgaggaccaaagtgatcagctggtctggagaactgagggggtgaagaacaacctgaaccccagctgggagccgttccgcctgtccctgcattccctatgcagctgtgatgttcaccgacctctcaagttcctggggtatgactatgactccagtgggaagcatgacttcatcggtgagttcaccagcactttccatgagatgcaggaagggacggcaaaccctgggcaggagatgcagtgggactgtattaaccccaagtatcgggacaagaaaaagaaatg

SEQ ID NO: 33431 - DNA, 437 bp, Homo sapiens
  misc_feature (1)...(437): n = A,T,C or G
taaactgatnacactgataaccctttacaccacgcttggcacgaggggagaaaacaggaggagatgttaaagtaacccatcttgcaggacgacattgaagattggtcttctgttgatctaagatgattattttgtaaaagactttctagtgtacaagacaccattgtgtccaactgtatatagctgccaattagttttctttgtttttactttggcctttgctatctgtgttatgactcaatgtggatttgtttatacacattttatttgtatcatttcatgttaaacctcaaataaatgcttccttatgtgattgcttttctgcgtcaggtactacatagctctgtaaaaaatgtaatttaaaataagcaataattaaggcacagttgattttgtagagtattggtccatacagagaaactgtggtcctttataag

SEQ ID NO: 33432 - DNA, 439 bp, Homo sapiens
  misc_feature (1)...(439): n = A,T,C or G
ttaaattgatnacatttgataactctttacgccacgcttggcacgagggggggagtaactcggcctccgacacttgttcagactgtgatggacaaggtcttggagggagcgcaggtggtgggggtaacaatcctgacttggtagctggatcctcagacacgtcctttggtaaggcttcattgatagtacttttcaaagcttgtttgtcatcactagttacatcctggttagggacaggaaggtcagccatgtctttaacagatgtcttctccatccgattcaagtcacgaggttgttgatttgccggcagtgactcagaataaaaatcaaataattgacagtcccatttgggcttaggaaaagctgcctgcaggtattctggctgcagagttggagggaggccctcaagcaatgggtagccgttctttcgagccacaat

SEQ ID NO: 33433 - DNA, 388 bp, Homo sapiens
gggtcatcattaacagcaatatcagcatcatgattttttattatttacttacaaggagttgtacacgggtttataagtaatccctgcctggatggaaatttgcaagctataacaaatgacatttgtatgggtgacaaggtgaatttctatgaaccagcaaatgtccaacaacaattaacatatcattagattatgcctgtgttcacacttccagtctcaataaatggttcacctcattatctaatggttgttattgaatattagtgctatctcatacatcaaagcagttgtctactgaaacaagtaaacttgcgaattgaatatgtgcttcctgatttattcccaaaaataatttctattttctaccatgttatcctaaaaagaaatt

SEQ ID NO: 33434 - DNA, 449 bp, Homo sapiens
  misc_feature (1)...(449): n = A,T,C or G
aggaatannctgattacatctgcatccacgantacgccaagcttggcacgaggaatacctaatgtagatgatggattgatgggtgcagcaaactttcgtggcacatgtatacctatgtaacaaacctgcatgttctgcacatgtaccccagaacttaaagtataattttaaaaaaaaaaggggggggtttcccaaatggattttaccacaaaactttttttttaaaaaagggtattctgggactagggttttatgggatttccttgggaaaggcagatttttcacacaggggtggtatatgggtcatgaaggcaagggtggtattgggagcatacctcctagccccacacctggttgcccctttaccactttgcattgtcattcattgccaccttcccctcccactaaaggtcctggaggcaggggtgccccttgttcctgttgacccn

SEQ ID NO: 33435 - DNA, 387 bp, Homo sapiens
gggtcgtttgctgcggggagggaatgaatgggcgctgggaacacgcccgcgaggtggggacgcgccggccgtagcgaggtccttagcgtgtgagtggccggggtcgggtcgcttccccgcagcatggaggacgatgcaccagtgatctacgggctggagttccaggcacgtgccttaacacctcaaactgcagaaacagatgccattcggtttttggttgggacgcagtctcttaaatatgataatcagatccatatcatagattttgacgatgaaaacaacattataaataaaaatgtcctcctccatcaagcgggtgaaatctggcatattagcgctagccctgcagacagaggtgtgctgacgacctgctacaacagaacttca

SEQ ID NO: 33436 - DNA, 430 bp, Homo sapiens
  misc_feature (1)...(430): n = A,T,C or G
agcgaatgctaacgcagtgtgagacaccattgcctccttgggtgccgctaagngaaacacattgcccagaaccactcanctggggaagtgggtgggctggtttcccacccaggcaaggctgacatcactgtttcctactgattcctatgggcagagattctctgatcatccaaaggtgctgcaaatgctgggtggcccaaaggaggacacaggtccaccatgctggatgtgtgaccttgggtgaactgcggagtttgtctgtgtatcagctggctcctgggtataagatgagagtggccacctatgccgccggcatgaggctcagaagagacacaggccgtgtatgtacattaccaccttaagggccgcaccaccccttttcctatttaagattcacaagatatttgccacctgctgatcccacaccatt

SEQ ID NO: 33437 - DNA, 492 bp, Homo sapiens
  misc_feature (1)...(492): n = A,T,C or G
gggtgggccaggggnnccccctttgatgaccgntttgaccatcttacgccaagcttggcaccaagctaatgctaacgcagtgtgagagaccattgcctcgttgggtggcgctcacggacatgcaggcacggaagcgggagcaatcacaaaactgtaatttacttaccaaatctgttcctttgcgtagcctcgcctgcctgacttagagaaagaaaagcaataattttacaggcattttgaggtggctctttgggttctttctgtttgaaaggatatttgtcgaaaaaaagagcaaaaccgttttaaataaactccccctggaaaaaaacccaaaacactggcatctgagtaggaatatgaaaatgacaccttttccaaatattaaattggaaaacaaggtctacaaaatcatgatacttttttaaaaggcagagcattcttttttcggcaattttgataagcaaggtgtagatttacatttttgtccttgcc

SEQ ID NO: 33438 - DNA, 431 bp, Homo sapiens
ggcacccgtctagaatccaggactggattccggaattccttgctgcatggcctctctgggccttaattttccccccatgtaagcatgtggattgacccagagaagcactaaaggcccattcttgctctatgtatctgtgacttaagatctgccacctgccccgaggatatgccagggatgaccaggacagctgccaccaagcccccaggctcatcatcagtcagccttttagacacacacacacacacacaccatataccttctcactgtgctccccgaacacctgcccccacattcaatgtcaaagcaaaaatacacacatgtgagcaaacataaagctgttcaggcaaagaggggaaagacgcaggggtccccaaagcccttcttcactttgtgtccccttgctgcgaacatggagagttaaagaggcg

SEQ ID NO: 33439 - DNA, 436 bp, Homo sapiens
  misc_feature (1)...(436): n = A,T,C or G
gggtgcggtcgatagtgtgcaggtagtangagactggcttccccgtccacgacaccgagcccttcaggggcgagagctccaccacgcgcatgatggtgccgatgtcactcaagtttctactgtttattctgaagttcagaggtgcaaagggtttcgaggacacgattctgccaccttccttcatgtttgcaaaccgctccttcagctggtgatccacctcaggaccaaaggcaaaattattcacaaatataacactcgtgttggcgattcgctccctccactcttctgagaggaaatcgcctctctccaatgtgtattctgcatgcttttttccataccatttcatccacttcctgaactcgcggtccatggtctccgcatacttggcccggatgtctgctttctcgacgccatagtgatgtttgcagttggtggg

SEQ ID NO: 33440 - DNA, 455 bp, Homo sapiens
  misc_feature (1)...(455): n = A,T,C or G
tgaggtggccnggggggctccccctgagtaccgtcgtgagaaagcatacgccaagcttggcacgaggggcatgaccccatgtctgggggctggggggaaggaaaggatctgctactgcagctggaggatgagacactaaagctagtggagccacagagccaggcactgctgcacgcccaacccatcatcagcatccgcgtgtggggcgtcgggcgggacagtggaagagagagggactttgcctacgtagctcgtgataagctgacccagatgctcaagtgccacgtgtttcgctgtgaggcacctgccaagaacatcgccaccagcctgcatgagatctgctctaagatcatggccgaacggcgtaatgcccgctgcttggtaaatggactctccctggaccactctaaacttgtggatgtccctttccaagtggaattcccagcgcctaagaa

SEQ ID NO: 33441 - DNA, 374 bp, Homo sapiens
  misc_feature (1)...(374): n = A,T,C or G
gggcggaggtcgatggcgagaggacacaagacactaaccttggagctaaagccactgcctctccctctggtgccacaaatgggcgccccccctccccatgcaggcggtgtcaggcccttcttgctgccctgccccaagatgggggtcattgctgcctgtccccatgcttaacatacccgcctagctgctgtgacattcttcttggtttggcctttaatttttttctaataagcctgaaaactggcaaaataattctgcacgttgaaaccatgtgtacatgaaagtcctcaagaagagttagacggaacagggcggagatatccttatgccaccccccctggaagaagcgggcagcttaatgccctggaggcgtn

SEQ ID NO: 33442 - DNA, 453 bp, Homo sapiens
cgagtaggccgggcgggtcccaatgattaccgtcgtgagaatgcttacgccaagcttggcacgaggggggaggtggattccgagtggtgacaggacgctaaccgtggagcttaagccactgcctctccctctggtcccacaaatgggcgccccccctccccatgcaggtggtgtctggcccttcttgctgccctgccccaagatgggggtcagggctgcctgtccccatgcttaacatacccgcctagctgctggcacatttttcttgttttggccttttatttttttctaataacctaaaaactggcaaaatagttctgcaggttgaagccatgtctacatgaaagtcctcattaagtgttaaagggaacagggcggagatatccttatgccacccccgctggaggatgtgggcagcttagggccctggaggcggtgcggcagggaagaggg

SEQ ID NO: 33443 - DNA, 442 bp, Homo sapiens
  misc_feature (1)...(442): n = A,T,C or G
gggggctttttaggattacatccgtagcanccncacgccaagcttggcacgaggggggaggtggattcccaggggtgacaggacactgaccccggttcttaagccactgcctctccctctggtcccacggatgggcgccccccctccccatgcaggtggtggcgggcccttcttgctgccctgccccaagatgggggtcagggctgcctgtccccatgcttaacatacccgcctagctgctggcacatttttcttgttttggccttttatttttttctaataacctaaaaactggcaaaataattctgcaggttgaaaccatgtctacatgaaagtcctcactaagtgttaaagggaacagggcggagatatccttatgccaccccccctggaggatgtgggcagcttatggccctggaggcggtgcggctgggaaaaaggg

SEQ ID NO: 33444 - DNA, 402 bp, Homo sapiens
ggcacgagcaggatgttctaccgggactggtggaactcaacgtccttctccaactactaccgcacttggaacgtggtggtccatgactggctgtacagctacgtgtatcaggatgggctgcggctccttggtgcccgggcccgaggggtaaccatgctgggtgtgttcctggtctccgcagtggcccatgagtatatcttctgcttcgtcctggggttcttctatcccgtcatgctgatactcttccttgtcattggaggaatgttgaacttcatgatgcatgaccagcgcaccggcccggcatggaacgtgctgatgtggaccatgctgtttctatgccacggaatccaggtcagcctgtactgccaggagtggtacgcacggcggcacttgcccttaccc

SEQ ID NO: 33445 - DNA, 418 bp, Homo sapiens
gggtgctgtgggctgctgaatgaagtcatgggaactggagctgtcaggggccagcagtcagcatttgcaggagccaccggtccattcagatttacaccaaaccctgagttttccacctacccaccagcagctacggaagggcccaacatagtttgtaaagcctgtgggctttcattttcagtctttaaaaagaagcatgtttgctgtgactgcaagaaggatttttgctccgtttgttcagtcttacaagaaaatctccgtagatgttctacttgtcacttattacaagagacagcatttcagcgccctcagttaatgcgactgaaggtgaaggacctgcggcagtatctcattctgagaaatatacccatagatacttgtcgtgagaaagaagacttggtggatctagtactgtgcc

SEQ ID NO: 33446 - DNA, 421 bp, Homo sapiens
gggggcttcagaggaagaacctgaatatggagaagaaataaagggttatccaggcgtccaggcccctgaggacctggagtgggagcgctataggggcacaggaagtgaagaatacagggctccaagacctcagagtgaggagagttgggatgacgaggacaagagaaactaccccagcttatagcttgataagatggcacatggatatggtgaaaaaagtgaggaaaagaggggccttgagccgggaaagggacgccatcacagaggcaggggaggggagccacctgcctatttcatgtctgacaccacagaatagaaaaggctcttgggtgaaggacaccaccgtgtccaataaaaccagatggacgaggcgaggaggcattcacaaagtgcgtggcaagagctggacagaaattatctc

SEQ ID NO: 33447 - DNA, 480 bp, Homo sapiens
  misc_feature (1)...(480): n = A,T,C or G
tactttgaaattccgtacgaatcttngcnancancannacgccatgctnggcacgagggggagattccttattggatgtgaaattctcctctaggttggaatttcacctgagcagcaggggctgtttcacaattgggtcaggtatacaaaccagccaggccattttcctggagctccagggatgattcatattcactggtgtctcttaagacggaattgatggtgtagttcacagcttgttgttctgattttgagtgtcagattctgcaaagggttttttttttctgaggtgagctccgcgaagataatgggtgagctgctattttcaccatttttaacaccgcattggtatctgtctgcttggtcggagaacacttccagaaatggcaactgaacggaagctctgtctgcttgtggatggaccacttgaacatgttctgtcctcgcagggtgataacgaatgatattagggtgctgaag

SEQ ID NO: 33448 - DNA, 441 bp, Homo sapiens
  misc_feature (1)...(441): n = A,T,C or G
ctacacataagaatcacatgaagaacttaataagattctgtgtgctggggcctagtttactgaaaaatttctcagttgtgtctaatatgcaagacaggatggaaaacgactgatctaaagtaaagatcttgtgttgtaatctaaattcttctcataatgagatctattattaatcttcagtacttggcatataatgggcacccagcataagaaaatctggatagctgctacataaaaatgtcagtcaggcttgaaaagatcccctgtgctagctggcttgcttactgcaccactggcctctcatactcaaatacaaaaacatatattatacatatatgtgtaccctttttgtgttatctatgttccacagcccaaaaccagactctctgatagaaaattgaataaatcatgttgcagttacttctctggtttaaaaacaan

SEQ ID NO: 33449 - DNA, 426 bp, Homo sapiens
ggggactgggtccccaagaagatgcagcgggtgggctgtgtggagctgctcaacacggtgcaaaggcgcgtccagccgcggttacatgtctttggccacatccacgaagggtatggtgtcatggcagatgggacgaccacctatgtgaatgcgtccgtatgcactgtgaactaccagcccgtgaacccgcccatagtcatcgacctccccacaccccggaactcctgactgctccccactgcccctgccctgcccgcccgtgtcagctccacaggcctggcccggccactgttccttccatgctgagttgcctggacgacccatctggctgcggggactggcctaacaggcaggtcaaggccttggaacgactctttaaccttctgtcacctggagttgggaccctgcgcatccccatcaggggtt

SEQ ID NO: 33450 - DNA, 444 bp, Homo sapiens
ggttggggtgtgaggaggcagctagtgctgctggcagactggggagaggaagtgggtcagctctttggtaaccttgcttcccatcccttaaggtatcgcacaaccaaggacatcatccttcccttccgggtgatcccgctagtgcgagaagtgggacgcaccaaactggaggtcaaggtggtcatcaagtccaactttaaaccctcactgctggctcagaagatcgaggtgaggatcccaaccccactgaacacaagcggggtgcaggtgatctgcatgaaggggaaggccaagtacaaggccagcgagaatgccatcgtgtggaagtgagtctttccttcattaggccacagcagggctcaagatcccagtataccctcttgttttcagctttgatccttctgaatgaggggcaggggagtgtgcctgtttgcttttctagga

SEQ ID NO: 33451 - DNA, 455 bp, Homo sapiens
  misc_feature (1)...(455): n = A,T,C or G
tggaggggacaggcggnnccgtgtgaaaccgtctattgagtactctcgccaaccccggnacgagggngtggngacgggtgcctgtagtcccagctactcgggaggctgtggcaggagtttggcaggaacctgggaggcggagcttgcggggagccgagatcacgccactgcaccccagcctgggcgacagagccagactcatctcaaaaaaataaaaataaaaacaaaacaaagcaaaaaaaaccaacagacactcgtatgcaagcattcacagcagtacttattcacgacagacacaagatagaaatacaacccaaatgtccataaactgacaaacagataaacaaatatggcttatctataaaatgaaacattattcagccataaaaataaaggaagcactgagccatgctgcaacatgaatgaatagcagaaacatcatgccgaaagaagcg

SEQ ID NO: 33452 - DNA, 453 bp, Homo sapiens
ggagatcaaggcgctcctgacccctgaggattaccagcgatttctagacctgggcatctccattgctgaaaaccgcagtgccttcagctaccattgcaagaccccagattgcaagggatggtgcttctttgaggatgatgtcaatgagttcacctgccctgtgtgtttccacgtcaactgcctgctctgcaaggccatccatgagcagatgaactgcaaggagtatcaggaggacctggccctgcgggctcagaacgatgtggctgcccggcagacgacagagatgctgaaggtgatgctgcagcagggcgaggccatgcgctgcccccagtgccagatcgtggtacagaagaaggacggctgcgactggatccgctgcaccgtctgccacaccgagatctgctgggtcaccaagggcccacgctggggccctgggggcccaggagacaccag

SEQ ID NO: 33453 - DNA, 436 bp, Homo sapiens
  misc_feature (1)...(436): n = A,T,C or G
nccccattgagaccgtcattgaaaaccttacgccaaccctggcacgagggggaaatggatattttcaagtgcccccacatacacccgtgatttttggtgaatttggaggtcgcacactgttcaggctgctctggcgagattccgggggtgagactgagtctatgcttcttaatgaaacagggccacaatgggtaattgacatcactgtggataaaaatatgcccaaattcaacaaaattcctttctacctccaacctcatgcatcttcaggagcaaaaaccttaaaaaaagatagactctctgctagtgacatgctccaagtccgaaaagttatggaacatgcttatgaaaaaattatcaacttggataatgagtctcaaaccactagctcttctaataatgaaaaaccaggagaacaggaaaaagaagaagatat

SEQ ID NO: 33454 - DNA, 418 bp, Homo sapiens
  misc_feature (1)...(418): n = A,T,C or G
ggtggagttgctgataaagctcctaaggtgaaaacaaaatggcacattcctctgctttctaaagggtgtcacagagactggacacatggtcccataggactcactagatgtgagagtcacagagccacttgatccttggcccctatagatataaaaaccatgtaaggaggttctgatccagaggagatgggcctcatgctcctgggatgaagcccctaccctgcccctacaggggtgggggacttgggcaccaagaatgagatattgggagatctgaaagcatgggagcttggcatctccatctccagcaaaaccacaggcccacttcacagctgtcacctggagttcttgggagaacttaatgtttgttccttaaaatgtgttccctgtantgtggaggtggaaggtggaaaggatc

SEQ ID NO: 33455 - DNA, 453 bp, Homo sapiens
ggcgagataaataaaaatgataagtaaccacccaggttactaccacccaactggtaggcagaaatggcccaagtcatgaagtcacatgactaaataaagcttgggaaatactagcataaagttaattcatgtaaacactaatgatcacaggcacagtatccttggcttctgtttcttcgtggcgtgtgtccacatgagccggcctgaatcataaagcccagcctgaaagcagctctctttctcggaagggctgatgtcatttgtgtgtgttttatcagctgctcttcaaggagcataactcctgtggcttctgccatatctttatgccatcagaattctgatttcgggaagacctcaagagagcattgaaatagctcacttacagtcctcaccccttttgcatcaaggctcacctctgctccctcacctccttgtacctggtactccagccag

SEQ ID NO: 33456 - DNA, 501 bp, Homo sapiens
  misc_feature (1)...(501): n = A,T,C or G
cgccccgcgccgngccggnattgaaaattgagnacagtctgcgaccnccattacgccaagcttggcacgagggacacagaccagaccctgaagaaggaggggctgatctctcaggatggcagtagtttaaaggctctgttgcgcactgaccccctggagaagcgaggtgccccggatccccgagttgatgatgacagcctgggcgagtttcctgtgaccaacagtcgagcgcgaaagcggatcctagaaccagatgacttcctggatgacctcgatgatgaagactatgaagaagatactcccaagcgtcggggaaaggggaaatccaagggtaagggtgtgggcagtgcccgtaagaagctggatgcttccatcctggaggaccgggataagccctatgcctgtgacaatagtttcaaacaaaagcatacctcgaaagcgccccaaagagtttgtggaaaacgttacaagaaccgaccaggcctcagttaccactatgcc

SEQ ID NO: 33457 - DNA, 479 bp, Homo sapiens
  misc_feature (1)...(479): n = A,T,C or G
ntcggcacattgagnaccgttatgaccatgaatagatcactctnggcacgacgngaatatgtgtttgagaattattgaattaaagcttgttaacttttttcatataatatttattattattagaacaacttacaatgtgttcaggtagtgcttatacactggacttgcgtaattacttgtgtaataaccatgaacaaaatgcaaggcttaacctttggttctgcccatgaaacatgtaatccttcttacacattaaaaacactgaatgggttctactttttggcttcattttgttcttgggagagtatgaggattttaaaatgttaaagatgaaaagtggcgtctagtttctgacagtttgtacagatggatgcattacatttttagatttgaagttttggttatgttagngccatgagtgatctttgtggggatgtcttcccctgtaaacctagtgctcagggcgctttgtccacggn

SEQ ID NO: 33458 - DNA, 500 bp, Homo sapiens
  misc_feature (1)...(500): n = A,T,C or G
naattgaaaaccgttgtgaccatgtttacgcccagcttggcacgaggggagatgatggctgatgaagaggaagaagtcaagccgatcttgcagaaattgcaggaactcgtggatcagctctactcatttcgagactgctatttcgagacacatagtgttgaggatgctgggaggaagcaacaggatgtgcggaaggagatggagaaaaccctacagcagatggaagaagtagtgggttctgtccagggcaaggcacaagttctaatgctaactgggaaagcactaaatgtgactcctgactatagccctaaggctgaggagcttctgtcaaaggctgtgaagctggagcccgagctggtggaagcctggaaccagctgggtgaggtgtactggaaaaaaggggatgttgcagcttgccacacctgcttctcaggagccctcacccattgcaggaacaaagtctccttgcaaaacctggcaatggtgcttcgtcagctgcg

SEQ ID NO: 33459 - DNA, 431 bp, Homo sapiens
ggacctttcctgcctgtgtgactaacctaattttgctagttccataaatacacgattagtttagtaacagccatcacaatgtaccatgtacattcatggtgagagctaaagatcgacacagacttctaggagctttgttcatactgattacttaatccaattgtatagattgaatatttgagtggaaggaatttacactctgtttaaatgatgggattctatcgagatagcactcatgatcatgacctttttggtagtattcttaaacaaaattctacagagactaaatgttagcgaggatcctccattttcaattttaaccaattctgtcccctttctcaaaaccctgagccctgtgcatgctttctcagtcttgtggggggactggatacaatgactaacttcccctcctcccctctttaaacaccatt

SEQ ID NO: 33460 - DNA, 415 bp, Homo sapiens
ggacctggcttctatactaccaggtgtcttgcgcccatgatgtctgaagtcatccgaatcctccaggaaggagttgacccgaagaagctggattccctgaccacaagctttggctttcctgtgggtgccgccacactggtggatgaagttggtgtggatgtagcgaaacatgtggcggaagatctgggcaaagtctttggggagcggtttggaggtggaaacccagaactgctgacacagatggtgtccaagggcttcctaggtcgtaaatctgggaagggcttttacatctatcatgagggtgtgaagaggaaggatttgaattctgacatggatagtattttagcgagtctgaagctgcctcctaagtctgaagtctcatcagacgaagacatccagttccgcctggtgacaa

SEQ ID NO: 33461 - DNA, 421 bp, Homo sapiens
ggcaaggattgctgtgggtgctgggacttcccgtccgcggcgtggaggttgcagaggaaagtggtcgcttatgttcagaggagcagcctgctcaccctctccaggtgggggctgtgtacctgggtgaggaggagctcctgcatgacccgatgggccaagacagggccccacaaaaggccaatgctgagctggggctggacacccaaggcgatcacatggagatgctgtctgtgaaacctggggaagctgatgacaaagtgagttcaaagcctatcggcgtcacctgtggtgctggaggagcggaggactcaaggtgcagcgttcgagagagccttttctctctggatggcgctggagcacacttccctgactgagaagaggagtgttacacacagccctaagtggcggaatctgacgcata

SEQ ID NO: 33462 - DNA, 428 bp, Homo sapiens
gggcatagagtactaaaaagtgtggaatcagaaagacataagcaagaaagagaaatacctaactttcatcaaattcgagaattccttgaacatcaagtcagctgtaaaattgaggagaaagcactactctcttcagatcagtgcagtgtttctcaaatggataccctttcaactggagaagtacccaaaatgatacaacttccttccaaaaacagacaactgattagacaaaaagctgtttctactgataggacatctgttccaaaaattaagaaaaatgtcatggaagatccttttcccagaaagtcttcaactattacgacccctccttttagttcagaggaggagcaggaggacgacgacctcatccgggcatacgcatccccaggcccacttcctgtgccgccaccacaaaacaagggcagctt

SEQ ID NO: 33463 - DNA, 496 bp, Homo sapiens
  misc_feature (1)...(496): n = A,T,C or G
aatggagaacgctctgaccngtttgagaacagtttggcacgagggttactatcgtgaaaacatgcaccgttaccccaaccaagtgtactacaggcccatggatgagtacagcaaccagaacaactttgtgcacgactgcgtcaatatcacaatcaagcagcacacggtcaccacaaccaccaagggggagaacttcaccgagaccgacgttaagatgatggagcgcgtggttgagcagatgtgtatcacccagtacgagagggaatctcaggcctattaccagagaggatcgagcatggtcctcttctcctctccacctgtgatcctcctgatctctttcctcatcttcctgatagtgggatgaggaaggtcttcctgttttcaccatctttctaatctttttccagcttgagggaggcgggatccacctgcagcccttttagtggaggaggctcactctttctttttctttgtcccggataggctaatcaatacn

SEQ ID NO: 33464 - DNA, 485 bp, Homo sapiens
  misc_feature (1)...(485): n = A,T,C or G
gccccccccntnnnattgagagcgttattagatgactactccaagcttggcacgaggggattattattgtacataatagcagttctggctggaattccaatccactttctggggatcattttgacggtgaatgttcccccaaagcattgtgacaagttgggtccacttggctctttaccccggggaataagacccttattgactttgaaaaactggcataaatgagcttaagaaatccattgtatacaggcctagtgtttgccttcttgggaaaattacatttaaggatggcatttcatgagtcaaattgtatctgctgacactgaagtgtattgagatgttgttctttagtttaagtattgaacaaagcagtattcataggggatggttgggggtggggctgggaccgggtggctttatattgataatgaaatattccacagcaaaacacatttggctaatgaagatgttgcagctctcttcan

SEQ ID NO: 33465 - DNA, 438 bp, Homo sapiens
  misc_feature (1)...(438): n = A,T,C or G
ggattccttttcacaagaatgttctgggaaactcttcagaggacgtgaaggaaataccctgaagagtcatgattaactattgactattttctgatttaaaactgctcacctgaaattgatacttttagactttacgatcagtaaattattcagaattcatgaagatgctgagtatgttaagtgtcactgcaggaacggagctgtggtgatcacgttttgcctgcctgtgcccatgtctcttcccttgagcttattctggtgctgattcatatcttgtgttcaattattttggaagcttttcagtcgacattctgtagagtgtgttctgaggaggaactgtgataagaaagtttattataaatattatgtaaaatatatggctctctctgcaccagctatatcttatttggtgggcatatcactggaaactggaacctn

SEQ ID NO: 33466 - DNA, 431 bp, Homo sapiens
gggttattattctggattatttgatggaggacaaacttacctgtatttgttagtcaagctgtgaaaataaggtggattacagaagatgtgaaagaaattttagtctgtagactcagtaattttctataatttactgctaatctcatttgaacatggattaggcacaatttataaattaattcaagtcacggtctttaggtatcaggtgccagagagatatttaacagagttccctacctaaatttatgtatatgtactgcctaaaacaatacttttttaaaaaaaaggaacagttgggagaaaataaatataatgaaaaattcccataggctaccacttggattctaacacgtatgctattggattatccattacttctgtaatatttaagtttagattcttttatttttttaattggcgcagcacgaggg

SEQ ID NO: 33467 - DNA, 422 bp, Homo sapiens
ggcattatttgaggatatcttataactcacagattgtcagcatccagccatgtcctatctagattaggaagatgatcagaatattccagctcaacaagtctggggatattcactattgtgagtcaatacaccatagctctgttgaaattcctggaggcaaaattgaccttggccccaaagatattcctcaatagatttcaaacaccactcccctgtagaactctcccagcctcgttggggaggcttgtccagggtgatagagactgatttcagacaaacctatttattacaaaagtttcatggtgtctgaaagagtggtttctctctttgtatatttggacaaatgcttcagctgtgcttttaaaaaatctggatgttttttatttagagattgttcgacaattatctgcttcaaaacatag

SEQ ID NO: 33468 - DNA, 422 bp, Homo sapiens
ggggagactgtatttaggcctgtaagtgagacatgcacagacagatctggcatctccactggacactggtcaggtgaagtgaaggacaaaaatgttcaagtggtcgagcttcccattgtagacagtcttcatccccgtcctccatatttacccttggctgtaccagaagacctcgcagatcgacttgtacgagtgcatggtgaccctgcagtgtggtgggtgtctcagtttgtcaaatacttgatccgcccacagccttggctagaaaaagaaatagaagaagccaccaagaagcttggcttcaaacatccagttattggagtccatgtcagacgcacagacaaagtgggaacagaagctgccttccatcccattgaagagtacatggtgcatgttgaagaacattttcagcttcttgcacg

SEQ ID NO: 33469 - DNA, 454 bp, Homo sapiens
aaaaaaaactgataacatttgacttgattaccccaagcttggcacgaggaaaattgtcaaaagtactccgggaaagcccttaaatagttggtaaagtacagaacacatgattgtcaatatatgtaaatacaggatgagctaggacagaggggcccttctttcacaccacttaaattaattcccactttaaccttgtttgagattgacttctggagagttaaatgcagatagacttaactctcctaagtcaggtgagactgagagctgactgctacaataattacggagcccaaatgcagtaaaacagcctgtttttcaagcaagggttttgtggggggttttcctaaattaaaacggatcgcctcctacctgctcctatttattgaattaactagtgaattagaaagcattttcaattctaaattcattcaccagttctgagaggtgtgcaaca

SEQ ID NO: 33470 - DNA, 394 bp, Homo sapiens
  misc_feature (1)...(394): n = A,T,C or G
ggaaagagacagggcccgggcccaggctgagagcgaccagcaggctcctgtggccttttttgccaaaaagcacaagatgttgaagcgagcagggcaggcccccggggaggggccaaaggtttctatgaatctatttttctttagactgaggccttttggtaatgggagcccccgcaatggtcatcctccctgaggtctggcagcagagcccccactcctgctactttatttgctgtgtgcaatcacacgtggtgacctaacacacctctgccccttgggcctcccactcccatggctctgggcgggccaaaaggagcaaggcctgggcctccacctctgtgcaaggcacaaaaagctggtgtggggtggaggannccccaanagccttgctctc

SEQ ID NO: 33471 - DNA, 431 bp, Homo sapiens
  misc_feature (1)...(431): n = A,T,C or G
ggcaccaccacgcccagctaatttttgtatttttgtagagacagggtttcaccacgttggccaggctggtcttgaactcctgacctcaggtgatctggccgcctcggcctcccaaagtgctgggattgcaggtgtgagccaccgcgcctggccccagttgatagtttttttaatttaaaagttcctcaattccaagctctttaaacgagtgaaataggttaactttatttggatgagttaggtgtaccatctcaccatctgagaggagatttatatatttcctgctgctccttaacaaaatatgtaatgtacttaaaaactttaacgacttcctagttgagagaaaacttgacatataaaaggctgtgaatttttctgcttggaggaagagcccaaccttggttgctttgaagttacaagcccccttgtgn

SEQ ID NO: 33472 - DNA, 422 bp, Homo sapiens
  misc_feature (1)...(422): n = A,T,C or G
ggcagaatttctaatttagtagaatcactggatatatatagatgttgttatatatgtttgcgtatatataggaaacccaatgggataggagaagtatagctttacagatgaggagaaggagctctttataggtcggagtcaagactggtgtcttggacgtgcatgggctgtgtcccaggccacttcgtacacatggggctgaggcgtggcgccgggcccttgtcatccacctcaccacggcagagccaccaggccctgtagggagctgctgctgtctcactgggtcccagctttaagcgcatcaatgggtgacgggggcaacaaatcaaagggactggaagtttccatccccgtttgctttgaccacgtgaactgagctgcagcctctgatactctgtcacgttttcaaaaatggtattcan

SEQ ID NO: 33473 - DNA, 417 bp, Homo sapiens
  misc_feature (1)...(417): n = A,T,C or G
gacagcatgcctccatttttctcagncatctcattcttggtctaggggggcccatttaactccaagccctggcatactctgtagccacaagtgtttgagggcttaggaatcaacaggatcaaaggctatcagccttaggaaaacagatctcagcttccctcagccatctcagctgatttgtttacatgaaaactcagtttaaaaggcattagttttctcctttcttatctctgctctgatgctggactttctcaaaaaaaaaaaggggagggcctcctttttgatgggaaaagccagcagaaaagcataccttgtccaaatttaaaggagggtctttaaagagagcaacccttaaagggccccatgggtttttcttataaaacttggtcccttgcctgggccacccctgaaatctgg

SEQ ID NO: 33474 - DNA, 394 bp, Homo sapiens
gggggcgccctccacgaagttcttcgttgggggaaactggaagatgaacgggcggaagcatagtctgggggagctcatcggcactctgaacgcggccaaggtgccggacgacaccgaggtggtttgagctccccctattgcctatatcgacttcccccggcagaagctagatcccaagattgctgcggctgcgcaaaactgctacaaagcgactaatggggcttttactggggagatcacccctggcatgatcaaagactgcggagccacgtgggtggtcctggggcactctgagagaaggcatgtctttggggagtcagataagctgattgggcataaagtgggccatgctctggcagagggacctcgggtaatcgcctgcattggggagaag

SEQ ID NO: 33475 - DNA, 406 bp, Homo sapiens
ggcaacaatagaacactcatcatcttttctgagtgggcacctgcttccatttctttttattctcctgtcccttcttgatctacactttaacacattcctttctcttcccacaggattccctttattgaaggtgggaatgagggggattctggactgcaggcacaggacatctgccctcccacagcagcctgagatgttttcttctttgtgcatgttccccatgaagagggctcatacccctccatcagtgtgcctccccacctcacctggagcgtggcttcagtgcccccaccgccacccccagcttgtactgcagggtttttttttatcctttctctaagccagagagataggcacagctgatagtatgaacctttctagctaagagtcagatcaagtgctggac

SEQ ID NO: 33476 - DNA, 392 bp, Homo sapiens
  misc_feature (1)...(392): n = A,T,C or G
ggcactgctgcccgtcattgttctcgcagttagatgggggtgctttgtgacggctgccaagttggggtgtgttctctttattccgtttttcaaacagaacaaggcctccaaggctgaccccagacaacccaccccctcggaccctaattcaccttattgcactgattttttttatcaagtcgtattttattgtacaggagccacgccctgatttcttaaaggcgccttgcactctggccatgtgttatctctgcagccggtgtgtgggaggcctcttgtgagccagttgttttcccgcctccaccacccccctcgaagatttagggatgccaggggggaagaaggtggcgcttggtgnnncatcnttgccactccaacgtccgctgcggcac

SEQ ID NO: 33477 - DNA, 454 bp, Homo sapiens
  misc_feature (1)...(454): n = A,T,C or G
gcaaccctgataccgtttgacacngaataacccttgcttggcacgaggcacaggtgtcgtgaaaactacccctaaaagccaaaatgggaaaggaaaagactcatatcaacattggcggcattggacacgtagattcgggcaagtccaccactactggccatctgatctataaatgcgggggcatcgacaaaagaaccattgaaaaatttgagaaggaggctgctgagatgggaaagggctccttcaagtatgcctgggtcttggataaactgaaagctgagcgtgaacgtggtatcaccattgatatctccttgtggaaatttgagaccagcaagtactatgtgactatcattgatgccccaggacacagagactttatcaaaaacatgattacagggacatctcaggctgactggggctgcctgattgttgctgctggtgttggtgaatttga

SEQ ID NO: 33478 - DNA, 478 bp, Homo sapiens
  misc_feature (1)...(478): n = A,T,C or G
agaggcgcgaggncnccgcncctaggggnccattgannnatctncgcaccnagccnggcacgagggccaggtacccaggggtcagcccacattcactaagaaaaagaagaccatccgcttgttctggaatagaaattcggccttttgactggccgtgtaaaaacaaccgacgctgcagagaattcctgtggtcaaaactggaacccattaaggtggacacttccagactggagcacctgtttgagtctaaatccaaggaactgtctgtctcaaagaaaactgctgcagatggaaaaaggcaagagatcattgttctggattccaagaggagtaacgccatcaatattggtctgacggtgctgccccctccaaggacgattaagatcgccattttgaattttgaagagtatgccttaaacaaagaaggaatcgagaaaattctaacgatgattcccaccgatgaggagaagcagaaaat

SEQ ID NO: 33479 - DNA, 396 bp, Homo sapiens
ggcataatcctaatgtagaagaatttcagagttggggaactttacatttttttctttcactatcaaggataatagaataacaaataataattgaattattttgaaagggatatatcatattaccgggaatgttaacttattaaatcacattacagttcactgaaccaagatatttttaaagcaaaaatatataactctgaattttttatgttcctttttgccaaaaagttttcagaaactgtcaatctttattaaaaaaaacactactatgtaagtatgaattttgtatacaaaagatataaacttattctggagaagatactaaattaacactattatgtatgccttcaccatatgctgggcattttatagccctacatagtttaaccctcacag

SEQ ID NO: 33480 - DNA, 470 bp, Homo sapiens
  misc_feature (1)...(470): n = A,T,C or G
aggagcggggcccgctctgatattcctgagaatctttgacgccagcttggcacgaggagggatgcaatcttgcaactctaaagcaatgctgcgtgcactgccatttctccacatccagctccgtgggaaaacacagcacggcaggatggggcaggcagctgtccacagccacgggctcctcaacaccagccaccgggctttccaggggcttgaagccaatgacaaagagggtggtgtgaactctggagaccaaggcacaaaggatgtgggtttatcatcaattcaataagtagatttattttttaatcatttgaaaagctgctaaaattctacaagcctcttttaataaaatggtggaatctataataatttaaacagctttccatttcttttagtaactcagaatgaacgcattcaagaaaatggaaaggcacacggctgggtcaaataacaaagagggaaggagaggn

SEQ ID NO: 33481 - DNA, 455 bp, Homo sapiens
  misc_feature (1)...(455): n = A,T,C or G
gaaaaacctgaataccntatgaccttgataccactagcttggcacgagggctgcccggaaagagtgggacctgaagcctattgcagaccgggcccagatcttcctgaaggcggcagacatgctgagtgggccgcgcagggctgagatcctcgccaagaccatggggggacagggtaagaccgtgatccaagcggagattgacgctgcagcggaactcatcgacttcttccggttcaatgccaagtatgcggtggagctggaggggcagcagcccatcagcgtgcccccgagcaccaacagcacggtgtaccggggtctggagggcttcgtggcggccatctcgccctttaacttcactgcaatcggcggcaacctggcgggggcaccggccctgatgggcaacgtggtcctatggaagcccagtgacactgccatgctggccagctatgctgtct

SEQ ID NO: 33482 - DNA, 482 bp, Homo sapiens
  misc_feature (1)...(482): n = A,T,C or G
agaggccccggggggtcgccttttgantacataattgatcacctatagcgccagcttggcacgcgggaaaatggtggctccttgggcagcaagaagggtgtgaaccttcctggggctgctgtggacttgcctgctgtgtcggagaaggacatccaggatctgaagtttggggtcgagcaggatgttgatatggtgtttgcgtcattcatccgcaaggcatctgatgtccatgaagttaggaaggtcctgggagagaagggaaagaacatcaagattatcagcaaaatcgagaatcatgtaggggttcggaggtttgatgaaatcctggaggccagtgatgggatcatggtggctcgtggtgatctaggcattgagattcctgcagagaaggtcttccttgctcacaagatgatgattggacggtgcaaccgagctgggaagcctgtcatctgtgctactcagatgctggagagcatgatcan

SEQ ID NO: 33483 - DNA, 414 bp, Homo sapiens
ggaggagttaaaaaccaacctgagcatcatagtgagattccaccttttctgagcacaaaaaactaatagaccaggctgacgggaagtacttttgcctccatctgaaaccttggaaggaggtggaagcatgccttactcctacccaggcctttctgctgagcacaataaggagctgtctgacattgccctgcggattgaagccccgggcctaggcattatggctgaggatgaatctgtaagcaaaatggtcaagcggctgaaccaaattggggtggaaaacacagaggaaaaccgccggctgtaccgcaggacctgttcaagctgatgaccgtgtgaaaaagtgcattggaggcgtcattttcttccatgagaccctctaccagaaagatgataatggagttcccttcgtccgaa

SEQ ID NO: 33484 - DNA, 412 bp, Homo sapiens
gatgaactagagggctttctccccttttccaggtgtgccatccatattcaatctcctcttggccaagttcaacaaatgtttccagggaaccccgtgggttgaggcaaagtacccaatatgtattgagttaagtttttctagaggacaaaagtatttcttgtcccttttccctcatgctcatatgttttaactgaggcgcaaatggccaagttgagtaatatctgtggaactgagacagagagccagggacccatgtacccagggaccagttccctggggaatcacacagtggctcagactagactggtctattccaccacaactctgctgctgttcatttacatcaggaccacccaggaaagcatataagttaaccttctcatcattaggtcacctaatctcttgggttgca

SEQ ID NO: 33485 - DNA, 484 bp, Homo sapiens
  misc_feature (1)...(484): n = A,T,C or G
ggtccnnnnnnagggnntttganaccttnattgatatcactccagcttggcacgagggaagtcagtctgaaaaggccgctggggaactcccctggagaaagactgaacaggaaaatgccagattttggtcaagtgacaggtgaggagaagctaacccccaggggagagagaagcgagaaatataacgattttgggaacagcttcactgtgaattccaaccttatctcacatcagagactccccgtgggagacagaccccataagtgtgatgaatgtatcaagagctttaatcgaacttcataccttattcaacatcacagaatgcacactggggaaaagccctatgaatgtaatgagtgtgggaaggccttcagccagagctcacaccttattcagcatcagagaatccacactggggaaaaaccttatgaatgtagtgattgggggaaaaccttcagctgtagctctgacctcattctgcatc

SEQ ID NO: 33486 - DNA, 489 bp, Homo sapiens
  misc_feature (1)...(489): n = A,T,C or G
aggtgcaacanncgccaccattgataacgtatgacctgactacgcctagcttggcacgaggaatttcttctccacctccctactgaacaaaaaaagaaatgccagacttactatgagaatcgagttgctttgagtttcttttgttttggattgatttgatttggtttgttttaaggctccccttacacaccctcctttaaactttgggttttctctcttatagcttggtgactagatacatgctaaaaatgtctttggagaaaacttctgcctgataaacacccaattctaaactgtgggtggattttcgagctgacggcggtcaatttctttcattaagcagtgatctgatttctccacatggccattttgccttcttgggggcagagtagatgggcaacagttcacctttttacaaaaagaggtcttctagacacctgggctggtactgaatgagtttctacatgacgctctacctaatgattattt

SEQ ID NO: 33487 - DNA, 417 bp, Homo sapiens
  misc_feature (1)...(417): n = A,T,C or G
ggaacgtttatttaaaacaaaatattttaatttttaaattttcccttaaaacacacttttggaatatgctacaatattacatgttttttgtctttttatttttctgagacggagtcgttttctgccacccaggctggagtacagtggcatgatcttggctcactgcaacgtctgccttctgagttcaagcaattctcctgcctcagcctcctgagtagctgggattataggcacatgccaccgcgcccagctaatttttgtatttttagtagagatggggtttcatcatgttggccaggttggtctcgaactcctgaccttgtgatgctcccacctcggcctcccaaagtgctgggattaaagctgtgagccactgtgccaaggcttttttatttttttttttggccattttctttn

SEQ ID NO: 33488 - DNA, 409 bp, Homo sapiens
aaaagaaacggggaaggtgggaagaggtggaaatggaagggcacaggagtgcccgtgcgcagcggagaagccaccttccccaaagctatggacaacgggacggtccggcagggggagagcgccaccctcaggagcactattgacaaccgggtcacccgggtggcctggctaaaccgcaacaccatcctctatgctgggaatgacaagaggagcctggatcctcgcgtggtccttctgagcaacacccaaacgcagtacagcatcgagatccagaacgcggatgtgtatgacgagggcccttacacctgctcggtgcagacagacaaccacccaaagacctctagggtccacctcattgtgcaagtatctcccaaaattgtagagatttcttcagatatctccattaatg

SEQ ID NO: 33489 - DNA, 417 bp, Homo sapiens
ggacactacgagccacaggacatgaagagttggccaagagggttgtgggaccaggccctgaactgtacagcgggatcaggtgttgagggagcgtcagggctgcaataggctgagaaggcttcaggacggaggaagtgaatcctgaagagcagggagaagtgaccctacagtgaaaccacagaagcttaagcctcaggctcctccctttgtctcttccaaggccttgtgcccaattttgtattcataattgtgtgttctttttctgtgaggggccttccaaattatgtaagtatcagactccacaaaacatggggtgggtcaggattggcagcagaaggtggcagcggggcacagctttctgccccccagcagccccacagtcaggccaggagatgctgcagaataaggccaaggtag

SEQ ID NO: 33490 - DNA, 419 bp, Homo sapiens
ggtggcacgaggattttaaaggtagtgtaacctaagtgtgcaatgttcacacctacagtagtgtgcaacaatgttttaggccttcacattcactcactgttcacacacagactcatccacgacaacttccagccatgttaagtgccctatataccacatttttactctccctttactatgttttgatatgtttagatacacagatacttaccattgttttacagttttgatggtagtgtaaaatgtttacattgttttgatggtagtgtaaaatggcacaaacactttcagaaatgatctggcatttcttataaaactaaatatacactgaccctataatttagttttaatcctaggaatttactcacagtaaatgaaaacacttataccacaaaaacgtttgtatgacaatgttcact

SEQ ID NO: 33491 - DNA, 446 bp, Homo sapiens
  misc_feature (1)...(446): n = A,T,C or G
ttatttccgttgatactagtacanncantacgccaagcttggcacgaggaactattctcctgtatcaagaattggtttgttcattaaagcaggcagtagatatgaggacttcagcaatttaggaaccacccatttgctgcgtcttacatccagtctgacgacaaaaggagcttcatctttcaagataacccgtggaattgaagcagttggtggcaaattaagtgtgaccgcaacaagggaaaacatggcttatactgtggaatgcctgcggggtgatgttgatattctaatggagttcctgctcaatggcaccacagcaccagaatttcgtcgttgggaagtagctgaccttcagcctcagctaaagattgacaaagctgtggcctttcagaatccgcagactcatgtcattgaaaatttgcatgcagcagcttaccggaatgcct

SEQ ID NO: 33492 - DNA, 445 bp, Homo sapiens
  misc_feature (1)...(445): n = A,T,C or G
aaaaaacttcggacatcgtatgacctgcanacgccaagcttggcacgagggcctgtgaaggtgatgtatttttatcaacaggactcctttaggaggtcaatgccaaactgactgtttttacacaaatctccttaaggtcagtgcctacaataagacagtgaccccttgtcagcaaactgtgactctgtgtaaaggggagatgaccttgacaggaggttactgttctcactaccagctgacactgctgaagataagatgcacaatggctagtcagactgtagggaccagtttcaaggggtgcaaacctgtgatttggggttgtttaacatgaaacactttagtgtagtaattgtatccactgtttgcatttcaactgccacatttgtcacatttttatggaatctgttagtggattcatctttttgttaatccatgtgtttattaa

SEQ ID NO: 33493 - DNA, 403 bp, Homo sapiens
  misc_feature (1)...(403): n = A,T,C or G
ggaaatactctctgatacctgatgaggaagaggaaaaggaagaggcaaagtcagcagagtttgagaagcctgaccctacaaggaatccttctagaaaaagaaagaaggagaagaagaaaaagaaacatagagataggaagtcatctgactctgacagctcagactctgagagtgatacaggcaagagggcaaggcacacatcaaaagacagcaaggcagcaaagaagaagaaaaagaagaagaagcacaagaagaagcacaaggagtgagagtataaagagtgtagggggtggttgagagtaagaaaccaggagccttgtgccttgagactcctggaaagactcaatagtgagaatatagcctcccaccccattaacttcgctcccatgggagatggcttccn

SEQ ID NO: 33494 - DNA, 429 bp, Homo sapiens
  misc_feature (1)...(429): n = A,T,C or G
ggctccaggcatggtggctcacacctataatcccagccctttgggaggccaaggtgagaggattgcttgaacccaggagtttgagaccaacctgggtaacataaggacaactccatctctacaaataataaaaaattagccaggtgtgttggtatgtgcatgtattcccagctacttgggaggctgaggcggaaggatcatttgagcctaggagcttgaggctgcagtgagtcatgtttgcagtactgcactccagcctgggtgacagagtgagaccctatctacaaatataaacaaacaatgtgaaacgtcttcagtcacaagtattccctaacaaatcactatagaattcatactgcagagaagccttacaaatgcagcgaatgtgacaaagcatttatataatgttcaggctttactgcccatctn

SEQ ID NO: 33495 - DNA, 482 bp, Homo sapiens
ctccccgaattgataccgctatgaccatcatagcaccccgcttggcacgagggtgggctacgaccgaaacaacaagcaggaccacagacttctcctctgcctcctcatgacctcctgtgacctctctgaccagaccaagggctggaagactacgagaaagatcgcggagctgatctacaaagaattcttctcccagggagacctggagaaggccatgggcaacaggccgatggagatgatggaccgggagaaggcctatatccctgagctgcaaatcagcttcatggagcacattgcgatgcccatctacaagctgttgcaggacctgttccccaaagcggcagagctgtacgagcgcgtggcctccaaccgtgagcactggaccaaggtgtcccacaagttcaccatccgcggcctcccaagtaacaactcgctggactttctggatgaggagtacgaggtgcctgatctggatggcacta

SEQ ID NO: 33496 - DNA, 473 bp, Homo sapiens
  misc_feature (1)...(473): n = A,T,C or G
gggagtagcnncggncccncaatgaagcccctaatatctcgaaccncatacgccaacttgggacgagaccagcctgagctgtttgaagagtttgagaaacatgggatttactgctgcggcttgctccgcgcgcgggagagggagtgcaccggcctcccactgtccatgctgaccaacccaaccacacccccggcccggggccagtaccaaatcaagatgaaggggaacatgtccttgatctgctggtacaacaaaggacacttccgcttcctgaccaacgcctactccccggtgcagcagggagtcatcatcaaaaggaagagtggggagatcccatgccccttggccgtggaggcgtttgccgctcacctgagctacatctgcagatacgatgacaaatacagcaagtatttcatttctcataaaccaaacaagacctggcagcaggtgttctggttcgccatcagcatcgg

SEQ ID NO: 33497 - DNA, 413 bp, Homo sapiens
ggtaattcgtttttttcctgcaaataaattaaatgctgggaccataatgattatttttgcatagcaatagctggggaagaagttgttttaaaattaaattgccaaaagtattacctcttgaaaaatttattttccccaagtttttcatatgtcatgaaacccctaatcttgacctttatgacacagcggcattacactgatgttggaagcatgtgtgaaatctgtgccctggtcgggagtcatatgccttaaaaatgactgcgagtcagtgtgaagtaatataaagtggagtcctacgtgggaaaaagcaggcttctgaggacaaaaacctcccaaccctccccaccttgttttccactgggaatgagaatttgatatgagaaactataaccttgcagaagtgtggattttcc

SEQ ID NO: 33498 - DNA, 464 bp, Homo sapiens
  misc_feature (1)...(464): n = A,T,C or G
ntttgaaaacagtgatgaacattattnnnccnggnttcgcccagacttggcacgaggttgtagaactggggcatggaattcgcaagatcagcctggaacatcttgttgcctccaaaaatcaaggaagtgcttgaatagcgataaagatatgtcaaaatgacacagaagtgagatttaatgggccaaagcagagatgagatgagcatcaaattaaataatgagagcaatagactaaaaacaggaaagcttgtgtctatacaaatattgataaataataaattgaactttatatggaaacagtatatcaaaatagttaaggtgttccttcctagaaaatatatattaattacatagtagaaaagaataattttcagtggaaaagcctctataaccaccctatctgatcaaagtaaacattttcaataatgggataaataaaagttgccacctgatataatacaatn

SEQ ID NO: 33499 - DNA, 429 bp, Homo sapiens
ggctctagctcctgatatcgcgatccacccaccttggtctcccaaagtgctgggattacaggtgtgagccaccgtgcccggcagtttttgtatttttagtacagacagggtttcaccatattggtcaggctggtttcaaactcacgacctcaggtgatccgcctgccttggcctcccaaagtgggcggattacaggcgtgagccacggcacccagcccttatatggcttttatgaggttatgtgaaaggaatatttgcctttgacctggaagtcaactttatagtaagctgaaattataaataactgatcatggaactattgcagatcacctttgagccaaaaatttggcctggattttggttatgcctactactatgtgcctcgcatttgcatttatactctgcaacggcattattaactccttttcg

SEQ ID NO: 33500 - DNA, 474 bp, Homo sapiens
cgcttggagaatgcttacgccaagcttggcacgaggccgagttctcgggaacagcggctcggcctgcaaggctgttgtttcattaaatgaaaatgaagggcgccctggaataggttcgccgaaaagagagcttgcaggcctctgggaagcaagccatcgtgtggcagaggcccaggtggcaaggaaccaagggcggcttctggccaacagccagcgaggacctgagaccgtagcccaacacccctccaggaactgaattttgccagcaaccagtgagtgaccttggaagtggatccttcccccgaaagcccggctttcagacggaggctggtgggacctcaaccccagctggtattcaggctcttgacaccatctggagaaggaattcaagagtgtgtcagaaaatgatgaaagtacaaagatttatttgcaagcgaaaaatacacactctaaaaaggggagtatgggtggact

SEQ ID NO: 33501 - DNA, 412 bp, Homo sapiens
gggtgtgtagctttatttctgtctgttccattccattggtctatgggtctgtttttatatctgtaccatgctgttttggttactgtagcttccttatagtatagtttaactcaggtaatgtgatacctcagctttgttttatttgcttaggattgattttttggttccatatgaattttagaatggattttttcttttttttttttttgaaaagggatttttgttgggtcccccagcttttgggggcggtggggaattttaagttaattgaacccttggcttctggagtaaaaccatttttctggcctaaccccccaaaaaagggggaataaagggacccccccacccttccccccttattttttgtatttttaaaaaaaggggggtttatttttttaacccgggttggttt

SEQ ID NO: 33502 - DNA, 409 bp, Homo sapiens
  misc_feature (1)...(409): n = A,T,C or G
gggctggacaggatgagaacttcagtcaatgttgtgggtgactcttttggggctgggatagtctatcacctctccaagtctgagctggataccattgactcccagcatcgagtgcatgaagatattgaaatgaccaagactcaatccatttatgatgacatgaagaaccacagggaaagcaactctaatcaatgtgtctatgctgcacacaactctgtcatagtagatgaatgcaaggtaactctggcagccaatggaaagtcagccgactgcagtgttgaggaagaaccttggaaacgtgagaaataaggatatgagtctcagcaaattcttgaataaactccccagcgtatcctatggtaactgatgatataaacaagctttctttaaaaaggaaaaaaatgcgtan

SEQ ID NO: 33503 - DNA, 449 bp, Homo sapiens
ggcaatcaaggaataggccatttccatcactacagaaagcttcctcatgctccttcccaggccacctcacccacctccagcctcaggccaccagtgatctgctttcagtccctgctgtttagtttagacttttctagagttttctagagttatgactggatcatacagtatgtctcctttttgtggctggcttttttgtgcatgtcagagttgggggcaggcatcctgatatgtttgagattcaaccatactgtttgctatggtttgaatgtgtccgccagagttcatgtgttggaaacttaacccccagtgcatcaaagctgggtgttggggtctgataagaggtgactaggtcatgacagctctgtcctcatgaatgaattaatgttatttcaagagtgggctttttgtaaaggggactctggccccctcttgctctcttgctgctt

SEQ ID NO: 33504 - DNA, 451 bp, Homo sapiens
  misc_feature (1)...(451): n = A,T,C or G
ggcagggacttaaggacaatcctctgtctttttcttggtgaaaagacctaagatgttcaggaagtatttattcctggccagaattatttcagtttcttggtaaaacaaaaatatttagccacaattaccacccgctcattcacatacacagaaccattcttaggggtgtttgcggggagaaaaagcccttatctatgtatcacctaatggaactcttatttataatctaagttctttgaatccactactttaaataccaacatgcacctctcttattccctccctctccacccatctaccccatacacccccagtgaacctaggtattctaatgtctttgtgttttctaagcctcatgaataaggctggtgagtaccacctncaccggatcaaaattaacacctggtgcactttctacagcacctttnttcttctccacaattgagtggaa

SEQ ID NO: 33505 - DNA, 381 bp, Homo sapiens
gggatgaagaaaggcttaagttgaccgttgggcagatcctggtggttgtgaaaagtgggggctttgtgcacttgtaagagcatttgcagtgcagtacatggtaacactcatccatgaaataatgaccagtttgaaatgctttctagtataaacgctacagtgatgtcagctgaaacatgaatgttagaaggtatctgttcattcttcgtaacccctaacgtgtaaacctgggatgttccctcacctagcttttaactgaaaggtggttatattttgaatccctaaatcaagaagtcccagagcagctttattatcaaacttggaatccagcattcatcactgtgtttcactcttctatgtggaatattaacagcactggag

SEQ ID NO: 33506 - DNA, 469 bp, Homo sapiens
  misc_feature (1)...(469): n = A,T,C or G
ggagggttttttttgaaatcgtatcacctgcntacgccagcttggcacgaggagtgaccgcacaccattggtcagcgtgcttctggaaggccctcctcacagtgggaagactgctttagctgcaaaaattgcagaggaatccaacttcccgttcatcaagatctgttctcctgataaaatgattggcttttctgaaacagccaaatgtcaggccatgaagaagatctttgatgatgcgtacaaatcccagctcacttgtgtggttgtggatgacattgagagattgcttgattacgtccctattggccctcgattttcaaatcttgtattacaggctcttctcgttttactgaaaaaggcacctcctcagggccgcaagcttcttatcattgggaccactatccgcaaagatgtccttcaggagatggaaatgcttaacgctttcagcaccaccatccacgtgcccaag

SEQ ID NO: 33507 - DNA, 450 bp, Homo sapiens
  misc_feature (1)...(450): n = A,T,C or G
gggccggacatcgaggtcaaggactggttcgcagccaggccagattgcgggtccaagtaccagctgtgcgttcagctcctgtcgtccgcgcacgcgcctctggggacctttcagccagacccggcgaccatccagcataagagcgatgccaagtggagggaggtctcccacacattctccaactacccgcccggcgtccgctacatctggtttcagcacggcggcgtggacactcattactgggccggctggtacggcccgagggtcaccaacagcagcatcaccatcgggcccccgctgccctgacaccccctgagcccccatctgctgaaccctgactggtaaacaactgctgtcataaaagggctgggcttgggaaggggaggtggngccangtgtncccagacctctaaccctttgccctagcaagctcttcttttgtggagcctt

SEQ ID NO: 33508 - DNA, 386 bp, Homo sapiens
ggccccaggggtggagaagcggaggcccacgaggagggggaattaagaagggggaggatcctggctaccactctgaatccgataccgcttctcttagacctcagcgacagaaaaagggaagggggtctcatcccccttcctcctctcctccctgacctgagccttatccatggccgaggcaggggctgggctgagcgagaccgtcactgagacaacggttaccgtgacaaccgagcccgagaaccggagccttaccatcaaacttcggaaacggaagccagagaaaaaggtagaatggacaagtgacactgtggacaatgaacacatgggccgccgctcatccaaatgctgctgtatttatgagaaacctcgggcctttggcgagg

SEQ ID NO: 33509 - DNA, 397 bp, Homo sapiens
ggaccagctgctccccgagtcccctttttttctggagtgcaacagcttctcgtggactggcccccacaagggcctcgttcttctgcctaagacggagagcgacgtgcgggaagaggagctgatgcggtgcctgcggctgcctcagtcctccctggagcctgtgggcttccgggtgccccgagtccggaatgagttcttccacgatgacgtgttcccatacacgggtgtgatctgggagcctgggctcaatgcctaagcctggctgcaaagcgctaatgggcagccctggcttctctacctgcagccttctgacatgagcccagagagccaagcccctcaataggtccctgctagttggggcccatcctcatcgcagaacctggaagaaaagtatgac

SEQ ID NO: 33510 - DNA, 449 bp, Homo sapiens
  misc_feature (1)...(449): n = A,T,C or G
ntttgaaacctttgatgacatcattacgccaagcttggcacgaggggtgataacgtggtgctggaccaaacctacctgtggcagggagttcgaaaggcggttggagcacaaatccatcattctctgctttgtgacaatgctgagggcaaggaacgagtgacactgaaaccacgctctgtcctcacttaccaggagggcgtgggcccaaatatcacgctggctgagggctcggggatctctttgcaccctccagatgcaaaggaagatgaagatgatggcgagttcagtgatgattctggggctgaccaaaaaaaggacaaagtggagatgaaaggttacaatccagcctaattaggagctgctggcaagggctacctatggaaagctgcaggcatgaacatggaggaagaggaggaactgatgcacaatctgtggggactcaagatcaa

SEQ ID NO: 33511 - DNA, 435 bp, Homo sapiens
ggagcagatggccttgaacaagaagttcgctgtcgtgagagcatggcattcccacagacatggggtatgcagtggcgccccaccactcgggcgtgtaccccgtgcacgtgcagctgtacgaggcttggaagcaggtgtggagcatccgcgtgaccagcacggaggagtacccccacctgaagccagcccgctaccgccgtggcttcatccacaatggcatcatggttctcccacggcagacctgcggcctcttcacacacaccatcttctacaacgagtaccctggcggctccagtgagctggacaagatcattaacgggggcgagctcttcctcaccgtgctcctcaatcctgtgagtgctccacagcccatggctgctggtgagaaggggctgctgcacagcctgtctgcagctgacacaggcttcctggagc

SEQ ID NO: 33512 - DNA, 432 bp, Homo sapiens
caggagagcgcatagggagggtttcttggctgattgcatttaagccaggaattcactgtgaaaataaagccaaggggcgataaataaaagaggcaatcttctctaggagacagacacacagcgtgggctttgcctgctttcatcagcggaagaggcctgggtgagtagttgtaaaagaaaatagtaactttttgaatagtccccaaaggggaagaggccactgaatggaattggcagtggttgacgtgaagtggtgtgatgtttctcgtgtagactgaagagttgaccaccacttcagaaacacatacgtgctaaacaagtgctatacaaattgtggaaaatattcttttttcgcctctgagttctgccatttgccttaacttcgaagttgtattacttgttgtgccagtcagctttagagatggaaggctg

SEQ ID NO: 33513 - DNA, 415 bp, Homo sapiens
ggtagacgtagcagattagcaatgcggccacttagcatgtcttacagttttgacttgtcagatgtgactacccctgaatctacaaagaatcttgtggagtcatctatggtgaatggaggtttgacatcacaaacaaaagaaaacgggttaagtacctcacagcaggtgcctgcacagcggaagaagctcctcagagccccaactctggccgaactggacagctctgagtctgaggaagaaacgctgcacaagtcgaccagcagcagcagcgtgtctccctctttccctgaagagccagtcctggaggccgtgtccacaaggaagaagcctccaaaattcctgcccatatcatcaacaccccagccagagagacggcagccaccccagagacgacattccattgaaaaggaaacgc

SEQ ID NO: 33514 - DNA, 407 bp, Homo sapiens
ggagctgaagaaggcggggggagccaattacgacgcccagacggagtaaccccagcccccgccacaccaccccttgccaaagtcatctgcctgctccccgggggagaggaccgccggcctcagctactagcccaccagcccaccagggagaagagaagccatgagaggcagcgcccgccaccctgtgtccacagcccccaccttcccgcttcccttagaaccctgccgtgtcctatctcatgacgctcatggaacctctttctttgatcttctttttcttttctccccctcttttttgttctaaagaaaagtcattttgatgcaaggtcctgcctgccatcagatccgaggtgcctcctgcagtgaccccttttcctggcatttctcttccacgcgacgaggtctgc

SEQ ID NO: 33515 - DNA, 407 bp, Homo sapiens
aattcaagatagaaatgtcagtcctaaagctgatgtgaaatcttgcaggtagagtcactctagggctcagatggggacactgttctctatgcagctgggcttcagatattcatagggccagtcaagttgctcattccgggctgtaatctccttttccagcttttccaaatctgttcggaattggtttagcacagctttgggcttggggcctgagaaatatttttctttgtggtgccccagaggcacctgagacagaacaaaggatcagtcagtttctaaagacaaacgcacctagagcccagcccctcactctgatgtttcctttccaactgtcatttccctctcccgagagtcccctctcaccatgtctggctggcggcgactcacatgccatgagatggccattt

SEQ ID NO: 33516 - DNA, 468 bp, Homo sapiens
  misc_feature (1)...(468): n = A,T,C or G
ggcggtccatgagactttgtagaggacatgccagctngcgacgagggtgcaatttcatgaatattaaattatgtttcgaagtccagttgtcattcccgcattcagatttcatttgctgttgctttatacgttacgtacccaaggacattgcctcagggttgcaaactctttaaaggaaaatttatccatatatccatgtattatatagaagaataaaaattgagtttacttcacccgacctgatttttttttaccagcttggaaattcctcttgaacctacgtctccatatgtcacatcatgacaggactagcctgaacaaaagccatgtctatctaagcggaggctgttgacttcattcagtttgcatattgtatatagcaacacaaacacttgacaggtatatactccagtcgccacatttgtcctgcataacagcttcactcacaggcctcaccgtcactttatn

SEQ ID NO: 33517 - DNA, 394 bp, Homo sapiens
ggcaagtgcaagggtttcggcttcgtgaccatgaccaactatgacgaggcggccatggccatcgccagcctgaacggctatcgcctgggcgagcgcgtgctgcaggtctccttcaagaccagcaaacagcacaaggcgtgagcccaccccgcctgccctcccaccccctccccgggcagcagagagagagagagagaaagagagagagagagagagaaggggcccaagagagacagcacaggcagccccacggacgacgcgagggccccacgtccctgcggaagccacagggtgagcactctggggtgggagggtctgcagggaattgggggggtgcccggggatcccccgccccattcttctgcccccaccccaggctgggctgttcactctt

SEQ ID NO: 33518 - DNA, 505 bp, Homo sapiens
tgaggggggcccccctccccattgacgaccgttatgaccattgaaaaccatgtctaggcaccaaggctcgaaaaaggcaaagagtcatgacaaatatttcttttcttctcaatatagaagccttcgatgtgaggcccaggcattgagtaccatgtgtgcgattcacaagccttggcatctgaacaattttttggaaggatccatcaggacaacacgtcgggggtgtactagtgaagtgattttccaaatgtgctactcagacctgtagcatcagcatcaccggataatttgttagaaattccaactgttaggccccactttagaccaactgaatgtgaaactctgggagtacgtggggcccagcaatttgtgtttttacaagacttaccaggtgattctgagaaccactgtgctagtgaattgttcctgtctgtggccacgtagaataagaaaaccatatggttggaaaatggggaaactggtgagtgttcgcttatgaagaaag

SEQ ID NO: 33519 - DNA, 426 bp, Homo sapiens
ggggtttcttgagtaattattttgattgactgatagaaatgaaacatcttcattgtagattttaaaatcgtcccgagtttttaccatggaaactctttcttctgtttctgcctttgatggttcctttttctgaggactatatgaggagtttttggcattgaataactgcgacttgtcctcagcttttaatgcaactttaactgtactgatatgatttatgtgtgttgttgaagttgtctggtctctcttgaggacctcaagtttagtgatatttctttctcttttctgtggagtaccacacttgtccctgcaataacaaagtagtacagcaaaaaatccaatgacaatgactattgttcctcctaatatggctgtaagaaacactgtgtggtaggcagttatgtccttggaatcttcatttatacc

SEQ ID NO: 33520 - DNA, 409 bp, Homo sapiens
acaagggtttttcaaacagtctgatttaattaggaagttaaataagttgaggtggggtggagtgggatcatcaaaaggctgacatgggaccgctggagttggcaatcataacagtgtgaggttggcaaggggagcaacccccttcaagacaaggcacaaactatttggcaaggagagatgaggggtgggacctcactgtcaatggacatgctcagggaggccagtgggttacatgcaacaggaggatcattcaggcaacttcatctatcaggctgggcatctgtgagggctgaaggctcaagctgttctcaaaggcttgtgattcacctgggagatgctcacgcctgtgagtctttccacactctctggcaggcgagttagaatgtgcagtacttacccagtcactttg

SEQ ID NO: 33521 - DNA, 451 bp, Homo sapiens
  misc_feature (1)...(451): n = A,T,C or G
nttgaaaccttgtgacatcattacgccaagcttggcacaaggttttttaaacagtctgatttaattaggaagttaaataagttgaggtggggtggagtgggatcatcaaaaggctgacatgggaccgctggagttggcaatcatagcagtgtgaggttggcaaggggagcaacccccttcaagacaaggcacaaactatttggcaaggagagatgaggggtgggacctcactgtcaatggacatgctcagggaggccagtgggttacatgcaacaggaggatcattcaggcaacttcagctatgaggctgggcatctgtgagggctgaaggctcaagctgttctcaaaggcttgtgattcacctgggagatgctcacgcctgtgagtctttccacactctctggcaggcgagttaaaatgtccagtacttccccagtcactttggctggcn

SEQ ID NO: 33522 - DNA, 405 bp, Homo sapiens
ggtgatggcgtgatgtctcacaaaaagttctccgctcccagacatgggtccctcggcttcctgcctcggaagcgcagcagcaggcatcgcgggaaggtgaagagcttccctaaggatgacccatccaagccggtccacctcacagccttcctgggatacaaggctggcatgactcacatcgtgcgggaagtcgacaggccgggatccaaggtgaacaacaaggaggtggtggaggctgtgaccattgtagagacaccacccatgggggctgtgggcattgtgggctacgtggaaacccctcgaggcctccggaccttcaagactgtctttgctgagcacatcagtgatgaatgcaagaggcgtttctataagaattggcataaatctaagaagaaggcctttacg

SEQ ID NO: 33523 - DNA, 497 bp, Homo sapiens
  misc_feature (1)...(497): n = A,T,C or G
cgggcgccccgttttnattganaccgcttgacatggaacgccagcttggcacgaggcttttcaaatgacttaataccttttccaaaaagaactttatagttcttatggcagtgcaaacctcatctgaaaacctcagtgggaactttagagataaatatgaggccaaaccttagcctgaaaatacaaatgaccattggcattcatgttacatcatgggtgaatctcgtgtggtgttttgactaatagttttagtgccccagaccttggtttgttaaatcatcaggtaaaaagtacttgaagataggcagcaaatcctttgtttaaaagtaccttagaaaaattgaggctgggcatggtggcccactcctgtaatcccagcactttgggaggccaaaatgggtggttcacttgagtccaggagtttgagatcagcctggccaacatggtgaaacccatctctactaaaaatacaaaaattagctgggcatggtggtaca

SEQ ID NO: 33524 - DNA, 404 bp, Homo sapiens
ggatggagtcttgctctgtcacccaggctggagtgcagtggcgcaatctcagctcactgcaacctctgcctcctggattcaagcaattctcctgcctcagcctcccgagtagctaggattacaggtgcccgccaccacgcccagctaatttttgtatttttagtaaagacggggtttcaccatgttgaccaggctggtctcaaacacctgacctcagatgatccaccagcctcggcctccccaagtgctgggattacaggtgtgagccaccatgcccagcccagaatatttttaaaaacaaaattttgggggtggcagggcagggatgacaaaaaggaagaagagaatatacatatattgtacaaatcaaataattcaaattgaaatggatagaagggttttta

SEQ ID NO: 33525 - DNA, 412 bp, Homo sapiens
  misc_feature (1)...(412): n = A,T,C or G
ggaacaaattgaaaacaagcccttacatccagttttagggatcttgatcaatgggcaaacccaaattggaaaatattctggaaaagaagaaactgttcagtttgatgtccaaaagttgcgaatctactgtgacccagaacagaacaaccgggagacagcatgtgagattcctggatttaatggagagtgccttaatggtcccagtgatgtaggttcaactccagctccctgtatttgtcctccgggaaaaccaggacttcaaggccccaaaggtgaccctggactgcctgggaaccctggctaccctggacaacctggtcaagatggtaagcctggatatcagggaattgcagggacaccaggtgttccaggatctccaggaatacaaggagctcgaggactaccaggttan

SEQ ID NO: 33526 - DNA, 431 bp, Homo sapiens
gggtaactagatcttttttcttccagctgttattattatttagcaataatttgtactgtgcttttgttcattccattgaagcttatctttctatattttttaagaaatttgtcgttagtcaaaaatattttaatttcatgataggatttcaaataaaaaataatctgaatccagagtttaaatgtttcatttattatgctttattagaagagacttgaagccattctaatattattaaaaatgcattgaaaacagcattattgttgaatgtagcttttttgcttttgatttcgattcactgccactaattctttttttttttttttttttttgggcattggtcccaaaagtgggggtttttttggcaggaaggagaaaaccggtggaattaaccatttttgacccgggggccctatcacttaaaacacgct

SEQ ID NO: 33527 - DNA, 477 bp, Homo sapiens
  misc_feature (1)...(477): n = A,T,C or G
cattgacaccatcgttgagaccgtcagcanggccgaggcctcgtgccacttagaaacataatgggagtgtaattgaagaaagcatgtctcataagggtttgatatgcagaactggaagctattggaattcctacatacatttccattagctatgccttatgtaatgggagtgcagatttttacaacttagaggtcccatcagtggttttttgccacatcaccgggttccttattttactggtttcttttcaactttgggtgctttatttccattctctaaaactaagtttcttgctcttacgagacttagtgttccttttgaacccaggtgttccacctgacagtgtttgtctttcatagactttccagaatagacatagtcaagatcagacacgtgagcttctctctcattttaatgtgaggaaaatcatctttcagagacaaggcaccgcttagaaatgtatgtccaggtatgag

SEQ ID NO: 33528 - DNA, 458 bp, Homo sapiens
  misc_feature (1)...(458): n = A,T,C or G
ggtgtccggngnnttttncccgtagacgtcttacctgcctacgccaagcttggcacgaggggtctctgcagtgagtggggagcctacataaaagagagtaaagaggggcaaaaacccagatcagaatgcaggcgacgtccaaccttctcaacctcctgctgctgtctttgtttgccggattaaatccttccaagactcagattaatcctaaagaagggtggcaggtgtacagctcagctcaggatcctgatgggcggggcatttgcacagatgttgctccagaacaaaacctgtgttcccgggatgccaaaagcaggcaacttcgccaactactggaaaaggttcagaacatgtcccagtctattgaagtcttaaacttgagaactcagagagatttccaatatgttttaaaaatggaaacccaaatgaaagggctgaaggcaaaatttcggcagatt

SEQ ID NO: 33529 - DNA, 406 bp, Homo sapiens
  misc_feature (1)...(406): n = A,T,C or G
ggctgcctgcagttctcattcctgcacctaatcctgagctgtaaaacttcgtgcatgggagctcttggctgttccgttcccacataaagcacgtacctgactcatcaactcatctgtcgcaggtgctcagtcgaaatttgttaaataaatggaggcgcttagttaagtttgcctttttcttttgtagcaatgtgaaagctaagggtggaagtctagagtgaagctgagttttcagcttgggcagaggcttaaggaataaaagatggaagagtaattaaggagtgggtcgtgctgtgggaagtgctgtgtcaagacacctgaggatggaattggtagccctctgttttgggactggttcagatggtgttttgggttcctttctatgacctttatctctgaaacttgn

SEQ ID NO: 33530 - DNA, 487 bp, Homo sapiens
  misc_feature (1)...(487): n = A,T,C or G
catggacnccntctattgagagccatccgaacangactacgccaagcttggcacgagggtaaaagaccgaagaaggaggctggagagaccaggatccttccagctgtacaaagtcagccacaaagcagactagccagccggctacaattggagtcagagtcccaaagacatgggcttgttagagtgctgtgcaagatgtctggtaggggccccctttgcttccctggtggccactggattgtgtttctttggggtggcactgttctgtggctgtggacatgaagccctcactggcacagaaaagctaattgagacctatttctccaaaaactaccaagactatgagtatctcatcaatgtgatccatgccttccagtatgtcatctatggaactgcctctttcttcttcctttatggggccctcctgctggctgagggcttctacaccaccggcgcagtcaggcagatctttggcgactacaagacc

SEQ ID NO: 33531 - DNA, 445 bp, Homo sapiens
  misc_feature (1)...(445): n = A,T,C or G
aaataacctcagacatcgtatgaccagcanacgccaagcttggcacgaggaaatactgttttgttgtgaattgaacagtgaggggctgggacagtgactgggggcatcaccatagtcaatgcttagagcctcaaaagggtgtaatctagctctggggaggagtgaggctgagctgagtctcccacggtctttaaaatgtgtcctggcaggaggactgagaacaggctggtcaggactggagtcagctaatggacagacagggaccacagactgttgctgggggaaatgcgggtttatgcaagtatctcgggctgggcaggggaatcacccaaactgcttacccctcactcctcatgctcagcatgtcaagggcccaaggcttccttttctgtcactctctctgtcattcctgaatagatatcaccctatagatgtctgatgtgag

SEQ ID NO: 33532 - DNA, 414 bp, Homo sapiens
gggggcatccgaagcaaggaggtgggcgaactaatccggagcaagctctattccttgggcaatgggcgctggatgctgaccctggccaaaaacatggaggtcagggccatcttcacgggggactacgggaaaggcaaacctgtgcccacccaaggaaaccggaaggggggcgccttgcacgcctgcaccataatatgagtgttctcaccaccacttatgcccctaaaagggaaggggagagggaaacgcgccctccgcttgatccttgctttgtgacattttttttttttttttttatatcaagaaaaccaacctggaactttttaaaaactaggaaaataactggccctcctttggtaacccccctatgacccttgaaggttcacgctcctagcacaaggggggcggggaggg

SEQ ID NO: 33533 - DNA, 391 bp, Homo sapiens
gggcacaactctggtgtccttctatggagaaaaccttttgttttgttttattctgcctttgaaaatgcgtccaaaagtagaccctgtccccacacaggtcaagactacagagaaggctttgtagaaatgtgtcacctatgtacacctgctacttacacatttcctcttttggaaaaatgagatacttagaataacaagaaaattaagacatactggcctggtgccagcagatggcttttctatagacaaactaggttagtgtggaagatataggttaaaataaactatgctgttttatttatcttcccaacctgattggcagctagacttttttagggtctcatttaatggccctgcccttttcattattatatttaatgatagggcagga

SEQ ID NO: 33534 - DNA, 430 bp, Homo sapiens
gggtggcacagggatggcagcttaaggtgccctggcttctctgcgtggctgtcactgagcagaggagtccgggcctgccagcagggtccatcctagcttattctctgtgtgtcctcagttggggtacctacccggtctctgcctcagtttcctcctctgtgagacagtgatcctaacaggccctacctctgacagtggttttgatgaagtacgcgatgtgggtgaagcacctggagctggcccactcacaaagaacgcgccacggactctcaaggttaatgttgaaaaggggctggggtggggcaaaagtgggccggccatttccgctccaggtgcctgggctgacagattggattaaattaacatgtgcattgctgagtgcacaggggacagttgcccaggccagaggcatcagggtcaaagctggtga

SEQ ID NO: 33535 - DNA, 481 bp, Homo sapiens
  misc_feature (1)...(481): n = A,T,C or G
catggaaacccttgttgagaaccgtccagcttggcacgaggtcatgggccagataatgtctccatcaatggaattccttgcattctcttctgggccaaaagaataatgattaaatttaagaatcaaacctggctggaccttacagacgagccatttggtcagaaggtaactgtggaccctgacaactcaaattgcagtgaacaaagtgctaaaaaaaaaaagtaggctcctttgtataggaccctgacacacatctttgaggaagtatttactgtctaaaataaaggaacaagtcagaagttaacttcaaaaattgttggctgggcatgggggctcacgcctgtaatcccagcacttcgggaggccgagggagtggatcacctgaggtcaggagttggagacaagcctggccaacatggtgaaacctcgtctctactaaaatacaaaaattagccgggcgtggtggcaggtgcctgtaatn

SEQ ID NO: 33536 - DNA, 432 bp, Homo sapiens
  misc_feature (1)...(432): n = A,T,C or G
ggcctgttggagagactatggcgctcaacaagaatcactcggagggcggcggagtgatcgtcaataacaccgagagcatcctaatggcctatgatcacgtggaactcacattcaatgacatgaagaacgtgccagaagccttcaaagggaccaagaaaggcactgtctaccttaccccttaccgggtcatctttctgtccaagggcaaggatgccatgcagtccttcatgatgccattttatctcatgaaagactgtgagatcaagcagcccgtatttggtgcaaactacatcaagggaacagtgaaggcggaagcgggaggtggctgggaaggctctgcttcctacaagttgactttcacggcagggggcgccattgagttcggacagcggatgctccaggtggcatctcaagcctccagaggtgaagtcn

SEQ ID NO: 33537 - DNA, 421 bp, Homo sapiens
ggaagatgctggccgcgtacctgtatgaggtctcccagctgaaggactaggccaagccctctgtgtgccatctccaatgagaaggaatcctgccctcacctgacccttttccaacttgcccagggaagtggagggtccctctttcctttccctcttgtcagggcatccgtgactttagagaacagacaccagtgtatccagctgtccacgggtggagctacccgttgggcttatgagtgacctggagtgacagctgagacaccctgggtaagttctcagagtggccaggatggcttgacctgcaaaagatacccaaggtccaaaagcacaaggtctgcggaaagttctgggtgtcggctgggcaccacggctcacacctataatcgagcactttgggaggccaagacaggaggatcacttg

SEQ ID NO: 33538 - DNA, 433 bp, Homo sapiens
ggcaaaacaccaaagaattgtaggcagtggcccctattgagaagttttccggtagagttggaaatcagttgtgaatacattctttgctagttggagtgcttgtttactaagcatgtgccgtcgtaggtattagtgctagtctcaaataggtgcttcccctgaggtgcaggggaagaccaaagtttgcaactcgaactgctttcgtccatgtttctcacattgctgtattttagaaaataggggttaagactgataacaaccttttacattgtgactgtgtttgcattgtctaatgacagataaatccttaacatttctctccaccttagtactttagactaattgtgtttgtccgtccatgccatgaatgagtgggctgtagttgggcctaaataaatgagctgttggaagaaaagaatcacagtactttcca

SEQ ID NO: 33539 - DNA, 483 bp, Homo sapiens
  misc_feature (1)...(483): n = A,T,C or G
ccattggccagctnnattgacaagccctcgccaagcncggcacgagggggcattgattatgcttttctcttgggttttcttcatttcttttcataattcatcttcaagctatagatccatccttcttccctatccaaatactttgttctcagggggcagacagatttttttggcttccaaacctcactgagcatgttcagagaattcctctcattaaggaaatatttttccccacaattgtctgatgtatgagtcctctcagaagcacaagtgcatactaggaaggctttgtaaactggttttgtaggcaggctgtacctgcaaataggcattctgagcaaggatcctaaatttccctttggctcatgtcccccccgccccaccccaccttcttctttttggcatgtctggtgaaaagctacaaggttcacagggccaaatattctcccttttgttctctaaacatgttgcacacataaactc

SEQ ID NO: 33540 - DNA, 430 bp, Homo sapiens
  misc_feature (1)...(430): n = A,T,C or G
ggatgaaagtcggggaagtccttatgcgaatcgtcagggcattaggagacatggtctcaaagtaccgagaacctttgatccataccttcctgaggggagtgagagatcctgatggtgctcacagggccagcagcttggccaaccttggggagctgtgccagaggctggactttctgctgggctccgtggtccatgaggtaacagcttgcctgattgctgtggccaaaacagatggtgaagttcaagtacgcagagctgccatacatgtggttgtgctgctgcttcggggactcagccagaaagctactgaggtgctgagcgccgtcctcaaggatctctaccacctgctgaagcacgtagtgtgtctggagcccgatgacgtggccaagctccatgcccagttggccctagaagagctggatgacatcan

SEQ ID NO: 33541 - DNA, 488 bp, Homo sapiens
cattgataacgttggtagatgaacactgccagcttggcacgaggcctccctctactgtgacacagcacttaacacctgaatcttcgtttctctcccagggaccctccattttccatatccaggaaaatgtgatgcgccacaggtatcaacgtctggatcgccacttcacgttttagccacaagtgactcagtggaagatccagagtcaacagaggctcgtcaggaagatgtctacagaaaaggtagaccaaaaggaggaagctggggaaaaagaggtgtgcggagaccaaatcaaaggaccggacaaagaggaggaaccaccagctgctgcatcccatggccaggggtggcgtccaggtggcagagcagctaggaacgcaaggcctgaacctgggggcagacaccctgctcttccgggcatggtcaacgacccttcagtacctgccttactgtgggcccaggaggtgggccaagtcttggcatgtcgg

SEQ ID NO: 33542 - DNA, 434 bp, Homo sapiens
ggggccctggagatcacgtggctcggggcatttctggaaaaaagtatgacatcggccagaaatggggcatgggcacctataagtgcacaaaggaactgttatcacaacgatttggtctaggctcaccgactgtggacctggagctatagctgcaaattgagttgctgcgggagactaagcgcaagtatgaaagtgtcctgcatctgggccgggcactgacagcccacctttacagcctgctgcagacccagcatgcactgggtgatgcctttgctgacctcagacagaagtccccacagcttcaggaggaatttggctgctatgcacagacacagaaactactatgcaagaatggggaaacgctgctaggagccgcgaacttatttgtctctagcatctacacattgggcaccaagaccatggaagacacgctg

SEQ ID NO: 33543 - DNA, 434 bp, Homo sapiens
  misc_feature (1)...(434): n = A,T,C or G
ggggccctggaaattaagtggttctgagcattgctggagaaaaatttgacatcgtcataaaatggggcatctgcacctataagtgcacaaagcaactgttatcagaacgatttggtcgaggctcacggactgtggacctggagctagagctgcagattgagttgctgcttgagacgaaccgcaagtataagagtgtcctgcacctgggccgggcactgacagcccacctctacagactgctgcagacccagcatgcactgggtgatgcctttgctgacctcagccagaagtccccagagcttcaggaggaatttgtctacgatgccnagacacagaaactactatgcaataatggggaaacgctgctaggagccgtgaacttctttgtctctagcatgaacacattggtctccaagaccatggaagacactctg

SEQ ID NO: 33544 - DNA, 482 bp, Homo sapiens
  misc_feature (1)...(482): n = A,T,C or G
ntttgcaacattttagatgactactccagcttggcacgaggcaaaacaccaaagaattgtaggcagtggcccctattgagaagttttccggtagagttggaaatcagttgtgaatacattctttgctagttggagtgcttgtttactaagcatgtgccgtcgtaggtattagtgctagtctcaaataggtgcttcccctgaggtgcaggggaagaccaaagtttgcaactcgaactgctttcgtccatgtttctcacattgctgtattttagaaaataggggttaagactgataacaaccttttacattgtgactgtgtttgcattgtctaatgacagataaatccttaacatttctctccaccttagtactttagactaattgtgtttgtccgtccatgccatgaatgagtgggctgtagttgggcctaaataaatgagctgttggaagaaaagaatcacagtactttccagcagtcagcg

SEQ ID NO: 33545 - DNA, 481 bp, Homo sapiens
  misc_feature (1)...(481): n = A,T,C or G
naatggtagccactcgaatatgcacacgccaagcttggcacgaggcgagctctcattcacagctttctagagaaatctgagcccgaacctgccagaataggggatctcacccacccagttcagcagcgaggacacctgcagaaatacattcccaaagcaaggctgggcggccgtgtgaagtaagcaatggcctcagttttgcttctgttttggatgaacaccaccacatatggcctgaatgtgaaagaagaccctctatttgtctgttccggggcagcctggtagtaaaacactgttgaatgggccacagtttcagcagaccatcaggtgaatgggaccagactctcttctttcaaaatatcagaagttaaacacttggaacggagatttggccaagatgacccatttacaggctggactcagtccagagactatagagaaagctcgcctggaactgaatgaaaaccccgatgttttacat

SEQ ID NO: 33546 - DNA, 433 bp, Homo sapiens
ggggccctggagatgaggtggctcggggcattgcttgagaaaagtttgacatcctccagaaatggggcattaacacctataggggcacaaagcaactgttatcagaacgacttgggcgaggctcacggactgtggacctggagctagagctggatattgagttgctgcgtgagacgaagcgcaagtatgagagtgtcctggaggtgggccgggcactgacagcccacctctacagcctgctgcaaacccaccatgcactgggtgatgcctttgctgacctcacccagaactccccagagcttcaggaggaatttggctaccatgctgagacactgaaactactatgcaagaatggggaaacgctgctaggagccgcgaacttctttgtctctagcatcaacacattggtcaccaagaccatggaagacacgcc

SEQ ID NO: 33547 - DNA, 421 bp, Homo sapiens
ggaagatgctggccgcgtacctgtatgaggtctcccagctgaaggactaggccaagccctctgtgtgccatctccaatgagaaggaatcctgccctcacctgagccttttgcaacttgcccagggaagaggaggtgccctctttcctttccctcttgtcaggtcatccatgactttagagaacagacacaagtgtatccagctgtccacgggtggagctacccggtgggcttatgagtgacctggagtgacagctgagtcaccctgggtaagttctcagagtggtcaggatggcttgacctgcagaagatacccaaggtccaaaagcacaaggtctgcggaaagatctggttgtcggctgggcaccacggctcacacctataatccagcactttgggagggcaagacaggaggatcacttt

SEQ ID NO: 33548 - DNA, 421 bp, Homo sapiens
ggcctcgtgccaaccttggcacgagggaattgtactggaacagctacaacaaccgccgagacctgaactttgagcgtgggggggatatcaccctcaggtgtcctgtgatgctggtggtaggataccaagcacctcatgaagatgcactgatggctgactccggaggtcagccccagctgactcaaccaggcaagctgaccgagggcttcaagtacttcctgcaaggcatgggctacatggcctcatcctgcgatgactcgcctgtcccgggctcgtacagcctctctgaccagtgcagcatccgttgatggcaaccggtcccgctctcgcaccctgtcccagagcagcgagtctggaactctttcttcggggcccccggggcacaccatggaggtctcctgttgaatggcccttggtgccc

SEQ ID NO: 33549 - DNA, 482 bp, Homo sapiens
  misc_feature (1)...(482): n = A,T,C or G
cactgaaaacgtcngtgatgaccatgccagcnnggcacgaggcgacatcggcctggctgcctggggacgcaaggccctggacattgctgagaacgagatgccgggcctgatgcgtatgcgggagcggtactcgggctccaagccactgaagggcgcccgcatcgctggctgcctgcacatgaccgtggagacggccgtcctcattgagaccctcgtcaccctgggtgctgaggtgcagtggtccagctgcaacatcttctccacccaggaccatgcggcggctgccattgccaaggctggcattccggtgtatgcctggaagggcgaaacggacgaggagtacctgtggtgcattgagcagaccctgtacttcaaggacgggcccctcaacatgattctggacgacgggggcgacctcaccaacctcatccacaccaagtacccgcagcttctgccaggcatccgaggcatctctgaggaan

SEQ ID NO: 33550 - DNA, 407 bp, Homo sapiens
ggcgcacttcctgagacactcagcgatgccctcagacagtggtttgagttggtgacagcctctgaccacccatagaacagaaagaagagtccaaagtgagacttaactgtggtcagaaggtcacattgcttacccaggtgctcccttttggacaactacaaaaaattttattgtaatatttttattttacaacgtgatcttacagcctacagaatgctctctggctcccggctttgcctgggctgaggtttttataccaaacctggaagcagcagcaggtgcctgaactcgtaactagagaagagttatccttcttccctgccttggaagccctggcctgggaggaggtcataccccaccgttggagcccagctgcctgttttcttttgcaggggatctgggcaccc

SEQ ID NO: 33551 - DNA, 405 bp, Homo sapiens
ggtggcacgaggtccaaacacagtatgtctaaattctagcactctactggctgcttagaatacaccaaacctggaagacctttccaagagtaaaatcccagtctgccactatcaaaattgccacagtcacttttactacttgtgttcatagtagactcagcacttctttttcactggacctagtataactgagaaataaataactgtgtgcaaaatattggtatcattaaggacccagagctgcccattttctctttgttctaatagggaagcaattactgatagaaatgtgagattaaaaatagggtcctccctgctgctccaaacaaatgcctaaacacagtatgtatctcagtcctctgttcccagagattccaccctagcccaggaaagaactggcctgtg

SEQ ID NO: 33552 - DNA, 474 bp, Homo sapiens
  misc_feature (1)...(474): n = A,T,C or G
ctccccactgataccgtaggatanccactgatnatcctcggaacgaccgnnnngctgntagaaattattaaagttacacactagtatgttggtctggtgacctggttacattttattatacacattattggaccataaggacatttgtttcacctagattttaagattatggagactgctgtcatttttatcttatttaaatctctaggtttattggaagagtaagattgatgaactatagcatgcacagtttggtacagtagagatcattaatacttttaaaagttctacattaattgacttggaatccttagaaatggagtggtgacatgtcagtatgagaacaggcaaaaggtaaatttttttttttttttacacccttaagaaatctcaataataaaattttctgatctgaattatatccagggtggggtttatattttcacccacaaacaactgacccttgtttctttt

SEQ ID NO: 33553 - DNA, 411 bp, Homo sapiens
ggtgttgattcaaaaataatacctacatgaaaacatgattccaagttgattgaatgttgtaggaattactggtttagagtagcccagttctcggcctaccctgctggttgggatcttactgtattcttgaatgcactggtttgaaaatatgccagacttcagcccccaaggaaacaaggctgcaagaatttatgaactccagctggaaaaggtaaaggtgacctttggctagccacatactggaccttaccccactgacgtctttcagaacattccaagggttttcctcaaggaacatttttgagctagaaattaaaatgggttctctggcagactgcaccccttgagtcaaagttaacagtattcctttgaatgcaataatagaggcttttctgcgttaagggagaagga

SEQ ID NO: 33554 - DNA, 418 bp, Homo sapiens
acacgagggcattcctgagggcctggacttccccaatgcctccacggggaacccttccaccagccaggcctggctgggcctgctcgccggtgcgcacagcagcctggacatcgcctccttctactggaccctcaccaacaatgacacccacacgcaggagccctctgcccagcagggtgaggaggtcctccggcagctgcagaccctggcaccaaagggcgtgaacgtccgcatcgctgtgagcaagcccagcgggccccagccacaggcggacctgcaggctctgctgcagagcggtgcccaggtccgcatggtggacatgcagaagctgacccatggcgtcctgcataccaagttctgggtggtggaccagacccacttctacctgggcagtgccaacatggactggcgttcactg

SEQ ID NO: 33555 - DNA, 413 bp, Homo sapiens
ggcatatcccatttatcagcagatggttacagtagttcagactcttttacttctgacccagaacagatcgggagcaatgtaactcgtcaaaggtcagtatttctgtcaatgaaaagcatgttaaactatcttgctgcgttttaatgtttaaaactatttagaaccaagcacaaatgattttgttctctgaaagctgttaggttactttttgatttatgtaaaagacaagtaattttgatcctttccaacttgaatagaaaaacaaaaagaaccctgactttctaaatggtatgttgtggaagctctaaaaagaggtgataacttcttgacgatagaagttttataagtcctttttgtacctaaacaacgagaatctgtcaagtaatacatgtatagccttatggtaagtacca

SEQ ID NO: 33556 - DNA, 469 bp, Homo sapiens
  misc_feature (1)...(469): n = A,T,C or G
gggacgggnnccnnncattgaaaccatgagnacatttgacctgattacgccagcttggcacgaggctcatgaccatggccttgatcgttgccactcagttccggttccgctacaaccatttcaaaaacgatgattctaaagggaaagaggtggagatcccgcaggtggaaaggaacaactctacagagtcctctgaggagacaccaaccaccacaagccactcgcaggccttcaacttttgggacttaatcaagctgctctgcagcgtgcagtatggctcaatgctgtttgtggcttggttcatgggttttggatatggcttcgtgttcacctttctctactggcatttggaagacctcaatggaactacaaccctctttggggtctgttcagtcctgagtcatgtgtctgagctgacagcatatttttttagtcacaagcttattgaattgatcggccacatcagggt

SEQ ID NO: 33557 - DNA, 497 bp, Homo sapiens
  misc_feature (1)...(497): n = A,T,C or G
gctgtccggggcggcccctgaaaacgtcactganaatcgtcggacctgctacgccagcttggacgaggaagatgctggccgcgtacctgtatgaggtctcccagctgaaggactatgccaagccctctgtgtgccatctccaatgagaaggaatcctgccctcacctcacccttttccaacttgcccagggaaggggagggtccctctttcctttccctcttgtcaggtcatccatgactttagagaacagacacaagtgtatccagctgtccacgggtggagctacccgttgggcttatgagtgacctggagtgacagctgagtcaccctgggtaagttctcacagtggtcaggatggcttgacctgcagaagatacccaaggtccaaaagcacaaggtctgcggaaagttctggttgtcggctgggcaccacggctcacacctataatcgagcactttgggaggccaagacaggaggatcacttgaggccaggag

SEQ ID NO: 33558 - DNA, 480 bp, Homo sapiens
  misc_feature (1)...(480): n = A,T,C or G
cactgtaacgctgctgatgacatgcgcagcnncgcacgaggaagatgctggccgcgtacctgtatgaggtctcccagctgaaggactaggccaagccctctgtgtgccatctccaatgagaaggaatcctgccctcacctcacccttttccaacttgcccagggaagtggagggtccctctttcctttccctcttgtcagggcatccatgactttagagaacagacacaagtgtatccagctgtccacgggtggagctacccgttgggcttatgagtgacctggagtgacagctgagtcaccctgggtaagttctcagagtggtcaggatggcttgacctgcagaagatacccaaggtccaaaagcacaaggtctgcggaaagttctggttgtcggctgggcaccacggctcacacctataatcgagcactttgggaggccaagacaggaggatcacttgaggccaggagtctgagacaa

SEQ ID NO: 33559 - DNA, 477 bp, Homo sapiens
agagcctccttttgatacctcgatgaacattcttacgccacccttggcacgagggcttgaacagacgtgacctaaaagaaactgaacataaaaagaatgtttgtggggtgctacttttcaagttggggaacctgatagtgaagagtcacacatggagaaaattgctctcagaaaaactgtttggattgctttcctcttgttgcacatgtaccatgcatttctcagcttggggtactacattttgtggaaagctaatctatcatctatctttccacatctgaattaatcattctaggaaagaatacttattcctactcatttcctttatgatgtccaaatgggtgcaggatcataatctattgtgccacctttatttctagaagtacaactaatatgttcacattttcaaataaataatactccccgtaagtaataactgcaaccaatcagtgttattcagagctatgcctccttgta

SEQ ID NO: 33560 - DNA, 416 bp, Homo sapiens
  misc_feature (1)...(416): n = A,T,C or G
gggcccgacgtctaactggattccatgaaacctccaacatcaacgacttttctgctggtgtagccaatcgtagcgccagcatacgcattccccggactgttggccaggagaagaagggttactttgaagatcgtcgcccctctgccaactgcgaccccttttcggtgacagaagccctcatccgcacgtgtcttctcaatgaaaccggcgatgagcccttccagtacaaaaattaagtggactagacctccagctgttgagcccctcctagttcttcatcccactccaactcttccccctctcccagttgtcccgattgtaactcaaagggtggaatatcaaggtcgtttttttcattccatgtgcccagntaatcttgctttctttgtttggctgggatagaggggtcaagttat

SEQ ID NO: 33561 - DNA, 483 bp, Homo sapiens
  misc_feature (1)...(483): n = A,T,C or G
ntctgagaacgctggtagatgaccacgccaagcnngccacgaggggccctggagatgaagtggctcggggcattgctggagaaaagtttgtcatcgtcaagaaatggggcatcaacacctataagtgcacaaagcaactgttatcagaacgatttggtcgaggctcacggactgtggacctggagctagagctgcagattgagttgctgcgtgagacgaaacgcaagtatgagagtgtcctgcagctgggccgggcactgacagcccacctctacagcctgctgcagacccagcatgcactgggtgatgcctttgctgacctcagccagaagtccccagagcttcaggaggaatttggctacaatgcagagacacagaaactactatgcaagaatggggaaacgctgctaggagccgtgaacttctttgtctctagcatcaacacattggtcaccaagaccatggaagacacgctcatgactg

SEQ ID NO: 33562 - DNA, 486 bp, Homo sapiens
  misc_feature (1)...(486): n = A,T,C or G
ttttgaccaccctntgntgataacgtaggaccangcnnacgccaagcttggcacgaggggccctggagatgaagtggctcggggcattgctggataaaagtttgacatcgtcaagaaatggggcatcagcacctataagggcacaaagcaactgttatcagaacgatttggtcgaggctcacggactgtggacctggagctagagctgcagattgagttgctgcgtgagacgaaacgcaagtatgagagtgtcctgcagctgggccgggcactgacagcccacctctacagcctgctgcagacccagcatgcactgggtgatgcctttgctgacctcagccagaagtccccagagcttcaggaggaatttggctacaatgcagagacacagaaactactatgcaagaatggggaaacgctgctaggagccgtgaacttctttgtctctagcatcaacacattggtcaccaagaccatggaagacac

SEQ ID NO: 33563 - DNA, 425 bp, Homo sapiens
ggctggaagaattcgcggccgaagtggctggctcatttaagatgaggcttctgctgcttctcctaatggcggcgtctgcgatggtccggagcgaggcctcggccaatctgggcggcgtgcccagcaagagattaaagatgcagtacgccacggggccgctgctcaagttccagatttgtgtttcctgaggttataggcgggtgtttgaggagtacatgcgggttattagccagcggtacccagacatccgcattgaaggagagaattacctccctcaaccaatatatagacacatagcatctttcctgtcagtcttcaaactagtattaataggcttaataattgttggcaaggatccttttgctttctttggcatgcaagctcctagcatctggcagtggggccaagaaaataaggtttatgca

SEQ ID NO: 33564 - DNA, 433 bp, Homo sapiens
gggcgacacacgctctcgccgccgtcatgactgagcagatgacccttcgtggcaccctcaagggccacaacggctgggtaacccagatcgctactaccccgcagttcccggacatgatcctctccgcctctcgagataagaccatcatcatgtggaaactgaccagggatgagaccaactatggaattccacagcgcgctctgcgggggcactcccactttgttagtgatgtggttatctcctcagatggccagattgccctctcaggctcctgggatggaaccctgcgcctctgggatctcacaacgggcaccaccacgaggcgatttgtgggccataccaaggatgtgctgagtgtggccttctcctctgacaaccggcagattgtctctggatctcgagataaaaccatcaagctatggaagaccctggg

SEQ ID NO: 33565 - DNA, 430 bp, Homo sapiens
ggggccctggagatgagggggctcggggcattgctggagaaaagtttgacatcgtccacaaatggggcatgaacacctataagtgcacaaagcaactgttatcagaacgatttggtcgaggctcacggactgtggacctggagctacagctgcagattgagttgctgcgcgagacgaaacgcaagtatgagaatgtcctgtagctgggccgggcactgacagaccacctctacagcctgctgcagacccagcatgcactgggtgatgcctttgctgacctcagccagaagtccccagagcttcaggaggaatttggctacaatgcagagacacataaactactatgcaacaatggggaaacgctgctaggagccgtgaacttctttgtctctatcatcaacacattggtcaccaagaccatggaagacac

SEQ ID NO: 33566 - DNA, 418 bp, Homo sapiens
ggggcacatagtatgtattcaaaacaagtgtgttaattaataaaaatatataaatctcatttgagatttaagaatataaataattttcttttaatctttattttgctcaatatttaataggaagtatgatttcaaggactactaaaggaaggcaatatacatgtgaaaaccataaaatacattttttgcattctactatttttaggggcatgaaatgaatgaaagctttagcacttttttgcccctacatatgagacaacatattttgtatttcactcaaggctctgccagtaaaaagtaatgaaattgtacctttctaatgacatctatgcagcaggggtctatcgccttgtggatggcaccaaattatccaagtgtattaggagactggggcttttttctttaatcccttcttatt

SEQ ID NO: 33567 - DNA, 470 bp, Homo sapiens
  misc_feature (1)...(470): n = A,T,C or G
agggacgggannnnnacatgagatcatgagtaacttcttacgccaagcttggcacgagggaacattcaaccaaaattgaataattggatatatttttattggtctatgtgggtgtgaatgtataaatggtgcataaaaaataatttaagccagaaaaatagttatttgtaatgaataaaactaaaaagtagttaattattatatccaggtgatatctttgtttatgtagataacaaaagcagcagaaagactcttttttttttccatgatggagggttgctttgtcttccaggctggaaagcaggggcgtgatctcagctcatggcaacctccacctcctgggttcaagcaattttcctgcctcagcctcctaagtagctgggattacaggcatgcaccaccacgtctgactaatttttgaatttttagtaaagacagggtttcatcatgttggccaggctggtcccaat

SEQ ID NO: 33568 - DNA, 478 bp, Homo sapiens
  misc_feature (1)...(478): n = A,T,C or G
tttgacaacctcgtgatgacccatccagncngccacgaggggcctctgctgtgttttaacatcgagcttcttatatggaaagtttttgtgagctgtgttatccctctggtcagtattatgaaatcatttgtcaggggtaataaataaggaaccagtaatatgccaatggttcatgaattactggacaaatagcagacaatgggagtccctttacaataacgagcccacttagctgtccttgagggcttagataccttgccacgtgaagtaggtagagcagcatttcaataggtaatttgtgtggttgtgccagaaactcagcccttctatgtaattacatacaggataaaagggaagtctgctcactttttcttctacagggcattttaactgactggaataaaggcatggttgcatttagtactcaatcagatattactaaaaaaaaaattaataatgggagccttttcgagacaag

SEQ ID NO: 33569 - DNA, 405 bp, Homo sapiens
gggctttttctttgggccatatttgccttctaatacattcctgcaatatgtagtggtgatttcccttagcttcctcctactacctcttatactcatctccccaaattatttgcctcccttaaataagttttcctagaaggtaagctggtcaggcaatttgaaaaatattagatcccaagaaatctattccgtttgcattggacttctcggattccatgtgtttgcagcaggactacatcaaactctgatgtgccggattgtggcatgtctgcatgtctcatccatctattgtttttggtaactcagcttggaatttcagtgtctgtcttccctgggttgacattggaatcagcctctcctttgagcttattttaactcttgagcaacataacatagatttaatgg

SEQ ID NO: 33570 - DNA, 473 bp, Homo sapiens
  misc_feature (1)...(473): n = A,T,C or G
gcaggggtgnttttgattacattagcctctgcactacgccaagcttggcacgaggttctgttgctatgtcttcaaattcactcatcttttttctggaatgtctaatttgccgttaatcccatccaatgtatttttattgcgcattatagggttttatctttagaagtttgatttgggtcttttttatatgtttcatttctccaccaaacttttagatgtatcagatatgggtgtaataacttttaaatgtcattgcctactaattctgttgtgactatttcagaagtctatcaggattagtttttaatgtaatttcttggattatgaattactggtccaagtagatagtattaatttaaactctatacttaatgatgcaaactatgattataaatttttagaagacatttctactaccacttcaaagcttaggcaaggaccataagattctttgttatctctctttgttcatg

SEQ ID NO: 33571 - DNA, 455 bp, Homo sapiens
  misc_feature (1)...(455): n = A,T,C or G
ggcagcctcccaaagtgctgggattacagttgtgagccaccgtgcccggccttagttatttttaaagcaaatctagatatgttttggtaagggatttttaaattttcctaaaaaaagataacctgcaatttcttgccccaagtcattccctactgacaaattgcccatcttcctgattctctgatcccctcctttctcctcattttccaaattcagacaagtctgtgcatggggtgatatcaccgcaccagctctgtccctggctcattttctgtaaccctatactccaggcgtttctccacatttctctgaagcctgaaaacgatccttcttaatgaccatgaatgggctggagttgcttggcaatcctgtcctctgcaataggacatttaatctgcttgtggcctttcgccatggtgggggcctcttcccttattttggttatttttctggan

SEQ ID NO: 33572 - DNA, 413 bp, Homo sapiens
ggcgctcccggggaggtgttgcaaccatggctacggcagccggcgcgacctactttcaacgaggcagtctgttctggttcacagtcatcaccctcagctttggctactacacatgggttgtcttctggcctcagagtatcccttatcaaaaccttgggcccctgggccccttcactcagtacttgggggaccaccatcacacccttctgtgcaatgggtattggcttgcctggctgattcatgtgggagagcccttgcatgccataatattgtgcaagcataaaggcatcacaagtggccgggctcagctactctggctgctacagactttgttctttgggatagccgttctcaccatcttgattgcttacaaacggaagcgccaaaaacaaaccttgagttcgctgaaaact

SEQ ID NO: 33573 - DNA, 491 bp, Homo sapiens
  misc_feature (1)...(491): n = A,T,C or G
ggggaggcngggccnnnnnaattgagaactgaggaccgttatgacctgcattacgccaagcttggcacgagggggaaaccctttccaggtgaaccagccccaaccgctgacactgaaccagcttcgggggagcccagccctggggaccagaacatcctttgggcctggcccaggagtggagtccatggctgtggcctcgatgacctgcgcggccccacagccagctctgggggccactggttcctctctgacaccactgggccctgcaatgatgaacatggtgggcagtgtgggtatacccccattagcaacccaggccactggcacaaccaaccctttacttctctaatgcctgggcctgggacccacccagagcacctgtgctggaggatgcgcgaacacggactctcgtctgtgggacgggatacaagaactcggggatcaggggtattagggcttttcaactgcagcttcctgacgaaagggctgtt

SEQ ID NO: 33574 - DNA, 420 bp, Homo sapiens
  misc_feature (1)...(420): n = A,T,C or G
gggtgcggatgttcttgctatgtcctatgagctcacactcgtctcccttctttaaaatgccacgctctagtgtacctgtcaccacggggccacggcctgggagggaataagacaggatatcagggaccccgagctaggcttctgctagagagagtgcgtgggaacaggcagagtcctcaccagggacggagtacaccgcctccaggcagcaggaaaggcttctccaggtcccgggcgggcactgggatgtaagtgtccacagcatccagtagcttctgcacagacttcaggcctaactcagggtcccgaccctgttgaggggaagtgccaggactctgaaatccccattctacttccctcgattatcaagagccacttcccagacacaaagcagagctctgggtgcccatccagccccan

SEQ ID NO: 33575 - DNA, 455 bp, Homo sapiens
ggcactgggcatcagaataaaaggcctctagaaattgctgaacaatggttaattaagatattgctaacacaatcgagtgataatacagttttactgcaaaagaagcacttcaaacctattatgtccttagaacttccagagtagccactgctcccagttaaaggggggtcagtagccttgcagaactgtcctgagaagttattgctggtgctggccagccatggcttaagactccaacagccactctgagggaggggagaagggagcagaggccacgcacaatgaaccgatggggtattcagttgctggcagctacattgtgtggcattctagcatcttcaggtctttagatcttggacaaggtggcagggtattttaaaagctataactacttgtagttgtccagttttcattgctggtttagcaaaccacgctgtcttacagtggaacttttt

SEQ ID NO: 33576 - DNA, 421 bp, Homo sapiens
ggggaagattgtcttaagagttttagttatcaaattaactgtttagagcttcttataaaagttccttccgatccatgtcaacttttgtggcctaaggttgaaactttcagctctttgtataaacagactttcctgctccacctttcttctggttgctgtgcgaactttggtaattttcatgcgcatccgtgtgaaaagaccaccaaacaggctttgtgtgagcaataaagctttttaatcacctgggtgcaggcaggttgagtccgaagagtcagcgaagggagataggggtggggccattttataggatttgggcaggtagtggaaaattacagtcaaagggggtttttctcttacgggcagggccgaggggtcacaaggtgctcagttggggaggttctgagccaggagaaggaatgtc

SEQ ID NO: 33577 - DNA, 447 bp, Homo sapiens
ggggagcagcttcgcgccgccgcccgtctgcagattgttctgggccacctcggccgcccctcggccggggctgtcgtagctcatcccacttcagggactatttcctctgccagtttccatcctcaacaattccagtatactctggataataatgttctaaccctggaacagagaaaattttatgaagaaaatgggtttctagtaatcaaaaatcttgtacctgatgccgatattcaacgctttcggaatgagtttgaaaaaatctgcagaaaggaggtgaaaccattaggattaacagtaatgagagatgtgaccatttcgaaatccgaatatgctccaagtgagaagatgatcacgaaggtccaggatttccaggaagataaggagctcttcagatactgcactctccccgagattctgaaatatgtggagtgcttcactggacct

SEQ ID NO: 33578 - DNA, 449 bp, Homo sapiens
ggtttggaaacaagcaggacagcgccttttctaacctagagaatgctctggacctggccccctcctcactggtgcttcctggcgtcgactggtatgcagtcagcactctgaccacttacctgcaggagaagctcggggccagccccttgcatgtggacctggccaccctgcgggagctgaagctcaatgccagcctccctgctctgctgctcattcgcctgccctacacagccagctctggtctgatggcacccagggaagtcctcacaggcaacgatgaggtcatcgggcaggtcctgagcacactcaagtccgaagatgtcccatacacagcggccctcacagcggtccgcccttccagggtggcccgtgatgtaaccgtggtggccggatggctatgtcgtcagctgctacaaaacagccagaatacctgtgatccatctctgtgg

SEQ ID NO: 33579 - DNA, 434 bp, Homo sapiens
ggcttcccacctgggttgcaagctgaactcattactggttttcataacaacacaatagtaagaacaagcaaacacaacaaattctcctggaggtagacttggcttaaaaaggcagacttggcttggtgatagtttttcttgaaagttccagatccacagtggagagtgagcctgtctcatatttggcaaaaatatttgttgaaatgtccacataggggatgttggatgtttaacacttttgagagtttaacacatgaatattctttctcctagaaaacacattagacctgttggagggagtctcccgtattccttttctgccacttttcgtccccatttcatttcattaatgataggatatgatttacctgtgacttactacttcaaatggatggcagtgcacttggatttttttttaatatccagaagattga

SEQ ID NO: 33580 - DNA, 422 bp, Homo sapiens
ggtagtatttgaaggagaagaagggcaggatgctggcgggctcctgcgggagtggtatatgatcatctctcgagatgtttaaccctatgtatgccttgttccgtacctcacctggtgatcgagtcacctacaccatcaatccatcttcccactgcaaccccaaccacctcagctacttcaagtttgtcggacgcattgtggccaaagctgtatatgacaaccgtcttctggagtgctactttactcgatccttttacaaacacatcttgggcaagtcagtcagatatacagatatggagagtgaagattaccacttctaccaaggtctggtttatctgctggaaaatgatgtctccacactaagctatgacctcaccttcagcactgaggtccaagaagttggagtttgtgaaagtcgtgac

SEQ ID NO: 33581 - DNA, 422 bp, Homo sapiens
ggttttgacaagtttaaagacattttctactatagctattttttcacttgctacgaataaagttttcaattaatatacattgtcttatactcttgtctatataaaaccattttagcatcttttattttctatcatatgacttccttatacatttaaagaatttccacctaacatggagttttactctacaccgtaggagacccaagttctggttgttaccggaaaggggtcccaattcagaccccaagagagggttcttgggtcttgcaagaagtaagtcagggcaagtccacagcacaaaagcaagtttattaagaaagaaaggtggtgaaactatagctactccatagacagagcagagtattcccagtattcccaaaagtaagaggaaggacgtgcctgccctatgtacaatgcttgtt

SEQ ID NO: 33582 - DNA, 424 bp, Homo sapiens
  misc_feature (1)...(424): n = A,T,C or G
ggagcttataggtctcctgttgcagtggaagaagtcgtctcctctggaaattcaaaaccttaggcctgtctatacttactttgggtacatttacattacgttatagtttgagaatcaccaaggggaaattttaacattaaaactaaccccaaggcacctggtagaagcagcacaggataaatttctgcttacattctcaattgagacctaacagtgctcccactgaaagagtccaactaaacttgaacccctgtgctgactttgcaaaatgagaccctcaatggctttagatattagagttattggctataaaatagctatgtttaagatttctaaagacctaaaagaaggaattaaaaacctgacaaaatactgtcttaaaagaacaaagttgaaaacaaatcacatagaaattacagatttn

SEQ ID NO: 33583 - DNA, 420 bp, Homo sapiens
ggcaaatatcctaaatgatagatcacaaaatgcttctaaggcagttattaacggtgttcctggtgagtcttcttgggacagctgtgaattacatccttttaaaagagtacctgagaaagcaagcccaggtgatatcaccatttaagcccctcttaggctgtgtttgctgatgtcctcaaaatgcgttctcactagcttaagggtgtcttcttaggatgctgctatggaaaactccatcactgttttccagctttgcccatactcaggtaccaagaggatttcactcatgtgattcttcatttatttcactattttaggggctcttctcatgtggcagtcactgtgtcaggcgccagggaaacagcagacagcagaacagacacgagctttacactctcaggaagctgatattccagtaag

SEQ ID NO: 33584 - DNA, 455 bp, Homo sapiens
  misc_feature (1)...(455): n = A,T,C or G
ggtggggatgggaggtctgagccgggcccaccctaaacctgctggtagctaggagggaggcgggggagaccagcagaggcctccgcctgtgtccccagccctgacagggcgggatcacggagggggagccaggattgtgggtcctcatcagggtggggctgaatccaggaaagtctagggaaagccccgaactccagaaccaggacactggtcccaggctgccccccgtcccccaccccatttcccatcgaccctcttgccacttatctcacttgcaagcatctctcggcctcctcccccgacccctgtgcgccaccaaatccttggccagtacatatttattggtgcttttaagtgccaggcactgcacttggtgaagtggggccagcggngtggctcaagcccaggcctggccctcgactggcctctttttgatggggatgnggaaggccaag

SEQ ID NO: 33585 - DNA, 508 bp, Homo sapiens
  misc_feature (1)...(508): n = A,T,C or G
ccccgccccattgatttgattaactntttgaccanngacacgccaagcttggcacgaggaaaatattaaagaagatcaacaaggccatcgtctccaagaagaattaagattttgtgacagtggctaacgccgtgtttgggaagaatgcctctgaaattgaagtgccttttgttacaaggaacaaagatgtgttccagtgtgaggtccggaatgtgaactttgaggatccagcctctgcctgtgattccatcaatgcatgggttaaaaatgaaaccagggatatgattgacaatctgctgtccccagatcttattgatggtgtgctcaccagactggtcctcgtcaacgcaatgtatttcaagggtctgtggaaattacggttccaacccgagaacacaaagaaacgcactttcgtggcagtcgacgggaaatactatcaagtgccaatgctggcccagctctccgtgttccggtgggggcgacaagtgcccccaatgatttatggacg

SEQ ID NO: 33586 - DNA, 505 bp, Homo sapiens
  misc_feature (1)...(505): n = A,T,C or G
cgcgcccccattgtatccaattgcaccatgacacgccaagcttggcacgaggaaggctccatcaggactgggtcagtgatggcaacaggatggccaaggatggctctagaacactctgtccatgcgtcactccccccagttttatttttagctttggcttcagggagtgacagccatcacaaatagccacattctgctctactctccaacataccagattctacactgttgttatttcatgagacgtgaatgttgcaaagagtggggggattctggttgttaaggaacttacactggggagctttactcttccgtgtcaacaatgtgactacatgttctccagattagccacacatgcaaacatcagtgtccttctagctttagccgagaaagaaaccagtcccagggaatgaatggtggtctccccactcccggcagcactttaggcagcccataagctatgcgagagtgtgaacgctcaccctgctccgtcacggntctgacc

SEQ ID NO: 33587 - DNA, 425 bp, Homo sapiens
actatgccgaggttggctgctctggttttggggtgggagtgatcctggtctgacggagtgggctttactcacaaccctgtccaccccaggatattctttccaggatctgtccttgggattaagtgtcacctggttctggacaaaggtcctgaaactggcccgctgaggatgttttaggtgtcctgttcccctgcagtggcacaggttgggtgaggaaagcttgtggcatcaaatctggtcagttatagtcctagttgtgaattgggagggcacgggccagggcagcagtacccctgggcgattccagggcaatgggccaaaaggaaacagaaagaatggtcaactaaaattcctggtgatggcagcgagcagcccagtttagagaaagggagaattcaaatcaaagggctattttccccatgacc

SEQ ID NO: 33588 - DNA, 497 bp, Homo sapiens
  misc_feature (1)...(497): n = A,T,C or G
tgggcncctcccnatgaagacgttatgttgagattcatccaagcttggcacgagggtacttgcgagctaacttgtactattcttgtgaaagcactgtcatcttttagtagcaaattttgataatgtttctcgtggaaaaaaaaatcagtatctatctttagaacaatgtaattataatgtgggaagtgtgcatgaatgagagagagtgtgtgtgtatctgtgtgtgtgtgcgcgtgtgtgtgtgtcttttaatagtttatgccagcaatctttgcttgaatgtttaacgatgccttcagtgtgatgctggccaatagatgattgcagtttaaaatgtcattattgtgcaggcttggataactaacattccatgatgtagcttgtttctgatgagatgattgtaggtacatttttctcattatccaatcatctgtgggatacttagttttctaatgtgccattatctatttttattctgcagntatgttcaaaatacc

SEQ ID NO: 33589 - DNA, 410 bp, Homo sapiens
ggcagggaaggatatctgtctgtaggcagccaaaaataggagtctaggattaccgatcagtgttgacctaaagatttgagagttaagagtataggtgggaggttacatttatgtggggggaatggctatgtagacagcatgggatgagagagtacagtgctatagtattgagtggagccctgtgatgtccaacaatagtctccagccatgtgtggttatttaaattttaataaattataattaagttaaaaattcagttattcatttgccacatttcaagtgcttaatagccacatgtgtctagtggcttctatatttatagccagaggtagaacattcccatcattgcagaaagttctgttggacagcgctgctatagactttgagagaataatttgattatagcaggg

SEQ ID NO: 33590 - DNA, 429 bp, Homo sapiens
gggcagcacatctgtggaggatctgccagggagcaaacctgagcctgatgccatttctgtggcctcggaggcctttgaagatgacagctgtagcaactttgtgtctgaagatgactcggaaacccagtccgtgtccagctttagttcaggaccaacaagcccgtctgagatgcctgaccagttccctgcggttgtgaggcctggcagcctggatctgcccagccctgtgtccctgtcagagtttgggatgatgttcccagtgttgggccctcgaagtgaatgcagcggggcctcctcccctgaatgtgaagtagaacgaggagacagggcagaaggggcagagaataaaacaagtgacaaagccaacaacaaccggggcctcagcagtagcagtggcagtggtggcagcagtaagagccaaagcagcac

SEQ ID NO: 33591 - DNA, 423 bp, Homo sapiens
ggcatatatatattttttaaagaagagaaaaacaccttgagccttaaaacggggctgctgggaaacatttgcactcttttagtgcatttcctcctgcctttgcttgttcactgcagtcttaagaaagaggtaaaaggcaagcaaaggagatgaaatctgttctgggaatgtttcagcagccaataagtgcccgagcacactgcccccggttgcctgcctgggccccatgtggaaggcagatgcctgctcgctctgtcacctgtgcctctcagaacaccagcagttaaccttcaagacattccacttgctaaaattatttattttgtaaggagaggttttaattaaaacaaaaaaaaattcttttttttttttttccaatttaaccttttttaaaaaaggtggtgggagctttcctcaaggggg

SEQ ID NO: 33592 - DNA, 397 bp, Homo sapiens
  misc_feature (1)...(397): n = A,T,C or G
tgatctgtaccatgaccctacataaggctggatggcacctcaggctgagggccccaatgtatgtgtggctgtgggtgtgggtgggagtgtgtctgctgagtaaggaacatgattttcaagattctaaagctcaattcaagtgacacattaatgataaactcagatctgatcaagagtccggatttctaacagtccttgctttggggggtgtgctgacaacttagctcaggtgccttacatcttttctaatcacagngctgcatatgagcctgccctcactccctctgcagaatccctttgcacctgagaccctactgaagtggctggtagaaaaaggggcctgagtggaggattatcagtatcacgatttgcaggattcccttctgggcttcattct

SEQ ID NO: 33593 - DNA, 392 bp, Homo sapiens
ggattatgttttggaccctggttcaggggatgtccttactgtgtctaactgatgtgtttcaggctcttccttcaatatgtattgcgaatagtgagatttattacacagtcctaacattgatgcagtttaattgcttgtggatggtgttgtcaggaaaaaaggtaatattttcttctgaactcatggttagaaagggcaggagaagctggaagtaagatatcctccatcctccttagacatatttacatcacctcttccaggtttgcatattgcttacaatcaataccgagaagagaaaacaaaggaaatatgtgataagttgataaattactgctacaaaatttaaattctggccctaaagcaataacaaagtagaacatagtgaaacaagt

SEQ ID NO: 33594 - DNA, 454 bp, Homo sapiens
  misc_feature (1)...(454): n = A,T,C or G
cttagaattcagttacgaccatgantacgcgcagcttggcacggagggacacgacaggccacatgctggccaacccccacccgttcgcagttttcttcagcactgcgacagttgtgatcgaggagtgcgtcagcttcctggtgttcatgattatcctgggggtatttcggatccgggccgcacatcggcggaccatgcgggatcaggacaccgggaaggagaacgagatggactgggacgactctgccctgaccatcaccgtcaaccccatggagacctatgaggaccagcacagcagtgaggaggaggaggaagaggaagaggaagaggaaagcgaggacggcgaanaagaggatgacatcaccagcgccgagtcggagagcatcgaggaggaggagggggagcagggcgacccccagaacgcaacccggcagcagcagctggagtgggatgt

SEQ ID NO: 33595 - DNA, 462 bp, Homo sapiens
  misc_feature (1)...(462): n = A,T,C or G
agggaggttttnncttgatnaccgttgtaacctgtattacgccagcttggcacgaggatgtaaaatctctctactgaagctcggtataatcctctcttgtgtaatgggacacactgcctgccatgagacttgcttttctgtactgtcaggcaagcccacgtcatcgagatatttttatgctccttactttctcttttctaagtgctgtgggatctgggaagggatttgaggggactctgtccttttattggggatcctttttatactgaaacatctgtcctaacttgagtgccccaaggtccaactctctttcctaaagaaggtgcctgaagaagtctctcttctctctgcttcgtggcccctttcttaaatttctagggctgatgctgaccatgtggtttccacaccttattggccccagaggggccctcccatgggaagatctgcagcagtctccccaaa

SEQ ID NO: 33596 - DNA, 393 bp, Homo sapiens
  misc_feature (1)...(393): n = A,T,C or G
ggacttcgtggagtggatccccaacaacgtgaagacggccgtgtgcgacatcccgccccgcggcctgaagatggccgcgaccttcatcggcaacagcacggccatccaggagctgttcaagcgcatctccgagcagttcacggccatgttccggcgcaaggccttcttgcactggtacacgggcgagggcatggacgagatggagttcaccgaggccgagagcaacatgaatgacctggtatctgagtaccagcagtaccaggacgccacggccgaggagggcgagttccaggaggaggcggaggaggaggtggcctangctgctcccatcgcttcccacctgtcccctcgaggcttctgacctttgatccgctaggccccccatctctgaac

SEQ ID NO: 33597 - DNA, 400 bp, Homo sapiens
acacgaggattgaagagtctcagccagaaaaaataaagatgctgttagagaaatttgttgaagaatgcaagttccctccagtgccagatgccatttgttgctatcaaaagtgctgtggatattctaagatccagatatacataactgatccagactttaagggttttatacgcatcagctgttgccagtactgtaaaatagaatttcacatgaattgctggaagaagttaaaaaccacaacctttaatgataaaattgacaaggattttctacaaggaatatgtcttacccctgactgtgaaggtgtcatttctaatgattatcatcttcagcagtggtggtcaagttaaatgtgaatttgaacacaaggtcataaaagaaaaggttcctccaagaccta

SEQ ID NO: 33598 - DNA, 423 bp, Homo sapiens
ggagttcaagaccagcctgaccaacatggagaaaccccatctctactaaaaatacaaaattagccaggtgtggtgttgcatgcctgtaatcccagctattagggaggctgaggcaggagaatcgcttgaacccgggaggcagaggttgcagtgagtcgagatcacaccattgcactccagcctgggcaataagagcaaaactccgtctcaaaaataataataataataatttaactgtgttctgcacacacagaattacaaaatccctataggactttcacagatagctttgggcttaaggtcttcggacaacagggagttctaatttcttactctttgggacatttagtacatgttggtacacataaggaaagaaaatggcttatattagagctaggaaacaggggcagcctggatttttat

SEQ ID NO: 33599 - DNA, 497 bp, Homo sapiens
  misc_feature (1)...(497): n = A,T,C or G
agaggcnagggaggttcnnngttgataccgtcattgaatgcctacgccaagcttggcacgaggcagnggttctccgactttttgttcccaggatttctctacattcttaaaaggttctgagaatttcaaagagctcatttctatgggttctatctagtggcgagctggagctggcttgtactggcatgcaggagtgaactgtgcacaggtctcccaaccattagttcagttataccagattggagcttgaaatgggccatggtgagagtgtttacaccatggaatgggcaaatgatcgaaatcagagcttttttttcctcaggagagccaacatttgccagttcactactcatcgtatctattggtatttaccatatttgatatttaaaaactaagaatttttaaaagtgcaagagtacacaggacacttttccttatccacgggagtgatgatgccatttcacatcatgtagcttgaggaaactactatgcttggg

SEQ ID NO: 33600 - DNA, 459 bp, Homo sapiens
  misc_feature (1)...(459): n = A,T,C or G
gggaggctgngtttgatacctttgaacacgtttacgccaagcttggcacgagggtagtgaaaacatcttttacctaaggaacccatttattcaacaaatatttattgaatgcctgttttgtgccaggcacccacccagtgatctttttctgccaacctaaaataccttgaggaacactctgcatcttatctgtggctgggacccataggacagccacactgactttaggaatcacctggttacatcagttgatgcttgttcattagtccgtctggagagattgggccagaaggatactggaagggcagacaaaccctccgcctacttcctctgccgggttcgggttgcctgtttggtctcagccttaccttcacagttcagtgtcactctggcttgccatcgagtttccgcctgtccccattggagagaaggggtgggtgttggctgttgcattatatn

SEQ ID NO: 33601 - DNA, 419 bp, Homo sapiens
ggattttatctcatttgagatcatggtaggttaagaaaatatgcctgttgatgaaagctaaaagcaaatttatgaaactaaaagggtgattgacatccatgtttacactccgctctaatgtttgatatataaataagttattttcaaattaggaaaaaacagtgagtattacaaagggcttcagatgtttagagtactacgttatttatgttttacaaagtttgaatcttctataaactaagaaaggggatgatccttagatttgcattaaaatataaaagtcttttaaagtaaatgtgaaccttgtctaagtactgtaatccacacaccacattataagaagcaaaccagcatcttaaggaattataaaattaccctatttaaaagccatgctattgttctgctattaccagatttat

SEQ ID NO: 33602 - DNA, 452 bp, Homo sapiens
  misc_feature (1)...(452): n = A,T,C or G
tattatnaatacggcgaccancannacgcgaagcctggcacgaggaaggaccggggcagcacgaccaaccttggcagcgacttctccctggttttttagaggtccccaggagccactgggaggttcacctatgaggccgtggagctggtcccagcaggagcgccaactcaggcagcttggaggaagagccactcatcctctccacagagtgtcctctggaaccggccacaaccctcagaggaccgcttgccttcccagcaggggctggcggaagccaggtcttccagctcctcttcctcaaaccattctgataactttttcaggatgggtagcagtcccctggaggtccccaaacccagatcagtggaccatcccctgcccggatcctctctctccacagactatggcagctggcagatggtaacgggctgtggcagtattcaggagcgggc

SEQ ID NO: 33603 - DNA, 421 bp, Homo sapiens
gggctgtgagtgcaccaaggccgtgaactttgccatgcatgaacttcagctcatccgggtggagaagcagtaccttcaccacaacctcgaccacctggtcgaggagctcttccttggtgacattcacactgatgccacccagaggatgttctaccggccctccagttaccagccccctctgcagaatgccaagaaccacgaccatgcctgcatcgcctgtcggatcatctatcggtcagacgagcaccaccctcccatcctgcccccaaaggcagacctgaccatcggcctgcacggggagtgggtgagccagcgctgtgaggtgcgcccccaagtcctcttcctcacccgccacttcatcttccatgacaacaacaacacctgggagggccactactaccactactcagacccggtgtgg

SEQ ID NO: 33604 - DNA, 419 bp, Homo sapiens
ggaccagatcctgacaagagagcctgtgctaacgacttgcttgttgatgagtttttaaaagtttcaagcaaaaagaaaaagacacaacctaagctttcagctctttcagctggatcaaatgaatatctcaggagtatatccttgccggtacctgtgctgggggaggacaccagcagcagcagtgagtacggctcagtttcacccgacacggagttgaaagtggaccccttctctttcaaaacaagagccaagtcctgcggagaaagagatgtcaagggaattcggacactctttttgggcattccagatgagaattttgaagatcacagtgctcctccttcccctgaagaaaaagattctggattcttcatgctgaggaaggacagtgagaggcgagctacccttcacaggatcctgac

SEQ ID NO: 33605 - DNA, 422 bp, Homo sapiens
gggctatgaagagctagagaaattcttgttatggtagaaaaatttcacgggtcatttttgaaactgcatttgtgcgtatgcagtgtagattttatagtgtgttgggctttcaagatctaaatcatatataataaattaagggacaatggggctgacagcactaaacttggtgcttattgatattctaagaaatatctgtgaaatatcatcacgtatgttatacaaccttcatttaaaaaggtttaaaactagttagattcactttgacacttttcatatcatttcttaacccaagtgacgaaaacattgtccccaatgaatatactcattagaattaccatttgttaatatcactcattaattaaccccataattagatccattaatttaaatgatttaaatttaagtaaggtttataaggg

SEQ ID NO: 33606 - DNA, 404 bp, Homo sapiens
ggagcacattctgcgcttggcctcttgggctctggaaagagacaacaaccctgcccttttgctttctaagaacttgatctacttccaactgcaccgggccctgaagacgattgtggatcccgaggaaccacatggcgaaataaagattctgggggacctcaatgcctggaccaagagggcccaagcctttggcaagattggggcaaaacgtgctggcactaactcaacaggccctgcacccatggaccctgctagagccccagggcccctgagcaagcatggctctggcatctccctgcccatggaggtgcatgaaaggtctggctttttgtcaggagatgattcctactgaagtgctgatccccatgtggcacgagtgaaacgtgcccgctcatgctaagacg

SEQ ID NO: 33607 - DNA, 473 bp, Homo sapiens
  misc_feature (1)...(473): n = A,T,C or G
agggagggggccngncctgaaaccatgattaacgttatgaccatcattacgccaatcttggcacgaggggagaaacaagagttgaaataaaagaatctgttcgtggccaagatattttcattatacagacaatacccagagatgtgaatacagctgtgatggagttgctcatcatggcttacgcactgaagactgcctgtgccaggaacattattggggtcatcccctacttcccctacagcaagcagagcaagatgaggaagaggggttccattgtgtgcaagctgctagcatccatgctggcgaaagcaggtttaactcacattatcactatggatcttcatcaaaaggaaatacaaggctttttcagctttcctgtggacaaccttagagcctcacctttcctgcttcagtatatccaggaagaaattccaaattacagaaatgcagtcattgtagctaagtctcctgat

SEQ ID NO: 33608 - DNA, 400 bp, Homo sapiens
ggattttggaggcagggctgggaagggagcgctctcttgattctgggatttctccctctcagtggagccttattaatatccaagacttagagctgggaatctttttgatacctgtagtggaactaaaattctgtcaggggtttcttcaagagctgagaaacattattagcacttcccgccccagggcactacataattgctgttctgctgaatcaaatctcttccacatgggtgcatttgtagctctggacctgtctctacctaaggacaagacactgaggagatactgaacattttgcaaaacttatcacgcctacttaagagtgctgtgtaacccccagttcaagacttatctcctgttgtcatgacggggacagagtgagggaatggtagttaaggg

SEQ ID NO: 33609 - DNA, 487 bp, Homo sapiens
  misc_feature (1)...(487): n = A,T,C or G
agaggcnnnnnnaattgaaactgagagcagtnagcaccatgcntacgccaagcttgccacgaggcacgcatgtacagtggaatattatccagcttaaaaagtaggaagttctaaaaaatcccaaacccactccaccctactaccagacaaccttagccaaaccatttacccaaataaagtataggcgatagaaattgaaacctggcgcaatagatatagtaccgcaagggaaagatgaaaaattataaccaagcataatatagcaaggactaacccctataccttctgcataatgaattaactagaaataactttgcaaggagagccaaagctaagacccccgaaaccagacgagctacctaagaacagctaaaagagcacacccgtctatgtagcaaaatagtgggaagatttataggtagaggcgacaaacctaccgagcctggtgatagctggttgtccaagatagaatcttagttcaacttta

SEQ ID NO: 33610 - DNA, 411 bp, Homo sapiens
  misc_feature (1)...(411): n = A,T,C or G
ggaaggatgctagggaattcctataggcaccaaacagaaggaaagctaggggcttggactactgggtataggacttgctctagctctcaggtcctagcccaagctcaatgcaaacacagcccctccgggctctctgtttctgtgaggttctggaatcccttcctctgtgtccgtgagtctgacagaatcgatgatgttcccttagagctgggaaatccatgtgtttattcacggagggaactcaccattacctcccttgtcttctttgcctgccttggagaaatccagagtcttcggaatggcaaaggcagctcctggatttccctggaggggaggcactagctgagggaagtagctcccttcattcatgatgcacagtttacgcagcagacacacaactgcgcctactan

SEQ ID NO: 33611 - DNA, 401 bp, Homo sapiens
gggcatcgttaaagtctctcttcaccctgccggcatgtctaagtcagagtctcctaaagagcccgaacagctgaagaagctcttcattggagggttgagctttgaaacaactgatgagagcctgaggagccattttgagcaatggggaacgctcacggactgtgtggtaatgagagatccaaacaccaagcgctccaggggctttgggtttgtcacatatgccactgtggaggaggtggatgcagctatgaatgcaaggccacacaaggtggatggaagagttgtggaaccaaagagagctgtctccagagaagattctcaaagaccaggtgcccacttaactgtgaaaaagatatttgttggtggcattaaagaagacactgaagaacatcacctaagag

SEQ ID NO: 33612 - DNA, 460 bp, Homo sapiens
atgggccctaatgaaagctttgtgaaccttattacgccacgcttggcacgagggagttgtggaaccaaagagagctgtctccagagaagattctcattgaccaggtgcccacttaactgtgaaaaagatatttgttggtggcattaaagaagacactgaagaacatcacctaagagattattttgaacagtatggaaaaattgaagtgattgaaatcatgactgaccgaggcagtggcaagaaaaggggctttgcctttgtaacctttgacgaccatgactccgtggataagattgtcattcagaaataccatactgtgaatggccacaactgtgaagctagaaaagccctgtcaaagcaagagatggctagtgcttcatccagccaaagaggtcgaagaggctctggaaactttggaggtgtgcgtggaggtggcttcggtgggaatgacaacttcggg

SEQ ID NO: 33613 - DNA, 472 bp, Homo sapiens
  misc_feature (1)...(472): n = A,T,C or G
agagaaaattgaaacctnctgatnaccgttaggaacancagnacgccaagcttggcacgagggaggtgtggaaccaaagagagctggctccagattagattctcatttaccaggtgcccacttaactgtgaaaaagatatttgttggtggcattaaagaagacactgaataacatcacctaagagattattttgaacagtatggaaaaattgaagtgattgaaatcatgactgaccgaggcagtggcaagaaaaggggctttgcctttgtaacctttgacgaccatgactccgtggataagattgtcattcagaaataccatactgtgaatggccacaactgtgaagctagaaaagccctgtcaaagcaagagatggctagtgcttcatccagccaaagaggtcgaagtggttctggaaactttggtggtggtcgtggaggaggtttcggtgggaatgacaacttcggtcgt

SEQ ID NO: 33614 - DNA, 453 bp, Homo sapiens
gtactcccctgataacgttgtagatgacatctccagcttggcacgaggattgcctatgctgttagcagatacagaactacgtttgctctgtatgatggggtgttgaagggtgggtgtaaatatcccatgtgctcacatttagaatctatccctattttttttttttttttggaaagggatttttgctttgccccccaggttggagggcagggggccaatctcggttaattgaaagttccccctccaaggttaccgcatttttctggcttaaccctccaaggaaactgggattacaggcccccccccccatgccgggatatttttttgtttttttaaaaaaaacggggtttcaccgggttaacaaggagggtcgcgatctcctgacctggggatctgccaacctgggccccccaaaggggtgggattacaggggtgagcccccgcccccagcct

SEQ ID NO: 33615 - DNA, 409 bp, Homo sapiens
ggggatgatgacaccattctaatcccaattatagttggtgctggtctttcaggcttgattatcgttatagtgattgcttacgtaattggcagaagaaaaagttatgctggatatcagactctgtaacactaatcaatacgtgatctctgttacaaaagaaaaaagcaagtacaagttccaacatgcaatactggtcaacttaaggtatatttagttgcagtccagctctttagaatgggtggtatgggggatttcaaacttaaacaaaaaactatcaactacaaattagttgcctgactttggtttttccaaccaaggaatttaaaactgttatttttacagcaaaagatgtgcaaaatcactggattataagttctattttactgtcttgaattagtatttcagtgtt

SEQ ID NO: 33616 - DNA, 458 bp, Homo sapiens
  misc_feature (1)...(458): n = A,T,C or G
agcgccnccactgaaacctttgtgaccctcattacgccacgcttggcacgagggggaggaaaagtactgaaatacagtttatgaagcaagagtgtctcgggctgtgcttgtcccacgagccccagcagcatctgaactgaggcttcttcagtcctgcaggaacaggatcatctgtctcagcggtgggcagaagttttcatagacagccagggaggaaacactgttggctctgtgggctgtatggcctctgccataaatagtacagagatgtggctgtgtctagtacaacttttagacacagaaatctgaatgacatatattgttctgtgtcaagaaacttacattttttttttaactatttaaaaacgggaaacctatttttaactcacaggccatggagaagttggtggggaccagacccagctccttatctggctgggctggggagggggtaccgn

SEQ ID NO: 33617 - DNA, 482 bp, Homo sapiens
acgaacgactggataaccgcttgattcacccatacgaccagcttggcacgaggcgctgaagtgacactctcttctcctgttctgatgactctaaatcttttgcctctttcagcattaatgggggagtcaacattgcagacctgagaaagggttctagaatggtaacccaatgttctttagaactggagaattccattttccttttctggctttagtggtaatggctgggaagggaggctcatgataagaaaataaaaatgagaaaagaagatctagttcataaaatgactataccccacgtaagtttgtaactgcacagtgttttgttgtacggctcacaaatgagcaagtgttagtattattaggcacacatcacgttcacagcttcgcgcagagacggatagtggatttggatatatggaagtcatccaaatgcgttgctagaatatcaggcctatgtttgttctggtagaaccacagag

SEQ ID NO: 33618 - DNA, 428 bp, Homo sapiens
gggcgggcgccatcttaattatgtccctcagaaggggcatccccccttctttgatcagcagagggcagtacttgtccgggtagacagacacgaggttatacagggcccaggttgcccagtgctggctgacaggagagattccctggggaaggaggcggagaattggttcaaatgacctgtaattgatgtttctccgagagtttatgtcccagctctggatggcagcccacatgcgttcctccacctcctcacgctggggctcacagacgccccaggcctcgggtccatcaaacatgatgtgggagaggacgccgcaggcattgtaggaaacctcgatcccatcggccttgctctccaacaggttgctgaagacgctgatgaactgggaagtcattatttgaggcctcagctccttcacttctgccacc

SEQ ID NO: 33619 - DNA, 416 bp, Homo sapiens
gcagctggttcaggtcaaggaggccgagcggcaccacagtagtccaaagagagagctcccgcccgggatcggggacatggtggagctcatgggcgtccaggatcaacatatggacgagcgagatgtgaggcgatttcaactaaaaattgctgaactgaattcagtgatacggaagctggaagacagaaatacgctgttggcagatgagaggaatgaactgctgaaacgctcacgagagaccgaggttcagctgaagcccctggtggagaagaacaagcggatgaacaagaagaatgaggatctgttgcagagtatccagaggatggaggagaaaatcaagaacctcacgcgggaaaacgtggaaatgaaagaaaagctgtcagcgcaggcgtctctgaagcggcatacctccttga

SEQ ID NO: 33620 - DNA, 425 bp, Homo sapiens
cgagggcacgcccctgacctcccagcggttctggaaggccactcctaacccttcaaaccatagcaaggaaggttagagctatctttgtgttaggatcaaaactcgagaaggttctgtttgctaaccactgaaggaagcccacggcctgtctttagggcttctgtcaggagaggacaatggacatagacaactagatactgcaggagggctctggttttctcagacaggatcctaggatgtgtctggaagcctgcggagtgaaggtagacatgcaggtgtgatgttctgcctgatagtgcctctctccaggcattaactacaaggctgggtgggggcttacggtaaggcatcgagtccctaagcatttatacagtcccaattgtgcatcagtgcagtgctggttataacagggaagaatttgtgga

SEQ ID NO: 33621 - DNA, 420 bp, Homo sapiens
ggcactcacttggattattgcaataatttcctaactgggttccatgtttccagcttttctgtctgcagtctgttttgttttcaacatgtggccagagggatcctgttaacatctaagtgaaatatatcatttctctgcagtggctccctagctgctcagagtaaaatctaatgtttttacaatggcctgaaaggctctccataaccttatcccctcccacttacctccctgtctcctctcctccctccgacactcagcccctgtgtattttagctattgaaagaatatgtgggcacactgctaatttattgtctttgtggaggcttggtttgtgcattccttatttcaaacacttatgggtggactctggtaatgggcagtcatatttatgagtccccctccaagtgaggagatgtacta

SEQ ID NO: 33622 - DNA, 426 bp, Homo sapiens
ggaacagaaacgtaagaagaagaaaatgccagagatcttggtgagtgagaggcaggggtttttctctgccgtgtgctctgggagacgtgcagggctggggctctggctcttttgggggataggcagcacctgcagggtgtgggtgagatgctccagccaccatgttcccttctcactcacctgctcctcatttctcttccctcagaaaacggagctggatgagtgggctgcggccatgaatgccgagtttgaagctgctgagcagtttgatctcctggttgaatgagatgcagtggggggtgcacctggccagactctccctcctgtcctgtacatagccacctccctgtggagaggacacttagggtcccctcccctggtcttgttacctgtgtgtgtgctggtgctgcgcatgaggactgtctg

SEQ ID NO: 33623 - DNA, 456 bp, Homo sapiens
  misc_feature (1)...(456): n = A,T,C or G
ganaggggcccggggggctcnccactgagngacctccgttgactcgcntacgccaagcttggcacgagggttttttaatttttaacctgattttctgatgtcatgatctatatgaggggtagtgggggatggaagagagtaccaggtggtccaccgttggggagtggggccgtccgcctgctctctactgtgcagacctcctaactgagtttacacacgcttgtgtttgcaacactaggtctggatgggaggtgaggggtgtgcgtatggctgccatgccagtgtctgtgcacatccctgtctgttggtctccatggccactgtggactgggacccttgggggaagcctgcccatgtcgggctgtgggaggctgatcaatgcgtgtgagagtggcttcccttctgcctgactccccactccctgacctgccccttccttgtttttcctcctactgg

SEQ ID NO: 33624 - DNA, 364 bp, Homo sapiens
  misc_feature (1)...(364): n = A,T,C or G
actcgtgtcccaattccaaaattcaatgcacaagttgaacttgggctgaacgtggcgtgttgagatttgcaatgaggtttctaagagccgtgttcttcatggaattttccaggccacttggcagcttggtttaccgatggatgggctagagatcttggcgtttcttggaagtcacagggaagattgaagagaacgcttgagcatccttggcaacagcccaagtgggacctggatgaagctttgcactcaagtattgtcaagggaagcttcctgtgaaccaaagctctcaggccaaggtctcgcccaccaaagccagaaagtgcaagcacccgtctacccagctctaacttgtatgtgcgagacn

SEQ ID NO: 33625 - DNA, 452 bp, Homo sapiens
ggcctcgtgccaagcttggcacgaggcgtgaaaatacaatgtgtgtcaacaccccgggttcttttatgtgcatctgcaaaactggatacatcagaattgatgattattcatgtacagaacatgatgagtgtatcacaaatcagcacaactgtgatgaaaatgctttatgcttcaacactgttggaggacacaactgtgtttgcaagccgggctatacagggaatggaacgacatgcaaagcattttgcaaagatggctgtaggaatggaggagcctgtattgccgctaatgtgtgtgcctgcccacaaggcttcactggacccagctgtgaaacggacattgatgaatgctctgatggttttgttcaatgtgacagtcgtgctaattgcattaacctgcctggatggtaccactgtgagtgcagagatggctaccatgacaatgggatgttg

SEQ ID NO: 33626 - DNA, 564 bp, Homo sapiens
  misc_feature (1)...(564): n = A,T,C or G
caaaactattgatacttaaccgactcagagatatacttggtgtgttatgactacacgcnnnnnnnnnccgggntttganaccattgatgacgtctgaccagcanacgccagcttgggcgaggggacccagggcctttggcttccccagctcatccttggtccttccgtttcaccagcctggnctgaggcgtgctctgtccttagagaaggcgcgggggccgggttcccttcccctagggcacattactaagggggtcaggcactgcatgctcgttccagcaccatctgggactgggtacagtacctccagccccagggccctgacctgcgcacctagcttgacatctcacgcacctcccagagctggcgccactgagtaatccggacctcaccacctcttttcctttgagcccaaggcagagctggagctggcgccacccatacagcgtcaggtgtggctggggtaggtttggaggtctgccagttacgccaagtcccctctgagattcgatcaggggactggatagaatctttcangtactcaattcagaagctggaggtggn

SEQ ID NO: 33627 - DNA, 451 bp, Homo sapiens
  misc_feature (1)...(451): n = A,T,C or G
ggagcatgttactgtatgaaatactgtaggcaattgttatacaatggtttgtatttgttcatctaaacatagaaaaggtacaggaaaaatacaggattataatcttatgggaccatcattgcataataatcttataatgagatcaccggtgtataataatagtcttatacagtataataatcttaaaagtgatctgttcacttacaagatctgttcaacaacagatcacttataagattggtatactggatttttgcttgtaccttttgcatgcatggtagagatattggctatttctgtgtaataagacattcgataactcaggagcttaaaacatttattatagttacaatataatgtacgagttattatggtattatatattattatgttattgttatagctctggaacctggnggttggctgtaggcctgctgatctttgctggact

SEQ ID NO: 33628 - DNA, 453 bp, Homo sapiens
ggggaagctgaggtacgagaatcacttgaacccaggaggtggaggttgcagtgagctgagattgtgccactgcactgcagcctgggcaacagagcaagactctaaaaaaaaaatggtttatcaatatttactattgaaatatttgtccaggtaactttacacttacaatgaattcatggattttgttagcagcattggctttctcaaaaggacaaactcaatatcgttataaaatataattcgtgatcacaaattatacaaaaatcagtagaaacagttttttatgttcagattaaaaaaaaaaacttgggataattttaaatttacagaaaagttgcaaagatacatggagagcttttgtgaccactcacccagttcccccagggttaaccttttatttaaccatgaagcatttgtcaaaagctaagtaaccagcaatggcaattactattg

SEQ ID NO: 33629 - DNA, 91 bp, Homo sapiens
ggcacgagctggacttggacgacgagagcctgcgaaagtacaaggatgccctgctgggcctcgtggtcgttttcgcagaccccaacgttcc

SEQ ID NO: 33630 - DNA, 407 bp, Homo sapiens
ggggctttaggagtggagcacgtttctgcgaacgttaacccagagcacagcgccaaggcctgtcttccctttattgggtagagttcttgatggctccaaggtgacttctggtgacagccagatcgtccctcgagtccccagcgagaaagaaagcatttagccattcttacagaggagaaattaaccctgtaatgtgtttctattttagatgagtgtttcctaatacaagcaacattaacatcttcagaaaaggaagcaggcatggtcctggaaaattggggaatgacgggccaatctgtgtttcctaaggtcctgaagaatctggcaaagagtcctgtgggttgtttatacctgggtggccagggcctccctctctgttaccaaagtccaggctggcgaattgtctc

SEQ ID NO: 33631 - DNA, 91 bp, Homo sapiens
ggcaggagctggacaaggacgacgagagcctgcgaaagtacaaggaggccctgctgggccgcgtggccgtttccgcaaaccccaacgtccc

SEQ ID NO: 33632 - DNA, 91 bp, Homo sapiens
ggcaggagctggacaaggacgacgagagcctgcgaaagtacaaggaggcccttctgggccgcgtggccgttttcgcagaccccaacgtccc

SEQ ID NO: 33633 - DNA, 430 bp, Homo sapiens
ggcgcttaagttacactctcttctcctgttctgatgactctaaatcttcagcctctcccagcattaatgtgtgagtcaacattgcagacctgagaaaggtttctagaatggtaacccaatgttctttagaactggagaattccattttccttttctggctttagtgttaatgtctgggaagggaggctcatgataagaaaataaaaatgagaaaagaagatctagttcataaaatgactataccccacgtaagtttgtaactgcacagtgttttgttgtacggctcagaaatgagcaagtgttagtattattaggcacacatcacgttcacagcttcgcgcagagacggatagtgtatttggatatatggaagtcatccaaatgcgttgctagaatatcaggcctatgtttgttctggtagaaccacaga

SEQ ID NO: 33634 - DNA, 423 bp, Homo sapiens
ggagattctgataaagatcattcctttctgacaaacgatgagctcgctgtactccctgtcgtcaaagtgcttccctctggtaaatacacgggtgccaacttaaaatcagtcattcgagtcctgcggggtttgctagatcaaggaattccttctaaggagctggagaatcttcaagaattaaaacctttggatcagtgtctaattgggcaaactaaggaaaacagaaggaagaacagatataaaaatatacttccctatgatgctacaagagtgcctcttggagatgaaggtggctatatcaatgccagcttcattaagataccagttgggaaagaagagttcgtttacattgcctgccaaggaccactgcctacaactgttggagacttctggcagatgatttgggagcaaaaatccacagtg

SEQ ID NO: 33635 - DNA, 436 bp, Homo sapiens
  misc_feature (1)...(436): n = A,T,C or G
gagcgagggccngcgctgaaaaccgtaggacactagtacgcccgcttggcacgaggcctgttctagcagtgaagcctggtttgccaggcacggggctgggaagcaagcagtctgggtctggagggtggccccaaaaaggccaactctgcagctccacagccacatgggggaggctgccacaggtcacactccttatccggatcccctcctgaagaaaagcatctgagctgaccagcgagactgcagtggggcagacactattaaatttgctggcacagctctgagtaccccctcgcttacaccctgacttcatcccgcaatagctctcagacctcccagcccctgcagggccacgtntttctctattgccggtcaacaggggtgtgcacaaagcccctaaggtgtcatgtgtacacaccggcgctaaatgtttttt

SEQ ID NO: 33636 - DNA, 429 bp, Homo sapiens
ggctgcgagccaggattcccgatccagagacaatggccccgatgggatggagcccgaaggcgtcatcgagagtaactggaatgagattgttgacagctttgatgacatgaacctctcggagtcccttctccgtggcatctacgcctatggttttgagaagccctctgccatccagcagcgagccattctaccttgtatcaagggttatgatgtgattgctcaagcccaacgtcgggactggaaaacaccacatttgccatatcgattctgcagcagattgaattagatctaaaagccacccaggccttggtcctagcacccactcgagaattggctcaacagatacagaaggtggtcatggcactaggagactacatgggcgcctcctgtcacgcctgtatcgggggcaccaacgtgcgtgctgaggta

SEQ ID NO: 33637 - DNA, 384 bp, Homo sapiens
ggcagccattgatgaagatcgcactggcacctaccgccaggtcttgcaccctgagcaacttatcacaggcaaggaagatgctgccaataactatgcccgagggcactacaccattggcaaggagaacattgacctcggggtggaccgaattcgcaagctggccgaccagagcacgggtctccaaggcttcttgggtttccatagctttggtgggggaactggttatgggttcacctccctgctcatggaacgtctctcagctgattatggcaagaagtccaagctggagttctttatttacccggcgccccacgttttcacagatgtagatgagccctacaacttcatgcttaccacccacaccaccctggagcactctgattg

SEQ ID NO: 33638 - DNA, 383 bp, Homo sapiens
gggtagcatcttcccttcagactctctgaatgtctactccctgctccatggctttgccagcttcctgtctgtaaagggtataatgactcatcaaccctgaaggacagtcagtcttccaaaagccatgaactgaatgctttatatcctaatttaaatatagagtttccagaaggtgagcatgcaggtttggtttggttttttttctgactcccaaaactgtgttttttccagatatggctggaagcagaagcttcatggaacatccatgaacgtcctcctggtaattagcataatggatgcccatgtaccgcatccataaccttaaggggagaaaaatgcatggtttacagcctttgccaaccctggtggctctaattctacca

SEQ ID NO: 33639 - DNA, 448 bp, Homo sapiens
  misc_feature (1)...(448): n = A,T,C or G
gggagggcggggtttccatgatnactgatgtccctcattacgccaagcttggcacgaggcagccattgatgaagttcgcactggcacctaccgccagctcttccaccctgagcaacttatcacaggcaaggaagatgctgccaataactatgcccgagggcactacaccattggcaaggagatcattgacctcgtgttggaccgaattcgcaagctggccgaccagtgcacgggtctccagaggcttcttggttttccatagctttggtgggggaactggttctgggttcacctccctgctcatggaacgtctctcagttgattatggcaagaagtccaagctggagttctctatttacccggcgccccaggttttcacagctgtagttgagccctacaacttcattctcaccacccacaccaccctggagcactctgattgtgcctt

SEQ ID NO: 33640 - DNA, 385 bp, Homo sapiens
ggcagtcattgatgaagttcgcactggcacctaccgtcagctcttccaccctgagcaacttatcacaggcaaggaggatgctgccaataactatgcccgagggcactacaccattggcaaggagatcattgacctcgtgttggaccgaattcccaagctggccgaccagtgcacgggtctccaaggcttcttggttttccatagctttggagggggaactgggtctgggttcacctccctgctcatggaacgtctctcagttgattatggcaagaagtccaagctggagttctatatttacccggagccccatgtttgcacagctgtagttgagccctacaacttcattctcaccacccacaccaacctggagcactctgattgt

SEQ ID NO: 33641 - DNA, 481 bp, Homo sapiens
  misc_feature (1)...(481): n = A,T,C or G
agtggttnnnnncctgagactggnacactagcacccgccttcgcgatgctaggcacgaggggaccttgtctgaacataaagaatgcaaaatgtgagcttaaaaaagacactctgaaatccagtcaacgtgcctcactagacttttcgatttcaagattttctgcacaaaatgttttgaaaactttgaatacttaaaaatggcaggtgtagtattgcactttgctagttgctcacatacccttttttatttgtatagatattctgagttcctttttttttctacatgttgtacgttgtcgaaagctaaaaggaaacttatccttggatcacggaaggcagaggcatttggtgagatggaaacaaggatgtgtaaaaatgagacgaccacctctcggattaaaaaaaaaaagtgccagagttctagggttctaattgatgtccaggaaggaggaggaataatatttatggagcatatattatg

SEQ ID NO: 33642 - DNA, 455 bp, Homo sapiens
  misc_feature (1)...(455): n = A,T,C or G
ggtnagaggcggggggcttttncctgagaactgatgttcntacgaanacnccaagcttggcacgaggcagccattgatgaagttcgcactggcacctaccgccagctcttccaccctgagcaacttatcacaggcaaggaagatgctgccaataactatgcccgagggcactacaccattggcaaggagatcattgacctcgtgttggaccgaattcgcaagctggccgaccagtgcacgggtctccaaggcttcttggttttccatagctttggtgggggaactggttctgggttcacctccctgctcatggaacgtctctcagttgattatggcaagaagtccaagctggagttctctatttacccggagccccaggttttcacagatgtagttgagccctacaacttcattctcaccacccacaccaccctggagcactctgattgtgcctt

SEQ ID NO: 33643 - DNA, 456 bp, Homo sapiens
  misc_feature (1)...(456): n = A,T,C or G
gcnnagggcggggcgcttttnccttgagnactgatgtccctccgaatacgcccagcttgtctcgaggcgtgggcgatgtaaatgggtaggatggctggactgcagtctgacttcacgttgaatcattctggatggggcctttttctgattttacctcataaagctactattgtagaaacttggctttgctcctgtgacgaagccagacagaggaatggcttttgggaccagagtgagtcaagcatgtatgtgtatgtcacacggccaaatttgagggcattctcacatgtgctcttctctcaaaaccactggggttgacagatccaggaggctaaaaaaaagtgacctctataattctttaaaggggctatttttagaatattggataatttattcacagtatatctaaaacagaattaaggacaattaaaatatcttatgtgacagcctttatgn

SEQ ID NO: 33644 - DNA, 454 bp, Homo sapiens
  misc_feature (1)...(454): n = A,T,C or G
naataagacatcgctagaccngcntacgccaagcttggcacgaggcagtcattgatgaagttcgcactggcacctaccgccagctcttccaccctgagcaacttatcacaggcaaggaagatgctgccaataactatgcccgagggcactacaccattggcaaggagatcattgacctcgtgttggaccgaattcgcaagctggccgaccagtgcacgggtctccagggcttcttggttttccataactttggtgggggaactggttctgggttcacctccctgctcatggaacgtctctcagttgattatggcaagaagtccaagctggagttctctatttacccggcgccccaggtttccacagctgtagttgagccctacaacttcattcttaccacccacaccaccctggagcactctgattgtgccttcatggtagacaatgaggccat

SEQ ID NO: 33645 - DNA, 444 bp, Homo sapiens
  misc_feature (1)...(444): n = A,T,C or G
gggaggggggggggtgncctgaaactgtacatccaaacgccagcttgtacgagggaaagcccaggacacgttcctttcacgttggatgctggccctgaggactcgtgcccatcagcacaggagccaaggctgagcgtccaggtcacctccacgcccgtgatcgtgatgcgcggggctgctggcctgcagcgggagatccaggagggtgcctactccgggagctgctaccatcgagatggcttacggctgagtatacagtttgaggggaggcgggtggagcttcagggccccacacctttgttctgctgctggctggtgaaagacctcctccacagccaacgcgactcatccgccaggacccgcctgttccttgccagcctgcccggctccacccactctaccgctgctgagctcaccggacccagcctggtggaagtgctcaag

SEQ ID NO: 33646 - DNA, 365 bp, Homo sapiens
  misc_feature (1)...(365): n = A,T,C or G
ttttctgatgacatcgtaagtacaccatcccaaccncgaacgagggacaagatctggccaaagctgcgggtgctggctcgctcctcttcaacggacaagcttaccctgggtaaaggcaggatcgacagctcagacactgagcagcggcagggggtggccgtgacgggggacgggaccaacgacgggcctgcactcaagaaggccgacgtgggcttcgccatgggcatcgcaggcactgacgtggccaaggaggcctcagacatcatcctgacagacgacaatttcagcagcatcgtcaaggcagtgatgtggggccgcaacgtctatgacagcatctccaaattcttgcagttccagctcaccgt

SEQ ID NO: 33647 - DNA, 437 bp, Homo sapiens
  misc_feature (1)...(437): n = A,T,C or G
nnctgaggtactagctggaccncanacgcaagcttggacgaggggatttgagccgccgcattttttaaccctagatctcgaattgcatcgtgattcctgtccattggactgtaagggggatgtaggcaatcttggaagcaatggcaacaagacggaattggaacgggcttttggctactatggaccactccgaagtgtgtgggttgatataaacccacccggctttgcttttgttgaatttgaagatccccgagatgcaaatgatgcagtccgagagctaaatggaaaaacactatgtggctgccgtgcaagagtggaactgtcgaatggtgaaaaaagaagtttaattcgtggcccacctccctcttggggtcgtcgccctcgagatgattattcgaggaggagtgctccacctcgccgcatatctccaagataga

SEQ ID NO: 33648 - DNA, 488 bp, Homo sapiens
  misc_feature (1)...(488): n = A,T,C or G
gtgccgggggnntnnncctganacgttggatatctactgatcactctnggcacgacgggggacagatcacaggccaacccatgatggcaggaggctaatcttgagggcctttgtgtcaccatggctatggaaaggcctggctacttataacttgatgttcttaactgtgggttgtgcctacccagtgctatagaaactggaatgtgattgggcttcttagtcactggcccagaccagagctgaccccctttccatgctctgggtcactggggcatgtggcccagaggaaaaagctttcccttagtgctagccgaatttctgtaacctgtttattttctttccaaggttcccaaaaatagtggtagcagaaaagtaacagcagagaaaatgcccagtcccaccctacaccagggctgagctgtcaggaacaggcacgatgcgtgaatatcccccactccaggagatctcgccattgtctgggttgcagn

SEQ ID NO: 33649 - DNA, 413 bp, Homo sapiens
gggctcgtttggtgcggacctggtacctcttttgtgaagcggcagctgaggagactccggcgctcgccatggccgacgaagagcccaaggaaggagtcaagactgagaacaacgatcatattaatttgaaggtggcggggcaggatgggtctgtggggcactttaagattaagaggcatacaccacttaataaactaatgaaagcctattgtgaacgacagggattgtcaatgaggcagatcacattccgatttgacgggcaaccaatcaatgaaacagacacacctgcacagttggaaatggaggatgaagatacaattgatgtgttccaacagcagacgggaggtgtctactgaaaagggaacctgcttctttactccagaactctgttctttaaagaccaagattacctg

SEQ ID NO: 33650 - DNA, 482 bp, Homo sapiens
  misc_feature (1)...(482): n = A,T,C or G
ctcgccacctgataccgcttggatangcactgatnactctcggcacgaccgcgctggaccagtgtgacaacgatatgttcgccgtggaccgagcctacatacactaagctgtggacaccccgccctgacccctccaatcccccgtctgaccccctcttcctcacatggggacgggggcctgggagttcattctggaccagcccacctatctccatttccttttatacagactttgagacttgccatcagcacagcacacagcagcacccttcccctgaggccggcggggaggggacaagtgtcagcaggattggcgtgtgggaaagctcttgaactgggcactggccccccggacgaagtggctgtgtgttnacacacacacacacacacacactcacacacacacactggctctcgacacaagataaaaactgcccaaaaactgctgcctggctttttttcttgcgagcgagacatatctg

SEQ ID NO: 33651 - DNA, 421 bp, Homo sapiens
ggaaatactctctgatacctgatgaggaagaggaaaaggaagaggcaaagtcagcagagtttgagaagcctgaccctacaaggaatccttctagaaaaagaaagaaggagaagaagaaaaagaaacatagagataggaagtcatctgactctgacagctcagactctgagagtgatacaggcaagagggcaaggcacacatcaaaagacagcaaggcagccaagaagaagaaaaagaagaagaagcacaagaagaagcacaaggagtgagagtataaagagtgtaggggggtgttgagagtaaaaaaccaggagccttgtgccttgagactcctggaaagactcaatagtgagaatatagcctcccaccccattaacttcgctcccatgggagatggcttcccctcatgcaacaggcaggg

SEQ ID NO: 33652 - DNA, 482 bp, Homo sapiens
ttcgcagttgggaccgtttgacatgaatagtccaatcttggcacgaggaaatactctctgatacctgatgaggaagaggaaaaggaagaggcaaagtcagcagagtttgagaagcctgaccctacaaggaatccttctagaaaaagaaagaaggagaagaagaaaaagaaacatagagataggaagtcatctgactctgacagctcagactctgagagtgatacaggcaagagggcaaggcacacatcaaaagacagcaaggcagctaagaagaagaaaaagaagaagaagcacaagaagaagcacaaggagtgagagtataaagagtgtaggggggtgttgagagtaaaaaaccaggagccttgtgccttgagactcctggaaagactcaatagtgagaatatagcctcccaccccattaacttcgctcccatgggagatggcttcccctcatgcaacaggcagggttgggagttagaggg

SEQ ID NO: 33653 - DNA, 417 bp, Homo sapiens
ggcctcgtgccacttacatcgaccgcctaagagtcgcgctgtaagaagcaacaacctctcctcttcgtgtccgccatcagctcggcagtcgcgaagcaacaaccatgcgtgagtgcatctccatccacgttggccaggctggtgtccaaattggcaatgcctgctgggagctctactgcctggaacacggcatccagcccgatggccagatgccaagtgacaagaccattgggggaggagatgattccttcaacaccttcttcagtgagacgggggctggcaagcatgtgccccgggcagtgtttggagacttggaacccacagtcattgatgaagttcgcactggcacctaccgccagctcttccaccctgagcaacttatcacaggcaaggaagatgctgccaataactatgccc

SEQ ID NO: 33654 - DNA, 368 bp, Homo sapiens
  misc_feature (1)...(368): n = A,T,C or G
ctgatcctccaaagacagcgctgtggtcatgtccggagcagagggaaaagcccaggtgctcagaaaggctcggtaatgagtcccaggtcatacggctagcgagcggcgggcctggggtttagacccacagctgcctcaagcaaacagggtatcacgcttgcccctgggcctgggtgggggccggaatgagaccacttgacagcccatagaggtgggtggtcaggccctgatgtcctggggatttcttgtcctcaatgccacccggccttccgtgtttcctgaaacccctcgccagattttggactctgaggtttttatctttcagacaatagctggtaggcaagacttctggcttctggttgctaacn

SEQ ID NO: 33655 - DNA, 433 bp, Homo sapiens
  misc_feature (1)...(433): n = A,T,C or G
gggcgggnnccnccctgaaaacctgatgacactattacgcccagcttggcacgagggtatccttagccaccccatcaagaacaccaacgacgccaactcctgccaaataatcatcccccagaaccaggtcaacaggaagtcagacatctacgtgtgcatgatctcctatgcacacaacgtggcggcccagggcaagtacatagctattgccagcactactgtggagaccacggaccctgaaaaggaggtggagccggctctggagctgttggagcccattgaccagaagtttgtggctatcagtgacttgtatgagcccattgatgatggttgtgagagccaggtgttctgttcctgctcctacgatgccaccacacactttgagacaacctgcaacgacatcaaagacatctacaaacgcatggctggcacg

SEQ ID NO: 33656 - DNA, 474 bp, Homo sapiens
cgttgtggacatgcttacgccaagcttggcacgagggttaatttcttgggaaatataaatcatcatagctagtcattctttcatcgtgggaagctaacagtcctgattgttcaggattataattatagtaaattctgaatttgtgacgtgtgaattttaaaaggttacaaaacaacttccagacaactgagtcataaagtttttgagagaagtatgtggcacacgtctaattcattgtcctttctctccagtggtatagttatgatattaacctaaattgcaaaaggaatcgttttagttgactgctgcttgaaattgtgtcacttttccaaatttaggtaatgtctgttacaaggagtatattttggaaacattaacttgactgatacttatttccctggttaagtgaccttcctgccatgtgctgagtgccaggacttacttgccctcagtaatttggaaggggatccttgg

SEQ ID NO: 33657 - DNA, 484 bp, Homo sapiens
  misc_feature (1)...(484): n = A,T,C or G
cctcggcaaactgannaccgttatgaccatgctactgaccacgcttggcacgacggtccttgtctgctttaaatcatctcacgtcttcccatacatgatgtggcccctacctacttgtccaacttggtgcctttatatcctctccctcatcacaaggctctttccagccacagtggcctttctcttcctgaaacacaccacaatcacttctgctacagggcctttcatttgctcttccttttgcaaggaatgttcttttccaagactttgacacacatggtcccttctctttagatgttactccaatgtcaccttctctgagagtccttccttgaccaatgtgaaatagcccccctcataatcacttttacatgattctctattattacaatagtcacaactctattaatatctggatttatttatgtcttggcgattttagaatttaaaagctctatccccaaagcctcccgtagtatacagn

SEQ ID NO: 33658 - DNA, 415 bp, Homo sapiens
  misc_feature (1)...(415): n = A,T,C or G
ggtggcacgaggctgtcctctggctactgaactccatggagccacgttcatgctccctcttctactggcctggctgctcctccctcaatgaggagaggcagctggctcaaagaggtgggacagacacatgctgtcatcagttaagtgagctcttttccagaagtatctcagataatgttgggttaagacagatagatgttgaaaatggtggagatcattacacattagcataaaacaggacaggaagagattttttgaaagaccaaattagttgagcaagtaatacttttcaagttactcctggaaggtgtttttaaggaagtgtgttacctaccatactctcctaatttgacatttctgtgtcctgaggagttacatttattgtctaacccttgccataaggctgtggtntgag

SEQ ID NO: 33659 - DNA, 429 bp, Homo sapiens
  misc_feature (1)...(429): n = A,T,C or G
gagagaggcccgcctgannaccatttaactgcgtaacccgatacgccagcttggccgaggataaaatcaaggacatacttgtccttttagccttttaaaaattccaaaacgtttagtccaagggaactttttatgctatcaggaaagggtcttgctgtttttgattctgattatcacagccaagtactttggtgtatttctccctaattaataactacattccatgaggcctcttccaaccaaagaggccttttcttccaggagagtcccgcaggaaatgctggtatgatgggcaccattggtttagtaaactacatgcaagaagaagtccttggggccagtctgccaactgagtcctggttttggatgaagagttaatgagatattgggccaagctcaatgcttgagttttaatgctaagaggttacg

SEQ ID NO: 33660 - DNA, 432 bp, Homo sapiens
  misc_feature (1)...(432): n = A,T,C or G
gagagggnccgcactgggctatgtgtctctcgtaacccgattacgccaagcttggcacgaggggcttggcaagacacaacacttacctccaggaatgtacaggccagcgggagcccacgtatcagctcaacatccacgacatcaaactgctcttcctgcgcttcgccatggagcagtcgttcagcgcagacactggcgggggcggccgggagagcaacatccacctgatcccggacatcattcacactgtgctttacgtcctgaacacaacccgagcaacttcccgagaagagaagaacctccaaggctttctggaacagcccaaggagaagtgggtggagagtgcctttgaagtggacgggccctactatttcacagtcttggcccttcacatcctgccccctgagcagtggagagccacacgtgtggaaa

SEQ ID NO: 33661 - DNA, 433 bp, Homo sapiens
  misc_feature (1)...(433): n = A,T,C or G
gagcggggccngcatgaaaacatgatgacactattacgcccagcttggcacgaggtgcttggcaagacacaacacttacctccaggaatgtacaggccagcgggagcccacgtatcagctcaacatccacgacatcaaactgctcttcctgcgcttcgccatggagcagtcgttcagcgcaaacactggcgggggcggccgggagagcaacatccacctgatcccgtacatcattcacactgtgctttacgtcctgaacacaacccgagcaacttcccgagaagagaagaacctccaaggctttctggaacagcccaaggagaaatgggtggagagtgcctttgaagtggacgggccctactatttcacagtcttggcccttcacatcctgccccctgagcagtggagagccacacgtgtggaaatcttgcgg

SEQ ID NO: 33662 - DNA, 467 bp, Homo sapiens
  misc_feature (1)...(467): n = A,T,C or G
aggccgaggccgccctaaaggcatagannatctncacggccagcctggcncgaggagctgaagaaggcggggggagccaattacgacgcccaaacagacttaccccaggccccgccacaccaccccttgccaaaggcatctgcctgctccccgggggagaggaccgacggcctcatctactatcccaccagcccaccagggagaagagaagccatgagaggcagcgcccgccaccctgtgtccacagcccccaccttcccgctttccttagaaccctgccgcgtcctatctcatgacgctcatggaacctctttctttgatcttctttttcttttctccccctcttttttggtctaaagaaaagtcattttgatgcaaggtcctgcctgccatcagatccgaggtgcctcctgcagtgaccccttttcctggcatttctctttcacgcgacgaggtctgcctagaga

SEQ ID NO: 33663 - DNA, 393 bp, Homo sapiens
  misc_feature (1)...(393): n = A,T,C or G
gagaggncccccctganacatgagattcgtacccgatacccactggccgagggctgcagaacaacacttacctccaggaatgacaggccacgggagcccacgatagctcaacatccacgaatcaactgctcttcctgcgcttcgccatggagcagtcgncagcgcaaacactggcgggggcggcgggagagcaacatccacctgatcccgacatcattcacactgtgcttacgcctgaacacaacccgagcaacttccnagaagagaagaacctccaggctttctggaacagcccaagagaagtgggtggagaggcctttgaagggacagccctactatttacagtcttggccttacatcctgcccctgacagtggaagcccacgtgtggaat

SEQ ID NO: 33664 - DNA, 441 bp, Homo sapiens
  misc_feature (1)...(441): n = A,T,C or G
ngagaggcgnccncgcattgatnaccattgatgaccctattacgcccagcttggcacgaggtgcttggcaagacacaacacttacctccaggaatgtacaggccagcgggagcccacgtatcagctcaacatccacgacatcaaactgctcttcctgcgcttcgccatggagcagtcgttcagcgcaaacactggcgggggcggccgggagagcaacatccacctgatcccgtacatcattcacactgtgctttacgtcctgaacacaacccgagcaacttcccgagaagagaagaacctccaaggctttctggaacagcccaaggagaaatgggtggagagtgcctttgaaatggacgggccctactatttcacagtcttggcccttcacatcctgccccctgagcagtggagagccacacgtgtggaaatcttgcggag

SEQ ID NO: 33665 - DNA, 374 bp, Homo sapiens
ggtgcttggcaagacacaacacttacctccaggaatgtacaggccagcgggagcccacgtatcagctcaacatccacgacatcaaactgctcttcctgcgcttcgccatggagcagtcgttcagcgcaaacactggcgggggcggccgggagagcaacatccacctgatcccgtacatcattcacactgtgctttacgtcctgaacacaacccgagcaacttcccgagaagagaagaacctccaaggctttctggaacagcccaaggagaaatgggtggagagtgcctttgaagtggacgggccctactatttcacagtcttggcccttcacatcctgccccctgagcagtggagagccacacgtgtggaaatc

SEQ ID NO: 33666 - DNA, 417 bp, Homo sapiens
gggctctcatcactccgttcatcgcccaggtgaagctggaatcctctgtgtacctgactctggcagtttacaggggctgctgcctcctggctgccctggcctcctgctttttgcccattgagaccaaaggccgaggactgcaggagtccagccaccgggagtggggccaggagatggtcggccgaggaatgcacggtgcaggtgttaccaggtcgaactctggctctcaggaatagtgaccgatgggggactgagctggtctttgaggctgcagagcttggggggctggcaggccccaactggggcactgattgtcactgccgacatcaagaactcacccaagagtatgacctggaccaacagggttttgtgtcttgactcagcttgctcatcttcattgagggccacccagggatg

SEQ ID NO: 33667 - DNA, 374 bp, Homo sapiens
tgtgcttgacgagacacaacacttacctccaggaatggacaggccatcgggagcccacgtatgaggtcaacattcacgacattaaactggtcttcctgcgcttcgccgtggagcaggcgctcaacgcagacactggcgggggcggccgggagagcaacatccacctgatcccgtacatcattgacactgggctttactttctgaacagcagccgcacatcttcccgacaagagaagaacctccaaggctttctggaacagaccaatgagaagtgggtggacagggcctttgaagtggacgggccctactatttcacaggcttgggccttgacatcctggcccctgaggagaggagagccacacgtgtggaaatt

SEQ ID NO: 33668 - DNA, 436 bp, Homo sapiens
  misc_feature (1)...(436): n = A,T,C or G
gtggggnccngctatgaagctacgatgactctgagacgcccagcttggcacgaggtgcttggcaagacacaacacttacctccaggaatgtacaggccagcgggagcccacgtatcagctcaacatccacgacatcaaactgctcttcctgcgcttcgccatggagcagtcgttcagcgcaaacactggcgggggcggccgggagagcaacatccacctgatcccgtacatcattcacactgtgctttacgtcctgaacacaacccgagcaacttcccgagaagagaaaaacctccaaggctttctggaacagcccaaagagaagtgggtggagagtgcctttgaagtggacgggccctactatttcacaggcttgggccttcacatcctgccccctgagcaatggagagccacacgtgtggaaatcttgcggagg

SEQ ID NO: 33669 - DNA, 433 bp, Homo sapiens
ggtgaaattgttcatcacatttcaattacaagatgtttatcagaatttttccctacaattttgattacttgctttaattaaatgctaacatgtttcaacaagactgttcaatatattgatgtgttggtgctactttgtaagcattcaggagattgatgaaggaacaaactttgttataaaaatgagtcacctaaagagagaaaaaagataaatgaatccctactaccactaatttcacagctattttttaaaaggaaaatttctaaaagaatacttctacgatagaaatgatagaacttcttcgttattaaccttgtagcttccatctcgcctaagatttctatcttctgattcttaattatttcaagcatggagtgagtaggaagcaggcaatttctataaaaacagtaaatatttattttgagtatttaaa

SEQ ID NO: 33670 - DNA, 446 bp, Homo sapiens
  misc_feature (1)...(446): n = A,T,C or G
tgtgggnnnnccnntttgaacccactgagtccactcgtanaccacgattacgccaagacttggcacgagggtctccagcaccatgtctggtttgtctggcccaccagcccggcgcggcccttttccgttagcggtgctgcttttgttcctgctcggccccagattggtccttgccatctccttccatctgcccattaactctcgcaagtgcctccgtgaggagattcacaaggacctgctagtgactggcgcgtacgaaatctccgaccagtctgggggcgctggcggcctgcgcagccacctcaagatcacagattctgctggccatattctctactccaaagaggatgcaaccaaggggaaatttgcctttaccactgaagattatgacatgtttgaagtgtgttttgagagcaagggaacagggcggatacctgaccaactcn

SEQ ID NO: 33671 - DNA, 485 bp, Homo sapiens
  misc_feature (1)...(485): n = A,T,C or G
ntttgaaaacgttggtcgatgcccactccagcttggcacgagggagcagncaaggatgctggtgaggctgcagtttctgctctttttcatcaggggggatagtctctaggatttttcagtgaggacccttgggctttggatgcagcttgaaccaagaaaacgaggagggaaagggattcagcgaactattcctcagtgggatcggttcttcagctcctgatgggggctgtgtaatgggggcagaggccagggaaaaagatgctgttcacccaccctcagcttcccttttcctaaattaagaggaaaagtggtcaaagaaaaactcttcatttctccctgattcttaaacgaaggtgggtaatagaaactcaggctcccgtgacaaggcaggacaagagcctgtttcgctttcctccctgaccctgccaggtgccaactcaaacactacctttctcattggtttctaagtcagtagagacagatcn

SEQ ID NO: 33672 - DNA, 433 bp, Homo sapiens
gggcaccattcctgagaaataggaaatatatgtgtgtggtatgaaaagcccatattctgttcttgtcacctgaatctaggcttcctctttggatgtgaacgcgggaatgaacagtggctgttttccacccaaaggggcgtggagaccttttggaaacgggctttctcctttccattttgcagccgggggcgggtggaaaccttccttcgaagggtagtgccttggggagcagcagacctgctctgagtccagcttatctttccaaaattctgtgtggaacttactggagatgtttttatatatttgaaaataatggcctgtatttctcacgctatacttaaaaaaaataactaaccttttaaacaaagatattcaaactcacccttgtgctgaaagcactcacatttctgtgttcattcctgaaagggcgttg

SEQ ID NO: 33673 - DNA, 482 bp, Homo sapiens
  misc_feature (1)...(482): n = A,T,C or G
cctgagaacgtatttgatgacactccaagctnggcacgaggggctcagaggaggagccggcgcctggccacgccaaccttagaatcatgaactgtagtcacagagatgggaaggcagcctcctgcctgccctggccttgctggggcccctcctgcctccacgcccacccagcgtcgacccttgacccacgaagtgcgtagcatgcagtatttaaagcagtgtagctacgggcttctgtttttttcccttttttaatagcatgtatggggttctgttccatgtctgtgttgtggacattccgcggcatgaccgcgtgaactgcacggtggagctgcctcagggctgtcggtcaggttggtccagtgaggggtgactgcagccggtcaggtgggcgaggagaaggggggctgcccctttcctacctgtgcttgaggggccggaggcaagtgctgcctggcagagctgtgttaccgtcttggccn

SEQ ID NO: 33674 - DNA, 434 bp, Homo sapiens
gggccatcgggcaagggggattccgatagtcggaggaagctactccctgatatatcgaggactgaggctcacatgtcacaaccggccatcgtaaagaccagcggtgctgctatacctcccacagtacataaaataaccccgtaaagaatgacctggctggggcctgagagcattgctttacctggaggggcagccagtctgccaggggaacgaagcagtatttgtgggctgagcaaagagggccctgggcagatcctgggtgtgtgcacatgatggccccggtcttggcagggcagaggaggttgggacactgagtcacaggtatgctcctgaaggcaacccacaaaggggctcagatcgtggaactgcaggcctgatcctgagcagcatggtgcggaactgtctggacaggcctagatagaagggcgcctacc

SEQ ID NO: 33675 - DNA, 486 bp, Homo sapiens
  misc_feature (1)...(486): n = A,T,C or G
ctttgataccttatttgatgaccatgccaagccngcgacgaggggccattgtttataatggtgggttatgttcttataacatctatgtagttaccataaaagtatatcaacatcaaatcagaagtgagcattattgagggagagaagggagggtgagagcacccgcacggtcagtagtcagtgtcggagccctcggcgttgtccacgtttctcgagagcatgtagttgtccatgtcgattgagcggcagttgttgatggcatatcgcaggcgctcggccatgaccagctggctggagtacgggggcagcctcagctggaaaaagcaggtctgtgaggtaggcagactgtcgtaaggcctatcaaccttcatgatttgaaatctctgagaaatgtcagcagtgttggctggtagtcgagatcttcctgacacaaacctcatgaaaagcacccgctcctcattggagaactcttccagtgtgtgccan

SEQ ID NO: 33676 - DNA, 484 bp, Homo sapiens
  misc_feature (1)...(484): n = A,T,C or G
aaaaaaaatttgannaccgctatgaccttgattacgcctagcttggcacgaggcaaaaaatcaaacaaaaaccactaaaaaaccatacatatatgatataccaacaagattttcttggtggggggcctaaaccacctgattctcaagttcacgtggaaaaattacacaggtaagaatagcaggaggtcaggcacctgtaattccagcactttgggaggccgaagtgggaggatcacttgagaccagcgtgggcaatggagcaggaccccatctctacacaaaaaaactaaaaaattagccaaggccaggcatggtggctcaagcctgtaatcccagcactttgggaggccgaggcaggcgaatcacgaggtcaggagttcaagaccagcctgggcaatatggttaaacctggtctctactaaaaatacaaaaattatcttggcgtggtggcaggtgcctgtaatctccagtactcgggaggctg

SEQ ID NO: 33677 - DNA, 418 bp, Homo sapiens
ggattataatccctggtctaagctgatatgaaagtttctatgtgtgaaaatatggagttatatgctttgagattttctgccagttaaactaaaacaagatcatactgtaaatgtttgtaacttgcttccccccactgtatactgtaaacatctttgcatgtcaataaatatgcctctacaacatatttttgaatcacttaatatttttcccatgttaacagttggtatatagtgttgtaaacctttattgcatattctcataacatacaatatacacattcttttgcaaaaatgggaacacagtattgagacttgccttttcctcttaacacttatcttttcaatttagtattatatagatctgtcacatgctttttatctaataactttatagaaatataattgccatacattaagc

SEQ ID NO: 33678 - DNA, 409 bp, Homo sapiens
aacgtgcttggtaacagcaagtcccagacaccagcccccagtttcgaagtggttttggattcaaagagacaagttgagaaagaggaaaccaatgagatccaggtggtgaatgaggagcctcagagggacaggctgccgcaggagccaggccgggagcaggtggtggaagacagacctgtaggtggaagaggcttcgggggagccggagaactgggccagaccccacaggtgcaggctgccctgtcagtgagccaggaaaatccagagatggagggccctgagcgagaccagcttgtcatccccgacggacaggaggaggagcaggaagctgccggggaagggagaaaccagcagaaactgagaggagaagatgactacaacatggatgaaaatgaagcagaatctgaga

SEQ ID NO: 33679 - DNA, 480 bp, Homo sapiens
  misc_feature (1)...(480): n = A,T,C or G
nggagcnaggncctggctacttgatnantctatatgaccgtctgcgnccaccttggcacgaggggctaataggaattccctcctggtgccaccactggccagtacctttcctaagtctttgctcaaattaaccaggttgtgagccagtggcttgagtgaatgttaggccttgggggctgagtctctgaaaagtctaagaagctctgcctagaccaaatatggtatacctcctgacccctctctccctcatgtcctgggattctggggaagagacctagaaacaagctttcaaagaaaaaccagaagttgtcataaatggtcagaaagaacgatcaggttggagacttgggaaacccagggcctaaagagaagtatccatgagggtcaaacttcctgttgaacttcctatgttctttctcaagtgctcagggatctaagttagtggacagcaagcctgtggctacggggtggggatgttcn

SEQ ID NO: 33680 - DNA, 474 bp, Homo sapiens
  misc_feature (1)...(474): n = A,T,C or G
aggagcncgnncccccccctggganccattgatatccttgcaccagcttggccgaggctccccagaatgttcctcagccggctgctctggcaacatcgacctctttgctcaaacacaccaagtattctcctgccttctccagagtgcacagcctctacaacagcatggcgtgctcctttacatcattccaggatgctctgatctcacctccccagagaggccttccccaaatgctctgcagaaaagagcaccactacctgcccttaccactctctaccctgagtgccatggagacactgcagaatgatttactactgccggtccttctgggccagcaaaagaaggggacttgtctggtttgttcactgccacatcccttttgttgaataaatgaaaccgggctgcagggacctgataaagtgacaggctggccttttcttttggagaccttcaaatatcagatctggactcttt

SEQ ID NO: 33681 - DNA, 431 bp, Homo sapiens
ggttgtgatattaacaaacttattaacacctgttgacaaagatctttgaagacaaatctacacgcaagcttttgccttagcgaacaacaggaatagtttccttaaaaggatacagctattttgaaatttcctcaaccattgcatcccagtgggggggatacttacatggtaggactgtttggccaaagtgcttgaagcattaggacacaacaaagatagttttgaaatgttttcttgctcaaaatacatttgttcttaggacacggctagtgctcattttacattccatgcctgaagtgtttaaaacactgtggtacaggtttctgattctgtgttggtcaattttgaaatccatgtgttagtagtaagtgtgctgattcgtagagtgggtaacttctgggaactcccctttcttttattgacaatttctt

SEQ ID NO: 33682 - DNA, 411 bp, Homo sapiens
ggttttttttgtagagaaaagctctcgctatgttacccgggctggtctcgaactcctgggctcaagagatcctctggcctccgcctcccaaagttctgggattacaggtgtgagtccatgtgcccagccctttaattctttacttggggttcaggtgactacatatttcttacttacaaattttacttaatctcgctgatgctgtcacttgaaagctgacccaccttgaatgaagcctcctccaacaagtctggaatccatccgaatttaaattaacaggcgctcctatgaattccatcagagaacacacagtagatgctttagcaacctcttcccatgcctccgaagtatctggtttgcattgtggtggccattagtcatccatgggcttctgatgtaaaaaacaaacct

SEQ ID NO: 33683 - DNA, 482 bp, Homo sapiens
  misc_feature (1)...(482): n = A,T,C or G
cattgagacccttgattgagaaccnttgacatgactacgccaagcttggcacgaggaaaatattcagtaaatgttaactactattattaaggcaaaatacagaaaagcaattagtaggctaaatttactactcagtagttagggacaaccataaacttaatgtactaaaaagtctttaaaatttaggtatatcagaaagaaaagttagaccttaaaacatgagggcttatgctgctgcaatgcctcctggtagaacatagaactatcaagagctagacatatgctccttatggtcccaggatcataatattatataacaatgaatgaacgcccaaactggcacacttggctatatttagccacaattattgcatttccatttattgaggctagccgtatcagaaaggccagtgaagtccttgaggtctcagccccctattaggcttcaagtaaagatcaggtgctctattgagttatttaaa

SEQ ID NO: 33684 - DNA, 459 bp, Homo sapiens
  misc_feature (1)...(459): n = A,T,C or G
nctgaaacatttgtgacctctttacgccagcttggcacgaggggtacacttactccagtgggaggaggactccaattcagtggttctttcctttgactccgctggacaaacactaggctcagagtatgatcggttgggcttcctcctgaatctggactctaaactgcctgctgaattagccaccaagtacgcaaacttttcagagggagcttgcaagcctggctatgcttcagccttgatgacggccatcttcccccggttctccaagccagcacccatgttcctggatgactcctttcgcaagtgggctagaatccgggagttcgtgccgccttttgggatcaaaggtcaagacaatctgatcaaagccatcttgtcagtcaccaaagagtaccgcctgacccctgccttggacagcctccgctgccgccgctgcatcatcgtgggcaatggaggcgt

SEQ ID NO: 33685 - DNA, 466 bp, Homo sapiens
  misc_feature (1)...(466): n = A,T,C or G
ggggcgagggccccctccgaaagtcgatggggcgtaganancanacgnaagnnggacgagctggtggggtgtgcggcaggcagccgacttcgtttagcagttttgctcctactcagagagcgagaaggggtgcaagggccgcatggaattgatcctgcgccacctgcccgactaccgcgacccgcccgacggcagtggccgcctggaccaactgctctccctctccatggtctgggccaaccatctcttcctaggctgcagttacaataaagaccttttagacaaggtgatggaaatggccgatgggattgaagtggaagacctgccacaatttactaccagaagtgaattaatgaaaaagcatcaaagctaagccagaagatttatcacattttcatcatcagctacaggattagaaaggaggctgggatgaatgtgacatataccacagcagctctcttaagag

SEQ ID NO: 33686 - DNA, 426 bp, Homo sapiens
  misc_feature (1)...(426): n = A,T,C or G
ggccgggcggncagctgggctcggagtgcagcggggttaggatggacgaggacgtgttgcaccctgaagagcctcatcatcggtgagagtggggtgggcaagtccagcctgctcttgaggttcacacatgatacctttgatccagaacttgcagcaacaatagatccatcttcggttgtgaatccggcccggaatgcagccaccccttagagcaaccccccttgctgctcgtgccctgctgtgctactgcctcagtcacttcctgcttggtcaagaccacagctgctgatgtcacagctgaggcacatcaaaaaggctgcctgattcaaagaaagctgccggataaatcatagagcacagacacttctacctcatgctcttatgggactttaggaaccaaacataagcacctatggaaaatgcacg

SEQ ID NO: 33687 - DNA, 459 bp, Homo sapiens
  misc_feature (1)...(459): n = A,T,C or G
cgcaccactgattaccgttatgaccctggttaccactgcttggcaccaggcttggttttccacagctttggtgggggaactggttctgggttcacctcgctgctcatggaacgtctctcagttgattatggcaagaagtccaagctggagttctctatttacccggcgccccaggtttccacagctgtagttgagccctacaactccatcctcaccacccacaccaccctggagcactctgattgtgccttcatggtagacaatgaggccatctatgacatctgtcgtagaaacctcgatattgagcgtccaacctatactaacctgaataggttaataggtcaaattgtgtcctccatcactgcttccctgagatttgatggagccctgaatgttgacctgacagaattccagaccaacctggtgccctatccccgcatccacttccctctggccacn

SEQ ID NO: 33688 - DNA, 426 bp, Homo sapiens
  misc_feature (1)...(426): n = A,T,C or G
ggcttggaggagagttgaggcttttcttaggtgcatacacagacccaggtgaacacgctgactgtgaacctgccctgtatccggagctgtgctgggcactgaggggatgcaacaaaattaggagaggatccttgctcccaacgtctacttctcctacctcaacaggggtccagggtgcagtgaactcagttcttggcccttgggtgaggattcatggatgaatgaaagctagacctgatggggaggcattatgactaaataggcccagcctccttcccttccagctctgtcctaggagcataggcgggaaatctgagtagagtctgactgcagtttttgcttatgatttgtaaaagccgtcatggggtcaataagaaaataagggtgatggagggggagaagcccacgactgggagaatcgcacan

SEQ ID NO: 33689 - DNA, 457 bp, Homo sapiens
  misc_feature (1)...(457): n = A,T,C or G
natgatnacactgagaccnctttacgccaagcttggcacgaggagcaggagaaatttctggactgttaggatgaatggacgccttctccccgttatttaagatttgtgaccttgtacataaccctgggtgacgtgcacattgcttgggtatggaacggtagaaatttgggtgtttttaaaaccttgtttggggttgttcctgtccttgttgagaatcatagagatgtctgtgttcttggagtatttcacactgaggactaatctgctatcttcattccagtccctacccctcagtgcctgctctcatccaaataacctgggaggtgacaatcaggatatctcaggaggtccaaggtggaacagacctctttgcctttcccagcgtctcatacccccggtagtgcagctgtgggtggaggctggggtgtctgcacgaagtcaggccagcgtcctcctt

SEQ ID NO: 33690 - DNA, 410 bp, Homo sapiens
ggcaaacctccaaatttttcagcagcgcaccatgggtgagaaacccgggaccagctcaccgtgtacttgggcaagcgggacttcgtagatcacctggacaaagtggaccctgtagatggcgtggtgcttgtggaccctgactacctgaaggaccgcaaagtgtttgtgaccctcacctgcgccttccgctatggccgtgaagacctggatgtgctgggcttgtccttccgcaaagacctgttcatcgccacctaccaggccttccccccggtgcccaacccaccccggccccccacccgcctgcaggaccggctgctgaggaagctgggccagcatgcccaccccttcttcttcaccataccccagaatcttccatgctccgtcacactgcagccaggcccagaggatat

SEQ ID NO: 33691 - DNA, 442 bp, Homo sapiens
attgaaacagcttgacctttatgacgcaagcttggcacgaggctgagactcggcccttgagagccagggcctggcccaccagtagttgctcatagacctgggaagcaggggcctgctggaaggaatcactagattgctgcaaaaactcacataatccacagtttcctctttttttttttaaaaaaagttatcaaaaggttttaaaaacactttatgaaaccatagtactcagggccttttgtgaaacagggggccatttagccttcagcttccctgtttttgaggaaaaaaaagcttctatttcactggcctcatcccacaaaattgggcgacctttccccgtcatagcctgtcgggacaatcacgctattgaaaggggctttttagttaaaaggcaattggaaacttgacagtctctaaatgaataaaaagtttcctttgg

SEQ ID NO: 33692 - DNA, 411 bp, Homo sapiens
ggagatatgaataaaaatgcggatgggaactccaagcttggtcctgagaccaaggctgtcattcattggattatggatattcctttcgagctttgtgccgatctccatggaggagagcttgtggccaattatccatatgaagagacgcctaggggtaccgctcacgaaaacagatccttctcagatgacgccattttgcaaagcttggcccgggcatacttttatttcaacccggccatgtctgaccccaatcgggcaccctgtcgcaagaatgatgatgaccgcacctttgtggatggaaccaccaacggcggtgcttggtacaacgtacctggagggatgctagacttcaaataccttaacagcgactgttttgagataaccgtggagcttaggtgtgagaagctccca

SEQ ID NO: 33693 - DNA, 417 bp, Homo sapiens
actaggggcgaggggctgctattaactatgccccagggcactatgccattggcaaagagatcattgacctcgagttggaccgaattctcaagctggacgaccagggcacgggtctccaaggcttcttgggtttccacagctttggagggggaactgggtctgggttcacctcgctgctcatggaacgtctctgaattgattatggcaagaagtccaagctggagttttctatttacccggcgccccaggtttacacagctgtagttgagccctacaatttcattctcaccacccacaccaccctggaacactctgattgtgccttgatggtagacaatgaggccatctattacatgtgtcgcagaaaccttgatattgagcgctcaacctatactaacctgaataggttaataggtg

SEQ ID NO: 33694 - DNA, 406 bp, Homo sapiens
ggaaatggttaaggattcaataagataaaactgtaggcaatgaaaaccgtacctggtaacagtaggtgctgaagaagtgttagctattaatttttgcttaatttttctctctctgctctatgggatgaaaagattcaagaggcaattgttggaatgtaaaaagagcacgggacttggagtcaaatacttaagtctaccatcaagtagttgttaagaattaaacaacaatttttgtgtacccagttaaatgtgggctgcttaggaatgatgactgtgtcttaatgatctctgtattcttagtgacatgtagaatcattgtgcctgacacatagtatgtactcaggaaagaaatggaaaatgtggttttagcattgaaggccgggagagagggtctaacagactacaa

SEQ ID NO: 33695 - DNA, 443 bp, Homo sapiens
tcccttgacaccgtttgaccatatgacgccctgcttggcacgagggcgtcctcttcctcctcatctgaagggtgtacctcctccatttcttctaactcagccttttctatcacatcctcctttacttcaggttcactttcctctctggcttctgttctgtctgggagcctctctgcttccctctgcttcttttcctcccagggatctttctcttcctctgtttcagccccagagtctaggcctctgtccttgctgccttgttcctcagggacctctgggacaagctctttctccttcatcacatgttcttcttgtcccagccctggaacagagggtggtgttccctggatagctgtacttgggggtccctcctctgcagtgtctagagggaatggcttatctcctagtcctgtgtccctttgttcagccagcaaagccctctc

SEQ ID NO: 33696 - DNA, 467 bp, Homo sapiens
  misc_feature (1)...(467): n = A,T,C or G
cccgcccccngnnnaatgaaatcgtctacattctcaanacgccaagcttggcacgaggggctggcaataactattccctagggcactacaccattggcatggagatcattgacctcgagttggaccgaattcgcatgctggccgaccactgcacgggtctccaaggcttcttggttttccacagctttggtgggggaactggatctgggtttacctctctgctcatggaacggctcttagttgattatggcaagaagtccaagctgaagttctctatttacccgacgccccacgtttacacagctgtagttgagccctacaacttcattctctccacccacaccaccctggagcactgtgattgtgccttgctggtatacaatgaggccatgtcttacatgtggtgttgaaacctcgatattgaagcggcaacctatactaacctgaataggttaatatggcaaagt

SEQ ID NO: 33697 - DNA, 406 bp, Homo sapiens
ggtgctgccaataactatgcccgagggcactacaccattggcaaggagatcattgacctcgtgttggaccgaattcgcaagctggccgaccagtgcacgggtctccaaggcttcttgggtttccacagctttggtgggggaactggttctgggttcacctcgctgctcatggaacgtctcttagatgattatagcaagaagtccaagctggagttctctatttacccggcgccccaggtttccacagctgtagttgagccctacaatttcattctcaccacccacaccaccctggagcactctgattgtgccttcatggcatacaatgaggccatgtattacatctgtcgtagaaacctcgatattgagcgttcaacctatactaacctgaataggttaatagggc

SEQ ID NO: 33698 - DNA, 473 bp, Homo sapiens
  misc_feature (1)...(473): n = A,T,C or G
ggagcgggccnnccnccattgaaatcgattaccatctcatgaaacgccaagcttggcacgaggcagcgggcagccgaatacaaccaggccctgggcacctgtcgcctggaaggcacaccgctctgtgtggcagctggagatgtgctcgccatctggctcttgtgggccatgataggctggctgagccaggacaccaaggggaagcccttggaccccgaagccgacagccacgtggaggtcttcggggatgaaccacagcaacagctggcacccattttccgcaatgccagcggccagtcatggttctcgccacccggcagcccctttgggcaatcttttgtgcagactatccaccccaagagggacttctgagctgcccacatggcctaagatgagggtcctggatccttcccccttctcaccataaccccctctcagcgtttccccaacttctcccttttagcagggacccc

SEQ ID NO: 33699 - DNA, 511 bp, Homo sapiens
  misc_feature (1)...(511): n = A,T,C or G
nggcgctgnnnnnnaattgaaatcgatnagcaatgagcacactgcacttcgccgatgcttggcacgagaggtttgtctggaaccacttttcaaaanctgtctctagctttgtatattcaagaatgcgcgttcttcacttctgtgcctacactggtgggagcgtgtgtggcgttattgtgtaccgagcctttcacttataggaaccgagatataattctaccttgtcctcgtagtggttgttctaaaagcttctgcaggcgcctaaagctcaaatctcctttaccagatacaaaccttcttctgcttgttcagtttatttgtgcagatgctggaaccaaactagctgagtcaacaatcctgagcaagcagatgatagcctctgtacctggatgtgggactgcagcgatggagtgtgtgaggcagtacatcaacgaagtgctggatttcatggcagacatgcacacgctgaccaaactgaagagccacatgaagacatgttcccagcctctgc

SEQ ID NO: 33700 - DNA, 406 bp, Homo sapiens
ggtgctgccaataactatgcccgagggcactacaccattggcaaagagatcattgacctggagttggaccgaattcgcatgctggccgaccagagcacgggtctccaaggcttcttgggtttccacagctttggtgggggaactggctctgggtttacctccctgctcatggaacgtctctgaattgattatggcgagaagtccaagctgaagttgtctatttacccggcgccccacgtttacacagctgtatttgagccctacaatttcattctcaccacccacaccaccctggagcactttgattgtgccttgctggcatacaatgaggccatctattacatctgtaccagaaacctcgatattgagcggtcaagctatactaacctgaataggttagtagggc

SEQ ID NO: 33701 - DNA, 410 bp, Homo sapiens
ggtgctgccaataactatgcccgagggcactacaccattggcaaggagatcattgacctcgagttggaccgaattcgcaagctggccgaccagtgcacgggtctccaaggcttcttggttttccacagctttggtgggggaactggttctgggtttacctcgctgctcatggaacgtctcttagttgattatggcaagaagtccaagctggagttctctatttacccggcgccccaggttttcacagctgtatttgagccctacaacttcattctcaccacccacaccaccctggagcactctgattgtgcctttatggtatacaatgaggccatctattacatctgtcgtagaaacctcgatattgagcggccaacctatactaacctgaataggttaatagggcaaaa

SEQ ID NO: 33702 - DNA, 415 bp, Homo sapiens
ggcgtgaactgtgtgatttttttaaaaggattgcaccttttgttatctgttatagctggacagtatgaattattatattggagagatataacaacttatgcctataatgtccagaagtgttaatatttttgtattaggttgaaaaaatgtgcaagcttctatcactagatggataggaccgtgcaattctaggtgggtggcgaatcaaagagctcctttctcttccctctctcacgcatcaggccagtgtcctcagcattgtcaactgagaggcacagtagacaactagggctggtggaatgtaagggaagaagattgaaaaaacgggaggaagggttctctggccctctctcaaccttgcaagtcaatgggggagttgttgatataattaacacccaggtttttactgttactg

SEQ ID NO: 33703 - DNA, 411 bp, Homo sapiens
  misc_feature (1)...(411): n = A,T,C or G
gggctgatccttggacaagagcaggacaccgtggggggtaggtttgatgccactcaggcatttgtcggggagctcagccagttcaacatatgggaccgcgtccttcgcgcacaagaaattgtcaacatcgccaactgctccacaaacatgccgggcaacatcatcccgtgggtggacaataacgtcgatgtgttcggaggggcctccaagtggcccgtggagacgtgtgaggagcgtctccttgacttgtagccgccttctcctctgtccaggaggccgggatcaggctgttgccatggaagttcagggccatagactgccccacttaaactcttgtcagtctgggctcagggttcccagagctcattccccaggaatctctaagaccagggctggggcagtgtctgtcan

SEQ ID NO: 33704 - DNA, 410 bp, Homo sapiens
ggccccatcttcactaaaaatacaaaacttaactggttatgtggagcatgcctgtaatcccagctactcgggaggccgaggcagaaaaatctcttgaactgaggaggtggaggttgcagtgagcccaaatcacgccattgcacttcagcctgggcgacatagcaagactccatctcaaaaaaataataattatcttaaagatgagaaaagccaccccatctggcaccacagctgcatcttgcttgtgagaaatggggaagagttcatggaggacacgtgacctgcacaggatcacaaagcatggggcagagcccggactaaagctcaaggcatctgactccctcttcagagttcttccccctccatgttggctgcccctgaagacccttgagttcaggctacacctaagc

SEQ ID NO: 33705 - DNA, 444 bp, Homo sapiens
  misc_feature (1)...(444): n = A,T,C or G
ctccaattgaagactgttaatagattcacntcgccaagctcggcacgaggccaaggacaataatctgaccactggaaagatataccagtatgtcattaacaaggttcggaaaggagattacttggggaaaactgtgcaagttgtccctcatatcacagatgcaatccaggagtgggtgatgagacaggcgttaatacctgtagatgaagatggcctggaacctcaagtgtgtgttattgagcttggtggaaccgtgggggacatagaaagcatgccctttattgaggccttccgtcagttccaattcaaggtcaaaagagagaacttttgtaacatccacgtcagtctagttccccagccaagttcaacaggggaacagaagactaaacctacccagaatagtgttcgggaacttataggacttgggctttccccagatctggg

SEQ ID NO: 33706 - DNA, 424 bp, Homo sapiens
  misc_feature (1)...(424): n = A,T,C or G
gggtagggagacatccacgtgggttgttttcgtctgctgtgaaaatctagggttggaatcatggaagcaaactgcaggaattcttaatcatcctgctcacgtggggggcatcaaagggtgtctgcttggcccccacagcactgggacagtcagagaggccatgagtggatgacgccctgatcactgccctttgcagtccaggaatacctcactgggctggggccataccctgtgccctctggaagacaagcctgcgcacttactatgtgccagatgccatgcacagtgccctagttccttgctgtagcaccaacacgtcccatgctggtgcttaaatgcacgcaaacaactttggtggttgtggcccgaaaagctcaaatgttaaagttaagcagtcaggcaagctataagaggtgaggagccn

SEQ ID NO: 33707 - DNA, 439 bp, Homo sapiens
  misc_feature (1)...(439): n = A,T,C or G
gtgcgcccgggtatgaaactccggttngagacatccgaaacacgattacggccagcttggcacggaggaaaacattaaattttaccgcaagttttaaatcgngcattatcaggctggncagagtggcaaccatatcggggccaatttctgggaggtgatcagagattaacatggcatcgaccccaccggcacctaccacggggacagcgacctgcagctggaccgcatctctgtgtactacaatgaagccacaggtggcaaatatgttcctcgtgccatcctggtggatctagaacctgggaccatggactctgttcgctcaggtccttttggccagatctttagaccaaacaactttgtatttggtcagtctggggcaggtaacaactgggccaaaggccactacacagagggcgccgagctggttgattctgtcctg

SEQ ID NO: 33708 - DNA, 444 bp, Homo sapiens
gcagtgccactgagaccgttgatagagcgacatcgccaagctcggcacgaggctggttttgaggggtacagtctgagcagtcgaagaaatatagcacttcggaacgattctgaatcatcgggtgttctctactccagagctccgacttatttctgtgggcagacattaacattcagagttgaaactgtgggacagccagacagaagagatagcataggagtgtgtgcagaaaaacaggatggatatgactctctgcagcgggatcaagctgtgtgcattagtacaaatggtgcagtttttgtcaatggaaaagaaatgacaaatcagttacccgcagttacttctgggtccactgtcacgtttgacattgaagccgtgactctaggaaccaccagtaataatgaaggtggacacttcaagcttcgagtaactataagttcaaat

SEQ ID NO: 33709 - DNA, 497 bp, Homo sapiens
  misc_feature (1)...(497): n = A,T,C or G
agccaggccggtttcgnncttgaaatagatatatccacctgattacgcccagcttggcacgaggtaggaaatggctattttgagcaatatgcaggaaagagatattcatttggtgttgaaaaatagaacatatttttatgaaaaactacactctccagaccattgtagcaaacctcctgacattgagattggaggacatttcagggccaaagttgctaaagaaaaattctctgtttcaaactcaaaaattacggtgtttcagatagcatgtgcctcaaaacttgaatagatgttgaattaaaaatctagtggattttttctactcttgtagacagagtccggacttgggatggtagaaacatgagtttgctgcagtaatgaaataatcagcaattcctgcttcttggatgatgtattttctaaggaagttttttatgcacacagtatgccatgtctgcaagccatatgcctgtatatggaaaataaagagattaata

SEQ ID NO: 33710 - DNA, 429 bp, Homo sapiens
ggaagcagcgtccatggccgtcgtcatcccacaagctgccctcaaggaggggctgagtggtgatgccctcagcagccccagtgcacctgagcccgtggtgggcacccctgacgacaaactagatgccgactacatcaagagatacctgggcgatttgactccgctgcaggagagctgcctcattaaacttcgccagtggctccaggagacccacaagggcaaaattccaaaagatgagcatattcttcggttcctccgtgcacgggattttaatattgacaaagccagagagatcatgtgtcagtctttgacgtggagaaagcagcatcaggtagactacattcttgaaacctggacccctcctcaggtccttcaggattactacgcgggaggctggcatcatcacgacaaagatgggcggcccctcta

SEQ ID NO: 33711 - DNA, 462 bp, Homo sapiens
  misc_feature (1)...(462): n = A,T,C or G
naagaagacatcgctagaccngcatacgccattcttggcacgaggagcacagtgaaagtccaaggcaatgacatctcccacaagctttagatttccaaagtgaggaaaaaggatgaaggcttatatgagtgcagggtgactgatgccaactacggggagcttcaggaacacaaggcccaggcctatctgaaagtcaatgccaacagccatgcccgcagaatgcaggccttcgaagcctcgcccatgtggctgcaggatatgaagccccgcaagaacgtctccgcagccatccccagcagcatccatggctctgccaaccaacgaacgcactccacctccagccctcaagtggtagccaaaatccccaaacaaagtccacaatcagcaaagagcaaatcgcctgtaaaatctacggagcggacagcaaagttgaccctaaactccaagcaccaccctgcaccg

SEQ ID NO: 33712 - DNA, 400 bp, Homo sapiens
ggggtcttggcggccggaggaggagtaagtgcgggtgaagatggcggcagccgaggccgcgaactgcatcatggaggtgtcctgtggccaggcggaaagcagtgagaagcccaacgctgaggacatgacatccaaagattactactttgactcctacgcacactttggcatccacgaggagatgctgaaggacgaggtgcgcaccctcacttaccgcaactccatgtttcataaccggcacctcttcaaggacaaggtggtgctggacgtcggctcgggcaccggcatcctctgcatgtttgctgccaaggccggggcccgcaaggtcatcgggatcgagtgttccagtatctctgattatgcggtgaagatcgtcaaagccaacaagttagaccacgtg

SEQ ID NO: 33713 - DNA, 532 bp, Homo sapiens
  misc_feature (1)...(532): n = A,T,C or G
gccgcgcccacctctttatttttcttttcgcactcgcgccgctccgccttnttagtncacagcatcccnnnccaagccagagcggtttccnttttgacaccatcgaattagatcacactccagcnnggcacgaagcctcgngccaagcttggcacgaggggnaaatagcatacattttctcatgcccagcctatattatattttgaaatgagttcttcctggggatttaaaaagctattgctcttgactgagtcaaacccaattagtaagtgtgactgcaccttaggctgcctgtcaccgcataaatatgaacttacatgtatgaatggcttcctctcttgggggaaccagaggaaattgtcatcatttgacatcgcctgggagtagctacggcttaaattcccatttcaaattttggaacacacatctgcataaaatgtataacctactgacagttgaaattaaaccattaagcagaatcccctatccataagagaggagagagagagagagaaagagaggagggagagag

SEQ ID NO: 33714 - DNA, 421 bp, Homo sapiens
gggaccagctggggggcacgggggagagggggtaatggatgccatgcctgcagatttcttgaaattcttccctgggggtcccacgatcccctgctactccactgacctggaagagctgggttccatgccaaccactgtggggcaagcctgagtggtgaggggccactgggccccattctccctccatggcaggaaggcgggggatttcaagtttagggattgggacgagggggagaatctgagggcactctctgccaacttcacagggggggatgagcctctccttgccccacacctggttcagagggaatgcaatggttggggctgttcacaccctgcaacacagactgttccctccaaggtcctcttatgtcccgggaggagcgtggattataaacatggagatcgggagcccctctcc

SEQ ID NO: 33715 - DNA, 391 bp, Homo sapiens
ggagaagatgctgccaataactatgcccgagggcactactccattggcaaggagatcattgacctcgtgttggaccgaattcgcaagctggccgaccagtgcacgggtctccagggcttcttggttttccacagctttggtgggggaactggttctgggttcacctcgctgctcatggaacgtctctcacttgattatggcaagaagtccaagctggagttctctatttacccggcgccccaggtttccacagctgtagttgagccctacaactccattctcaccacccacaccaccctggagcactctgattgtgccttcatggtagacaatgaggccatctatgacatctgtcgtagaaacctcgatattgagcgtccaacctatacta

SEQ ID NO: 33716 - DNA, 434 bp, Homo sapiens
acacgaggcgtggcatcaaaaccaaggttatcaattatttataaaggttgtgtggtggttggtccaagcatctctccttcatgccatcactcctttcaagagctgcctctattttctaatttagcacaggaatttagatgcccctaaataagtaggcatccagtatctgcccacaccagttttagtgagagtacatatggagacactgccaccacccctgctctcctactgcataccccaccatgccaaagcatggtggctcacacctgtaatcccagtgctttgggaggccaaagaggaggaacacttgaggccagaagtatgagaccagcctgggcaacatagtgagacctcatttctataaataagttaaaaaaacaaaaaaatagggcacagtggtgcacatgtgtggtcccagttactcagcaggctgg

SEQ ID NO: 33717 - DNA, 459 bp, Homo sapiens
aggagggttgtttgatacctttgaacacgtattacgccaaccttggcacgaggccttgctcaaattgtagtaaggtacaaaccgagcttctgcagcatggaggtcccaaagaacagtggcttgagcaaggggcaagcacatttctttctcctctaacagtctggtctgccaggtggccttcctcagcttgtggcttccactcgtggatctagaagggtctttatggtttttggtttcccaccaggcggtaaaatcagaacgaaggaagctcacaacagtaagaggttgaggttccagtgttagttacttctactcgcaacccgtttacccagagtttagtcacatgatgatagctggctgtaaggagggttggaaaagttaggctgaaggagggtggccatgtacccagctgacctctattctgttgaagaaagggaaactggaaactggggacaagta

SEQ ID NO: 33718 - DNA, 400 bp, Homo sapiens
  misc_feature (1)...(400): n = A,T,C or G
gggcttccaaagatgaatggccttcaaagaaagaccccttagtgctggcttcctctttgcatggactctgtgggttacattctctatcaacatatctatgcagagggtggcttctttggtacaacagccaatatttcatgtctcctttgagtgtggcttactgcattaaggccagatgcttaattgagctctagggtggctggttagtattaatacattggtgggctaacagggcatataggatgtggcttttgtccagctgatagtagttagaggcttacaacttaggagcagcaccaactgaaggggctaattgcttggatctccttcattgggatagctggagagggattggagtaccactttccttccactgttacctggtacttaatgccctaan

SEQ ID NO: 33719 - DNA, 408 bp, Homo sapiens
  misc_feature (1)...(408): n = A,T,C or G
ggatttgagcatcccaaagaataatgactttagtggactggaacacatcaacatgtatacatccatgaattcataatactcaaaacggtaaaaccaaactcatttgttacctttggaggagtctgtcacctctgattattctgaaaactggtaaatagaaggggaaaattcaagcatttattctgcttttcttgtataaactgtacctcacagttacggaagagctgataagggaaatgtcttctttattgaaaaattcagctgatacatttggaaggaatgagagaattagagtaccaccattaggtgacaatgagggtctggttttttatttttcttttgctgagngctgggaacatagtgataacaaaaaaagccatagtgttctggcccttctggagttttgat

SEQ ID NO: 33720 - DNA, 428 bp, Homo sapiens
gggtctaatgagttctttgttctgttctgctgccttttacgttttcttgtcctttcaaaagtgttcttgaaagaaacaaagcgaataggcagttagcacagcacagctaccccttaccaagcagtctatggaaacaacccctcatccaaatcatgggttagttaagaatctaactggggcaattaagatgaattccactcacttcctggtcacttcagcagcccagcggcattgagccaaaatatacaattctgtgttattagtgaggaaactttaaaactcatgtttgttattacttactacccaatttcattatcctcccttcctctttccatttctattctctctcacttgaattctggcattatttttagtggcctctactgataatacctaccctagagtacataaaaattatattaaaagag

SEQ ID NO: 33721 - DNA, 407 bp, Homo sapiens
gggggtgtgaaacaactaattgtcggtgttaacaaaatggattccactgagccaccctacagccagaagagatatgaggaaattgttaaggaagtcagcacttacattaagaaaattggctacaaccccgacacagtagcatttgtgccaatttctggttggaatggtgacaacatgctggagccaagtgctaacatgccttggttcaagggatggaaagtcacccgtaaggatggcaatgccagtggaaccacgctgcttgaggctctggactgcatcctaccaccaactcgtccaactgacaagcccttgcgcctgcctctccaggatgtctacaaaattggtggtattggtactgttcctgttggccgagtggagactggtgttctcaaacccggtatggtggt

SEQ ID NO: 33722 - DNA, 410 bp, Homo sapiens
gggtgagataaatgcacatttcagaaattccaactcctgatgccctcttctccttgccttgcttctcccatttcctgatctagcactcctcaagactttgatccttggaaaccgtgtgtccagcattgaagagaactgcaactgaatgactaatcagatgatggccatttctaaataaggaatttcctcccaattcatggatatgagggtggtttatgattaagggtttatataaataaatgtttctagtcttccgtgtgtcaaaatcctcacctccttcataaccatctcccacaattaattcttgactatataaatttatgggttgataatattatcaatttgtaatcaattgagatttctttagtgcttgcttttctgtgactcaactgcccagacacctcattgta

SEQ ID NO: 33723 - DNA, 405 bp, Homo sapiens
ggctttaggatcaagaaagatgtacactgtcagagcatttttaattttacaaaagttgtttccaatttaagccccaaaaccatttgttgtattagtggatggtgggtaaaatatcattcactgaggtaatgattccccttgagaatataactctgtgtaggtcactggaaagtgattgccatatggctgggagagaagcattgcactcttgaggctgtagcctgtgtcaagctgtttcttcaggcagcctctcaaatgagctttgtctctctgtgctgaggcctggaccctgtgctgagctggtgactcactgtcctgacaagtggacacacagatgcactgctgtgctgctttcctgaagtgagtttctatgcctgttttcctctgaaacatgtctgttatccc

SEQ ID NO: 33724 - DNA, 394 bp, Homo sapiens
  misc_feature (1)...(394): n = A,T,C or G
cctctttccagctgacttgcaggcttattttgtaacctttcctcatccagttttccctgagaacctgggtttatctctagatagctgttcaggttttttagctgaggggtaagtatcctagctgagagttttgcatctttgggctgggtttgcagtggttgtgttttgcataaaatgtctagtctttgccacagatagtgagctacccactaatgagcccatggttttatttcagaagcacatgagggtgtgaaaccactctgttacctttctgtattgtcttagctattcaagccagtcagaggataatatatatattctcatcagcactcacagtagtcagtgaagagagtagatcacacttgggcacaccaggattcacataaacattgtn

SEQ ID NO: 33725 - DNA, 413 bp, Homo sapiens
  misc_feature (1)...(413): n = A,T,C or G
ggggctcaaagagtacactgtgtctctatgggactttggaccgtttttatttaccaacatggatctgtctactttctcttggttaaaaaaagaaacaaggacttaccaatctggggctataaacggtccgcaaagggtgggtctgaaaagtttggctgggtcaagtgggcattttgacaacatggctactcctttggcatgtttaatcgggacatctgacatgacatccttgcagtttaagatgacactcttaaactaaattctctcctaatgatgacttgagccctgccactcaatgggagaatcaccagaacctgtaggatcttatttggaattgacattctctattgcaattctgttcctgtttatttttaaattttctttttggttcactggaaaggaaacatgatgcn

SEQ ID NO: 33726 - DNA, 453 bp, Homo sapiens
  misc_feature (1)...(453): n = A,T,C or G
agggggnctagaaactatgagtctcttgaaccncncnnggnnnnaggngggccaagccatgtttgggccacttggctcacctcatcctgtttttgatttttcatttccaaagcgagtctcaagctgcagttgccagctagcagcagccattcttaggagagcctattaggattgccttgcccatgaaggctcattttgtacttattttatatttttgctctttagcattttctgtaaatcttttgctacaggtaaactgggacaacagaaacattttcatcctatgataatgaagcaataaagagaggagacatgtactggctttttggttttataagtaacttaagtgtactcagaatatcattctttagtattctcaaatgttgttgatgtgctactaatttatatttagtttctttctggtcttcagaaggtagctatgacctatgggtg

SEQ ID NO: 33727 - DNA, 420 bp, Homo sapiens
ggcacaattaaccctggctgtgtggtggttgatggcatgcccccgggggtgtccttcaaagcccccagctacctggaaatcagctccatgagaaggatcttagactctgccgagtttatcaaattcacgggcattagaccatttccaggacttgcgattaataaccagctgggtgatcaaagtgagtcagaaggccccgtgatacaagaatcaactgaaccaagccagttggaagttccagccacagaagaaataaaagagactgatggaagctctcagatcaagcaagaaccagaccccacgtggtagacctcttccctcctaggcttaaagtatcagtggttgagaagagcttttcggacctgttactaccccaagctgtgaatatacttgtataacagagataccttctatacaaac

SEQ ID NO: 33728 - DNA, 454 bp, Homo sapiens
agggcccattgaaaccttgagaactgcttacgccaagcttggcacgaggcctgccaagccatgttttggccacttggctcacctcatcctgtccctgattttccatttccaatgtgagtctcaagcttcagttgccagctagcagcagccattcttaggagagcctattaggattgccttgcccatgaaggctcattttggacttattttatatttttgctctttagcattttctgtaaatcttttgctacagttaaactgggacaacagaaacattttcatcctatgataatgaagcaataaagagaggagacatgtactgtctttttggttttataagtaacttaagtgtactcagaatatcattctttagtattctcaaatgtttttgaggcgctactaatttatatttaggttctttctgttcttcagaaggtagctatgacctatggct

SEQ ID NO: 33729 - DNA, 390 bp, Homo sapiens
gggtgaaaaagtgcattggaggcggcattttcttccatgagaccctctaccagaaagatgataatgggggtcccttcgtccgaaccatccaggataagggcatcgtcgtgggcatcaaggttgacaagggtgtggtgcctctagctgggactgatggagaaaccaccactcaagggctggatgggctctcaaaacgctgtgcccaatacaagaaggatggtgctgactttgccaagtggcgctgtgtgctgaaaatcagtgagcgtacaccctctgcacttgccattctggagaacgccaacgtgctggcccgttatgccagtatctgccagcagaatggcattgtgcctattgtggaacctgaaatattgcctgatggagaccacgacc

SEQ ID NO: 33730 - DNA, 410 bp, Homo sapiens
ggcacagtttaattgctctatgcatttattattagctattattaatgcagaatgagggaacaaaaagctcacaaacactctacacaatttcacaagacgcattgcaggggaaaaagtgactgagatggatcaacagtatgctaaggtcttggtggacgcattcctgggggaggtggacctctaatgcctggtggagggggtctcattcccggaggcggcatgcctattggcgtccctcgagcagggggaagcccaattggtgggcccatgggtggtctcataccaggtggaggagccataatgcctggaggtggggttgctctgccgacgggtgggggcggagtgccccgtcctggtgggtactgtgttggggctccagcaatactggcagtcgcagcaacagcagcagc

SEQ ID NO: 33731 - DNA, 424 bp, Homo sapiens
gggcggagcaagcatcacaccatggcgtatgagtgttcctctgtgtagactcaacctgcgcctcgccgtcccccattcgcacacccgatgcccgggggtcgctacggacttaaaatctccgcaccgcaccctccacctcagaaacgttcctggatccgaacactgccccctgacgacctaaagagatcccggctcccagcccactgagtggcttcagcctcgctggcacctcccaactcctggcctctctgcacgaggcgcctgccccgggccccgcctacaggggacccagctcttcttgcagccactggaagctgatcacctggagtgaagacctcacacgaagaagtctggaagaagaggaagaggaaagaaaaggagtcagggatggcccttactcaggtacggttgacatttatggatg

SEQ ID NO: 33732 - DNA, 408 bp, Homo sapiens
ggattttgcagaggatgatggggagatggtacccacaacgagtcacacagcagcttttcttagtgacactaaagatcgaggccctccagtgcagtcacagatctggagaagtggtgaaaaggtcccgtttgtgcagacatattccttgagagcatttgagaaaccccctcaggtacagacccaggctcttcgagactttgagaagcacctcaatgacctgaagaaggagaacttcagcctcaagctgctcatctacttcctggaggagcgcatgcaacagaagtatgaggccagccgggaggacatctacaagcggaacactgagctgaaggttgaagtggagagcttgaaacgagaactccaggacaagaaacagcatctggataaaacatgggctggtgtggagaa

SEQ ID NO: 33733 - DNA, 495 bp, Homo sapiens
  misc_feature (1)...(495): n = A,T,C or G
gggaatanccccaggnacnnnnnncccttgtataacgtttngaccatcactacgccaagcttggcacgaggaattatgaaaaattagaagctaaattacagattcattgatggagtcaattatgcaaagtggtcagtggttgttgaagcatgcattgcttcaacaggatttgcgtgcatttcccatgatcctgcattcttgtgttcttgatagcatacagacttactcagaatcaacagttgctgcttaatttgtctattttgtaagcttaggctactattttattaaaactggacatagatacttggctgaaaacaaatagttttgcagattgcaatataataaaggaaacagtaaaaactagtgggctatgcttaggtttttcttgaaacctaacattgctttangctgggtgccgtggctcgtgcctgtaatcccagtgctttgggaggctgaggtgggaggatcacttgagacccggagtttgagaccaat

SEQ ID NO: 33734 - DNA, 417 bp, Homo sapiens
ggctggaagaattcgcggccaaaaaagattatgaaagagtattagaactagaaccaaataactttgaagcaacaaatgaactcaggaaaatcagtcaggctttagcatccaaagaaaactcatatccaaaggaagctgacatagtgattaagtcaacagaaggagagcgaaagcaaattgaagcacaacagaataagcagcaggccatttcagagaaagatcgggggaatggatttttcaaagaggggaaatatgaaagagcaattgaatgctatactcgagggatagcagcagatggtgctaatgcccttcttccagctaacagagctatggcctatctgaagattcagaaatatgaagaagctgaaaaagactgcacacaagccattttattagatggctcatattctaaagctt

SEQ ID NO: 33735 - DNA, 498 bp, Homo sapiens
  misc_feature (1)...(498): n = A,T,C or G
nataganaacgtcttgaccatgttgacgcccagcttggcacgaggcaagaagataatgatgacatcaatgacaacgactggtcctatggctcggagaagaaagcccagaagagaaagtcagacaagaaccccaattcccctcgaagatccaagtcattaaaacacaaaaatggggaacttagcaattcggatccttttaagtataacaattcaactgggatcagctatgagaccctggggccggaggagcttcgcagcctgctaaccacgcaatgtggggtgatttctgaacacaccaagaagatgtgcacaaggtccctgcgctgcccacagcacacagatgagcagaggcgaaccgtacggatttattttctcgggccctcggctgtccttccagaggtcgagagctccctggataatgacagctttgacatgactgacagccaggccctgatcagccggcttcagtgggacggctcctctgacctctcaccctct

SEQ ID NO: 33736 - DNA, 422 bp, Homo sapiens
gggcgtgaggtgacccatctggcccgccgcgatgctggcaacacggcggctgctcggctggtcgcttcccgcgcgggtatctgtgcgtttcagcggcgacacgacagcacccaagaaaacctcatttggctcgctgaaggatgaagaccggattttcaccaacctgtacggccgccatgactggaggctgaaaggttccctgagtcgaggtgactggtacaagacaaaggagatcctgctgaaggggcccgactggatcctgggcgagatcaagacatcgggtttgaggggccgtggaggcgctggcttccccactggcctcaagtggagcttcatgaataagccctcagatggcaggcccaagtatctggtggtgaacgcagacgagggggagccgggcacctgcaaggaccgggagatct

SEQ ID NO: 33737 - DNA, 407 bp, Homo sapiens
ggggaactgaaattggagaacacgtgccagtcgactgtgaaatggttgctggataaaaccacagatgtggctttatccgagaaatgtgggactgaaattattttgatgagaggtacataagagagctgcggaaaagactgttgcttctgaggaggcaggagtaccttgttaatatccaaaccacccctgagttctaatgttccaactccacctaaacgaggaattggaaactttaaatggaattatctaatttaaaaccttagttttttctttgtctttctcagctgatacttgaagttatgttttgttttttaaccaccaagaacacttgcgagtttgttactgtatacatctctataggaaaagaagagtttcaaaatgcttgaaaagtactatgtggttgggat

SEQ ID NO: 33738 - DNA, 428 bp, Homo sapiens
  misc_feature (1)...(428): n = A,T,C or G
gacgaggcgccagccgttcacgcgttcggtcctccttggctgtttcaccgctttttccgacgcaccatggacgcccccaggcagggggtcaactttgggcctggtcccgccaagctgccgcactcagtgttgttagagatacaaaaggaattattagactacaaaggagttggcattattgttcttgaaatgagtcacaggtcatcagattttgccaagattattaacaatacagagaatcttgtgcgggaattgctagctgttccaaacaactataaggggatttttctgcaaggaggtgggtgcggccagttcagtgctgtccccttaaacctcattggcttgaaagcaagaaggtgtgcggactatgtggtgacaggagcttggtcagctaaggccgcagaagaagccaagaagtttgggactan

SEQ ID NO: 33739 - DNA, 393 bp, Homo sapiens
  misc_feature (1)...(393): n = A,T,C or G
ggcacgagcaggatgttctaccgggactggtggaactcaacgtccttctccaactactaccgcacttggaacgtggtggtccatgactggctgtacagctacgtgtatcaggatgggctgcggctccttggtgcccgggcccgaggggtagccatgctgggtgtgttcctggtctccgcagtggcccatgagtatatcttctgcttcgtcctggggttcttctatcccgtcatgctgatactcttccttgtcattggaggaatgttgaacttcatgatgcatgaccagcgcaccggcccggcatggaacgtgctgatgtggaccatgctgtttctaggccagggaatccaggtcagcctgtactgccaggagtggtacgcacggcggcactgn

SEQ ID NO: 33740 - DNA, 395 bp, Homo sapiens
ggcacgaggatgaatttaaacctcttggggaagagcctcacaatttaatcaaacaaaattgtgagctttttgagcagcttggagagtacaaattccagaatgcgctattagttcgttacaccaagaaagtaccccaagtgtcaactccaactcttgtagaggtctcaagaaacctaggaaaagtgggcagcaaatgttgtaaacatcctgaagcaaaaagaatgccctgtgcagaagactatctatccgtggtcctgaaccaattatgtgtgttgcatgagaaaacgcccgtaagtgacagagtcaccaaatgctgcacagaatccttggtgaacaggcgaacatgcttttcagctctggaagtagatgaaacatacgttcccaaagagtgtaag

SEQ ID NO: 33741 - DNA, 391 bp, Homo sapiens
ggagaagatgctgccaataactatgcccgagggcactacaccattggcaaggagatcattgacctcgtgttggaccgaattcgcaagctggccgaccagtgcacgggtctccagggcttcttggttttccacagctttggtgggggaactggttctgggttcacctcgctgctcatggaacgtctctcagttgattatggcaagaagtccaagctggagttctctatttacccggcgccccaggtttccacagctgtagttgagccctacaactccatcctcaccacccacaccaccctggagcactctgattgtgccttcatggtagacaatgaggccatctatgacatctgtcgtagaaacctcgatattgagcgtccaacctatacta

SEQ ID NO: 33742 - DNA, 376 bp, Homo sapiens
ggcacgaggctttccggcacttagtaaccattaaagtttgcattcctgggcatatgacctattttaaacaaaaacaacacaacatgcacccacagtaagctatctggccccttcaaatcttggcaagtgagtccagagggacagaaattaatctaggcagttatctagaatgacctttcatttcccctctccttgctcacaccccaaaaccaaaagcaaataaataaacctattctgaaaaaaactggctggggggaaggaaggggaagtgtaggtatatcgaagaggtcttaaacaacataatctctgagatcagaaaactcctggaacacagataaatttccctctctgtcccatctcacagcttgattccccg

SEQ ID NO: 33743 - DNA, 427 bp, Homo sapiens
ggacgtattataatattttatattaatgaagtactttagcatacattatgagcctgaataaagctttttattaaatattcacaagattgaaggagaaattctttatagttaggaaatgattttttcataaacaataaatagctttgaaaatataaaaaaaaatttagggctgggtgcagaggctcatgcctgtgatcccagcactctgagaggccgaggcgggtggatcacttgaggtgaggagttcaagatcagcatggccaacatggtgaaactccacctccacgaaaaatacaaaaattagccaggcatggtggcatgcgcctgtaatcctatctacttgggtggctgaggcatgagactcacttgaacctgggaggcagaggttgcagcagtgagccgagatcaagccgctgcactccagctg

SEQ ID NO: 33744 - DNA, 432 bp, Homo sapiens
ggaaacaccgctgttccgtaaccagggcatcattcctctggtgttgtctccagaccgagatgaagatctcatgcggcaaactgaaggacgggtgcctgttttcagccatgaggtaatccctgaccatctgagaaccaagcctgaccctgaagtggaagaacaggagaagcaactgacgacagatgctgcccgcattggtgcagatgcagcccaaaagcagatccagagcttgaataaaatgtgttcaaaccttctggagaaaatcagcaaagaggagcgagaatcacagagtggaggtctccggccgaacaagcagacctttaaccctacagacactaatgccttggtggcagctgttgcctttgggaaaggactatctaattggagaccttcaagcagcagtggtcctggccaggcaggccagccaggagc

SEQ ID NO: 33745 - DNA, 409 bp, Homo sapiens
gggcgccggaataaacagtatctttaatagttaatctctgcataaccactaggtggcactgtgactacacattaggaacctcaaccacacgactgcacttgtttaaaaaccaaccatatttttgtcttgccaactggattgagaaataagcagctgctcacactatatatcaagcttttcatgtattggctgaacaagcgtgaaaagaatataattacatgagaaagataattaactttcaggtcatgactcttatttgtaaaaatgtgaccaatgattggctgtttctatatagtatatgagtacattccttaaagacaccaaggaatcagttgagggtatttttatgtttggctttcatttgagctctaagcctgcgagattgaaaacaaatctttttgtttgtttg

SEQ ID NO: 33746 - DNA, 396 bp, Homo sapiens
ggccgcctaagagtcgcgctgtaagaagcaacaacctctcctcttcgtctccgccatcagctcggcagtcgcgaagcagcaaccatgcgtgagtgcatctccatccacgttggccaggctggtgtccagattggcaatgcctgctgggagctctactgcctggaacacggcatccagcccgatggccagatgccaagtgacaagaccattgggggaggagatgattccttcaacaccttcttcagtgagacgggggctggcaagcatgtgccccgggcagtgtttgtagacttggaacccacagtcattgatgaagttcgcactggcacctaccgccagctctttcaccctgagcaacttatcacaggcaaagaagatgctgccaataactatgcg

SEQ ID NO: 33747 - DNA, 547 bp, Homo sapiens
  misc_feature (1)...(547): n = A,T,C or G
gctatgacacgttacgcgaccgtgattactgctcttgttctaacgtattcctttgttacatggagatcctcatctacnaagcgtgcgggngnnnnnnaactgagacatcgtagcnacgacacgccagctggacgagggncttcacgaagcctcccaggacttgggttatgagacaggttttttggatgtgggttctcaggccctcgatgggggtgggggcaccatcatgggttatgggcagacgggagctggcaagacatacaccatgatgggggcaactgagaattacaagcaccgggggatcctccctcgtgccctgcagcagggtgagaccaacaggattatagccttccacactatgaacaaaaactcttccagatcacactgcattttcaccatctacttagaggcccattcccggaccttatcagaggaaaagtacatcacttccaaaattaacttggtggatctggcaggctcagagaggctggggaagtctgggtctgagggccaagtcctgaaggaagccacctacatcaacaaatcg

SEQ ID NO: 33748 - DNA, 409 bp, Homo sapiens
ggggcggtttggctgcttatgattggccgagacaccactgttattaccttcttaagttaggttttcagtttaaggtaggttgtagttcattaagtgggaactgaaagtatggagacagcctcaggccactggcctcctgcttattgattgattgattgagacagagtcttgccctctcacctaggctggagtgtagtggcatgatctcggcccactgcaacctctgcctcctgggttcaagcaattctcctgtctcagtctccctagtggctgggatcataggtgcccgctaccacacccagctaattttttgtgttttgagtggaaataggattttgtcatgttggccaggctagtgttgaactcctgacctcaaatgatccacccaccttggcctcccaaagtgctg

SEQ ID NO: 33749 - DNA, 390 bp, Homo sapiens
ggcagccaacacgctccagggtaggcagcaaacaagaaagagtgcgatatgagggctcagtgagtttggcaggccaaattctgttctctgcagcctgtttttgagtagttcgtgaataaaggcacccggctacttgtctaagcacaagtgggtgggtaactcacttcctggttctcgggtgtaaaaacacacttccaactgggaaactttttgggggaaattaactggacacctatctcggaggtttattttcttgcaaccagggaaggcgtcctcctcccttccctggataacccttcaccttgactgtcactgctctggtgtcaactccagcgtcggtacaggcggaaggacttctactgctggtctcattggatccctagcactgct

SEQ ID NO: 33750 - DNA, 421 bp, Homo sapiens
acagaagagaatggcccagcagctccagcagcagatgcagcaaatcagcgcagcatctgtgtggggaaaccttgctgggctaaatactcttggaccccagtatttatcactttatttgcagctccttcagcagactgcctcctctgggaacctcaacaccctgagcagcctccacccaatgggagggttgaatgcaatgcagttacagaatttggctgcactagctgctgcagctagtgcagctcaaaacacaccaagtggtaccaatgctctcactacatccagcagtcccctcagcgtgctcactagttcagggtcctcacctagctctagcagcagtaattctgtcaaccccatagcctcacttggagccctgcagacattatctggagcaacggctggcctcaatgttggctctttg

SEQ ID NO: 33751 - DNA, 388 bp, Homo sapiens
gggtagacttggaacccacagtcattgatgaagttcgcactggcacctaccgccagctcttccaccctgagcaacttatcacaggcaaggaagatgctgccaataactatgcccgagggcactacaccattggcaaggagatcattgacctcgtgttggaccgaattcgcaagctggccgaccagtgcacgggtctccagggcttcttggttttccacagctttggtgggggaactggttctgggttcacctccctgctcatggaacgtctctcagttgattatggcaagaagtccaagctggagttctctatttacccggcgccccaggtttccacagctgtagttgagccctacaactgcatcctcaccacccacaccaccctgga

SEQ ID NO: 33752 - DNA, 403 bp, Homo sapiens
ggccagacctggaaaccgacgaagagatccttctaaaggcctacgaggccctgcttggacttgtgggcgtttacactgacctgtacgttatcaacagtagcgtgtgtcaaaagactcatgcacagggactcagggatggggactgccaggggcaattggcaaatgtccaagtagagattacacccaacacaccattcctttcaggagcattaggtgggaggtttgacccaaaaaagccaatccttgcattccaggagtgggctgtgcctcccacctcttccttcccactgccaaaggcctgtgttgagaaagatgtgatgccaaaggacgacggtggccaactaaagcaaggcttccttccaccctgtggcctgcacttgagccacaaagtgtgtgagcgtgg

SEQ ID NO: 33753 - DNA, 389 bp, Homo sapiens
ggagaccatccaccatcacccttttcccctttggttttgaaggccttgccctaagctacctgagggtttaggaggtctgaacacacacagtggagaggttaatctaggttgggaaactgagtaaaagtccagagcaggaatgagcctgctgtggcgtgggtttggaaaggctcacaggaaagaacctgcaggatcaagggtgggaggggaggcccctgaggtgctctccagggaagaggggctggggtttaaatagcatgcttggaggaagattttccttcaatttttcctaaatccttgaattcaccagtagatttttgtaaacaaaatgtaagtcgatgttttctctcaattatcctaggagtgacctttatatgtgtggaagatta

SEQ ID NO: 33754 - DNA, 392 bp, Homo sapiens
ggaagtgaagaaagatgaggccggagaaaactattccaaggatcaaggtggtcggacattgtgtggggtaatgaggattggcctggttgcaaaaggcttgctgattaaagatgatatggacttggagctggttttaatgtgcaaagacaaacccacagagaccctgttaaatacagtcaaagataatcttcctattcagattcagaaactcacagaagagaaatatcaagtggaacaatgtgtaaatgaggcatctattataattcggaatacaaaagagcccacgctaactttgaaggtgatacttacctcacctctaattatggacgaattggataagaatgatggagaaaatgtttcgatgaaagatcctccggacttattggacaggg

SEQ ID NO: 33755 - DNA, 419 bp, Homo sapiens
gggccaaaatgggaaaggaaaagactcatatcaacattgtcgccattggacacgtagattcgggcaagttcaccactactggccatctgatctataaatgcggcggcatcgacaaaagaaccattgaaaaatttgataaggaggctgctgagaagggaaagggctccttcaagtatgcctgggtcttggataaactgaaagctgagcgtgaacgtggtatcaccattgatatctccttgtggaaatttgagaccagcaagtactatgtgactatcattgatgccccaggacacagagactttatcaaaaacatgattacagggacatctcaggctgactgagctcgcctgattgttgctgctggcgttggtgaatttgaagctggtatctccaataatgggcagacccgagagcatgcc

SEQ ID NO: 33756 - DNA, 410 bp, Homo sapiens
acttgaggtcgggattcagggccggcctggccaacatggtgaaaccctgtctcgactaaaaatacaaaaaaaaaaatttgacctgggcgtgggggcgggtgcctgtaattccacctgcttgggtggctgaggggggaaaatcccttgaacctgggaggcggaggttgcattaacccgaaatcgcacgactgaactccagtgtgggcgacagagtgagagtctcaaaaaaaaaaaaaaaaaaaaaaatttgccgggaaattttcccccccttgccaaaaacctttcggggaaattttaaaagggggggtttttaacccgggttttttttcccccccccaaaaaaattttttttttttttttttgggggggggggccgccccccccaacggggttttagggccccaaaaaat

SEQ ID NO: 33757 - DNA, 417 bp, Homo sapiens
ggagttatatgtaaggttacgtggtccagtaatgtcttacattgataaattaggtatggaatccatcagtgttacgtgatgagaataggtgaacacaccttgtcagtgatgatgtaaacttctctccttggcaggacatgggcaaacatgctgattggtgcaaatgtggtgccgagctgtccatagctgcagtgaaagatgaagagcaagaccttctctaggttttctagctttcattaaatgtatttttttccccagagctaatttgaaagttgattggaccactgtggatggggtctcattaagaatgtgggaaataggggccgagtgcggtggctcacacctgtaatcccagcagtttggaaggccagggcaggtggatcgcttgatcccaggaggtcgagaccagcctgggga

SEQ ID NO: 33758 - DNA, 406 bp, Homo sapiens
ggggtggtttagttttctgctttgtggttacaatattgttttttaaatattcaacatgaatacactttcttgtttggataacgtgtaaaacgtctacaaggagggatagataataagttttcccttcagaatgcactgctttgcctgggatgaggaataatttataatggtaactgttgctggttaaaatttggctcctacccacattcatgcaaactcagtgttctagattaaaagagatttaagagacttgccaagcaaatgcatggcatccttagatgtatcctgatttgaataaaacagctataaataataatatttttgggattattgaaaaatttgactatagattagttttcaggtgatattggagaattaatgttattattgttaggtatgttagcac

SEQ ID NO: 33759 - DNA, 471 bp, Homo sapiens
  misc_feature (1)...(471): n = A,T,C or G
nttgataacctatgatttgattaacgcttgcttggcacgaggaccaaactccacacgatgctgttgttccctaaaagaagcattgagctaacccttgaactcacatttttaaaatacagtatttctcttttccacatctccatgccttcgcatcaatgcttgtttttcctggcgaacactatagataatctcctgtttgaaatgtgggacagggtgtttcatggcaggggagctaaacttctcctctttatagcgaactggggacccaaatgtccctgtcatttatagtgaactgatgacccaaatgactccctgtcagtatagtcccatgtggcccatgcttcacacaagccgaaatgaacgcactgtttttaaggctagattatcagctctagaacgatcacttccaagatgggagctacctcctcagatattcacactatgaaatggaggtgctcgatgcgtttcaca

SEQ ID NO: 33760 - DNA, 411 bp, Homo sapiens
ggggctggtatgaccacagttcatggcggctcttctcgcttgggtcatgggcatcttccagcacctgctgtgctgggaaggccgaggatgggggcccaacactgtccaggcctgatggggcctggctgggagtcctgtgggcagcatggaacatgcagctgggcttactgtgaccaggcaccctctggcactgttgcttgccctgtgccctggaccttttcctgcccttctccttcctctgctactttggggctaccccttggcccctcctggactgtgcaaactccctcagggagcccccctgccctgtaactctcacttaacttcctaggggctgctgagcccacccaaaggttgttggagttcagcggggcagctctgatcccttgtcatcaggggcgtaagggctgg

SEQ ID NO: 33761 - DNA, 435 bp, Homo sapiens
gggttttttaatttttaacctgattttctgatgtcatgatctaaatgaggggtagtgggggatggaagagagtaccaggtggtccaccgttggggagtggggccgtccgcctgctctctactgtgcagacctcctaactgagtttacacacgcttgtgtttgcaacactaggtctggatgggaggtgaggggtgtgcgtatggctgccatgccagtgtctgtgcacatccctgtctgttggtctccatggccactgtggactgggacccttgggggaagcctgcccatgtcgggctgtgggaggctgatcactgcgtgtgagagtggcttcccttctgcctgactccccactccctgacctgccccttccttggttttcctcctactgggctccaccaaggcttttgtagcccccaccctgcctggtgtgcagct

SEQ ID NO: 33762 - DNA, 406 bp, Homo sapiens
ggattacattggcacaatgtatactttagtgctcacccgtaggcaaatctctttttaaaaaactctttggtgcacaagtaacacatttggccacaaaacaccaaagaattgtaggcagtggcccctattgagaagttttccggtagagttggaaatcagttgtgaatacattctttgctagttggagtgcttgtttactaagcatgtgccgtcgtaggtattagtgctagtctcaaataggtgcttcccctgaggtgcaggggaagaccaaagtttgcaactcgaactgctttcgtccatgtttctcacattgctgtattttagaaaataggggttaagactgataacaaccttttacattgtgactgtgtttgcattgtctaatgacagataaatccttaacatt

SEQ ID NO: 33763 - DNA, 430 bp, Homo sapiens
ggcaagtgataagtaaatttctacaaaaaaaaatggttaatgttcattgactggctttttaagtgtatattttggaggacgggtgaaaaggtaataactaaagccagcgagtgaattaggatttcaaagtgccctaatagtgtgagtctccagttcctaaaatatgaagagtgctgtcgttggggtgaaaccatgagactgacagatctgccttaaatggggggtgtgggaggtggtggcgatggttattttctttcctttaggaaatgaacccttcttacatcattcaagttctgctctgaggatcaagcttgggtctgatttaactcaacgacactggcattttttgttcattactggactaaaggggtgagccacccacttgccatttgctccttgccttccaggaaagcacaattttcattagagc

SEQ ID NO: 33764 - DNA, 403 bp, Homo sapiens
ggagtgcagaaaggatttacatatctaatattctagtggctctgatgatatacagtggcaatgtaagggctgctggccactcaaaattaaaacctgaaggtgacatttgcctttcacaaagacagttgttgattcacctctacaaactccataagacagcatctcagcaaaacagtccacaggggtctggcactcacacaaataccattctgcctctttccagccctcttcccacatcggccaacacctggcctcgggtataaaaagttatgggccaaatgtccaagccagtgtgtttactgatactggcttgcctagccaaaagccattcaaattcacctgaatgtcaccacatgtgtaaaggagacagtaggcaagggggaaaggaagacacctgtctttg

SEQ ID NO: 33765 - DNA, 488 bp, Homo sapiens
  misc_feature (1)...(488): n = A,T,C or G
tggatggccccccccttattgaatacgttcatcgtngcgaacancannacgccaagctgggcacgaggagagaacttcccatactataggcagttggacaaagatttaaattttttgtttacaaatgctacccagatcgggtaattgggaccacacatgcggagaacccaacagcttttggacttatcggccaatggtcttcttgggaaggtctctcctagtcatgggaattgtctttttattgttcaagcttttgcatagacctggaagaggcatccattgctgctacccctgagtttataatcatgctgcaaggccagtggggaactttggcacaaagcattgaatgagatgggactgcacttatgtagcctgcatttcttgagaataaagatttctgttcatttagagccgaggttatcatctgggggaaaaccagagagctgaggccaaggatgccactaaaatccctacactgtgcaggaaag

SEQ ID NO: 33766 - DNA, 429 bp, Homo sapiens
  misc_feature (1)...(429): n = A,T,C or G
ggctcatcaccgagtggctcaacctcatcttcaagtggtttctttttggagacaggcccttttggtgggtccatgagtctggttactacagccaggctccagcccaggttcaccagttcccctcttcttgtgagactggtccaggcagcccttctggacactgcatgatcacaggagcagccctctggcccataatgacggccctgtcttcgcaggtggccactcgggcccgcagccgctgggtaagggtgatgcctagcctggcttattgcaccttccttttggcgggtggcttgtcgcgaatcttcatcttagcacatttccctcaccaggtgctggctggcctaataactggcgctgtcctgggctggctgatgactccccgagtgcctatggagcgggagctaagcttctatgggttgactgccn

SEQ ID NO: 33767 - DNA, 349 bp, Homo sapiens
  misc_feature (1)...(349): n = A,T,C or G
aagacncnaancggctgatcggccgcaagttcggcgacccggtggggcaggcggacatgaagcactggcctttccaggggatcaacgacggagacaagcccaaggtgcaggtgagctacaagggggagaccaaggcattctaccccgaggagatctcgtccatggtgctgaccaagatgaaggagatcgccgaggcgtacctgggctacccggtgaccaacgcggtgatcaccgtgccggcctactataacgactcgcagcgccaggccaccaaggatgcgggtgtgatcgcggggctcaacgtgctgcggatcattaacgagcccacggccgccgccatcggctacgg

SEQ ID NO: 33768 - DNA, 427 bp, Homo sapiens
ggctctcttcgaattacatctatctgtcttggtctcttgctatctctgatttattttctttgctttatatgaactagggctcaaactccctgtgaagagtcaactttttgcttttccttagtttagactacccattcaatataaatcttgtaatcctgatagaaagtctgtgagaattctaagaattctaagaatggcccccaataacccctcacccttgcaaaataattgtgggtagaacctaagaatatggtgaaatgtcattgctatgattataggtccccaatgattgaccttcaaatagcaaaattatgtgagtgggtctaatctaatcttgtgattaaatctagtcctataattcctttattatccaagaagagatcctgatcaaaaccccaataaagggttcttaggtctcgcataagaa

SEQ ID NO: 33769 - DNA, 372 bp, Homo sapiens
aacgtgcaatcttgaaactgaggtgttagaaaacttgatctgtggtgttttgttttgttttttttcttaaaacaacagcaacgtgatcttggctgtctgtcatgtgttgaaatccatggttgggtcttgtgaagtctgaggtttaacagtttgttggcctggagggattttcttacagcgaagacttgagttcctccaagtcccagaaccccaagaatgggcaagaaggatcaggtcagccactccctggagacacagccttctggctgggactgacttggccatgttctcagctgagccacgcggctggtagtgcagccttctgtgaccccgctgtggtaagtacagcctgcccagggctgctgagggctt

SEQ ID NO: 33770 - DNA, 470 bp, Homo sapiens
ttagatgaccgttgcatccacaatattccgggcttctgggtcaccgccttcctgaaccacccgcagctctcagccatgatcagccctcgagatgaagacatgctctgctacctgatgaatttggaggtgagggagctcaggcactctatgacaggttgcaaattcaagttccgcttttggagcaacccctacttccagaacaaggtgatagtgaaggagtatgaatgcagagcctcaggccgagtggtgtctattgcgactcgcatccgatggcactggggccaggaacccccggccctcgtacacaggaaccgggacactgtccgaagcttcttcagctggttttcacagcacagcctcccagaggccgacagggttgcccagattattaaagatgacctgtggcccaaccccctgcagtactacctgctgggggataggccctgcagagccaggggaggcctcgcaag

SEQ ID NO: 33771 - DNA, 374 bp, Homo sapiens
  misc_feature (1)...(374): n = A,T,C or G
gggtgcgggagggatcctgaaccgcgcggccgaaccctccggtgtcccgacccaggctaagcttgagcatggctgagcaggagcccacagccgagcagctggcccagattgcagcggagaacgaggaggatgagcactcggtcaactacaagcccccggcccagaagagcatccaggagatccaggagctggacaaggacgaccagagcctgcgaaagtacaaggaggccctgctgggccgcgtggccgtttccgcagaccccaacgtccccaacgtcgtgaatgggggaaggggnnnnnnnnnnnnnnnnnnnnnnnnnnnnnnnnnnnnnnnnnntgnnnnnnnnnttnnntnntnnnnnnnnnnnnnnnnn

SEQ ID NO: 33772 - DNA, 476 bp, Homo sapiens
  misc_feature (1)...(476): n = A,T,C or G
aggggctcggggggctcgcnnngtaaatggcatangatnatctntgcgnccaccttggcacgaggaccagngtgcttgggtttgccatgatgcgaggctgagttgctgtttcgtcttgattctctccctgggtctgcgttccctcccctgggcctgactgagcctgctcattgtttttccctttattacacaggacagccaggggaggaggggggcccagccctgggaggctggtgggaggcagggggcaggcctgcggatgcatgaaataatgttggcattattttttaattttttaaaaaataaatgggatcttatttaattgtcctgttgcttcccactccccgcctcctaggatgttagcccaagctcagggtaggcccagggggctgggagaaatgaagccacccatggggactggggaccaggggccttcagcatggcttctaaggtccctcctccccctaccccatctn

SEQ ID NO: 33773 - DNA, 402 bp, Homo sapiens
  misc_feature (1)...(402): n = A,T,C or G
gggtttgaatgtctgtcatgcacataatagtctgctagaaatttcgaaaatgaataagactggctgggcacggtggctcatgcctgtaatcccagcactgttagaggtcaaggcgggcagatcacctgaggtccggcattcaagaccagcctggccaacatggtgaaaccctgtctctactaaaaatacaaaaaatagtggggcatggtggcgcattcctgtaatctcagctactcgggaggctgagacaggagaatcacttgaacccgggaggcaaaggttgcagtgagccgagactgcaccactgcagtccagcctgggcaatagagcgggactcggtctcaaaaaaaaaaaaaattgattaaaacggtattctcacctccaggaacataacctaaatgn

SEQ ID NO: 33774 - DNA, 422 bp, Homo sapiens
gggcaagagtcctgatctttcatgctgcacaatatgagcatgcaaaaagctttttccagcagaacatgttccctcgtctccagttgccggaaaggaatttggggatcaagaacttaactcgtcctacccccatgttgagttctgccctggaaaacccaaagcaagtagtgatcatagtacagaacccgaccaaagtaggctggtgaggaagtccaggctccaggggaacagacgctgcccagtgttcatagcttcctgcaacttgacagagcctgagtttgcctcttaatgggagaatgagagagagctgtagtgtcacctgacattccccaaaccttgtgaagcacgttggcctaagtgtgccgtgatcccagcccacactatcctgggtgcatctgctaatgggagaccaaatctttgtg

SEQ ID NO: 33775 - DNA, 475 bp, Homo sapiens
acgaaaattgataccgtttgacacaactacgcccagcttggcacgagggtgggaatgataccagctgaaattaagaaccggaccaaaatacatttagaggatggagatattctagcatccaacttctctgttgacacacaagtcgcgtacatcctaagtctgggcgtcgtgaaagagttcaggaagcacggcataggttccctcttacttgaaagtttaaaggatcacatatcaaccaccgcccaggaccactggaaagccatttacctgcatgtgctcaccaccaacaacacagcaataaacttctatgaaaacagagacttcaagcagcaccactatctcccctattactactccattcgaggggtcctcaaagatggcttcacctatgtcctctacatcaacggcggacaccctccctggacgattttggactacatccagcacctgggctctgcactatccagcctgagcc

SEQ ID NO: 33776 - DNA, 381 bp, Homo sapiens
acaagggcgaggctgtcctcccagggctgccactaccagagacctgggggagctgaattccgaacagtgatggtgacactcagcacctttgccacagccggggggaaccggcttctgcctctgggatgggctcttattaggaccaccgtgcagcccagccagggaggacatgagaagggccagagggggcctcaatgaaccaaaacaagccaagctgaatggggcctgtgtgctccagggccctctttagccccctcccccaaaggtctgggtccctgccaccaacctactgaaggccggcccccggctcacctcacctgagcacctgcaccaggccccaggcacatggctgccctgaactcagatcacctagaccttgtc

SEQ ID NO: 33777 - DNA, 404 bp, Homo sapiens
ggaccagtgtgcttgggtttgccatgatgcgaggctgagttgctgtagcgtcttgattctctccctgggtctgcgttccctcccctgggcctgactgagcctgctcattgtttttccctttattacacaggacagccaggggaggaggggggcccagccctgggaggctggtgggaggcagggggcaggcctgcggatgcatgaaataatgttggcattattttttaattttttaaaaaataaatgggatcttatttaattgtcctgttccttcccactccccgcctcctaggatgttagcccaagctcagggtaggcccagggggctgggagaaatgaagccacccatggggactggggaccaggggccttcagcatggcttcaggttccctcctccccctac

SEQ ID NO: 33778 - DNA, 390 bp, Homo sapiens
ggagcgctcgctctactctctctaacgggaaagcagcggaatacaagagactgaactgtatctgcctctatttccaaaagactcacgttcaactttcgctcacacaaagccgggaaaattttattagtcctttttttaaaaaaagttaatataaaattatagcaaaaaaaaaagggaacctgaactttattaacacagctggaacaatccccaacggcgggggcagcggcggaaaaaaaggttaaattaagttgattttctggggtggggggtggtccgctagtcccacggggagggaagctgcacattttttcaaagggaccgaaaacctgctggaggttgggttttcccggcagcagcccgacgcaaaccaaggatctggggatcttg

SEQ ID NO: 33779 - DNA, 509 bp, Homo sapiens
  misc_feature (1)...(509): n = A,T,C or G
agtgnagagccggttcnttttgaaagcagcttgacctagttagcgtcatgctnggcaccaggccggtgcctatggggtcccggtgtacctaaagggagaaggaccctttgtgctaaccagaattatactgtctcttgaaggagagcaggagctcagactcttagagccagctgtggcttcggacccaaggcctgacctaggctgctatcctaatattgcaggaggggcctttctttcaagccccaccctaagggttagcccttggccaaatcttttgccgtctaagcccagccaggcttttctgactaaataagcaataagaggctctaagctgactgagttgcaaggaccctttccgccctcccttggatctccatgtttttccagatggcggaagagcatgtgccaccccctttcctaacaaacttgtccaagggcttggcgtgggacccatgaccaaagcccaagatggctttgtgggagtggccctgctgcatttgcatgaagcn

SEQ ID NO: 33780 - DNA, 377 bp, Homo sapiens
gggtgtgctggagttgtctgaaccgatatttctttttgttccttggtattggtgattcgtcgccgagtcaggctcatgtacaaaggcatgtttcgtgttgattgttcccatgtaagatatttttaaagccactgcttattctttgttaggaaaatgtaacagcagaaaaggaaagaaacaaagaacatgaacaaaaagcattaaactggctccatcaaaagacgttgaagggcagtgaagagcacagactctgtgggcttcttagataagaaaacgtagcttcagtgggggctccagggttgcagagtatgagtgacacagaccgggactattccattagcctgtggtctgcagggtaggcccgcaggaaatgagga

SEQ ID NO: 33781 - DNA, 377 bp, Homo sapiens
ggcctcgtgccatggggtggtgtcatggagcctcatgcccctgggtcgtgagctcgcctgagtatggggtggtgtcatggagccgcatacccctgggttgtgagctcgcctgcatatgcagggtctgtcatggaacatcccaagtctgtgcagcagggagccccatgcccctgggacatgaacccacctgcgtggaatgctgtttgtgaggtgtctacagggtttatagtagtcttgtggacacagaaatgcacaggggacacttacggacacagaaatgcacaggggaggccgagcataaccaggggtgaggggcaggcagcagttgtagttactgccgcggggcactgctatgtgcagggacagccagcgcccag

SEQ ID NO: 33782 - DNA, 433 bp, Homo sapiens
  misc_feature (1)...(433): n = A,T,C or G
natggggnacatctatgatcgtgattcacgccagcttggcacgaggaaattattttcttggctgggtctctcattgaattatcagaccccaagaggagatattggaacaggctcccttcatgccaagggtctttctaagttaatactgtgagcattgagcccccattaaaactcttttttacttcagaaagaattttacaggctaaagggaaagaaatggggggaaactctccccgaagtgcttacccaactttaaagggtacccttcaatatccccattggcaactgccgctgagatcttatagaggaaatataaccggtgtgagatctagcaatgcattttgaatcttcactccctaccaggctcttcctatttttaatctcttcacctcagaactagacatatggagagctttaaaggcaagctggacgg

SEQ ID NO: 33783 - DNA, 471 bp, Homo sapiens
  misc_feature (1)...(471): n = A,T,C or G
gaggccggagggcccgcnccagcnangcattgantatctncgcgccangcttggcacgaggggcacccacaatattgtggttttgacttttaaaaaacatttaagctttaaaaaaaaaatctcagttatatgtgcataaatgaacaatcagcagcccacaggctgttttccagaaagcagccacttttaacccttggctgattcatctgggatttacttatgccttaaaataacagcttatattgctgcttcttgatttttcacttttagggctttgattttttaccagtgagttaaataatctggttatggatctgtttctcctactagcctggaggcccttgggtggctcaaatggtagtatttcagcacacctgggggggctcagtagttcagtaaacgatgaatgagtgagtgggtaagtgatgaatgaatgaatgtggtcatcctgtctcaggatttcagtgatac

SEQ ID NO: 33784 - DNA, 468 bp, Homo sapiens
  misc_feature (1)...(468): n = A,T,C or G
nggcaggcggccncccctgaaatcccatttagctgcggacctcatacgccagcttggcacgagggcactgatgactacctggaccaaccctgccttgagaccggcaaccgcatcaagttgtacagcgagtccctggcccggtatggcaagagcccatatttatacccgctctacggcttgggcgagctgccccacggttttgcaagattgagtgccatctatggggggacatatatgctgaacaaacctggggatgacatcatcatggataacggcaaggcggcgggcgtgaaatctgaaggagaggtggcccgctgcaagcagctgatttgtgaccccaactacatcccggaccgagtgcggaacgctggccaggttatccacatcatctgtatgcttagccaccccatcaagaacaccaacgacgccgactgctgccgaataatcatcccccagaaccaggtcaac

SEQ ID NO: 33785 - DNA, 470 bp, Homo sapiens
agggaggggggccccccatcgatacgatgaacccctgttgcgccagcttggcacgagggctgcagactggctccccccctgccaccacccagccacagggcaccacacagccccccgcccagccagcatcgcagggctcaggaccaaccgcatagctgcctatgcccccgcagaactggctgctgcgtgtgaactgaacagacggagaagatgtgctagggagaatctgcctccacagtcacccatttcattgctcgctgcgaaagagacgtgagactgacatatgccattatctcttttccagtattaaacactcatatgcttatggcttggagaaatttcttagttgggtgaattaaaggttaatccgagaattagcatggatataccgggacctcatgcagcttggcagatatctgagaaatggtttaattcatgctcaggagctgtgtgcctttccatcccttccg

SEQ ID NO: 33786 - DNA, 418 bp, Homo sapiens
ggcttaaggttcttggactctgcatggttccctttagcctgtcttcgggcctgccacaattaaatgaccgcaagaaagaagtctatgctaagccccataatgaacgtttcaagcaagaaggatgagaattttagatctggaagtgtccgcgggacaggatcttgtcaagacctgatggggaagttctagagtgctgccaggttgccagatttctaagaaggagtttgaagaggagaaaaggatttttgcatgtttagaaataaggttcaggagaatcttgacagtgaatgtgtctcattacattgaataacagctacaggatgttcgagagctgatgagtctcgctctgtcgcccacggctggagtgcagggtgcgatcttggctcactgcaagctccgccttcctggttcacgctat

SEQ ID NO: 33787 - DNA, 404 bp, Homo sapiens
  misc_feature (1)...(404): n = A,T,C or G
ggggtgcgcccgctgcggggcctccgcgccttgtgtcgcgtgctgctcttcctttcgcagttctgcattctgtcgggcggtgaaagtactgaaatcccaccttatgtgatgaagtgtccgagcaatggtttgtgtagcaggcttcctgcagactgtatagactgcacaacaaatttctcctgtacctatgggaagcctgtcacttttgactgtgcagtgaaaccatctgttacctgtgttgatcaagacttcaaatcccaaaagaacttcatcattaacatgacttgcagattttgctggcagcttcctgaaacagattacgagtgtaccaactccaccagctgcatgacggtgtcctgtcctcggcagcgctaccctgccaactgcacggtgcgggaccacgn

SEQ ID NO: 33788 - DNA, 418 bp, Homo sapiens
ggccgtgttggctacggtggtctcgatctcctgaccttgtgatccgcccgcctcagcctcccaaagtgctgggattacaggcggaagccaccgcgcgcccggccaggattttttcattgttgtaaaaataataggtgcctattcagcagaaaataaaatccttgttgctgtgggttgaatagctcccttgcaaaattcaattggtgccaatgtgccagtatgaagaggtggggcctttaagaggtgattaggccaagagagttcctccctaatgaataaaattaggtcccattacaaaggggcttgaaggagggagttgattctctctcgccaccatctggtgatggcttgcttgcctcttccacatgatggaagtcaaagggcagcctccagaaatgaaagaagtaagtttctgttc

SEQ ID NO: 33789 - DNA, 391 bp, Homo sapiens
ggctcagtacaaactccgttatgatatatcctagccacatgcaggggaacatgtaggattttctatattgaaagaatacttttctggcaaaaaaaaaaaaaaaaaaaaggaggggaaaccaaaagccccttttttttaagggggaccaaaaaaaggtttttggcaacaaattggaaattttttggaccaaaagttgggaaaattaaaagcccttggaggcccgggacccctgggaccaccgaaaaaaaacctggttaacaaaaggagttgaaaaaaacccttcccaactttttaaccccttaaaaaaacccaaaaatttttaaggaccttggaaaacggaaagacccccaacccccgccgcctttagaaaaatctttttttaatccaaacg

SEQ ID NO: 33790 - DNA, 368 bp, Homo sapiens
ggcccacttactgaggggcgaatgctttggccccttgacttcttatgagtatattataggagacaagcacattcttgcaaagattccgtggaaatacatgatagcggacgaatgccaccgaatgaagaatcaccactgcaagctaactcaggtcttgaacactcactatgcggtccccaaaaggatcctcttgactgggaccccgatgcacaataagctccctgaactctgggccctactcaacttcctcctcccaacaattcttaatagctgcagcacatttgaacattggctcaatgctccatttgccatgactgttgagagggtggacttaaatgaataagaaactatattgatcatcacgcggg

SEQ ID NO: 33791 - DNA, 402 bp, Homo sapiens
  misc_feature (1)...(402): n = A,T,C or G
gggtatgctcagtatctttatctttctggaatttagacctataatattctaacattcttggaatgtgagccatctaccactggtttctcttctagtagtagttttaatttataataaatttttgagggatatgatccaaagaaacttacaggcattatccatcttaattgtcccaagtgtgtgtgtttaacagcttgttgagatataattggcaaactgcacactgcccatatttagaagatacaatttgataagttttcatctattttgacacctgtgaaaccatcgctgcagtcaagctgacagaccttctcccccagtggtgccccagcaccccttagcagtgcctcccttcaccttttctctttctgctgttaatcagcagttgatctggctggtttn

SEQ ID NO: 33792 - DNA, 441 bp, Homo sapiens
  misc_feature (1)...(441): n = A,T,C or G
gggggtccnattgagaccgtcagtgaatgcttatcgccaagcttggcacgagggtggaggtggattccgagtggtgacaggacgctgaccgtggagcttaagccactgcctctccctctggtcccacaaatgggcgccccccctccccatgcaggtggtgtcgggcccttcttgctgccctgccccaagttgggggtcagtgctgcctgtccccatgcttaacatacccgcctagctgctggcacatttttcttggtttggccttttatttttttctaataacctaaaaactggcaaaatagttctgcaggttgaagccatgtctacatgaaagtcctcagtaagtgttagagggaacagggcggagatatccttatgccacccccgctggaggatgtgggcagcttatggccctggaggcggtgcggcagggaagagggg

SEQ ID NO: 33793 - DNA, 377 bp, Homo sapiens
  misc_feature (1)...(377): n = A,T,C or G
gggaggaagagagcagctcgcttctaactggactgcacgttggtgacagcgtcccaagctggggacagacccactctgtaactttcagctagattcagccaccagatcccacaaacatgacccttggtgcctacaaagagaagatgaaggagctcccgctggcgtccttgatctgctcctgcttcctggccgatcccctgaataagtcgtcctacaaatatgaagcagacacgggggacctgaattggtgcgtcatttccgacatggaagtcatcgagctgaacaaatgcacctcgggccaatcctttgaagacatcctgaagccaccctcctttgatggggttcccgagttcaacgcctccctgccaaggcggcgn

SEQ ID NO: 33794 - DNA, 422 bp, Homo sapiens
gggtaaaatgatacaaaatttaaagtttatagagccagttacaaaatcctattagtcatatatttatagattgtgttcacagcaatcatttaaccacaaataaaatatcccttgatgatactgccataatgatatgtccattattagattatgttacatgacaaagttgaaggaatttggcagatgcagttaaggttcctaaacaactcactttgagactgttgaaagggcctgacctaatcaagtgaacccttgcaagaagaattctccttgtaagccttgaagaagtatgtgagagggccacattggctaaaacctaaaggtggcctctaggagatgagacctaccttccagttgtcagcaagcaggaaaaaaaaattgggacctcagttgcaaccacaaggaactgaattctgccaaaa

SEQ ID NO: 33795 - DNA, 404 bp, Homo sapiens
ggagtgattcttggaaagaatttgaggtccccaaaggtgtatttttgggcaaatgaaaccataaactccgactggcttctgtagatgccaaagggctctttttcagctaaccctgggaaggctctgtgggagggaggtcggagccagctgtttctcgatctttggtatatctttggatcttatttgtacattaatgatattaacactccagtggggggtggggagtccctgatgctatggctggggagggtggagtttgaagactcttgggaaagcctctcctggggccactgttgggggtgggagtgagcccaccacagaggccacaggcaggcccccacttcaggcccaaggcctggggcggggggaacagtcactgggtctcagattctgagactgttgtt

SEQ ID NO: 33796 - DNA, 423 bp, Homo sapiens
  misc_feature (1)...(423): n = A,T,C or G
ggctacatcagagcattcatactggcgaaaaaccctttgagtgtaaggaatgtaggaaggcctttaaacttaattcatcccttattcaacatctgagaattcattctggtgagaaaccctatgaatgtaaggaatgtaagaaggcctttaggcaacattcacaccttactcatcatctgaaaattcataatgtaaaaatctaagaaagtcttttcaacttctgtgttatagaacattctatgaatgtagtaattaatctattttgctccatacatgcaactgcgttggcattagaggttttataccattaaaagagtgtgacaatgtattgtagtccatcatcactcaaacctgaaacttcagcatatttgttctaaaaactaatcctgttataagaatgagaaagacatttaccgtcatccn

SEQ ID NO: 33797 - DNA, 472 bp, Homo sapiens
  misc_feature (1)...(472): n = A,T,C or G
gggcgggggncctcgcaatgaggangcctgantatctntgcaccaaccttggcncgagggcaaccaggatgtgaggagccggtacaaggcgcagccagctcctcccgaactcaactcggaatcggaagactactccccaagctcctccgagactgttcgctcccctaactcgcccttttaataagacccttttactcaaagtcctagcttaaccctttgagactctgagatttttttcccccaaatttgtgtaaaacagtttcatctgatctatctagcgctcaatgcttgaatggcagaactgaaagtgttttcaggtatctttgtagcggtttccctttactgaataagatgacacgtggtgattgtgaagatggtaatttgctgctaatagagtcctcaaagggttaaggccaatttgcaatttttttttaaacttataagcaatgaatgttttcatcagtcaagctag

SEQ ID NO: 33798 - DNA, 409 bp, Homo sapiens
ggagcagaacaaactcagatctcatcagggtagcagcagaggcaggaccagaaggcaatcaagagcttccagaaatgccacacttgtgtgccacagagttccccgctgacccttggttaggggtcctcttagtccacaaggtccggatgtcactcatgtacttaataacacttcaccttctgtaatactaagtcctcagagctccatgctgttctgaaagggatggccacaagttctttcccagcctcttccattccctttcttttcatgcccatcccgatgaacctgcatcattccccgacactgccaagccaaccctggaaaaggagttcgctggccattggctagaatcagggtggggaagttccctgaaccttcctgtctcccagggacatgtatgcttccaggg

SEQ ID NO: 33799 - DNA, 468 bp, Homo sapiens
  misc_feature (1)...(468): n = A,T,C or G
aggcgcgggncccgccctgggaggctagaaaccccttgcgnccaccttggcacgaggtttaaatgctatctttcaaagataactactcttaaaaccttgagtatcttttcagacctttttcttggcaaatgaatccatattgacatatttgatttttttaaaaacatggaaacgtactgttttgtaaattctttttaactgcacatctactgttcataaatatacctctgtaacataactttttgtggttctaatgtactctgttgtatagctaatacaagttaggatgcttttggccagaggtaacagtgtccaaatataattggcctaagtaacctaggaaattgtttgacataacacagggttcaggggtgtcattaaagacacactttttttgccttgacctcagttaggttggtttgccttaagctattccacctctcgatcacaagagctgctgctataact

SEQ ID NO: 33800 - DNA, 473 bp, Homo sapiens
  misc_feature (1)...(473): n = A,T,C or G
aggtccgnggncccccaactgtanccatangatatcgttgcgnccaccttggcacgaggttgaaatgaatcatataactaaatataaaagctagaactataaaactattagaagaaaacttatacatacatctttattatcttggattaggcaacaatttcttagatatgacaccaaaagcacaatcaacccaagaaaaacagatttggccttcctcaaaattaaaaactttagtattaatacatcaaagaacactatcaaaaagtgcaaatacatccaccgaatgggagaagatatttgtaaattatatatatgctaaggatctataatccagattataaagaattcttacaactcaacaataaaaagacagcccatttttaaaaagggacaaatgatttgaactgatatttctccaaacaagatgtataaatagccaataagcacatgaaatgatgctcaacttcattagc

SEQ ID NO: 33801 - DNA, 471 bp, Homo sapiens
  misc_feature (1)...(471): n = A,T,C or G
aggagcgaggggccgcccaggggnccctagntatgctcggacctgcttacgccaagcttggcacgaggcaatcagatcgtgttggtggcagtctccgtgctgtcagtatcccactgaggacagaagggagtcccctctgcaatggcagggctctagggcatagtgcatggggtggactcctcatgggccactcagacagggcctggagaacaaagcatcccgtgggcccaggaaattgtccacctggctccacgggcctgggagggctgtgtgcatgggacggcaggtttacgaggaggagtgaggcctcctgccggagccccacctgcattcagcctgaggccaggccccccacctactctaactaccctgctgaaaccacccactactcacagacctgttcaagaaaaagtgtccctcaggtctctcacacactggggaatctaccngaaatttaaacattactttttt

SEQ ID NO: 33802 - DNA, 468 bp, Homo sapiens
  misc_feature (1)...(468): n = A,T,C or G
aggagcggggcccgccctgaaantcatgantatctttggcgccagcttggcacgaggagattttatttatttggggctgtttaatgtgtctgtaaatcatgaaatataaaagcaagattcagtgtagcagagttggtgcttcttctgacaagctaacttgaccatatttctttatctgtgctctaacatgtgtcatattgttttctttttgtaaaccataaaatgggtgaacttccaaaaatcaagggtcatgttttaaaatcatggaacttttagaaataccatatctgtatctctattcctgcattttataaatctgtaaaggaagaaaactgaaaggaagaactagactgagtcttacctttctctgacctaagataaactgataaaactttttacttgatatttggagaagtcattaactggattctagttaatttcccatattgggcagtttacaggagaccc

SEQ ID NO: 33803 - DNA, 469 bp, Homo sapiens
  misc_feature (1)...(469): n = A,T,C or G
aggagcnggggcccccgctgangnccctaaagngcgagcacctcatacgccagcttggcacgagggaggaccggaagtccttcatctcaagcatccaatgctgaaagcggcctgattttctctaccggaagcccttttccagaggctgggaacacgggccacctagcaggaagacccacctccttgagctccgccacccttcccgaagtttttctgtcacctgtgttaggctccgtcccctttccgcgttttatccccgtaccagaaaaggatacattgagagcctcccacccagctccactaaacgggttggatatctcattctttgagttggggttccttccccggcgcccccatgtagctgggaagtgggacctgggggtggttggacccctgggatcctaaaggaggggcagggagggcgcaaaactccgcttctgctccttgctaccaggacgcgcggcctccn

SEQ ID NO: 33804 - DNA, 406 bp, Homo sapiens
gggggcaaaacttcgagagttccctctgaagctggagctttttcctcagatccaagatccaattggtcaccaattcgtgatttccgtcggccaagtgcgtgggcattgatctacacgcgagtttctccatctctgccgaatggctactttggggtgggggaggggccctcccaccgtggattgcaaagtgtttagcagcatttgtctcctccgctgactagacacatgccagggggataacattctccctcccgcttcccccagccgcggcctagtgtcccagcggggttgggagaggcatgtgagggcgaacttgccccctgttgagaaccattgctgcgcgtagtccttctctctgaacttgtgcagaggactctccatgtgaaggctcaaaggtggatccagc

SEQ ID NO: 33805 - DNA, 407 bp, Homo sapiens
  misc_feature (1)...(407): n = A,T,C or G
gggcctttccccatgctgcctccgtgtacgggcagttcacgggccaggccctcctctcagggcgagagatggtggggcccacgctgcccggatacccaccccacatccccaccagcggacagggcagctatgcctcctctgccatcgcaggcatgggggcaggaagtgaatactctggcaatgcctatggccacaccccctactcctcctacagcgaggcctggcgcttccccaactccagcttgctgagttccccatattattacagttccacatcaaggccgagtgcaccgcccaccactgccacggcctttgaccatctgtagttgccatggggacagtgggagcgactgagcaacaggaggactcagcctgggacaggccccagagagtcacacaaaggaatn

SEQ ID NO: 33806 - DNA, 410 bp, Homo sapiens
  misc_feature (1)...(410): n = A,T,C or G
ggtgctgccaataactatgcccgagggcactacaccattggcaaggagatcattgacctcgtgttggaccgaattcgcaagctggccgaccagagcacgggtctccagggcttcttggttttccacagctttggtgggggaactggttctgggttcacctcgctgctcatggaacgtctctcagttgattatggcaagaagtccaagctggagttctctatttacccggcgccccaggtttccacagctgtagttgagccctacaactccattctcaccacccacaccaccctggagcactctgattgtgccttcatggtagacaatgaggccatctatgacatctgtcgtagaaacctcgatattgagcgtccaacctatactaacctgaataggttaataggtcaaan

SEQ ID NO: 33807 - DNA, 465 bp, Homo sapiens
  misc_feature (1)...(465): n = A,T,C or G
agaggcggncccncnctttgaattcgtcttcacctgatacgccagcttggcacgaggtgctgccaataactatgcccgagggcactacaccattggcaaagagatcattgacctcgtgttggaccgaattcgcaagctggccgaccactgcacgggtctccaaggcttcttggttttccacagctttggtgggggaactggttctgggtttacctcgctgctcatggaacgtctcttaattgattatggcaagaagtccaagctggagatgtctatttacccggcgccccaggtttacacagctgtagttgagccctacaatttcattctcaccacccacaccaccctggagcactctgattgtgccttgatggtatacaatgaggccatctattacatgtgtcgtagaaaccttgatattgagcgctcgacctatactaacctgaataggttaatatggccaat

SEQ ID NO: 33808 - DNA, 405 bp, Homo sapiens
ggtgctgccaataactatgcccgagggcactacaccattggcaaggagatcattgacctcgtgttggaccgaattcgcaagctggccgaccagtgcacgggtctccaaggcttcttggttttccacagctttggtgggggaactggttctgggttcacctcgctgctcatggaacgtctctcaattgattatggcaagaagtccaagctggagttctctatttacccggcgccccaggtttccacagctgtagttgagccctacaatttcattctcaccacccacaccaccctggagcactctgattgtgccttcatggtagacaatgaggccatctatgacatctgtcgtagaaacctcgatattgagcgttcaacctatactaacctgaataggttaataggg

SEQ ID NO: 33809 - DNA, 410 bp, Homo sapiens
ggtgctgcctataactatgcccgagggcactacaccattggcaaggagatcattgacctcgcgttggaccgaattcgcaagctggccgaccaccgcacgggtctccaagtcttcttggttttgcacagctttggtgggggaactggttctgggttcacctctctgctcatggaaccgctcttaattgattatggcacgaagtccaagctgaagatctctatttacccgacaccccacgtttacacacctgtatttgagccctacaacttcattctctgcacccacaccaccctggagcactctgattgcgccttgctgggatacaatgaggccgtctcttacatgtggcgttgaaaccttgatatagagcgcccaagctatactaacctcggcaggttaatatggccaag

SEQ ID NO: 33810 - DNA, 406 bp, Homo sapiens
ggtgctgccaataactatgcccgagggcactacaccattggcaaggagatcattgacctcgtgttggaccgaattcgcaagctggccgaccagtgcacgggtctccagggcttcttggttttccacagctttggtgggggaactgggtctgggttcacctcgctgctcatggaacgtctctcaattgattatggcgagaattccaagctgaagttttctatttacccggcgccccaggtttacacagctgtagttgagccctacaatttcattctcaccacccacaccaacctggagcactctgattgtgccttcatggtatacaatgaggccgtctatgacatctggcgcagaaacctcgatattgaacgcccaacctatactaacctgaataggttcatatgtt

SEQ ID NO: 33811 - DNA, 411 bp, Homo sapiens
  misc_feature (1)...(411): n = A,T,C or G
ggtgctgccaataactatgcccgagggcactacaccattggcaaggagatcattgacctcgtgttggaccgaattcgcaagctggccgaccactgcacgggtctccaaggcttcttggttttccacagctttggtgggggaactggttctgggttcacctcgctgctcatggaacgtctcttagttgattatggcaagaagtccaagctggagttctctatttacccggcgccccaggttttcacagctgtagttgagccctacaacttcattctcaccacccacaccaccctggagcactctgattgtgccttcatggtagacaatgaggccatctatgacatctgtcgtagaaacctcgatattgagcgtgcaacctatactaacctgaataggttaataggtcaaaan

SEQ ID NO: 33812 - DNA, 411 bp, Homo sapiens
ggtgctggcaataactatgcccgagggcactacaccattggcaaggagatcattgacctcgtggtggaccgaattcgcatgctggccgaccactgcacgggtctccaaggcttcttgggtttccacagctttggtgggggaactggttctgggatcacctcgctgctcatggaacgtctctgaattgattatggaccgaagtccaagctgaagatctctatttacccggcgccccaggtatccacagctgtagttgagccctacaacttcattctcaccacccacaccaccctggagcagtctgattgtgccttgatggcatacaatgaggccatctattacatctgtcgtagaaacctcgatatagagcgcccaacctatactaacctgaataggttcatatggccaaat

SEQ ID NO: 33813 - DNA, 428 bp, Homo sapiens
gggctactatcaagagggctgggcattctctgctggtaattcctgaagaggcatgactgcttttctcagccccaagcctctagtctgggtgtgtacggagggtctagcctgggtgtgtacggagggtctagcctgggtgagtacggagggtctagcctgggtgagtacggagggtctagcctgggtgagtacggagagtctagcctgggtgtgtatggaggatctagcctgggtgagtatggagggtctagcctgggtgagtatggagggtctagcctgggtgtgtatggagggtctagcctgggtgagtatggagggtctagcctgggtgtgtatggagggtctagcctgggtgagtatggagggtctagcctgggtgtgtacggagggtctagtctgagtgcgtgtggggacctcagaacactgtg

SEQ ID NO: 33814 - DNA, 429 bp, Homo sapiens
  misc_feature (1)...(429): n = A,T,C or G
ttgactccctcccttaatattgcatgcgataacacgantacgccaagcttggcacgaggatcgaggtggccattgacgagatgagtaataaggtggttgagctccggcagctgtgctcctcggccgagggggacatgatcaaactgcagctcaaactccagggcagcgtgagtgttcaggtcaatgctggcccactagcatatgcgcgagctttcttagatgatacaaacacaaagcgatatcctgacaataaagtgaagctgcttaaggaagttttcaggcaatttgtggaagcttgcggtcaagccttagcggtaaacgaacgtctgattaaagaagaccagctcgagtatcaggaagaaatgaaagccaactacagggaaatggcgaaggagctttctgaaatcatgcatgagcagctgggatgat

SEQ ID NO: 33815 - DNA, 442 bp, Homo sapiens
  misc_feature (1)...(442): n = A,T,C or G
ggggggtttttttgannacagtgtgagccgcttacgccaagcttggcacgaggagctgacagagagagccccactcccctctccaagtccagaaacctcagagcagcgactcattggtcagggcctcctaatcagcagaggccagccggggacaaggagcccctgcgggacggtgggggaccaggcaggcaaaccagggaagtccacaccacgctgccatcacacagtgatcttcggttccgggaatggcatttggaagcccctaggcaaacgtttgtcatttgaaactcattccctgtgcagggctgggcaagtgcctggtctggagctcaaagcagccattggagccatttggctggcatctgcttgtgcttataagtgagtgatgctccagcgccggtgccaccagcttctttcagggccttgaggtgcagtgaccagg

SEQ ID NO: 33816 - DNA, 380 bp, Homo sapiens
ggagggccagggccagagagccggagagaggtgcccccgaccgttagcccagtgacatgtccgaccctgagatgggaggggtgcctgagcccccaaccatgacgctgggggcctctcgggtggagctgcgggtgtcctgccatggcctcctggaccgggacacactcaccaaaccccacccctgcgtgctgctcaagctctactctgatgagcagtgggtggaggtagagcgcacagaggtgcttcgctcctgttccagccctgtcttctcccgggtgctggcccttgagtatttttttgaggagaagcagcccctgcagttccacgtgttcgatgccgaggacggagccaccaccccccgaaatgataccttcctcggg

SEQ ID NO: 33817 - DNA, 433 bp, Homo sapiens
ggacggaacagaagtccaaaagcaaacagcaccgagtgtcaaggagagcacagcagagagcagaatctcctgaatctagtgcaattgaatccacacagtccacaccacagaaaggacgaggaagaccatcaaaaacgccatcaccatcacaaccaaaaaaaaatgtccgtgtaggacgctccaaacaagcagctactaaggaaaatgattcaagtgaagaagtaaatgtgtttcagggtagctctcctgtcgatgatattccacaggaagaaacagaggaggaggaagtttctacagtaaatgtacggcggcgaagtgctaaaagggaacggcgatgaacaaatgtaattaataactttctctgtgaaagctttggaaaaatctttttttttttttttttttgggccaactttggggtggaaaaaaccttttt

SEQ ID NO: 33818 - DNA, 381 bp, Homo sapiens
gggtcataggggtttgttgtacagattatttcatcactcaggtattaagccttggacccattaattattttttctgattctctctctcctcccaccctccaataggccccagtgtgtgttgttcccctccatgtgttcacatgttctcatcatttaactcctatttgtaagtgagaacatgcgggatttggttttctgttcctgtgttattttgctaaggataatggcttccagctccatccatgtccctgcaaaggacacgatctcattcttttttgtggttacttgatgttatttctacatcataaaaaaagtaatttttattgaaattagttttcataaaagttgtaccagtattgagtcccattagcctcatctcat

SEQ ID NO: 33819 - DNA, 422 bp, Homo sapiens
ggcttacatcgaccgcctaagagtcgcgctgtaagaagcaacaacctctcctcttcgtctccgccatcagctcggcagtcgcgaagcagcaaccatgcgtgagtgcatctccatccacgttggccaggctggtgtccagattggcaatgcctgctgggagctctactgcctggaacacggcatccagcccgatggccagatgccaagtgacaagaccattgggggaggagatgattccttcaacaccttcttcagtgagacgggggctggcaagcatgtgccccgggcagtgtttgtagacttggaacccacagtcattgatgaagttcgcactggcacctaccgccagctcttccaccctgagcaacttatcacaggcaaagaagatgctgccaataactatgcccgagggcactacacca

SEQ ID NO: 33820 - DNA, 448 bp, Homo sapiens
  misc_feature (1)...(448): n = A,T,C or G
ggcgggtttgccgccacaacacaggtgtcgtgaaaactacccctaaaagccaaaatgggaaaggaaaagactcatatcaacattgtcgtcattggacacgtagattcgggcaagtccaccactactggccatctgatctataaatgcgggggcatcgacaaaagaaccattgaaaaatttgagaaggaggctgctgagatgggaaagggctccttcaagtatgcctgggtcttggataaactgaaagctgagcgtgaacgtggtatcaccattgatatctccttgtggaaatttgagaccagcaagtactatgtgactatcattgatgccccaggacacagagactttatcaaaaacatgattacagggacatctcangctgactgtgctgtcctgattgttgctgctggtgttggngaatttgaagctggtatcttcaagaatgggn

SEQ ID NO: 33821 - DNA, 508 bp, Homo sapiens
  misc_feature (1)...(508): n = A,T,C or G
natggaaaccgntgtgaccanagtgatngcccatattggcacgaggcctcgtgccacgcaagtgtaaagatgaggagcgagggagaccagtggggctggaagagaatagctgaggaagagatgaggacagagagaggtaacaggaggtcagatcacataaggctttatatgctattggaagcactatttttttttcaactatgagtaggaatagatggcctcactgccagaaaaaaaagaagggaagagatgaggacagggcttcaggggaaggtgaaaattaaagggtgggacagggaagtatagtctagaatggatatggagggaatgcaatgctgtctgtaggaagaaatgaacatagtacctcaggaatcaaagagggaagaaaatttctattttgtttggtttagcagattacctatgggctggtatacttctgtggttcataccatatttacacaggttaataagcatgcctttaatcccttgctaactacagtatcaataa

SEQ ID NO: 33822 - DNA, 412 bp, Homo sapiens
ggcacgagattaggaatagtctgtttttctttcctgaagatcagtttttttattcaaacacatttcaaagaaccaaattttttttttctttaaggaaaaaggagctttttttcaagggaaaaggattcatttgtaatactttggtttaaggcatactttaatttttacgagtttcagaaacagaatttttgtactagggaattcattggtgagagtgttcttttaacctcagaatggcaaattttggtcttgaaccacagacatccaattacagaaagaatataagcaatctcacaggcctgcaatcggacactgtctctgtgtggttcataggagatgatttttgaggtttgcactcatgcaatttgagaacaccgttgacaagaaggctgagtttacataaatgatctaa

SEQ ID NO: 33823 - DNA, 411 bp, Homo sapiens
ggcacgagattaggaatagtctgtttttctttcctgaagatcagtttttttattcaaacacatttcaaagaaccaaattttttttttctttaaggaaaaaggagctttttttcaagggaaagggattcatttgtaatactttggtttaaggcatactttaatttttacgagtttcagaaacagaatttttgtactagggaattcattggtgagagtgttcttttaacctcaaaatgtcaaattttggtcttgaaccacagacatccaattacagaaagaatataagcaatctcacaggcctgcaatcggacactgtctctgtgtggttcataggagatgatttttgaggtttgcactcatgcaatttgagaacaccgctgacaagaaggctgatttacataaatgatctag

SEQ ID NO: 33824 - DNA, 483 bp, Homo sapiens
agggggttttattgagaccggtttgacctgcttacgccaagcttggcacgaggcgcccggggcatggccatggacttggttctagatgactcgaagcgggtggccaagcgtaagctgattgagcaaaaccgggagcggcggcggaaggaggagatgatccgatcactgcagcagcgaccagagcccactcctgaagagtgggatctgatccacattgccacagaggcccatcgcagcaccaatgcccagggcagccattggaaacagaggcggaaattcctgcccgatgacattggccagtcacccattgtctccatgccggacggagacaaggtggacctggaagccttcagcgagtttaccaagatcatcaccccggccatcacccgtgtggtggactttgccaaaaaactgcccatgttctccgagctgccttgcgaagaccagatcatcctcctgaaggggtgctgcattgagatcatg

SEQ ID NO: 33825 - DNA, 446 bp, Homo sapiens
ggcctttcaccaccatcgttgctttaatctgtgagctgcttggtatatatgacgaagggaactttagcttttcaaatgcttggacttatttggttataataaacaacatgtcacagttgtttgccatgtattggctcctgctcttttataaaggactaaaagaagaactgagcccaatccaacctgttggcaaatttctttgtgtaaagctggtggtttttgtttctttttggcaagcagtagttattgctttgttggtaaaagttggcgttatttctgaaaagcatacgtgggaatggcaaactgtaaaagctgtggccaccggactccaggattttattatctgtattgagatgttcctcgctgccattgctcatcattacacattctcatataaaccatatgtccaagaagcagaagagggctcatgctttgattcctttctg

SEQ ID NO: 33826 - DNA, 481 bp, Homo sapiens
  misc_feature (1)...(481): n = A,T,C or G
ggtgttccnaggagacccntttganaaccctgacatcatacccagcttggccgaggcctaccacatgctgtttaccttccagaataggacatgtgcaaaaactaggcttccagatcgtgaggctggggagcattctaggtaccatttattatctactgcgtttcggtcagtagctgttgtaggtacccgcatcagcccttgttcctaaggatgtgtggagcccaggctgtactctttgacattccacaggtcagtctgcgtgaaagccctttgtggggagtttccaagccagtgtcgtttttgcactggtttccacctcactgtcagatattgttcttttgatatgcaggttccagccctccaatgagtccccagcacagatctcaggcttgtggctgggaataagcccagctgagcaggtggggatctcagccagcctcccagactgcacctcttctattgctctcctctgtccaccgtc

SEQ ID NO: 33827 - DNA, 412 bp, Homo sapiens
gggcagggaatctggcttgattggcgtgctgagacgcacctggcgcaaccctcccttctgaatcgaagttcaagtcccgcggacactgcaaccatgaaggagagacgggccccccagccagtcgtggccagatgtaagctcgttctggtcggggacgtgcagtgtgggaagaccgcgatgttgcaagtgttagcgaaggattgctatccagagacctatgtgcccaccgtgttcgaaaattacacagcctgtttggagacagaggaacagagggtggagcttagtctctgggatacctcaggatctccctactacgataatgtccgtccactctgctacagcgactcggatgcagtattactatgttttgacatcagccgtccagagacagtggacagcgcactcaagaagt

SEQ ID NO: 33828 - DNA, 474 bp, Homo sapiens
  misc_feature (1)...(474): n = A,T,C or G
tttgaaacgtnctgataaccatgcgaagcnngccacgagggtctggaggagcttggcgatggtgccgacagccttggtgcgggcttcccggaacaccagccgctggtctatgtgcaggtactcaggggtcttgatgaagcggaagtgtacagtggccttgtccccagtgcgcagacagtccttgtacatgctcagaatgggggctgtctgcctgatgctcccacagtgcaccatggcctggtagcgcgggctaattgtggtggggtggtggaggacgagaatctcggcctcaaactcccaggaggcttggggattcaaacgtggggaaaccatcaccatgcccttccggatggacgagcgcttgatcaactggaccacaggcctctaaggtggacagcacgagcaccctcaaggctccatgggaagactcaacactactactgggggtcaagaaggctttatgcgggaatcacn

SEQ ID NO: 33829 - DNA, 447 bp, Homo sapiens
ggggcgcatgcctgtaatcccacctactcgggaggctgaggcaggagaattgctttaacccgggaaacgaagttggggtgagcccaaaatgcgccactggacttcaacctgggtgacaagagcgaaactccgtctcacaaaaaaaaaaaaaaaaaaaggggttttttcgggggggggggggttcccccggggcggcattttttaaaagaggggggggaaaaaaccatttgtaaaaaaaaaacttccacccggagggaaattcaaaataaaaggggggacgaaatcaaggggattgtttctacccaaaatgggtgaggaacccaaacccgggggttcacgcctgtaatcccagcattttgggaagctaacggggtttgatcattggaggccaggagttcaaaccagcctgccccacatggagaaaccccgtgttacaaaaaattacct

SEQ ID NO: 33830 - DNA, 431 bp, Homo sapiens
ggaacgcacagcaatgcccatgacacagggcacccattactaggggaaataatgatcagactctcagctctaaaaaagcccaatttaagggaaatggacgccaaaggcagcaatgactcttaacaaaggtagtacccagaaaaagaatcggcaaactacactgtcagaacacaggtttgaaatatagcaaggagtcacggaaatactccataatttgaataaggctttttttattttttattatttttggtcaggcctgcttaattaagctaaaaaaggacaccactctttttgacactgggaacccaaaggaggtgaaagaagagttcagatagcaactcaccatgatcaccacccctgaactgccactgttgcttcagacctcagattttggaatatttgcgttctacgtaccattttagcatcccaaa

SEQ ID NO: 33831 - DNA, 496 bp, Homo sapiens
  misc_feature (1)...(496): n = A,T,C or G
cgcgcccccgnnnnnnntttganacacctatgaccttgattaccctcagcttggcacgaggggcagcagggctgaggcaaggtaggccaactgcacccctgtcacctggaggagggccagctcgctgcccgagctctggcctagggaccttgccgctgaccaagagggaggaccagtgcagggtctgtgcaccttccctgctggcctgcacacagctgctcagcaccactttcattctggacctgggaccttaggagccgggtgacagcactaaccagacctccagccactcacagctctttttaaaaaacagcttcaaaatatgcagcaaaaaccaatacaacaaaacgagtggcacgatttatttcaaactaggccagctgggattccagcttttcttctactagtctgatgttttataaatcaaaacctggttttccttctctgacatttttttttggtttttggtttttggnttttttttttttttggccca

SEQ ID NO: 33832 - DNA, 411 bp, Homo sapiens
aggagtgcatctcctcaaagactcagcccctcacctgggagggcagtggtttgtgggcatccctccatgtacattttaggaaacacttgcaactctcatctgaagaagaaaacaactcatctttgggttcagattttgtgatggtattcagcaagtcacttgggcgagcacacttggtctatcctggaaagtctccttataagagaagttgtgtatttcatgtgcaccgagcaagggcattggaagacgtcatgaggctgtattttagcaggactgatcgtttttctaagtagacctgagctttgtttatcagtgaaattcaaggagaaaatgaggttaatgaagaggtatcagttaaatatccccttcttctcaccctgccaaaattagcagttggatttttggaaactc

SEQ ID NO: 33833 - DNA, 412 bp, Homo sapiens
ggggtttgtggtagtgttactgagatggcccgtgctgccgcctaccccgcctttgagcctttggtagcagcagtgccactgtgcatggagagggctgagccttggtgtgtggccgtcctggtggctgcacacctggcagtatcctgggcccttgggaggagcacagctgaccctggttttgttgcaatcccacctggactgttttcccaggcaggattttaatctagaatttagaaacatttgtatttgtaatgacttctggctaaagcacgtgtgctggccggatgtaactgttgtcctttcccagctcctgattgtgaagggcgtctgttatgctcctgcagtcgcctaggccttggatgtgcagccaggggaggagcgttctgccggccccacagggcccccaggactg

SEQ ID NO: 33834 - DNA, 415 bp, Homo sapiens
  misc_feature (1)...(415): n = A,T,C or G
gggtaggcttctggaatagaaacagtggtttgaagaccccactgccacctttatggactggcccctttgagtctgaatccccggcctctgtcacctgagacccaacccctagctgggccaactccagtgaattcacccatttttcttcttcagaaggcctttcctgtgtgagacccacatattttaaccttttgctcctatcccatttttaaagaattagagaataaaccaggcctgtttcttttcccctgaaatccctgcctctggcttcctaaacccatcatctaaggtgacagagcagtgctggaatagcatctcctttcactttcccaaaactgccacagatagctgccactggcatgctctttgattcctggaagcaaacgtgggactgtcggaggaaagggattgttcn

SEQ ID NO: 33835 - DNA, 501 bp, Homo sapiens
aggagggggccgcctcctatgagaccgtatgaccattgatataccatgcctaggcacgaggcctcgtgccacgggtatgtcttcatcagcagcatgaaaataaacttatacagtaaattggttccaataaagtggggtgctgctgaaaagatacccaaaaatgtggaagcgactttggaactgggttatcaggcagaggctggaacagcttggagggctcagaataagacaggaaaatgtgggaaagtttggaacttcctagagacttgttgaatggctttgacaaaaatgctgatagtgatatgaacaataaggtccaggctgaggtggtctcaaatggagatgaggaacttgttgggaactggaacaaaggtgacccttgttatgttttagcaaagagactggtggcattttgctcctgccttagagatttgcagaactttgaacttgagagagatgatttagagtatctggtggaaaatgtctaagcaacaaagtatt

SEQ ID NO: 33836 - DNA, 424 bp, Homo sapiens
gaccttgggagtcgccctgtcaacactcacatgcttgggacccactccacacactccctgccagctttgttgcagcctcagctggtggagtctccgtccttatcctagcctaactcgcagggggagaaccactggagtggctggggctggccaaaggtcaccgcttctccttcctgtgtgctccagtggcttttgaagacactgggttgggacctttttcctgaagagagctgggtgtaaccagagctactggcacctaccccgagcatctctctctgtaagcagcttcaggggcagtccgtttctctgtgcttctgaaacccccttctcacgtttcaagccccagttttaactcaaggcctggggcaggggcgtttaattgatgatgacagaggacacaggtttttgccagcaaaaaggaaaa

SEQ ID NO: 33837 - DNA, 496 bp, Homo sapiens
cgccccgccccctcccattgagaccgtttgacatggaacccctgctaggcacgagggaagcacgttctgccggggaggccctcaccttccagagaggacagacacagatttcctgctgggggagggaggagtccacgcatcctgatgctgcctggaagcttattttcccgtggccaggacgcatttctctgagtggaaacaggttcttgcatgtggatgtgtgtttccccaggcagacggcccctctcttcccagcacttccctgcctcccccaggcctcaggcccagcacccagttcctcctcacatggcaggtgagcacagacttctacttggcaggagctgaggagggtgaacaaaccccgagggaggcccggcccttgctcccgagttggggggagggggtgtggcaacgtgccccccgcagaggccacgcatgtttgaccaaagccctcattgtggtccgaggacagccttttccccaggccttatagcat

SEQ ID NO: 33838 - DNA, 406 bp, Homo sapiens
gggctacccaactcaactgagcgggccatcactattgctggcatttcacaatccatcattgagtgtgtcaaacagatctgcgtggtcatgttggagactctctcccagtcccccccgaagggcgtgaccatcccgtaccggcccaagccgtccagctctccggtcatctttgcaggtggtcaggacaggtacagcacaggcagcgacagtgcgagctttccccacaccaccccgtccatgtgcctcaaccctgacctggagggaccacctctagaggcctataccattcaaggacagtatgccattccacagccagatttgaccaagctgcaccagttggcaatgcaacagtctcattttcccatgacgcatggcaacaccggattcagtggtttggatgcatttg

SEQ ID NO: 33839 - DNA, 468 bp, Homo sapiens
  misc_feature (1)...(468): n = A,T,C or G
atccaggcnncnccctaagaaatcgncgcgaccancannacgcctagcttggcacgaggccagggtctcattaaagcccctgaggggcctccaagaaaagataggaatttgccaaatgtgattatcagtgagaagcgcaacatccacgcagcagctcatcaggtacaagtgcttccatatccatttacccaccatcggcaatttgaaaggaccatccagacccctataggatccacatggaacacccagagggctttccaaaagctgactactcccaaggtcgtcaccaagccaggccatatcattaagcccataaaagcagaggatgtgggctaccagtcttcctcaaggtcagacctgcctgtcatacagaggaatccaaaacgaatcaccacacgtcacaataaagaagaaaaactgtaggttgtgtagctggagaagtgacagtcaggggccctgattccactt

SEQ ID NO: 33840 - DNA, 442 bp, Homo sapiens
gggcttgaaaaaggcaatgagtcatgacaaatatttcttttcttctcaatatagaagccttcgatgtgaggcccaggcattgagtaccatgtgtgcgattcacaagccttggcatctgaacaattttttggaaggatccatcaggacaacacgtcgggggtgtactagtgaagtgattttccaaatgtgctactcagacctgtagcatcagcatcaccggataatttgttagaaattccaactgttaggccccactttagaccaactgaatgtgaaactctgggagtacgtggggcccagcaatttgtgtttttacaagacttaccaggtgattctgagaaccactgtgctagtgaattgttcctgtctgtggccacgtagaataagaaaaccatagggttggaaaatggggaaactggtgagtgttcgcttatgaggaaat

SEQ ID NO: 33841 - DNA, 401 bp, Homo sapiens
cagcccctacatcacccgctactttggctcctacctaaagagcaccaagctatggatcatcatggagtacctgggcggcggctcaacactggacttgcttaaaccaggtcccctggaggagacatacattgccacgatcctgcgggagattctgaagggcctggattatctgcactccgaacgcaagatccaccgagacatcaaagctgccaacgtgctactctcggagcagggtgacgtgaagctggcggactttggggtagcagggcagctcacagacacgcagattaagaggaacacattcgtgggcacccccttctggatggcacctgaggtcatcaagcagtcggcctacgacttcaaggctgacatctggtccctggggatcacagccatcgagg

SEQ ID NO: 33842 - DNA, 411 bp, Homo sapiens
ggtgggaaccgcagcgccagctgggatggggcggctccatttttggttccaaattatgatttgtgaaatcaagcaaatgtattttgaaaatgaaaagaaaaagggacagcaagccaacatgcctcagaaaggctttcggcctccatcaaaccaaacggccgggcggcaagttcactaagaacagcacatcagaaagcacgagtggcttctcctgcctctggggacgctgtagggcacaggccccaaagcggggtcccctcacataccggatgtgattggcctctgtcgaagttggggccctcagtctactcgcccagcggagggagaggctgctctgctgccacgtggccacatcctctctagcagacaccacgagcagttccgagttcttcccaagcgctctgaaagggt

SEQ ID NO: 33843 - DNA, 401 bp, Homo sapiens
ggcacgagcaggatgttctaccgggactggtggaactcaacgtccttctccaactactaccgcacttggaacgtgggggtccatgactggctgtacagctacgtgtatcaggatgggctgcggctccttggtgcccgggcccgaagggaaaccatgctgggtgtgttcctggtctccgcagtggcccatgagtatatcttctgcttcgtcctggggttcttctatcccgtcatgctgatactcttccttgtcattggaggaatgttgaacttcatgatgcatgaccagcgcaccggcccggcatggaacgtgctgatgtggaccatgctgtttctaggccagggaatccaggtcagcctgtactgccaggagtggtacgcacggcggcactgccccttacg

SEQ ID NO: 33844 - DNA, 472 bp, Homo sapiens
cgctgtgagaatgcttatcgccaagcttggcacgagggagttggccccactccacttgggggtctgcattggattgttagggataggcagcagggctgaggcaaggtaggccaactgcacccctgtcacctggaggagggccagctcgctgcccgagctctggcctagggaccttgccgctgaccaagagggaggaccagtgcagggtctgtgcaccttccctgctggcctgcacacagctgctcagcaccactttcattctggacctgggaccttaggagccgggtgacagcactaaccagacctccagccactcacagctctttttaaaaaacagcttcaaaatatgcagcaaaaaccaatacaacaaaacgagtggcacgatttatttcaaactaggccagctgggattccagcttttcttctactaatctgatgttttataaatcaaaacctgggttttcttctctgg

SEQ ID NO: 33845 - DNA, 418 bp, Homo sapiens
  misc_feature (1)...(418): n = A,T,C or G
ggcctgcaggttatgagaccaaggtcttaccagctgtagatttcaaaatttacagattgatcatgcctttgcttatgtctttcttcaaaaactattacaaaacaatgactcaggatttgctgggaccaggctgggcatggtggctcatgcctgtaatcccagcactttaggaagctgaggcagatggatcatttgaggtcaggagttcgagaccagcctaaccagcatggcgaaaccccgtctctactaaaaatacaaaaattagtagggcgtggtggcgggcacctgtaatcccagctgctcaggaggcaggagattcgcttgaacccgggaggcggaggttgcagtgagctgggattgtgtgtcttaacctccgcctcccagctgctcaggaggcaggagattcgcttgaacccgn

SEQ ID NO: 33846 - DNA, 471 bp, Homo sapiens
  misc_feature (1)...(471): n = A,T,C or G
agaganagatttgnngncttgattnaccngtagagaacctgtttacgccaaccttggcacgaggcggaagccggggccggggctgcggggcgaggctgaggccaccattttgcagtgttcgtgcgtggagagagagctggacaaggtcctgcagaacttcctgacctacgggcagcactgtgagcggagcctggaggagctgctgcactacgtgggccagctgcgggctgagctggccagcgcagccctccaggggacccctctctcagccaccctctctctggtgatgtcacagtgctgccggaagatcaaagatacggtgcagaaactggcttcggaccataaggacattcacagcagtgtatcccgagtgggcaaagccattgacaggaacttcgactctgagatctgtggtgttgtgtcacatgcggcgtgggacgcgcgggaacagcagcagcagatcctgcagat

SEQ ID NO: 33847 - DNA, 400 bp, Homo sapiens
ggaaagaaacaaaactctgtgaggtttgcttgtgaggagggtggacatgactttcgggcaagaaatattcccctagcactggcaattatatggttattttctcagggccactatcagtttaatgagtctctttctgtaaaagtttcatagcccagaggttttctcccttgttcccaagtttgctgtaacaacccatgtctctcagataaccattctagatctagcagcaacttgactatttcctgccctcctaggaacacacctgagacttcaatctgtctttgtcaagtgaaccaacattcagaaggcttaaagagctcattcagtcagagggtatagccaaatgttcacactttctcaaagggcaacaggacccctaatccaaaagtttcttgcatat

SEQ ID NO: 33848 - DNA, 426 bp, Homo sapiens
ggccgactaatttatttaaaatttccgagaaatgtctttgtcttagatcatgttccctaaatgcagagcctaggatggggagtcaggtgatcatgatttggtaagggccctgggaagaaaggaggaggatagggaagcgaaagaggtcccataaggatatggtctcaggcaaaatctagccccagattgatggagggagcaagaagaatggggatgactgtctctagagagtaaattgaagggtagagtaagttgtccattttcagaaacaggggcagagactttgtgccactgggtcagccagtcactggccacccggggtgaggaggtcaatgaagaagtgtagagttggtttcaagacattttttgagagcagagtgcaggtgagaggtattagcaggcagcagaacagctgaggggtagctg

SEQ ID NO: 33849 - DNA, 399 bp, Homo sapiens
ggtgctggcagaactgaaatataaactgtaaggggatttcgtcagttgctcccagtatacaatatcctccaggacatagccagaaatctccattccacacatgactgagttcctatccctgcactggtactggctcttttctcctctttccttgcctcagggttcgtgctacccactgattccctttacccttagtaataattttggatcattttctttcctttaaaggggaacaaagcctttttttttttgaaacggagggttgctctgtcacccaagctggagggcaggggcccaattttggttaactccaacctccaccttccaggttaaagggattctcctgcctcaccctcccgagtagttgggactacgggcacccaccaccacgtttggttg

SEQ ID NO: 33850 - DNA, 402 bp, Homo sapiens
ggaaaagcctgaatttcaggatggggaggagataagtttcagagaactttgggagaccatggggcatttaggcctggcgtggacacagaatggatattcacaggaagattcctgaggccagatatgcaggagagcacacattgtcacaaggggtgtggtgggaagagaggtgctggatgcctaagacagacttctgtgcttggcagattgactgagtgttgactctgaatactttgtggtccagtccataataggccagtcactcctgcctgatgcatccctgttgcactgttcataaaacctgtatcatatggggaagcttcaaggctggcaggcttttcatcaagtaatcatcattccatgttcctacgtatccttgaaatcaaaaccaggcaatatgtg

SEQ ID NO: 33851 - DNA, 421 bp, Homo sapiens
ggttgagcacctacattaatgctaattatattaggggctacagtggctaggagaaagccttcattgccacgcagggccccatgatcaacaccgtggatgatttctggcagatggtttggcaggaagacagccctgtgattgttatgatcacaaactcaaagaaaaaatgagaaatgtgtgctatactggccggaaaagagagggatatatggaaaagttgaggttctggttatcagtgtaaatgaatgtgataactacaccattcgaaaccttgtcttaaagcaaggaagccacacccaacatgtgaagcattactggtacacctcatggcctgatcacaagactccagacagtgcccagcccctcctacagctcatgctggatgtagaagaagacagacttgcttcccagggccgagggg

SEQ ID NO: 33852 - DNA, 432 bp, Homo sapiens
ggctaacactttgtgtagctctgtggagttggattttcttaaggtttaaaaagaatcacagcttcggaacttttaactgaaaatgagagacagaagccacaggggaagcaaagcaaataggattttcaatataaatatcagtgtggaaaaataacctattctgttgaatttagtgttcatgcacttgagaacaacattatttccatttactccgaaaatccttctgtgggggtttgagaaagtgaatgttgcagacatgttctgttgtgttgcactttatcctgtgtttatgtgtatgtgtttttagattaattcaagttgtgtgctatatttcttgtataatttacaaagttacacaaaatataaagagcagtaaacttgtctgaaagtttttggcaaaggaaggtaacttcaatgtaatagcttccttta

SEQ ID NO: 33853 - DNA, 434 bp, Homo sapiens
gggccactcagtacaaggtatgtagcccgagaaatgaccgacctgatgcgtgttataacccatctgagcccgctgcaaccaccgtttttgaaataagaactggccttttgctaggtgatacaagtaaaataataactagaacagaagaaaaagaaatccccaagcaaataactttaagatttgatgcttgtgcagccattaatagtaaaaagctagaaataggatgtggttctcttaactgagaaaggagctaaagagtagaaaataaatatgtttgtcatgagtcaggggtttgtaaaaattgtgcctattggccatgtgttatttaggctacttaaaaaaagaacaaaaatgactcggtttatcttcagaagggagaagccaacccctcctgggccgccggtcactgtaacccactagaactaataattacc

SEQ ID NO: 33854 - DNA, 472 bp, Homo sapiens
  misc_feature (1)...(472): n = A,T,C or G
nactgtaactgttgacatgaccacgccaagcttggcacgaggcgttgtctcactatgctgggacattgctgctacttctggcaggtgtggcctgcctccgaggcattggccgctggaccaacccccagtaccggcagttcatcaccatcttggaagcaacacatcggaaccagtcttcagaaaacaagaggcaggttgccaactacaactttgacttccggagctggccagccgacttccactgggaagaacccagcagccggaaggagtctcgagggggcccttcccgccggggtgtggccctgcttcgcccagagcccctgcaccgggggacagcagacaccctcctcaaccgggttaagaagctgccttgtcagatcaccagctacctggtggcgcacaccctatggcgccggatgctgtatacaggctctgtgtacctgctgcagaaggccctcatgcctgtgctgct

SEQ ID NO: 33855 - DNA, 472 bp, Homo sapiens
aatcgaaaactgatgaccattacacgccaagcttggcacgaggaagagtcgcgctgtaagaagcaacaacctctcctcttcgtctccgccatcagctcggcagtcgcgaagcagcaaccatgcgtgagggcatctccatccacgttggccaggctggtgtccaaattggcaatgcctgctgggagctctactgcctggaacacagcatccagcccgatggccatatgccaagtgacaagaccattgggggaggagatgattccttcaacaccttcttcagtgagacgggggctggcaagcatgtgccccgggcagtgtttgtagacttggaacccacagtcattgatgaagttcgcactggcacctaccgccagctcttccaccctgagcaacttatcacaggcaaggaagatgctgccaataactatgcccgagggcactacaccattggcaaggagatcattgacctcgg

SEQ ID NO: 33856 - DNA, 470 bp, Homo sapiens
  misc_feature (1)...(470): n = A,T,C or G
cttgatggccctaagggcacttgtcaatgatagttggtattgtagtaattagttttagttatggtcctcctttttactccatgattgctagcagccagaaggtgaagtcatggcagtaaggagaggctgacatataaaatcagaaagcaagggcatgcttctggatgagtttatttccttcatattttatatgtatatgctacttactatgtttgtaacagtgccattaagggcaaaaggcaagttttttgcttcattcctgaaaaagtagcctaccttttttttgcatcatatatttaaggactgctacacatgactaacaacaaggaactacttcctatttagtggattatttaaatgttatgcagtattctgctttacacataggaagcactcggatttctaaattaaatatcataggaatagcattaatttatgagtcacattcttaagtgtccatcagaacattn

SEQ ID NO: 33857 - DNA, 421 bp, Homo sapiens
ggatggaatatttattaggtgttgttgaagtgtacagggtaaccaagcgtgtggagctggggataaaagccactgcagtgtgcagtgagaaactccagcagttgctgaaggacatcgataaagtgtggaataacctaatcggcttcatgtcactcgccacactcacaccagatgaaaactcgctggatttttcctcctgtatgttacggcctgggattaaaaatgctcaggagcttgcctgtggagtgtgcctcttgaatgtggactcgaggagccggaaagaagagaagcctgcagaagaacatcctaaaaaagcattcaactcagaaacagacagtttcaagctggcctatggagggcaccagtatcacgccagctgtgccaacttctggatcaactgtgtcgaaccaaagcctcctgg

SEQ ID NO: 33858 - DNA, 469 bp, Homo sapiens
  misc_feature (1)...(469): n = A,T,C or G
ncctggattgcactcgagaccncannacgccaagcttggcacgaggattgtggcctatctggtttaagtctttcattaaaaatgtctcgttagagtatttgatgtcatgcaccaaaaaaataaaaccccaccttgttgcaaaagctgacctcgttgcatggaattaaaagagaaggaaaaacacaaggatgaagtctttccgaattcattcttgtgggaactggccttcggagccagccagcactttgggcaaatgcaaacaacaatgagtgcttgagataaaagaaagtgtgacgtcatggtcactggtactcaggcacttcacagtttacttgaaagaggctttggaaaatagataaagtgaaagaagaataaatacatatttttaataatgtaattttaaaaatcctttataatcaggactgagtcttggtttgcagaagctgtcacttaccctgaaacacagtat

SEQ ID NO: 33859 - DNA, 426 bp, Homo sapiens
ggcccgtcctcattttttcaggttgccttgcccattctggacattttggctgtaagaatattggaaacaaaggggggaagctggtttaatccatgtagattgtgttgagaatttcctaggaaaagtaagttgtgcttaggaagtaggaaagcagtcaggcccccgcttcccacatacggtcaaaaagcaaacatgagagtctgctatagtgagatggaaatggctagcttgcctttttcttgtctatttcatagccaaggatgaaggaaaaactggacctcattatggatttacttttgggatacactcattattccagaggagggtaaaaggctgagaagcttaaggtatttcagtctgttttatgttactcatttgcgaaaagtaggctcatcgaatacaggtgagtgtcagtgcgtcttgaat

SEQ ID NO: 33860 - DNA, 477 bp, Homo sapiens
  misc_feature (1)...(477): n = A,T,C or G
aattgaaanactgataacgctatgaccatgactacgccttttaagcaacgaagaagacctgcccgtgaagaggcgttcatgacacagcaggaccagaagaccctatggagcttgaatggattaatgctatcaggacctaacaaacccacaggtcctattctacctaacctgaatatataaattttggttgggaaaaaaaaaaaagaaaaccatttgtggcccccggtctttccataggggattactttgggccatgcacacccatgagcagattgaacaaaatgtaggtcccacttcaccccattctcctctcctctgacccctcagctccttggaagtcttggggtggggatctgagggggtgggtgggctgcaggaaattcaaaaatgtggtgggtgggggaagggacaaggcgcattatggagggaacaagctgggctctggggataggctctgattaattagttactctgact

SEQ ID NO: 33861 - DNA, 473 bp, Homo sapiens
aattgaaaattgtatgacattatgacgccaagcttggcacgagggtctgtctgagggcggccgaagtggctggctcatttaagatgaggcttctgctgcttctcctagtggcggcgtctgcgatggtccggagcgaggcctcggccaatctgggcggcgtgcccagcaagagattaaagatgcagtacgccacggggccgctgctcaagttccagatttgtgtttcctgaggttataggcgggtgtttgaggagtacatgcgggttattagccagcggtacccagacatccgcattgaaggagagaattacctccctcaaccaatatatagacacatagcatctttcctgtcagtcttcaaactagtattaataggcttaataattgttggcaaggatccttttgctttctttggcatgcaagctcctagcatctggcagtggggccaagaaaataaaggttatgcatgtatg

SEQ ID NO: 33862 - DNA, 409 bp, Homo sapiens
ggcgacgggacttgttaatgggacaatttacagcctcttccaccccactgcagtgacttttgccggaaagtggagcagtgggcacggccaaccttgtcgttcatcaatgccgcccctggcagtatctgaggatcggtggcagccatgcctccccctgccccagccgctccttcccccccacgctaatctgcatggtgtgggcgcccttgggacccccgaggactgattgtctgaccttgcttcacacgcccagtaaggactcccccaagatgtcgctcgagtggctggtggcctggaactggtcgctggatggcctgagggactgcatcgccaccggcatccatccgtgcgggactgcgacaccaccgtgtattactgtggcctgcctctggccctttgctggggactg

SEQ ID NO: 33863 - DNA, 420 bp, Homo sapiens
ggaataccgcggcgcggacggtagttgctgtggtttccgttctgagctcgcagcttaggagctgaagatcgcggacttagcgttgccgcgtccgagtccggccatcagtggctgcagatccggaggccaggagctcaaccacccttcttcggaacagggccggcctgctgctgtgcccttgacgctcggtgcctgtatctactccggggcctaggtcggctccgggggcggcttaggagaaggccgccggcgagatgttcaaaaacacgttccagagcggcttcctctccatcctctacagcatcggcagcaagcctctgcaaatctgggacaaaaaggtacggaatggccacatcaaaagaatcactgataatgacatccagtccctggtgctagagattgaagggacaaatgtaagca

SEQ ID NO: 33864 - DNA, 488 bp, Homo sapiens
  misc_feature (1)...(488): n = A,T,C or G
ggaagaaccagggccgcccctaggtatcctaaganaacatcgcgacagccngacgccatgcttggcacgagggctggatgtgaaattttcaggaattttgcaggctttttgatattttgttggtattggccatactgggagggtttacacaatgaaaattggctgagtctacaaatcagagcttcctcagagagctggttgttaaacttttatcagcataccccatatatgcctttcctttggagaccccatctgttggggttttacgtagtatgcaattccttgattaacttcctctccactcccatctcctgccaaagctagcctctttatgaaagcagacttcatcagtatccataattactatagcagtgcctataacatagtaggacttaaaaaagtatcagttgattgaatatatacctgtcttttggaactgttctctatatgggtttcaaatttagatacttgttgaaagaaaattatgt

SEQ ID NO: 33865 - DNA, 489 bp, Homo sapiens
  misc_feature (1)...(489): n = A,T,C or G
gcacgaacccaggcccccccccactgataccgattgaccancatagcgccaagcttggcacgatggctggttgtgaaatttccaggaattttgcaggccatatgatatcatgttggtattggccatactgggagtgtttacacaatgaaaattggcagagtctacaaatcagagcttcctcagagagctggttgttaaacttttatcagcataccccatatatgcctctcctttggagaccccatctgttgtggttttacgttgtttgcaattccttgattaacttcctctccactcccatctcctgccaaagctagcctcttcatgaaagcagacttcatcagtatccataattactatagcagtgcctagaacatagtaggacttaaaaaagtatcagttgattgaatatatacctgtcttttggaactgttctctatatggntttcaaatttagatacttgttgaaagagaattatgtgatcattn

SEQ ID NO: 33866 - DNA, 458 bp, Homo sapiens
gggtttttttttggagtttctaatccaacagttattttattaggatgaccgccctgggtccaaatggaaaaatagggacaggggacaacccagcaaagctgggtcgggggtcaccccacgatgttccaaccacaggggcagaatctcctccactccacatgctggccaagggcacaaagctgccgtatcgcctgccaaggggggggctcaatgctgctgccctggtcctgtatgggcccggggtgccaaaaacaaacagaaagcctcaggcgccggacctttgagctttcttgatttcctcaaagagcgcctccttcacctctgctgaggcctggtacaagctgtcgttaatgatgaccacatcaaacaggccgggctccttgctgctctccatgtaggcctgggcatgaaccagccgctttaccaggctctcctcggtttcattgttgcgctgcccg

SEQ ID NO: 33867 - DNA, 489 bp, Homo sapiens
  misc_feature (1)...(489): n = A,T,C or G
gttntgtnnccaggcccccccccactgataccgtttgaccaccatacgccagcttggcacgagggggacagattcttacggaaatttttttacctgacttgctatgaaaaaactcatcacacaagaagagaaacagtaacctcactttgaaaattagctccactcaagactagtccacgaacgagacccgccttttctacacaggatccaaggtcacgagaagcagccagagtgccccgcctccgccggctctggtctgccattcgccagtgcagggatctggcacggaccagatgtggcgaatggcagcacagcgcggtggctgggtctgcacactggcctctgcagccagatttctatattgggagttttttaaaaagacatttcatagccaacaagaatcagtaaaagtgctgggagcagcagctggggaagctgccgcccacgggctctgccccttccagctggagccgcccgtgcctccagggg

SEQ ID NO: 33868 - DNA, 492 bp, Homo sapiens
  misc_feature (1)...(492): n = A,T,C or G
gcancgccnccaggccgccccgattgaaacccatgatnaccgtnaggaccatcactacgccatgcttggcacgagggaaaagaccgggaaggtttctttaccaacggtttgactcttggcgcgaagaaatgctcagtgatcagagatagtctatacgtcgatggtgactgcacaatggacatccggacaaagagtcaaggtggggagccaacatacaatgtggctgtcggcagagctggtagagtcttggtctttgtaatgggaaaagaaggggtccatggaggcggattgaataagaaggcatactcaatggcaaaatacttgagagactctgggttctagctgctaggcagactgttaagtattaggggaaaattgctcttaaactttcctagctataagcttaagtcttaattctggaaattttattagcaatgcagggtgatggggtatgaacctgtgtctcctttgtatccctctgttggtggggag

SEQ ID NO: 33869 - DNA, 373 bp, Homo sapiens
  misc_feature (1)...(373): n = A,T,C or G
aacatctgtgncgccacgggccggatacgccacagggttgatggcagagacggccgagtccctggtctaaaacaagacacattctttaaacactgtattacttctgcctccctctaggtgacagaggcagtccgggtgccatcacgggtcctgcacatggccatgcaggggtcctggccacgcaggccaccgtatgttcaggacacgcactgggtctcacagccactggcccacgcagaagtctccttgagcccactgggtcatatgcgtgtcaccacacgtgaactaatgtggtggctgactgcggacaccctcctgttctgaaccctgggcctgtgttcttctcagacactcccaaactgaggggcggtgg

SEQ ID NO: 33870 - DNA, 455 bp, Homo sapiens
gtgcactggcccccgggccgtgaccctttggccgctggtacccttggtggggcatgcctacccccactggagcccccagccccctgcctgtgccaggacccccaggaagactctgtggaagacgaggagcccccaggctctctgggcctcccaccgccccaggcaggagtccagcctgccgctgctgctgtctcaggaaccacacagcctctggggactgggccgcgagtcagcctctcgcctcactccccactcctcagccccaaggtggcctccatggatgccaaagacctggccttgcagatcttgccgccttgccaagtgcctcctccctctgggccccagagcccagctggccctcaagggctctcagcccccgagcagcaagaggatgaggacagcctggaggaagactcgcctcgggccctgggctcgggccagcattcggatagccc

SEQ ID NO: 33871 - DNA, 398 bp, Homo sapiens
gggtccggttgctgtggggaggattcctcctatgagatcctgagccggaggaccaagtttggggacagccatcactcccacgcgggtgggcactgtggtggctgctgccactgaactctcagagccactttcaagtcacaatgctctctcctaaggcctttcctctttcctggtctcactgttcaccgggtgtcctcagagctgtggcctccccagccctgcacgtgccaggctgcgccctgagagcacagaaccctggggagaagtggtatcagctgctcctcctctcctaggagaccagagtgctagaagggaatgaaagggagagggaagagtaggtggggccgggcagtgaagctcatcctccacagaggctgcctcctcatttggctcctggg

SEQ ID NO: 33872 - DNA, 490 bp, Homo sapiens
  misc_feature (1)...(490): n = A,T,C or G
tggatatgccccaggccccccccaactgataccgattgaccatcantcacgccatcttggcacgaggctttggctctgtggaggagtgtctgctggacgagaacagcatgctgatccccatcgctgtgggtggtgccctggcggggctggtcctcatcgtcctcatcgcctacctcgtcggcaggaagaggagtcacgcaggctaccagactatctagcctggtgcacgcaggcacagcagctgcaggggcctctggtcctttctctgggcttaggggcctgtcgaaggggaggcacactttctggcaaacgtttctcaaatctgcttcatccaatgtgaagttcatcttgcagcatttactatgcacaacagagtaactatcgaaatgacggtgttaattttgctaactgggttaaatattttgctaactgggtaaacattaatatttaccaaagtaggattttgagggtgggggtgctcctttttccg

SEQ ID NO: 33873 - DNA, 490 bp, Homo sapiens
  misc_feature (1)...(490): n = A,T,C or G
gatacgaccccggccgccccaatgagaccgactganaccgtnaggaccatcattacgccatgcttggcacgaggctaagatccttctattctacgtaatattttatggctgcctggctggcatcttcatcggaaccatccaagtgatgctgctcaccatcagtgaatttaagcccacatatcaggaccgagtggccccgccaggattaacacagattcctcagatccagaagactgaaatttcctttcgtcctaatgatcccaagagctatgaggcatatgtactgaacatagttaggttcctggaaaagtacaaagattcagcccagagggatgacatgatttttgaagattgtggcgatgtgcccagtgaaccgaaagaacgaggagactttaatcatgaacgaggagagcgaaaggtctgcagattcaagcttgaatggctgggaaattgctctggattaaatgatgaaacttatggctacaaagag

SEQ ID NO: 33874 - DNA, 480 bp, Homo sapiens
  misc_feature (1)...(480): n = A,T,C or G
actaaaacgttttatgaccttctgaccangcnnacgccaagcttggcacgagggggatgggttgggtacaggaggaggggtgaaactgtttaggttcattgaggaagacaggacccaagttctggaaagttctctgttcatcagttaccatcatcactccaagatcactgaaccaagaacatacccatgtgatttatacaagttcccactggccttgggctttgccagccaagaggtacacccctgggaagacaggcatgctcaggggtgacatggcatcttgcttgacctggttttgggaaccctgcaatatttctactagcttgctcctctgcaagctggccaaccctgagcccagacaccccaggctatttccctgtaaggcactgaagaaaccgatgcaagctctcaggaccggaagacatgcacagctcggattacatactgccggcagatgggacattcattcatgcgcttgcg

SEQ ID NO: 33875 - DNA, 478 bp, Homo sapiens
  misc_feature (1)...(478): n = A,T,C or G
agaggacnggggnattgaaaatgtttgacctgattacgctcagcttggcacgaggattaagtgaaaaaatatgatctgatgagtaagtggcaagagtgttaacgtatgaatattaagagttgatctgaggcctttttgcttttctgggggttctgtgcttgtggtagaactcttggttattttataaatagttcctgaaaagtgagagagtacagctggaaatcagacttctgatgaataaatcagaccctattaagagaaacaggttcaagtaattttaaaaccatttgaattttcataaatgttttgctaatgattaattataaaaaaaaacagtgactctagctggaggcttttgtgtgtttgcttttgagtccgctaggaaaaggaagaaaaattctagcttaggcaattgtggctttcactgaatcttttttaaagaaatgagctggattgctttcttcatcactatagcaan

SEQ ID NO: 33876 - DNA, 411 bp, Homo sapiens
gggtctattccaggcatgcacaatcctgataaatttgaggtgttctgttatgccctgagcccagacgatggcacaaacttccgagtgaaggtgatggcagaagccaatcatttcattgatctttctcagattccatgcaatggaaaagcagctgatcgcatccatcaggatggaattcatatccttgtaaatatgaatggctatactaagggcgctcgaaatgagctttttgctctcaggccagctcctattcaggcaatgtggctgggataccctgggacgagtggtgcgcttttcatggattatattatcactgatcaggaaacttcgccagctgaagttgctgagcagtattccgagaaattggcttatatgccccacactttttttattggtgatcatgctaatatg

SEQ ID NO: 33877 - DNA, 384 bp, Homo sapiens
ggctggaatttagtcaagcttcaggcccctctgctcctgtctgtgtcttgcgtctgtggccttcctattgtgtcttgtgttttggtggatgtgacagggctggggccacagtctactctgtctctgctgctagagaagccacctgtggaggactgggctgtggttgggcctgaggcctgtggaggaggtgagtgtagccagcagcggccgtctactcctgttctggcctgagaccaccggtgtgggtcacgaggaccctggcccacagtgttgagggtcctctctttcgggggctctcctggggccttcgatgggcttttcttcttgtcagtggagggagcagctccccactcatccctgggacaggccctgggactgtggtgg

SEQ ID NO: 33878 - DNA, 478 bp, Homo sapiens
  misc_feature (1)...(478): n = A,T,C or G
cgaatgagtgnnnttgatttcataacgctatcacatgcttacgccaagcttggcacgaggcccagccttcatggagggcatcgccctgtcagaccctgctttcaaggaaaactgcatgatgcacctgctccgctccctgcccgaccccaacctcatcaccttcctcttcctgctggaacacttgaaaagggttgccgagaaggagcccatcaacaaaatgtcacttcacaacctggctaccgcgtttggacccacgttactgagaccctcaaaagtggagagcaaagcacacctcacctcggctgcggacatctggtcccatgacgtcatggcgcaggtccaggtcctcctctactacctgcagcacccccccatttccttcgcagaactcaagcggaacacactgtacttctccaccgacgtgtatcccgaggcatggtggctgcgggcgggtggtggaaccagcccctccagcctg

SEQ ID NO: 33879 - DNA, 512 bp, Homo sapiens
  misc_feature (1)...(512): n = A,T,C or G
cgcccccccgccngnttttngatttgaaagccgttatgaccttagaacgcccagcttggcacgaggccggtgcctatggggtcccggtgtacctaaagggagaaggaccccatgtgctagccagaaatatactgtctcttgaaggaaagcaggagctcagactcttagagccagctgtggcttcggacccaaggcctgacctaggctgctatcctaatattgcaggaggggcctctcttccaagccccaccctaagggttagcccttggccaaatcttttgccgtctaggcccagccaggcttttctgactaaataagcaataagaggctctaagctgactgagttgcaaggaccctttccgccctcccttggatctccatgtttttccagatggcggaagagcatgtgccaccccctttcctaacagacttgtccaagtgcttggcgtgggacccatgaccaaagcccaggatggcttggtgggagtgtccctgctgcatctgcatgaacg

SEQ ID NO: 33880 - DNA, 401 bp, Homo sapiens
ggctggccatcagcatcgctctcctgctaacagtcttgcaggtctcccgagggcagaaggtgaccagcctaacggcctgcctagtggaccagagccttcgtctggactgccgccatgagaataccagcagttcacccatccagtacgagttcagcctgacccgtgagacaaagaagcacgtgctctttggcactgtgggggtgcctgagcacacataccgctcccgaaccaacttcaccagcaaatacaacatgaagggcctctacttatccgccttcactagcaaggacgagggcacctacacgtgtgcactccaccactctggccattccccacccatctcctcccagaacgtcacagtgctcagagacaaactggtcaagtgtgagggcatcagcctg

SEQ ID NO: 33881 - DNA, 424 bp, Homo sapiens
  misc_feature (1)...(424): n = A,T,C or G
ggttgacctcgtgttggaccgaattcgcaagctggccgaccagtgcacgggtctccagggcttcttggttttccacagctttggtgggggaactggttctgggttcacctccctgctcatggaacgtctctcagttgattatggcaagaagtccaagctggagttctctatttacccggcgccccaggtttccacagctgtagttgagccctacaactccatcctcaccacccacaccaccctggagcactctgattgtgccttcatggtagacaatgaggccatctatgacatctgtcgtagaaacctcgatattgagcgtccaacctatactaacctgaataggttaatagggcaaattgtggcctccatcactgcttccctgagatttgatggagccctgaatgttgacctgacagaattn

SEQ ID NO: 33882 - DNA, 419 bp, Homo sapiens
  misc_feature (1)...(419): n = A,T,C or G
cggactggagttggtgggaacacctctgtgtagcgcagcactgggtgagctccctgaacagcagacacggtcagtgggagaccctctagcccccacagtaggcgactgaggtcgtcgtaacaacgtaccgccgctaccagggcctcctcacctgtgctggaggtctctttcaggccttggataagtgcatccagggggccccccacatagtggacacaggtttctgggatgtcagcatggagtgccaagaggtgggtgaccacctggtggggaataaggcgcttctgggacatagaggctgcctcccagaccacagcttcccgaatggctccgtcctggaaacgccgaagctccgagcgggatccccagaactggcggaatttagcagcctcaggctggtctgcctctggacccagttn

SEQ ID NO: 33883 - DNA, 414 bp, Homo sapiens
aggtgttgatttctgctacccatccagcttaagtttggttgcttgaagcacagtaggtactgatgattacttcctggaaatcttgacaggcttattgtactgtgtaatggggaaaagttaaagtataatgtttggtgttaataaaagactgatgtgaaaataggaacatgtgtttttaatatccaatatgggtttatttgccgtgaaatactaaattccttattctacactacaattttcttgccctgtggtgtatattcctctaaatacatttttcctgacaggggctttaaggcagtttaacacacttaaactgaaagggtttaacttactgagatcaccccagaaaccatgataaatcacaaaatttatctggaattaccacattaaaattttaaatcatgtgccacaaca

SEQ ID NO: 33884 - DNA, 418 bp, Homo sapiens
ggggcttctctttttgacatcttttctttagggactcctagatggttctaattcccctgtctctgttctaattgacagatgttggagtccggggtgacctggtctcagtgaagaaatctttaggccggaatcgactccttcctcagggactggctgtatatgcatcccctgaaaacaagaagctgtttgaagaggagaaattggtgagctcaaaggaaggacagagagacttggggagataaaacttcttttctcttgcagcttccttccctttgacatttaacttaacttgaaaatgaaataggaactagaagaacaggaatgcagaagcccagccaatgtccaacataggaatagtttgatgctatttaacatgggctcatttttcttttactgcttttcatctttaactttcttt

SEQ ID NO: 33885 - DNA, 402 bp, Homo sapiens
ggacttgacttttaaaaaatcatacggacaaacaactttcaaacaaaactggattagtaggatttcttgcctgcttaactaacatgacagacttcttgtcccaagcccttctcagaaaaacctcatgtggaaaccaagctagagataagaattcttccctgatgcagttaggggaaagggaaaggctagaaacttctttggcaagcaattccacacacagccatttatgtgtgagtgctctgcttcaagcacagtacactctttgcagggacggccagatgttcagagtgggagtggtacttttcaaccagctaaaagtgcagaagtcatctagtcgtctgcctcttcccactgccagtgcctgcagccttgcagcaacttttaaccacccctatggactgg

SEQ ID NO: 33886 - DNA, 406 bp, Homo sapiens
gggctcttacaccttggcttccacctttagcaacgggaggaaaaggaaccccgaggccggcgtggcaaccacagatttgtacgggggctgcactctgaggcattctgggacatctgcagctgcccccgaggcacctggtgtgtttgcactggctctggaggctaacctgggtctgacctggcgggacatgcaacatctgactgtgctcacctccaaacggaaccagcttcacgacgaggtccatcagtggcggcgcaatggggtcggcctggaatttaatcacctctttggctacggggtccttgatgcatgtgccatggcgaaaatggctaaagactggaaaaccgtgcctgagagattccactgtgtgggaggctccgtgcaggaccctgagaaaataccatcc

SEQ ID NO: 33887 - DNA, 400 bp, Homo sapiens
gggctcttccaccttggcttccaccttcagcaacgggaggaaaaggaaccccgaggccggtgtggcaaccacagatttgtacggcaactgcactctgaggcattctgggacatctgcagctgcccccgaggcagctggtgtgtttgcactggctctggaggctaacctgggtctgacctggcgggacatgcagcatctgactgtgctcacctccaaacggaaccagcttcacgacgaggtccatcagtggcggcgcaatggggtcggcctggaatttaatcacctctttggctacggggtccttgatgcaggtgccatggtgaaaatggctaaagactggaaaaccgtgcctgagagattccactgtgtgggaggctccgtgcaggaccctgagaaaata

SEQ ID NO: 33888 - DNA, 428 bp, Homo sapiens
accttgaagaattggctgccccttgctggacctgaattctactgagtccctggcaagactgtcttacctggcagcaaactgctgcctgatttgttgggaccttctgagccttctacttatcatgtaaatgtattggcacagtgcttacatatgttaataaactgcaaatgtgcagttcagtttgtctctttgcaactcctgtaatacggcctggtgtaaaagtagtgagttaaagctacaggtcagtttatgaaacacaaaagtaggaatgcattttctgggtgaaagagtcacaccttagtgctataactctcctgcccatgatagagtattctgtttcaggcaagcttattctttccttctttcattttagatattgtcattacaaatcttaccaggttcacttaaaagctggctttcatccaact

SEQ ID NO: 33889 - DNA, 399 bp, Homo sapiens
gggtcctcacatttcctgatccctcttctcatgtatctttcatgatcctgcgggaagctttctcctttcgggagcttccttaactcactggctcctctttctctttcctgccctgaaacacagtccttaccccccattcttcttctttattcatttgcacaggtttaatcattgtttctaaattagcaatttctaaaacaggctcatatttataattttctataggactataataatttaactcatcagaaactgaaaatagtttcaatcaagttttcttcctactccttccctgtcagttacatctttcttccctcagttctccagatttatactttgcagtctttcttcagccaactctaatcagccatcaaatcctgtcaattactcttttcaaac

SEQ ID NO: 33890 - DNA, 397 bp, Homo sapiens
ggccgagagcatgcccttctggcttacacactgggtgggaaacaactaattgtcggtgttaacaaaatggattccactgagccaccctacagccagaagagatatgaggaaattgttaaggaagtcagcacttacattaagaaaattggctacaaccccgacacagaagcatttgtgccaatttctggttggaatggggacaacatgctggagccaagagctaacatgccttggttcaagggatggaaagtcacccgtaaggatggcaatgccagaggaaccacgctgcttgaggctctggactgcatcctaccaccaacttgtccaactgacaagcccttgcgcctgcctctgcaggatgtctaccaaattggtgggaatggtactgttcctgcag

SEQ ID NO: 33891 - DNA, 440 bp, Homo sapiens
  misc_feature (1)...(440): n = A,T,C or G
attgaaatatgaacgctcaggaccancacnacgccaagcttgggacgaggctttcctggagaattaattgagcaattgaggagtgtctcatgatatcacaggccaaggtaggggagtaaaaaggaggtcaggcaaaagggaggagttttctgtcctttcccaggtttcacactcaatttgatatccattaccatgtcttttctacttccttgtaaataggtatgatctttattcccactgtacagtctgttctatcctctgcctcccatcaagccctggttctttggtcctttggtaatatcttgaatttagtccctccatccttaatccccccatccctccccatcatgcaaccagtggtttaatccatgtaccaataggggctagtaccacagaggcctcctgtggtgccctcgtatcataccacctgttcctgtgga

SEQ ID NO: 33892 - DNA, 394 bp, Homo sapiens
ggataaatgagggtgcatgcgcctcagctttttctgtaccactcattttaggatcccaggaaaatatgaacttcaaatcaagaaagctctgtaatctgagggtaaggacaaaaactggtcaatgttttaaaaaaagaaaaagagaaggctgtgggatggaggcgttcctttccttcaggattatttctgctccatagattgtagatagctctttgagccagttgaattacagtctgttataaaaatggggaaagaaagagaatgagaaaagcaagaccgatttaactctcctgtttcttattttaattgctggtgctctgtccttggcacatgaaggccaattagagaaggctccttggcccacacttagagcagagatgcgcaaacttggctg

SEQ ID NO: 33893 - DNA, 378 bp, Homo sapiens
  misc_feature (1)...(378): n = A,T,C or G
ggaggccaccaaagtgcaggacatcaaaatcaacctggaagaggcgattgaaaccattgtggccgccatgaacaacctggtgccccccgtggagctggccaaccccgagaaccagttcagagtggactacattctgagtgtgatgaacgtgcctgactttgacttccctcccgaattctatgagcatgccaaggctctgtgggaggatgaaggagtgcgtgcctgctactaacgctccaacgagtaccagctgattgactgtgcccaggactttctggacaagatcgacgtgatcaagcccgctgactatgtgccgagcgatcaggacctgcttcgctgccgtgtcctgacttctggaatctttgagaccaagttccn

SEQ ID NO: 33894 - DNA, 451 bp, Homo sapiens
gaccattgataccgttttttgatgaccactccagcttggcacgaggcttctctccctccaacagtggccaggggaaggggaagtgagggcaggggcaaaaagatttgggaatttttatttatttatttattgagacttttcatttttttggtatttggctttactggaataggagggcccctgcccactgtgccccgtttatcccttattccccaaaccctgctctccccaacacctactcacttaagcacttgtataaagcctccagggttgggaatgggagtaaagggcaagagggcggacacatgaagtttagtttctaacccatcatcaccctaactcaaccttttctgagccaaatggcttgaattgaagccagttgtcatggaaatagtaagaggttagggtttaagagctggggatgcgggggtgggagagagaaccctcaaca

SEQ ID NO: 33895 - DNA, 414 bp, Homo sapiens
ggcacttttaaatgggtcactgaggggaggggactgcttggtttgcattgtcgcttggccccacggtaaaagccgggcgcagtttgagtccttgctgtccctccctgggcgtggactctggttctgatctcccctgctttgttttcctactctctctcgtgcagagacagggcagggcattgttcatgcactgaccgacctcagcagccccggcatgacctcagggaacggaaactctgcctccagcatcgccggcactgccccccagaatggtgagaataaaccaccacaggccattgtgaaaccccaaatcctgacgcatgttatcgaagggtttgtgatccaggagggggcggagcctttcccggtgggacgctcgtccctgctggtggggaatctcaagaagaagtatgc

SEQ ID NO: 33896 - DNA, 378 bp, Homo sapiens
ggggaggggatggaccgaatcccgtcttgtcgggatgagggatccggaagatctggccagtaagaatctactctctggctgtgcaacgggtttactacccctgtctaactcggatccgccactttgcggtttgagactaaaagagcaaaccgggagggggccttccagccccaaagcagactgtccagagacccccaaattctgatcctgaaattggaggcctccggggatgctcttttttaatcttataaaagggttataggggctgaggctgcctgaccccagcctaatggggtaagtaagccttgggaagtggagcatgggggcaaaggatccaagcattgagccttcatcctctattccccatccagcggggcg

SEQ ID NO: 33897 - DNA, 436 bp, Homo sapiens
  misc_feature (1)...(436): n = A,T,C or G
nattggggaccatctatgaatcggagtacgccaagcttggcacgaggcaagatgtacagagaatggaggtaggaagtggaactgataaggggccattgaagtttatctggaagttgcaggatgaaggaagtctgcagagtacatagattttagtctgaattttgggaaatgtatagaatttctacaggtagggggccttcttggtaggaggaacagtgggtagaggtgcccaagttactcagatgtgaatagtaacagtcactatttgcatttaagcgcaaggaaagtgaaaagtgctctgtgggagagaactaactatttaagtagggtcagattcctaaataatttgaatgtcaagcatcaaggtagaaggaagaaagaagtgacaaagcagcattaaggaaaatccttcaagaacaaaagagatgtgagctgg

SEQ ID NO: 33898 - DNA, 424 bp, Homo sapiens
  misc_feature (1)...(424): n = A,T,C or G
ggatatcacaaaacaggggtctgatgaaagtacaatagccatgttgattcaataaacccagatgcatattttttgaaaaccaatgtgttattgaaacaaatcaatggcagtgttaatccataagagttctgattttctataggaatatcactaatcaaaaaaatgcactcatgaataattggaagatagctcacaagcaagaggaattgacccttgaataattatctgattaataggtttcatagggcattcaaagttgcagactcagttaatgactacagttaagttgtctggactgaaaagtcatttcttttgtttagaacctttttgcaaccgtagaaagcatattaaaccattggttttgcaggatggatctgtcaaaccacaatatatacatttggatcagtgtatcctaggagacagn

SEQ ID NO: 33899 - DNA, 412 bp, Homo sapiens
ggaggaggtctccaaacccgcgctgcggagtgagtgaccaagattcggccagctcgacctcgaggatccagaggtggagacggtactacctcccacctctgctttccatccccttcaagaccttcctcgggaggcggcgaacgctgaccaccctgcgcgggagactttatgcccggcccctgcccctccctgcggggggaacttgcccctcaccgccagacttaatctgaggatcgttggatctctggcggggggcacaactgagcccaggccacagaaccctattcacgctctgagcttgcgccaagggggcgacggccgcttcctgtggactactgcacactgggcagaagaggcctctcagtggtctggtgacctggaagagtgagcctggtcagcgaaaagcagctgc

SEQ ID NO: 33900 - DNA, 389 bp, Homo sapiens
ggcctcgtgccacggccctgcagtgcctcagcaatgtgccacagctcaccgagtacttcctcaacaactgctacctggaggagctcaacttccgcaacccactgggcatgaagggtgagatcgcagaggcctatgcagacctggtgaagcaggcgtggtctggccaccaccgctccattgtgccacatgtgttcaagaacaaggttggccattttgcatcccaatttctgggctaccagcagcatgactctcaggagctgctgtcattcctcctggacgggctgcatgaggaccttaatcgggtgaagaaaaaggagtatgtggagctgtgcgatgctgctgggcgaccggatcaagaggtggcacaggaggcatggcaaaaccacaaa

SEQ ID NO: 33901 - DNA, 481 bp, Homo sapiens
aggagatttttttgaaaattgtatacctgactacgccaagcttggcacgaggctctctgatgttgtcaatgatgtaaattcagtccctggcttttaattttctgtctgatggcacagatcattgttgcacacaaacgtggcatagaaaagaacatgttcagaagccatggggccaagcacatgcggggacggtctcaaatgcgtgatcagagaatccttcacctttgctgaaaagtgagctcagatccagcaccatgttcctcctgacccatcctgtctatcttctcagttgagtttttaatctcactttgggtttccttgtgaagttggagggaagtttataatagcctaacactaccccacccccaactaggaggaacctctgttttcaagagagatgcctgtcctgtgcttggatagtcagtcaattatttgtgtatgaaacaatgtacaaatcaatgttttgaaaataatgatctct

SEQ ID NO: 33902 - DNA, 426 bp, Homo sapiens
ggcccgcgatggctccctgttggctacgcagggatggttatttgcacgaatgtttgaacgtattgtaaataagtaactttgacttgtgacaaaaaacaaaaagtgctgcatggctcgcatggaatccacgcgctccagggactctgcccgcccccgcgactggagacggcatctcgttcacagcacccaccctcttacctgataagttccatcgtatcaaactttctataaacaaaatacagtataatcagaaagggccatttcgccattatttgtgatcggtaggcagttcagagcataagttaactgtgaaaaaaatgtaaaggttttatttaggacatttgcatggctagtcatcagtccattttatgagttaacaatgtattttgttgagggaagtttttaggggttgttttgggttcttta

SEQ ID NO: 33903 - DNA, 472 bp, Homo sapiens
  misc_feature (1)...(472): n = A,T,C or G
agggggnaattgaaaaccgttatgtcgatgatcactccaagcttggcacgaggggtcttggcggccggaggaggagtaggtgcgggtgaagatggcggcagccgaggcctcgaactgcatcatggaggtgtcctgtggccaggcggaaagcagtgagaagcccaacgctgaggacatgacatccaaagattactactttgactcctacgcacactttggcatccacgaggagatgctgaaggacgaggtgcgcaccctcacttaccgcaactccatgtttcataaccggcacctcttcaaggacaaggtggtgctggacgtcggctcgggcaccggcatcctctgaatgtttgctgccaaggccggggcccgcaaggtcatcgggatcgagtgttccagtatctctgattatgcggtgaagatcgtcaaagccaacaagttagaccacgtggtgaccatcatcaaggggaag

SEQ ID NO: 33904 - DNA, 416 bp, Homo sapiens
ggcattttggtttattttaaaagatgtaaacatatattaagctatattaaatctcacatacagttcttctgtgctctattataccctgatagagatgggggagagaaaggaatgtttttgatggtggtttcaaagctcggacagtaactatcttgagcccattagagagtctgtgtccatatttgcatctggctggtcatagcctttgttactaatgatgacattcagttctcttttgtttttattttttaaaaactcaggtgtaattattatctgttcttaagataattgcaaatattaaatattatgatatatcaattcatgtgtttggcataccagtgaatgatgaagaacatgagattaatttaatttatcttcggtaacttgacattctggagagagactatcttctggag

SEQ ID NO: 33905 - DNA, 482 bp, Homo sapiens
  misc_feature (1)...(482): n = A,T,C or G
attgaatanctagaaatntctgcgaccaccacnacgccaagcttggcacgaggctttactttagacactggcccaactccaggcgtttcctttcattttctcagtgcttctcttctgacctgcatggcgagttctgtattgctggggcttccaacaaaaaccagagtcactgacagagggaacagcaaagaccttgctggtattcagctgagatggatatagagaatcagaggcaccttgttttcacaactaggataaaaatatctggagggccctttccattcctatttagagggagtcctggctccatgaccccctcccgagtggactgtccaagcagataggctcacacgagaaacagtgaggctgaaagggggggctatggaagagcggtagggagtccacggagaagatgcagngaatgcttgcatgcattcacacgtgtgtgtgtcccagctagttcactcctttcgccgtgcggg

SEQ ID NO: 33906 - DNA, 385 bp, Homo sapiens
gggccaaaaatggcatccttcaattctgcatagtatgtgactatcctgtaaatgataatatgggtacagactgagaaggccgggatataaagtaattgaaagctgtcattgccggtatactctaaaacatgcttgatgccttgtcagcatcattgcacacattgactctgtatttacatctgtatatacactatgattagaaaatatgcaagaaattgtttttccatgttaaaaacaaatgccattaaaagatgtccccttaattgtattgtcagagtattactatgtcaaggatgactgttctgttaacctaattttgtgttttcacatggaaatgtgattggactccatttttctgtgagctgagagtaagagcataagtcat

SEQ ID NO: 33907 - DNA, 478 bp, Homo sapiens
  misc_feature (1)...(478): n = A,T,C or G
nattgaaatcgttgcactctcannacgccaagcttggcacgaggcagnagngagggttagagtcctgccaatacagctgttgcatttttcccaccactagccccacttaaactactactactgtctcagagaacagtgtttcctaatgtaaaaagcctttccaaccactgatcagcattggggccatactaaggtttgtatctagatgacacaaacgatattctgattttgcacattattatagaagaatctataatccttgatatgtttctaactcttgaagtatatttcccagtgcttttgcttacagtgttgtccccaaatgggtcattttcaaggattactcatttgaaaacactatattgatccatttgatccatcatttaaaaaataaatacaattcctaaggcaatatctgctggtaagtcaagctgataaacactcagacatctagtaccagggattattaattggaggt

SEQ ID NO: 33908 - DNA, 410 bp, Homo sapiens
gggtgacatgaccaccgagggcggtaagtggacggttttccagaagagattcaatggctcaaaaagtttcttccgcgggtgggatgactacaagctgggcttcagccgtgctgatggaaagtactggctggggctgcagaacatgcacctcctgacactgaaccaaaagtatgagctgcgagtggacttggaggactttgagaacaacacggtctatgccaagcacgctgacttctacatctgcccgaacgcggtcagcgcagaggaggatggctacaccctctttgtggcaagctttgaagatggcggggcaggtgactccctgtcctaccacagagtgcagaagttctctaccttctaacgggaccaggacctctttttgccgaactgcgcagctctcttctcaggag

SEQ ID NO: 33909 - DNA, 402 bp, Homo sapiens
ggcaagggtggcaggtcactgtcactgccgacatcccttccccagcagaatggaggcagaggacaagggaggcagtggctagtggggtgaacagctggtgccaaatagccccagactgggcccaggcaggtctgcaagggcccaaagtgaaccgtcctttcacacatctgggtgccctgaaagggcccttcccctcccccactcctctaagacaaagtagattcttacaaggccctttcctttggaacaagacagccttcacttttctgagttcttgaagcatttcaaagccctgcctctgtgtagccgccctgagagagaataaagctgccactgggcacctgcgcacaggtgggaggaaagggcctggccagtcctggtcctggctgcactcttgaactg

SEQ ID NO: 33910 - DNA, 407 bp, Homo sapiens
ggtgctggcagaactgaaatataaactgtaaggggatttcgtcagttgctcccagtatacaatatcctccaggacatagccagaaatctccattccacacatgactgagttcctatccctgcactggtactggctcttttctcctctttccttgcctcagggttcgtgctacccactgattccctttacccttagtaataattttggatcattttctttcctttaaaggggaacaaagcctttttttttttgaaacggagggttgctctgtcccccaacctggagggcaggggcacaattttggttcattccaacctccaccttccaggttcaagggattctcctgcctcaccctcccgagtagctgggactacggcccccccccaccacgtttggctaatttttgt

SEQ ID NO: 33911 - DNA, 470 bp, Homo sapiens
  misc_feature (1)...(470): n = A,T,C or G
agggccgggnnnnncaactgataccttgtagaactgtttacgccaagcttggcacgaggccagaagcatgtcagggagacggacaggtgctctccttctcgtgcaccacatccaagtccacccaccgtggacgcagtgtgactaaatgctggccttgaagagaaaccctcagccagcttgtctgttgtccaggtccctcagtgtctctggtttccctgccctgcataatttaagcattagtgccaaatacatctgtcatattcctctccctggagactgcgaaatgtccagactttttcagactagtggagggaaggaatgttacataactaagtggaggcctggaactgtcaggatttgacagggctggaccagagacccttccgcctctgcctattgtgtctgtcaggcaggcagcagccatcaatccaagaatgagccatggcggccagcactgtgtggagaaaggt

SEQ ID NO: 33912 - DNA, 399 bp, Homo sapiens
ggaagcgtaccctctctttcagcacccaggccagtattgagatcgattctctctatgaaggaatcgacttctatacctccattacccgtgcccgatttgaagaactgaatgctgacctgttccgtggcaccctggacccagtagagaaagcccttcgagatgccaaactagacaagtcacagattcatgatattgtcctggttggggggtctactcgtatccccaagattcagaagcttctccaagacttcttcaatggaaaagaactgaataagagcatcaaccctgatgaagctgttgcttatggtgcagctgtccaggcagccatcttgtctggagacaagtctgagaatggtcaagatttgctgctcttggagtcactcctctttcccttggtag

SEQ ID NO: 33913 - DNA, 439 bp, Homo sapiens
cgggggtcccttttagaccgtcggtgagcgcatacgcaaccccggacgaggatcatttctgaccatttgctcccttccattcttgaaacactttatgccccactttagccccagtggtgactggaggtgcaagggggatctcccgccctctggggtttgagtggaggtatggagccagagaggctatcctagctaccttcctcctagggggagctggtccccttcctatgtggtagagagactggtgtaagagtgtggggtgtggcaggcgccggaaatcctcaaagctttcagaagcatccagaatgcctaccatcagctcctgaatcagggattttcagcactacctctgagccatggggttggctgcccagccaggcttccaggccctgaggacatgtggtcaggttcagcaggctcctgggtaaagagggtggga

SEQ ID NO: 33914 - DNA, 406 bp, Homo sapiens
ggctgacttccatgcccatgccactggggagtgctggaatggggacctggggtggggaggcagagggtcactttacataggattaagttcgagggggctaccgatttcagcacatgcactactgaaatttacacaaaaagaaagctgtgaaattgaagtcccaatttaagagtcctgaggcagaacctggtggctggaggcattcccagaggtggggaagagagcctgcccggccggagaacatctgccttgctgcacctgaggcccagcaaagccgttcctgggactgtcaaataatcggtgcagcggtggaaggagcctgcggctgctggcacagactttacacagcaactgctctctggtgggttttcacacaggctgtcttcagatcctgctgccgcgtgcg

SEQ ID NO: 33915 - DNA, 471 bp, Homo sapiens
  misc_feature (1)...(471): n = A,T,C or G
gaggcggnnnnnnnncactgaaaccgtgagaactgtttacgccaaccttggcacgaggcagcaagtatgtctgcttttgatcctttaaaaaaccaagatgaaatcaataaaaatgttatgtcagcgtttggcttaacagatgatcaggtttcagggccacccagtgctcctgcagaagatcgttcaggaacacccgacagcattgcttcctcctcctcagcagctcacccaccaggcgttcagccacagcagccaccatatacaggagctcagactcaagcaggtcagatgtaccaacagtaccagcaacaggccggctatggtgcacagcaaccgcaggcttcacctcagcagccctaacagtatgggatttaatatttaacaagctataatcagcagactggaccccaacaaccttaacagtttcagggatatggtcacgaaccaactttccaggcaccaactcctggg

SEQ ID NO: 33916 - DNA, 407 bp, Homo sapiens
ggaaaattcaaggcctctccatattaaaaactctcaaaaatctgggtattgaggaaacatagctcaaagtgaagagctgtttttgtaccaccatcaagctgttttggttgctgtatccctgtactatactttgaagttggggaacatgatgccttcagctttgttctttttgctggggattgcttggatattagggctcttttttttttggggtccattaaaattttgaagcggcgggctttaatttctgaaggagagcccttgcgtattatgagtggggaggcctcccaccctgaaataatttggtcgggttttgcctttataagaagaggtgatctcttatatcaggagcggggaagagatttccagttggcggggccatcctatgctgattatgagaagagggt

SEQ ID NO: 33917 - DNA, 406 bp, Homo sapiens
ggtgctgccaataactatgcccgagggcactacaccattggcaaggagatcattgacctcgtgttggaccgaattcgcaagctggccgaccagtgcacgggtctccagggcttcttggttttccacagctttggtgggggaactggttctgggttcacctcgctgctcatggaacgtctctcagttgattatggcaagaagtccaagctggagttctctatttacccggcgccccaggtttccacagctgtagttgagccctacaacttcattctcaccacccacaccaccctggagcactctgattgtgccttcatggtagacaatgaggccatctatgacatctgtcgtagaaacctcgatattgagcgtccaacctatactaacctgaataggttaataggtc

SEQ ID NO: 33918 - DNA, 411 bp, Homo sapiens
ggtgctgccaataactatgcccgagggcactacgccattggcaaggagatcattgacctcgagttggaccgaattcgcaagctggccgaccagagcacgggtctccaaggcttcttggttttccacagcttaggtgggggaactggatctgggtttacctcgctgctcatggaacgactctgaattgattatggcaagaagtccaagctgaagttgtctatttacccgacgccccacgtttacacagctgtatttgagccctacaatttcattctctccacccacaccaccctggaacactgtgattgtgccttgatggcatacaatgaggccatgtattacatgtgtcgctgaaacctcgatattgaacgctcaacctatactaacctgaataggttaatatgtccaaat

SEQ ID NO: 33919 - DNA, 406 bp, Homo sapiens
ggtgctgccaataactatgcccgagggcactacaccattggcaaggagatcattgacctcgagttggaccgaattcgcaagctggccgaccagagcacgggtctccaaggcttcttggttttccacagctttggtgggggaactggttctgggttcacctcgctgctcatggaacgtctctcaattgattatggcaagaagtccaagctggagttctctatttacccggcgccccaggtttccacagctgtagttgagccctacaatttcattctcaccacccacaccaccctggagcactctgattgtgccttgatggtatacaatgaggccatctatgacatgtgtcgtagaaaccttgatattgagcgttcaacctatactaacctgaataggttaatagggc

SEQ ID NO: 33920 - DNA, 411 bp, Homo sapiens
ggtgctgcccctaactatgccctagggcactacaccattggcaaagagatcattgacctggacttggaccgaattctcaagctggcccaccagagcacgggtctccagggcttcttggttttccacatctctggtgggggaactggttctgggattacctcgctgctcatggaacgtctctcaactgattatggctggaagtccaagctggagttgtctatttacccgacgccccaggtttacacagctgtgctggagccctactgcttctttctcagcacccactccaccctggagcactctgattgggccttcttggtatacaatgaggccaaccatgacatctgtccttgaaacctcgatattgagcgctcaagctatactaacctgaataggttaatatgtccaatg

SEQ ID NO: 33921 - DNA, 413 bp, Homo sapiens
ggcctgaggtcaggagttcaagaccagcctggccacatggcttaaccccatcgctactaaaaaaatacaaaaattggctgggtgaggtggtgggtacctgtagtcccagctacttgggaggttgaggcggggagaactgcttgagcccgggaggtggaggctgcagtgagctgagattgcgccactgcactccagcctgaacgacagagtgagactctgtcccaaaaaataaaataaaataggtgctgagtgaacgaatgaatgaacagttcagcaacagcaccttcagcatattctgccgtttaggtcactgagctatgtcccagatctctcctgaatgagtatctggctgataggtagcccatctggatgcggatcttgcagtgctctgctctagtttttgtgtttgtcct

SEQ ID NO: 33922 - DNA, 412 bp, Homo sapiens
gggtgtgctatgttttgttttcccactgagccagaagccgaaatattatactaccacttaccaccatctaccacctccaagaccaagaccaacattatgtattgagcatcgtatctttcctactgagcctagacacagcctcagaacctctcaacatagcacttggagcaacaattgccgcttgattggaattgccatttgagcttgagttagccccaatggcagaacgacaggctcgcactagtgtccacctgtggctgtcaggggcggtaccacagaaaggggaaaggccacttgcctctacccactgcccttttggacaacaattccaattgaaggaacaccaatcactgatggatcccattccaaaatggctcttcattcacatcatttaattctggtgaatgaatat

SEQ ID NO: 33923 - DNA, 406 bp, Homo sapiens
ggtgctggcaataactatgcccgagggcactacaccattggcaaggagatcattgacctcgtgttggaccgaattcgcaagctggccgaccagtgcacgggtctccagggcttcttgggtttccacagctttggtgggggaactggttctgggttcacctcgctgctcatggaacgtctctgagttgattatggcaagaagtccaagctggagatctctatttacccggcgccccaggtttccacagctgtatttgagccctacaacttcattctcagcacccacaccaccctggagcactctgattgtgccttgatggtatacaatgaggccatctattacatctgtcgtagaaacctcgatatagagcgtccaacctatactaacctgaataggttaatatggc

SEQ ID NO: 33924 - DNA, 376 bp, Homo sapiens
gggtttttctcaagtgactttgaaggtaatgcttttgcttaccatatttccaagatggccacgtctgtgcccttaagcaaatatttaatctctgacctgattttccctcatctgtgattacatcacagtttgaggatcatctgtgataacgtgaacattctgtgtatatagtaggtagtcaacagatgtaccctgtgaggctcatcttttattattctttgccacattctttatagtgcctttagcacaaataagatccagcatcttaaacagatttgcaatgagaaatattttgttttaggtaaaaatgttgtacatcagctctcagtaaccctagaagacttatataatggtgcaacaagaaaactggctctgt

SEQ ID NO: 33925 - DNA, 406 bp, Homo sapiens
ggtgctgccaataactatgcccgagggcactacaccattggcaaggagatcattgacctcgagttggaccgaattcgcatgctggccgaccagtgcacgggtctccaaggcttcttgggtttccacagctttggggggggaactggttctgggttcacctcgctgctcatggaacgtctcttaattgattatggtgagaagtccaagctggagttctctatttacccggcgccccacgtttacacagctgtagttgagccctacaatttcattctcaccacccacaccaccctggagcactgtgattgtgcctttatggcatacaatgaggccatctattacatctgtcgctgaaaccttgatattgagcggtcgacctatactaacctgaataggttcctagggc

SEQ ID NO: 33926 - DNA, 481 bp, Homo sapiens
agaaaaatttgaaaccgcttgacctgattacaccatgacctgattacgccaagcttgaaaattggctgatgagcttaacgctgagtatccagagcctgcagaagcacgccatgcttgagaaggcctgaaaactaagggggagaaagcgtctcccccttcatgtttaagtttttgtaaaaatgaatttgttatctcctccactgactacgctttaagccagagtcaatccggaggcgttatgcatcgacaatcctttttccttgtgccccttatttgtctttcttccgctctctgggcggctcctgcaacggtaaatgtcgaagtactgcaagacaaactcgaccatccctgggcactggcctttttacccgataatcacggtatgttaatcactctgcgcggcggcgagttgcgtcactggcaagcaggaaaaggattatctgcgccgctttccggagttccggacgtttgggcgcacggg

SEQ ID NO: 33927 - DNA, 429 bp, Homo sapiens
  misc_feature (1)...(429): n = A,T,C or G
gggccatcgggcaagggtgattccgatagtcggaggaagctactccctgatatagcgaggactgaggctcacatgtcacaaccggtcatcgtaaagaccagcggtgctgctatacctcccacagtacatagaataaccccgtaaagaatgacctggctggggcctgagagcattgctttacctggaggtgcagccagtcagccaggggaacgaagcagtatttgtgggctgagcaaagagggccctgggcagatcctgggtgtgtgcacatgagggccccgggcagggcagggcaaaggaggttgggacactgagtcagaggtatgctcctgaaggcaacccacaagggggccagttcgtggaactgcaggcctgatcctgagcagcatggtgcggagctgtctggacaggcctgcagagaagggcgcn

SEQ ID NO: 33928 - DNA, 484 bp, Homo sapiens
  misc_feature (1)...(484): n = A,T,C or G
ggcacgctggnntttgattagcaatacgatatgannacgccaagcttggcacgaggtggcacgagggggtggagagtggggagaactgctcctctcctgcatccagagaagagctggtccctgcagaagagacggaacaggataaagagcacacatgtgagacgctgctgatgtgcattgtcaccgtgctgagtcacgggctgcggagcgggggtggagtaggagatgtactcaggaagccgtccaaagaggaacccctgtttgctgctagagttatttatgacctcttgttcttcttcatggtcatcatcattgttcttaacctgatttttggggttatcattgacacttttgctgacctgaggagtgagaagcagaagaaggaagagatcttgaagaccacgtgctttatctgtggcttggaaagagacaagtttgacaacaagactgtcacctttgaagagcacatcaaggaagaacacan

SEQ ID NO: 33929 - DNA, 429 bp, Homo sapiens
ggcagggcattgcccccacagcaaagagagacattggaaggcaaaccaatgtcaggtttcctaatgtgcacggagtcatccctggaagagtgagtccggtgatcttaccagctaattgcattgagctaccccaccttggggatctacctgccaaggagaacagaacaccactggctttgacacccatctctcaacaatgatggaagaatgctggaaatttacctgctctggtagctctgtctaagttcatcttccttgtatggactttctttttttattgctctcaaatacttggattattaaatatctcatttaaaatttctttaaaatacattaaaagtacatttaaagagtacattttaagagtgcagatgaaaacataatgaatacatctttgcttaagaaaaaatatttctgacacagcatgaa

SEQ ID NO: 33930 - DNA, 429 bp, Homo sapiens
ggtggaaccagggagctcttgtagagccaaggccacccatgagcatttgtagtctggcgacaacccccttttaagctaatttatgcagaaccctgatttccctcactttttgctcattccttctttgacctatggcatttcatgttgagtgtttccatcaacatgctgcacctgttagacaagtgagcattttttaagaacacattgtactgagaaccacttaagcattgaatgcggagaaagcagtgctacctcagtttcgctggaagtagacttctttgagagttttctttctttgacgaaggatctgtattttcatgcttgaacgcggaaatacttttttttgtttggttgcttcatttgccttggagccaaagcttctgttcctggcggtcgggaaactagactgcgggcaactgacttgaaggg

SEQ ID NO: 33931 - DNA, 419 bp, Homo sapiens
ggattttatttttatgtgtttaatagcaattgaataaatgtacaatattcgtttacaatgatagctcaggatcttgtttacctttggacagggagggagggagaaatttattttctgggtaggagtaaagctggttctattcctcagctatgtaaattatctgttataatccaaaaagctttacatgaatgtttccgtatgtaaagcgggatatcaataaagaattaaatattacgtatttgcaccagaatcctaactcactatctgagaatgttagcagcattttcttttagttgaaagggggacacaatctcatggcattaacagaaggggttgaatattctaaagtatcaacgtcctagtctcatgggcacctcttggggctttccatttttgccttcatttgctaagtggcgtgc

SEQ ID NO: 33932 - DNA, 480 bp, Homo sapiens
  misc_feature (1)...(480): n = A,T,C or G
nttgacaacgctattagatgaccactccaagcttggcacgaggcccaaggatttgcttttgtccttctggacactttgttgttgagcaaaggtgaattcactctcattttgggtaaattgttgtttaacagcttccttaaacaggtttttgtatcttacggattctggagggaagtcatatattttactctatctgtcaggtgttcactgtaaggaaggggattttagatatagtggttatgtcttttaaaaagtttcctaggatttcaatcgtgtagttggagctacactgtacttctcctaagccttggccattttatcttaggtaatatggactcttcagggggggaaaaaaggggaaggggggctcttgaataaaatgggtagccttttcacatattgacatcttcagtattaatttagagagagcgatactaacttcttcaatgaaaaattatttatggaagagatccagtgtag

SEQ ID NO: 33933 - DNA, 479 bp, Homo sapiens
  misc_feature (1)...(479): n = A,T,C or G
gagcgccnnnnnnnaattgaaatcgatagcagtcttcaccatcactacgccaagcttggcacgaggtctcaatataggtatatagttaaatcaataatgcgtgttcacatcgctgtgcctgtgatattctctgcagagctaataatcaactcattacagttctattcttgcatgggttttttctttccagaagcatttaatagtttttctcttcttcctgccatatttccctttgattttcttttttagctctaggatatttactaagtgccttcattttttttaactgttaagttcagggcatatgtacagatttgttatataggtaaacttgtgtcatgggggttctttgtacggattatttcatcacccaggtattaagcctagtacctgttagttacttttcctgatcctctccgccttcccatccttcaccctccattaggccccagtgggtgttgctcccctctgtgtgtccc

SEQ ID NO: 33934 - DNA, 414 bp, Homo sapiens
  misc_feature (1)...(414): n = A,T,C or G
ggctgaaaatctcttttgtctgttactttttagcttactcagttttttgttattgtatctggatcagtcaaatttggatcagagaaaccacttttagtgatatagcataagggatttacttgagagatgagactttacacaattgtggatactggttaagaactctgcaaagctgttgtctttgcatctatttttaagcctgaagtcagtggctggcatcaggaagcagaactggacatgaagtggggaagagcaaggacaaactggaactcatgaggagaacaaaggcgaatttgcatctgtctcactgcctacaacaatgatgatatggatggccttcaggacaagctggtgccctttgccatggaattgtacatacacctggcccacgacccagagaggttgaaggagatn

SEQ ID NO: 33935 - DNA, 488 bp, Homo sapiens
  misc_feature (1)...(488): n = A,T,C or G
ggccaggcctttgaaaccttcatataacgtcggaccngacnacgccaagcttggcacgagggcattttttggaaagaaccctctgaaaaacttccagcagttgaatttggcgggaaatcgtgtgagcagggatggatggcttgccttcatgggtgtatttgagaatcttaagcaattagtgttttttgactttagtactaaagaatttctacctgatccagcattagtcagaaaacttaaccaagtgttatccaagttaacttttctgcaagaagctaggcttgttgggtggcaatttgatgatgatgatctcagtgttattacaggtgcttttaaactagtaactgcttaaataaagtgtactcgaagccagtaagtgctctgggacctcattattttaagcctggtagttaaaaaaaatcttgctaaaggatgccaaagaagataaggacgtggaaagaagtttaatttgatgattaaaaacatgn

SEQ ID NO: 33936 - DNA, 420 bp, Homo sapiens
ggcagacacaaagggaagctggtttgaaaaaactgttgagttggcatgctccctccgtcgtctagatatttgggctgagaaaataatttcaagcaaggctgggaaacacaaaagtaaatagtatgaaatgatgtcagcaaaaaatgggaaaaaagtagggaactcaaaaatgaataagctggcaaaactgtcaggagcaccttttttggaaactctgaaactgataaaaaaaactcacaaaatccaggggaacatgtaatgaagaaaaaactgctgaattttggtaagagagttctgtggtcattttctattctccaagttgtcagtggccttgaagatggcagccacattcctggtgtgggttgctggcaccagagggagcactatggaccttatcctcaaggaattgtaggtgtgctt

SEQ ID NO: 33937 - DNA, 396 bp, Homo sapiens
ggcctcgtgccaacgaagttatgtttatggacataccttttctctggggccttttctgtggctttcaaaggtgaagctgtgtgatttgccagaggcaagaatgagaagtaaaatgctgtagcactaagaaaatgagtggaagggtagagctggaggggtccaaaggctaagcctttgtagtgcaggtggggaagacccaggcaaggcacaggactctccccagctcccggggaagtgtgtggtgggtgaggtttaacgtgggctggaattttctgagccttttcctgagaactgatgtctgtcctttattcttctgccccctataggatgctctggagttttggctgcaagctggcgtggatgggttccaggttcgggacatagagaatctgaagg

SEQ ID NO: 33938 - DNA, 498 bp, Homo sapiens
  misc_feature (1)...(498): n = A,T,C or G
gtggcgaganaaaaattttgataaccgttatgattttgattaccctcagcttggcacgaggcagggggttgcagcaccgctgcaggcttgcaagatcggggagttgggagggcgagagaggaggaggtgcagctttgatgctgggacctccctgagtggggctgatgaatgtatattcattagcaccatggctcacttcccaggaagactgatcaggagcccttcagggacaattttgttctcaagattcacaccttaggaacacatttttatcacctcaaaattttgatccatcacccctctctccacctatatttttacaaataccattcagacttaaattaagctgaagaaactagcctttggtaacatagggtgtcattggttttcagggatgtaaccaattccagaaatacattcttttgcctggcatgaagactttgaaacacgggccgcttattttcagagttcctgttttgggacgtgacttggctactn

SEQ ID NO: 33939 - DNA, 427 bp, Homo sapiens
accagggcgtgcggcgccgttgcgggcgggagcggctgcaatttcggtgcctgaggagcgatgccgagggaaatcatcaccctacagttgggccagtgcggcaatcagattgggttcgagttctggaaacagctgtgcgccgagcatggtatcagccccgagggcatcgtggaggagttcgccaccgagggcactgaccgcaaggacgtctttttctaccaggcagacgatgagcactacatcccccgggccgtgctgctggacttggaaccccgggtgatccactccattcttaactccccctatgccaagctctacaacccagagaacatctacctgtcggaacatggaggaggagctggcaacaactgggccagcggattctcccagggagaaaagatccatgaggacatttttgacatcatag

SEQ ID NO: 33940 - DNA, 389 bp, Homo sapiens
ggaggagagccccttggaggtttggctgaacctggggggcagcacacccgaccctcaagtgccagagctgacttacccatttcagggcaccctggagccccaaccggcatcagatatcattgacatcgactacttctaaggactggatggtgagggtcgtggcgcacatctggggagcttcccagggtcaccaggaacctcagagaaccaccctgatactgagggagagaccccttcctggagcctgcttgacttatacgatgatttcacccccttcgatgaatctgatttctaccccaccacatccttttatgatgacttggatgaagaggaggaggaagaggaggatgacaaagatgccgtaggaggtggagacctagaagatgaaa

SEQ ID NO: 33941 - DNA, 455 bp, Homo sapiens
  misc_feature (1)...(455): n = A,T,C or G
aggttagaaattgannacagttatgacctcgattaccctcagcttggcacgaggcagcttactccagagatcaagtccaaggccattggctatctcaacactggttaccagagacagttgaactacaaacactatgatggctcctacagcacctttggggagcgatatggcaggaaccagggcaacacctggctcacagcctttgttctgaagacttttgcccaagctcgagcctacatcttcatcgatgaagcacacattacccaagccctcatatggctctcccagaggcagaaggacaatggctgtttcaggagctctgggtcactgctcaacaatgccataaagggaggagtagaagatgaagtgaccctctccgcctatatcaccatcgcccttctggagattcctctcacagtcactcaccctgttgtccgcaatgccctgttttgccc

SEQ ID NO: 33942 - DNA, 488 bp, Homo sapiens
  misc_feature (1)...(488): n = A,T,C or G
tgggcagccccgcccaggggnaactgaaactgaagacattagaccngatacgccagcttggcacgaggaaaaacactataatgccattactattattacaaattgtttagaaaatagttatgtttgcaaggagggatagggaacgtatataatcctgtctctccagtagtagctatttttacctttgtgaaattcctcatagtctttgcctcaattgtacaaatttttatatgatgtatctagaattttttctgcctttaacctcctaatgtatcctgaacacctttctgttttgctgccagtcatcataattatcattttaaatgatgcatcaccgtcagttgaatggatggactggagtttaattgactgccccttccttatgtgagctgtgcgaggcagccatggcgcctgcaaaggaggcagaatgcacatgaggacagggagaggagagggggcaaagaggctcccatggccagctgcacctn

SEQ ID NO: 33943 - DNA, 477 bp, Homo sapiens
  misc_feature (1)...(477): n = A,T,C or G
ggggaaaattggagatccttggatagatncacctccgtgaccatcaatacaccaaggttggcacgaagactgtctgttagggtatatattatagcattatttatctaagaattttacaaaagcttggcaagtccgggaaatgccttggtgtatgttagtacataaacagatgttcaaagaggagggtttttcaaatttgttttaatatgacactatcccaattaagaaatatgactggtctttgttgattttgctaaaatagttattaaccttgatgatattaatctcatgtgtacttggcacagtattaacacatagtctatctagttacagcccacgttcattaattttaattatagcagaataaaccagtgcaatccaagacccgaatgtccattccaaatcaccttaagcttcctgagttatttgtttggtttgggttttttccaccttaagactataatcccatggaacgcg

SEQ ID NO: 33944 - DNA, 396 bp, Homo sapiens
ggcagccggctgttggcaccaaggacttctgcatggacttctattcccgtgatgccaaactgccaggctcgcgctccatccgcaacctctttggcagtgggagccttcgggcctcaaagagaaaccgcgtgactggtgtgtaccagctcaccctgtgccacgtggctgacgcgggcagcccatggatgcagcgccggcgccgacgagtcctggacacatctgaggcctatgtccggggcgaggagaacctggcaggctggaggccccggagtgacattctcattctggaccaccaatgggagctggaaaagctgatcctcctgcacgaggtggagaagactatgcactacctgctcctgcgggagaatctggagaccgcccatcggcctgtcccgg

SEQ ID NO: 33945 - DNA, 451 bp, Homo sapiens
  misc_feature (1)...(451): n = A,T,C or G
nattganaccactgataccgtgcgacgccccgcttggcacgagggagtcccaggacagtctgcaatctctacaggtacagaaacacccccagttcaaggatcttcacgcctggatttaggcctacacgggcaactaccccaggccagttatccaggcagtgactttctgtacagctacagtcacctctggacacctgcggagactttaaaaatttccagaaggtcaggaatttttggagacctttcttatggctacgttgcctgcaaaggtgaatcaataagcttctgaactgacttagaaaatgttgcagagactcttgtgaacagatagaccctctcctgccactccagatagacgtatccgggtcacacacacctgatttaacaacatctcattatctcagggtctcactctgtcacccaggctggagtgcaatggcatgatctcggg

SEQ ID NO: 33946 - DNA, 403 bp, Homo sapiens
ggcggaaaacctttcagttgttcagaactttctttacaacagcggctatggtcaatattcctaagaatgggaacattactctggggccagcttatttcaacaattccaactagccgtttaaaattcctcaaagaagctggtcatggaacacaaaaggaagaaatacctgaggaggaattagcccaggatgttgaagagattgatcacgctgaaagggagttgcggcgtggccaaatcttgtggcttagaggtctgaacagaatccaaacacagatggatgtagtgaatgctttccaaagcggaacttccattcagggggctctaaggcggtaaccctccatcgccagccaacatcatgatattcgagtggtgaatgcatttcgtaattctttatatgaaaggg

SEQ ID NO: 33947 - DNA, 407 bp, Homo sapiens
gaaaagtgcccaagatcctttcaggatatttggttttttgggcgcgacacaaatcgaggtgagggaagagagaggaaaatcccctgaatccctgcaggattaatttattcaaaaaggaaataaaaaatactcaatatgcaaaagtcttgtgaagaaaatgagggaaaaccacagaacatgccaaaggccgaggaagatcgccctttggaggatgtaccacaggaggcagaaggaaatcctcaaccttccgaagaaggcgtaagccaggaagcagaaggaaaccccagaggagggccgaatcagcctggccagggatttaaagaggacacacccgttaggcatttggaccctgaagaaatgataagaggagtagatgagcttgaaaggcttatggaagagataagaag

SEQ ID NO: 33948 - DNA, 378 bp, Homo sapiens
ggcacacacacacacacatatatgtatacgcacgcacccacaccctacagcagatccacctgcacaaacatagacagatggggacatgcacccgcatgtacaaaaacacaaatacggaagtaaacctgaacaaaccctttaaatggggacgcagatgagtcctcggtaaaccgaggacccatgaaacagcagctgaagccagctccctgaatctgaccacagacactcctggggggcctgaaagcaacagctggacacccccttggtgctcgccttcggcctctcttggaactgcaccaccgaccaacttcagacttgggagctttaaagagcaggatagctcttcctccccaggacttggtcttttttctgggtctt

SEQ ID NO: 33949 - DNA, 493 bp, Homo sapiens
  misc_feature (1)...(493): n = A,T,C or G
ccttcgacccgtttgacattagaacgcatagctaggcacgagggttccctgagggatacagatggagtgtgagctccttgagggatacttatggagtgtgagtttcctgaggtgactgaggtggagtgtgagctccctgagggatacagatggagtgtgagctccctgagggatacagatggagtgtgagctccctgagggatactgatagagtgtgagctccctgagggatacagatggagtgtgagctccctgagggatactgatagagtgtgagctccctgagggatacagatggagtgtgagctccctgagggttacagatggagtgtgagctccctgagggatacagatggagtgtgagctccctgagggatactggtagagtgtgagctccctgagggatacagatggagtgtgagctccctgagggttacagatggagtgtgagctccctgagggatacagatggagtgtgagctccctgagggtn

SEQ ID NO: 33950 - DNA, 415 bp, Homo sapiens
ggagtcactgtggcccctcatctttccacgcacttagcacattcattttctcgtggcctccagagtgctcacccccaacactaagtgtgatgtcacacctgcctacctgctgggctccaccgcagcatacatcatctctttctgcttcttgaactggtggaaatagaaaaaaacagatggaggagaacccagacagaaagggtagcacacgggactcttgtgggccggggaccacaggatgaacagagagtagggttggaggatactagagcaggcactcctaaatttgagctttatcttcatgtggatgagcccttcaggtattggttgaggaggaacttggattcacagtgacttgggggcttggacagcttatagatggggacgtggctcacgctctctgatctgctctttt

SEQ ID NO: 33951 - DNA, 470 bp, Homo sapiens
ttgagaacatttgaattgattacccttatcaccatgatacggccagcatggcacgaggcttaatatgggaatgtttttctatcgagaatatctgttgaattaagtaagatttcagttaaaaaaaggaattcccaaattaactggtctcaacctgattatatgagctacatggccaaatcctattacagggaattctaaggtgaatcaaattgttttattgttataaaaatatgcctaaatcagatggcttcagagtcataaaatatttttcttgtaatagtatttaagcaattcgaccttatatgcaaacgttaagcgaatataaataacctctgtttcaattcatgtccatttaacaacattaaaataattattaggaacaccacatgaattttctttacatttgctgtggtataaattctgcttttaatgaatgtttatttatttattagccaaaattcagcctctcg

SEQ ID NO: 33952 - DNA, 476 bp, Homo sapiens
ggggtttgaaacgcttgacctgatagacatcgtcttgacctaagaacgccatatatttttcactgaagctgagcaaccacatattgctacaaggcaaatcaagaagacatcaggaaatcagatgcacaggaaataaaggaaagctgtgctttgtcattgaatcctaagttcttagctgctgatgcaagttgtcccccaaggccatcacaaagcactggggcatgagctgtgtttcaggggccactaaataacagctggtactgaccccagaaaccgccttcatctccattcggaagcaggtgacacaccccttcagaaggtgccctgggttgccgagtgtcagaatatactcaggactccagaggtgtcacacgtggaactgacaggagacccgccaccgtggaggcagggggcaagaaactcaagaacgcatcaagagcaccagccctgggccagggaagacaggctcttcctgc

SEQ ID NO: 33953 - DNA, 419 bp, Homo sapiens
ggctgcccagaggactaacagggcagtggccttgtccagcttggtcatgtgtccggacgcacggtcccggtgccctgatgggtctacctgctgtgagctgcccagtgggaagtatggctgctgcccaatgcccaacgccacctgctgctccgatcacctgcactgctgcccccaagacactgtgtgtgacctgatccagagtaagtgcctctccaaggagaacgctaccacggacctcctcactaagctgcctgcgcacacagtgggggatgtgaaatgtgacatggaggtgagctgcccagatggctattacctgcttgcgtctacagtcgggggcctggggctgctgcccttttacccaggctgtgtgctgtgaggaccacatacactgctgtcccgcggggcttacgtgtgacacg

SEQ ID NO: 33954 - DNA, 419 bp, Homo sapiens
ggcgcaaccacccaatgatcgattcaggagaaaagaagcctgggcggagagcagaggaggcagtgaccttcaaggatgtggctgtgatcttcactgaggaggagctggggctgctggaccctgcccagaggaagctgtaccgagatgtgatgcttgagaacttcaggaacctgctctcagtgggaggcaagatccaaactgagatggagacttttccagaagcaggaacacatgaagaattttcctgcaagcaaatttgggaacaaattgcaagtgacttaaccaggtctcaagataccaccataagtaactctcagttatttgaacaagatgacaacccctcccagattaaagcaagactatctacagttcacacaagagaaaaacctttccagggtgaaaattgtaaacagttcttc

SEQ ID NO: 33955 - DNA, 419 bp, Homo sapiens
ggctgggctatatctatcgagtgtccagcgtgagcagtgatgagatctggctctgagccgagggcgagacaggagtattctcttggcctctggacaccctcccattcctccaaggcatcctctacctagctaggtcaccaacgtgaagaagttatgccactgccacttttgcttgccctcctggctggggtgccctccatgtcatgcacgtgatgcatttcactgggctgtaacccgcaggggcacaggtatctttggcaaggctaccagttggacgtaagcccctcatgctgactcacggtgggccctgcatgtgatgactgggcccttccagagggagctctttggccaggggtgttcagatgtcatccagcatccaagtgtggcatggcctgctgtataccccaccccagtactcc

SEQ ID NO: 33956 - DNA, 507 bp, Homo sapiens
  misc_feature (1)...(507): n = A,T,C or G
gcatgccggccccccccttttgaaaacgctagtagatgaccatgccaagcttggcacgaggctctgccctggaaaggctgactacattggagttactggaagtgcgcagacagcaagaggaagaggagaggaagaggcgggcaccttctcccgagccgagcacgaaggtttcagaggaagccgagtcccagcagcagtgggatacttcaaaaggagaacaagtttcccaaaacggtttgccagctgaacagggatctccacggatggcagaaacggtggacacaagcgaaatggtcaacggcgctacagaacaaaggacgagctctaaagagtccagccccatcccctccccgacctctgatcgtaaagccaagactgccctcccagcccagagtgccgccaccttaccagccagaacccaggagacaccttcggcccagatggaaggcttcctcaatccgaaacacgagtgggaggcccacaataagaaagcctcaagcaggtccn

SEQ ID NO: 33957 - DNA, 434 bp, Homo sapiens
  misc_feature (1)...(434): n = A,T,C or G
ggcccaaggatttgcttttgtccttctggacactttgttgttgagcaaaggtgaattcactctcattttggggaaattgttggttaacagcttccttaaacaggattttgtatcttacggattctggagggaagtcatatattttactctatctgtcaggtgttcactgtaaggaaggggattttagatatagtggttatgtcttttaaaaagtttcctaggatttcaatcgtgtagttggagctacactgtacttctcctaagccttggccattttatcttacgtaatatggactcttcagggggggaaaaaaggggaaggggggctcttgaataaaatgggtagccttttcacatattgacatcttcagtattaatttagagagagcgatactaacttcttgcatgaaaaattatttatggaagagatcccn

SEQ ID NO: 33958 - DNA, 467 bp, Homo sapiens
  misc_feature (1)...(467): n = A,T,C or G
ncttgattaccattcngaccatcannacgccaagcttggcacgaggacaaaattgactgcccgaccctggcccgggtctgtttgatggtgaaaaagggctaccgggatcccccctaccacaactggatgcacgccttttctgtctcccacttctgctacctgctctacaagaacctggagctcaccaactacctcgaggacatcgagatctttgccttgtttatttcctgcatgtgtcatgacctggaccacagaggcacaaacaactctttccaggtggcctcgaaatctgtgctggctgcgctctacagctctgagggctccgtcatggagaggcaccactttgctcaggccattgccatcctcaacacccacgggtgcaacatctttgatcatttctcccggaaggactatcagcgcatgctggatctgatgcgggacatcatcttggccacagacctggccca

SEQ ID NO: 33959 - DNA, 423 bp, Homo sapiens
ggcgcacagaggaacgagctgagctggcagagtctaagtgttctgagctggaggaggagctgaagaatgtcaccaacaacctcaagtctcttgaggctcaggcggagaagtactctcaaaaagaagataaatatgaggaagaaatcaagattcttactgataaactcaaggaggcagagacccgtgctgagtttgctgagagatcggtagccaagctggaaaagacaattgatgacctggaagataaactgaaatgcaccaaagaggagcacctctgtacacaaaggatgctggaccagaccctgcttgacctgaatgagatgtaaaacgccccagtcccaccctgctgctggtcctccctctgacccagactccgcctgaggccagcctgcgggaagctgacctttaactgagggctgatct

SEQ ID NO: 33960 - DNA, 473 bp, Homo sapiens
  misc_feature (1)...(473): n = A,T,C or G
acctgaaactgangaacntaccacannaacannggangaggagcccatggaggtcaacaaacttgcagaagagggttataaaacagctgttctctgttactcagagtcagcttccaaactaagcgaggatatgggcacatccatattttagggctactctaagctaaaaaccttttctcttggttcagaggtatttacatcaaattaagacatttacaaaatgttcatagtatacaatagcccaaatatgattttcacctatgctgtgtaaagaaggtaagcattcgtaaggttgtctaataaattcagtgcactttttttcataacacgagctattctaaatgttttacatttctttcagggcatatttccaaattcattaaacagaatgaaatcaatgttattaaatggctatatcataatattcaagcatattatggaatctataccacagtgggattcacgtcaatacn

SEQ ID NO: 33961 - DNA, 421 bp, Homo sapiens
gggtacatcacagtgaggaaggcagggataccttatgaagcagtacaaatcttcataatcactctgagggagagtatattccaggagcttgtagtgcttcaagtgtccaaaatggaattgcattggttcatacagactcttatgatccagatggcaaacatggagaagataatgaccatcttcaactttctgcagaagtcgtggaaggtagtagataccaggaatcattaggcaatacagtatttgagttggaaaacagagaggcagaggcatacactggtctttcaccaccagttccctcatttaactgtgaagtaagagatgagtttgaagagttagattctgtaccattagtgaaaagttctgctggtgatactgagtttgtccatcagaatagccaggaaattcagaggtcttctca

SEQ ID NO: 33962 - DNA, 430 bp, Homo sapiens
ggatgacatcaccaacacagatacatttgcacgggccaagaactgggtgaaggagctacagaggcaggccagccccaacatcgtcattgcactcgcgggtaacaaggcagacctggccagcaagagagccgtggaattccaggaagcacaagcctatgcagacgacaacagtttgctgttcatggagacatcagcaaagactgcaatgaacgtgaacgaaatcttcatggcaatagctaagaagcttcccaagaacgagccccagaatgcaactggtgctccaggccgaaaccgaggtgtggacctccaggagaacaacccagccagccggagccagtgctgcagcaactgagccccccttgcctgcccgctgtccccgcctcctccgcctgaatgacccgactggaatccactctaaccaatcgcactt

SEQ ID NO: 33963 - DNA, 423 bp, Homo sapiens
  misc_feature (1)...(423): n = A,T,C or G
ggttgatttcttaggctttggcttcagtgacaaaccgagaccacatcactattccatatttgagcaggccagcatcgtggaagcgcttttgcggcatctggggctccagaaccgcaggatcaaccttctttctcatgactatggagatattgttgctcaggagcttctctacaggtacaagcagaatcgatctggtcggcttaccataaagagtctctgtctgtcaaatggaggtatctttcctgagactcaccgtccactccttctccaaaagctactcaaagatggaggtgtgctgtcacccatcctcacacgactgatgaacttctttgtattctctcgaggtctcaccccagtctttgggccgtatactcggccctctgagagtgagctgtgggacatgtgggcagggatccgcaacan

SEQ ID NO: 33964 - DNA, 415 bp, Homo sapiens
acatgtgcaggatgagcaggttggttacataagtaaacttgtgccatggggacttgctgcacagatcaacccatcacctaggtattaagcccagcatccattacaaatattaaagatggtatgaacagaaaaccccatatttacttctccaaatctattatataacattaaacaatcaactaagataacattttactgacttttgcagagtatgtgttccaaaaatagcaatattgtttgttgaagtaagccatctcttcttttgttaattgaataatctcaagcacacaattcagaaagtaagtgtgctgtagtgaaaagtgggctgagcttggtgccttaagattggggctcaagggaaatgggtgctatatgatctatcttgggatgtcctatgttggtatcggtcaagaca

SEQ ID NO: 33965 - DNA, 510 bp, Homo sapiens
  misc_feature (1)...(510): n = A,T,C or G
ggagtgccgancncnnccccnccttgaaaaacgctaggtcgatgaccatctccagcttggcacgagggtggcagnccgcgggcccggacagaaggctgaggcgacgcctccactacagcggaccggagctgcaggggcaacacattcagggcggggtgccccatttaggcctgggtgaccggagtaagaaactacaacccccgaagtgccttgcgcctcaaggttacggaggcagtgaccacccaccctggagccatggtccacgccttcctcattcacaccttgagggccccgaatactgaggacacgggcctttgccgagtgctgtactcctgcgtcttcggtgctgagaagtcacctgatgacccacggccgcatggtgccgagagggacaggcttctccggaaggaacagattttatctgtggccaggcaagtagagtcaatgtgtcggctgcagcagcaggcatctggccggccccccatggacctgcagccgcaatcctcagat

SEQ ID NO: 33966 - DNA, 428 bp, Homo sapiens
gggtgatattttgatttgcttgacattattttcttttctttttttgagacagagtcgtgctctgtcacccaagttggaatacaggggcacaatcttggctcattgcaacctccacctcccgggttcaagcaagtgtcctgtctcagcctcctgagtagctgggattacaggtgcacgccaccacgcccagctaatttttgtatttttagtacagacagggtttcaccacgttggccaggctggtctcgaactcctgacctcaagtgatccacctgcctcggtctcccaaagggctgggattacaggtgtgagccaccgcgcccagccattgataggattttcaaaagaaggaaagacggcatggaggagcctgtccatggctctcctccaaggcccggtcagggctgtgtggtctgaagagcccctgc

SEQ ID NO: 33967 - DNA, 422 bp, Homo sapiens
  misc_feature (1)...(422): n = A,T,C or G
ggagagaagtgtgtccatttctgccctctcctccactctctccccatcccctaggcgtagncatttctttattaggccttactttatttttcaaagttacgtaataaatgtctatgtttctaagctatctttagatttgtaaaagggctaaaatgttacttttaaacatgtttggtttattcaaatttgtttataaatctctcctttgtacccctggctaccacccctccccactcctttgcctaaaactaagggaaaatcctgtctttgcccatagcttcagaatgttctgcaattttagacttttacttttaactgatcactgttaagcaagggaggaaatttaccacttctctttgtgatgtaatattgcacagtgaccctaagtggaagccttcctgtgtcctggatgtgagctccgg

SEQ ID NO: 33968 - DNA, 389 bp, Homo sapiens
ggcctcgtgccaccctgtgaaggagagggtggggagggaggcatctagggagaggggtcccccatggtggctcccctccctggccattgttatcccaggaggagacactgtgggcacagggctaagtccaggtgtttgtattcgggctagaaaaggcaatgtcccaagtctctgctgcctgtcacagtccttcagccagggctggacctcaaccctgaggagtcacactgagttccagtgaccaccgtggtggtggccatgccactcatggttgctatggccggaaggcctggggcagcctcctccaagccgctcgcaccccgtaggtgcccatccgctgctggcgcaagtgctggccgaagatgaagcagagcaggacagatgtcacg

SEQ ID NO: 33969 - DNA, 463 bp, Homo sapiens
  misc_feature (1)...(463): n = A,T,C or G
tgagttgccgggggaggtttgaattgatgacatcttganctgattacgtcagcttggcacgaggcagcgcctcggctccagcgccatggcgccctccaggaagttcttcgttgggggaaactggaagatgaacgggcggaagcagagtctgggggagctcatcggcactctgaacgcggccaaggtgccggccgacaccgaggtggtttgtgctccccctactgcctatatcgacttcgcccggcagaagctagatcccaagattgctgtggctgcgcaaaactgctacaaagtgactaatggggcttttactggggagatcagccctggcatgatcaaagactgcggagccacgtgggtggtcctggggcactcaaagagaaggcatgtctttggggagtcagatgagctgattgggcagaaagtggcccatgctctggcagagggactcggagtaatcgcc

SEQ ID NO: 33970 - DNA, 465 bp, Homo sapiens
  misc_feature (1)...(465): n = A,T,C or G
cgaggggcggaggaggtttgnactgaaaacagtcttgacctagattacgctcagcttggcacgaggaagagtcaacatctggaattgctgcatttggaaaatctggtacagctttggggatctctgacctgagccctctctcaggctcccacttctcttacaccttgttgaggtccagcccccaaccctaccactgtttctagctccctgtgctcctgtccttccatatctggcctggggagtccgtcagaaatccccttgtcagctcctcgagtatccttacctcctcgtcatctgtggcatccaccagcaacccccgagggtggatgagcttattcctggggaacgtcccaccttggcaggcgttggtgccataggatgcaagctcaggtcttatctgggccctcagcatgtccagaacctgataatcatcattattattggctggtcacatccattagtgag

SEQ ID NO: 33971 - DNA, 439 bp, Homo sapiens
  misc_feature (1)...(439): n = A,T,C or G
cggcncgaatgaccccctnnnaattgannacatcttgacctgatacgccagcttggcacgaggattaaactctgttctggtgcctgagctcaggggttttcagagaatgaataagagactgtccagtgactggtgggtccctgggggccagctgccttctcatcctgggaggtggcccttcccaagcccatcagggcgtgtgagcagactgaaggggccgctgcagcccctggccctcaatacccagctgcttctggctaagagtgcagcagagactgaggcatagccagcttcaaaagcgatctgacatgaaagtcattaacaaagccagccgtgaaaaggtgccccagagttgctgtggacagacctgtaaggacttgcaaaacaaaagaaagtgaggggtttttttaacctcagagctagctgctctctgcagcct

SEQ ID NO: 33972 - DNA, 426 bp, Homo sapiens
  misc_feature (1)...(426): n = A,T,C or G
gggctacaacagaacttcagacagcaaaggcctgacatgtgcagccgtgtggaggatgccgaaggaattggaatcaggcaggcacgagtcccctgatgattcatccagcactggacagaccctggagctgctctgtcaccttgacaacacagcccatggcaacatggcctgtgtcgtgtgggagccaatgggagatgggaagaaaatcatttccttggctgataaccatatcctgctgtgggatttacaggaaagctcgagccaggctgtgctggccagctcaacgtccctggaagggaagggacaactgaagttcacctcaggacggtggagcccacatcataactgcacccaggtgggcacagcgaacgacaccaccctccgtggctgggacacccggagcatgagccagatctactgcataan

SEQ ID NO: 33973 - DNA, 405 bp, Homo sapiens
ggtgcgttcactttgcttacctgttggcaagaggggcatacaaaaataacgtaacgtgacatcgttgacaacggtagctctttgattacacaaaagccaattttaccttcccgcaaaagccagttgacgcctttggaacttttatttgcggcattttggcgccctctggctgtgtttggatcgctttcatgctcgcctgcgtcccagccaagaaaaaatcgatggagctgcaggttgtcctcaggatggttctgccctcaggacctgggcgtgaattcagggacagggtggccctccagaaccggagtgacaaactgtaaccatacttagggaggcagacgtcaaaggcaagtacatctgtattcaactgggtaaagccatgtgaagacgtgcctgcctccctgg

SEQ ID NO: 33974 - DNA, 408 bp, Homo sapiens
ggactcgcgtgacagttcccggcacgcggcggcgacggtgacccatgaaggggctctggtgccgggctgagcgggggaagcaggggtagcggagccatgggggacgctcccagccctgaagagaaactgcaccttatcacccggaacctgcaggaggttctgggggaagagaagctgaaggagatactgaaggagcgggaacttaaaatttactggggaacgggaaccacgggcaaaccacatgtggcttactttgtgcccatgtcaaagattgcagacttcttaaaggcagggtgtgagggaacaattctgtttgcggacctccacgcatacctggataacatgaaagccccatgggaacttctagaactccgagtcagttactatgagaatgtgatcaaagcaatg

SEQ ID NO: 33975 - DNA, 408 bp, Homo sapiens
gggtctactggagatccaaagggatttgcgtttgtggaatttgaaacaaaagaacaagcagcaaaagcaattgagtttcttaacaacccaccagaagaagcaccaagaaaacctggcatatttcctaaaacagtgaaaaataagcccattccagccttaagagttgtggaagagaagaaaaagaaaaagaagaagaaaggccgaatgaaaaaggaagacaatatccaagccaaagaagaaaacatggacacaagcaacaccagcatcagtaaaatgaaaagatccagacccacatctgagggctctgacattgagtccactgaaccccaaaagcagtgctcaaagaaaaagaaaaaacgggacagagttgaagcatctagcttacctgaagtcagaacagggaagagg

SEQ ID NO: 33976 - DNA, 426 bp, Homo sapiens
gggttgtgaagaccatgacaggaggccgagcgcaaagcattggcaggaggggcaaggtggaacagttatctccagaagaagaagagaaaaggagaatccgaagggaaaggaataagatggctgcagccaaatgccgcaaccggaggagggagctgactgatacactccaagcggagacagaccaactagaagatgagaagtctgctttgcagaccgagattgccaacctgctgaaggagaaggaaaaactagagttcatcctggcagctcaccgacctgcctgcaagatccctgatgacctgggcttcccagaagagatgtctgtggcttcccttgatctgactgggggcctgccagaggttgccaccccggagtctgaggaggccttcaccctgcctctcctcaatgaccctgagcccaagccct

SEQ ID NO: 33977 - DNA, 409 bp, Homo sapiens
ggaggagggaaaggcttgaagtaaatggagtgaagagattgttcaattttcctacagaaaaaaaaatcatggctttgttacactgcattgtaaagctccagcaatggggatacaacgattttttttttttttttaaaaaaatttctttttaaaaacatggtcttgccatgttgcccaggctattctggaactcctgagctcaagggatttgcccaccttggcctcccaaagggctgggattacaggggggagcttccacccctttttgggacccaatgattaaggaaaaaactgaccccaaatgtggcccaccccatgagggttaaatcctgggttttaatccccgaggaaaagcaaagaggagatagagagctcccttttttttgcaaaaagtttaaacttcagtacg

SEQ ID NO: 33978 - DNA, 415 bp, Homo sapiens
ggaacagttattatggagcagaaacggaaagggagtctacagaattggaactggaggctcctaaaccaaggattcttttgctgcttagtgctggggcgaccttgggaatatacttaacctctctgaacctcagtctttctatcactaaattggggataatactacctcctgggataggagttggaagggattcaatgagactgggaaaccatttaataaaaggtagaacacactaataatgggaggcatgattgtacttactacatgggccttgaaggggaacagcgccatcagaactgtgaaagaaaataacatttcttctctctttttagaaagacacaggatcagaatggtgatgccagggatcacaacctcccaaccccgtgattagcagattgaccctgctcgcctgtct

SEQ ID NO: 33979 - DNA, 406 bp, Homo sapiens
  misc_feature (1)...(406): n = A,T,C or G
ggggatccggcttccaacatgtggcagctctgggcctccctctgctgcctgctggtgttggccaatgcccggagcaggccctctttccatcccctgtcggatgagctggtcaactatgtcaacaaacggaataccacgtggcaggccgggcacaacttctacaacgtggacatgagctacttgaagaggctatgtggtaccttcctgggtgggcccaagccaccccagagagttatgtttaccgaggacctgaagctgcctgcaagcttcgatgcacgggaacaatggccacagtgtcccaccatcaaagagatcagagaccagggctcctgtggctcctgctgggccttcggggctgtggaagccatctctgaccggatctgcatccacaccaatgcgcacgtcn

SEQ ID NO: 33980 - DNA, 447 bp, Homo sapiens
  misc_feature (1)...(447): n = A,T,C or G
ggaaggagtgcacctacccaaggcctctgccatcagactggatctgcgacaagcagtgcctttgctcggcccanaacgtgattgactatgggacttgtgtatgctgtgtgaaaggtctcttctatcactgttctaatgatgatgaggacaactgtgctgacaacccatgttcttgcagccagtctcactgttgtacacgatggtcagccatgggtgtcatgtccctctttttgccttgtttatggtggtaccttccagccaagggttgccttaaattgtgccaggggtgttatgaccgggttaacaggcctggttgccgctgtaaaaactcaaacacagtttgctgcaaagttcccactgtcccccctaggaactttgaaaaaccaacatagcatcattaatcaggaatattacagtaatgaggattttttctttctttttttatac

SEQ ID NO: 33981 - DNA, 431 bp, Homo sapiens
  misc_feature (1)...(431): n = A,T,C or G
ggcgtatgaatgtgatgaatgtgggaaagcctttaactagccctggactctgactaaatatgagaatttatatggaacataaaccctacaaatataaagaatgtgacaaagctttttaaggaagttctcaacccttattacacataatttatactggacagaaaccctacaagtgtgaagaatatggcaaagcctataacaacctgtcaactctttttgttttttgagatggagtttcactcttgtcacccaggctggagtgcaatggcacgatctcagctcactgcaacttctgcctcctggtatcaagccattctcctgcctcagcctcccgagtagctgggattactggtgcccaccaccatgcccagctaatttttgtatttttagtagagatggggtttcatcatgtttgccagactggtctccan

SEQ ID NO: 33982 - DNA, 435 bp, Homo sapiens
gggtacatacaggatttcaccatgttggccaggctagtttcgaactcccggcctcaggtggtctgcctgcctcagcctcccaaagtgttgggattacaggtgtgagccactgggccctgcctgtactttttatcagccacaaatccagcaacaagctgaggattcagctcataaaacaggtttggtgtcttggtgatctcacataaccaagatgctaccccgtggggaaccacatccccctggatgccctccagccttggtttgggctggagtcagggcctgtatacagtattttgaatttgtatgccactggtttgcattgctggtcaggaactctagtgctttgcatagccctggtttagaaacatgttatagcagttcttggtatagagcaaactagaagaaccagcaatcattccactgtcctgccaaggg

SEQ ID NO: 33983 - DNA, 398 bp, Homo sapiens
  misc_feature (1)...(398): n = A,T,C or G
aggtcctgggaccctcactttagttcttgggatttatttttctccatctcccacctccttcatccagataacttatacattcccaagaaagttcagcccacatggaaggtgttcagggaaaggtgggctgccttttccccttgtccttatttagcgatgccgccgggcatttaacacccacctggacttcagcagagtggtccggggcgaaccagccatgggacggtcacccagcagtgccgggctgggctctgcggtgcggtccacgggagagcaggcctccagctggaaaggccaggcctggagcttgcctcttcagtatttgtggcagatntagatttttggttttttttttaaacaaaaaaacaatttttaaaaaaaaagctttgaaatggagg

SEQ ID NO: 33984 - DNA, 404 bp, Homo sapiens
ggcacgaggatgaatttaaacctcttgtggaagagcctcagaatttaatcaaacaaaattgtgagctttttgagcagcttggagagtacaaattccagaatgcgctattagttcgttacaccaagaaagtaccccaagtgtcaactccaactcttgtagaggtctcaagaaacctaggaaaagtgggcagcaaatgttgtaaacatcctgaagcaaaaagaatgccctgtgcagaagactatctatccgtggtcctgaaccagttatgtgtgttgcatgagaaaacgccagtaagtgacagagtcaccaaatgctgcacagaatccttggtgaacaggcgaccatgcttttcagctctggaagtcgatgaaacatacgttcccaaagagtttaatgctgaaaca

SEQ ID NO: 33985 - DNA, 414 bp, Homo sapiens
ggcacgaggatgaatttaaacctcttgtggaagagcctcagaatttaatcaaacaaaattgtgagctttttgagcagcttggagagtacaaattccagaatgcgctattagttcgttacaccaagaaagtaccccaagtgtcaactccaactcttgtagaggtctcaagaaacctaggaaaagtgggcagcaaatgttgtaaacatcctgaagcaaaaagaatgccctgtgcagaagactatctatccgtggtcctgaaccagttatgtgtgttgcatgagaaaacgccagtaagtgacagagtcaccaaatgctgcacagaatccttggtgaacaggcgaccatgcttttcagctctggaagtcgatgaacatacgttccaaagagttaatgctgaacattcactttcatgcg

SEQ ID NO: 33986 - DNA, 474 bp, Homo sapiens
  misc_feature (1)...(474): n = A,T,C or G
ntttgataacgctttgaccttgattacgcctagcttggcacgaggatacattcttacctaaagctcactggcatgatgttagggatttaaattcttaaagacgctgggttggtaattaccggtatttttatggtgggttattttaggtaagctcctgtgtaaagctaaaaatcctgtgaatacaatactatcctttacaggcagacattattggtaaacaagatcttgccctccaatgaaatgacttacatgttttaaaaaaccgagttggttttattgaatttaaaaagataggtaactaagtagcatttaaaatcaagatagagcattccttcttgtatcagtggggcagtgttaccataaacacggtgtatatgttgttaaaccctatgaagagtaacagtgtagaccagactgcctctctcacatatgtgcctgatattttgtggatacctcccctgcactggcaaaaca

SEQ ID NO: 33987 - DNA, 402 bp, Homo sapiens
gggttactatcgtgaaaacatgcaccgttaccccaaccaagtgtactacaggcccatggatgagtacagcaaccagaacaactttgtgcacgactgcgtcaatatcacaatcaagcagcacacggtcaccacaaccaccaagggggagaactttaccgagaccgaccttaaaatgatggagcgcgtggttgagcacatgtgtatcacccagtacgagagggaatctcaggcctattaccagagaggatcgagcatgggcctcttctcctctccacctgtgatcctcctgagctctttcctcatcttcctgagagggggaagaggaaggtcttcctgttttcaccatctttctaatctttttccagcttgagggaggcggaatacacctgcagcccttttagt

SEQ ID NO: 33988 - DNA, 411 bp, Homo sapiens
ggccaccttggcctcccaaagtgctgggtttaatgggctaggtgtgagccaccacaccccaccccttttctctattttaatgaaatatagacgcttggtatcctaaaggtttctttttctttcttttttttttttggccgggaggtcaaggacccccttaaagggttttttgcgccaattttttggggccaaatcgggtcaaaaaaattaataaggttgggccgcccacctgggggtggcctgaaagttggtggggagctcaaaattttccagtccccaaagagccccctttttcccccaggggggccccattgggaattggaactttttgaaaaagggcccaggcgggggaaacagaacaaccctgaaaggggttcacagccctccaaaaaaaggggaaaaaaaaccctc

SEQ ID NO: 33989 - DNA, 397 bp, Homo sapiens
gaccgcctaagagtcgcgctgtaagaagcaacaacctctcctcttcgtctccgccatcagctcggcagtcgcgaagcagcaaccatgcgtgagtgcatctccatccacgttggccaggctggtgtccagattggcaatgcctgctgggagctctactgcctggaacacggcatccagcccgatggccagatgccaagtgacaagaccattgggggaggagatgattccttcaacaccttcttcagtgagacgggggctggcaagcatgtgccccgggcagtgtttgtagacttggaacccacagtcattgatgaagttcgcactggcacctaccgccagctctttcaccctgagcaacttatcacaggcaaggaagatgctgccaataactatgccc

SEQ ID NO: 33990 - DNA, 401 bp, Homo sapiens
ggcctcgtgccaagcttggcacgagggcgcgaaacatggcggggcaggacgcttgctgcggccgtggcggcgaccactactcataggacgaaggcgacagcagcgtgtccagggcggctgtggaggtgttcgggaagctgaaggacctaaactgccccttcctcgagggtctgtgtatcacagagccaaagacaattcaggaactgctgtgcagcccctcagagtaccgcttggagatcctagagtggatgtgtacccgggtctggccctcactgcaggacaggttcagctcactgaaaggggtcccaacagaggtgaagatccaagaaatgacgaagctgggccacgagctgatgctgtgtgcgccagatgaccaggagctcctcaagggctgtgcctgc

SEQ ID NO: 33991 - DNA, 469 bp, Homo sapiens
  misc_feature (1)...(469): n = A,T,C or G
ccccgccgccccctccattgagnactgttatagaatgactacgccaagcttggcacgaggaccacattaatgtcttgatatcaattaatagaaccatttcccctccattttctctttagtttcagaactggtaagagtttgtctaataagatttttataaagtggtgatatgaatggcttttggggatggagactggggccagctgccaagggtacccatctcacacgaagcatcaggtccacttgggtttgtttttggctgattacaatcttgaatcaaacttttcagtacagctggtctcccaagaactttctaatgttgatttgagcttccctgaatgaatctcaaaaaataacaaagggagagagaatgcctgtgtattgagcttgacccatttcacagatgccgaaatagaagtgaggcgacttgcccagggtccctgtggnggattgtgttgntgtctcaatt

SEQ ID NO: 33992 - DNA, 401 bp, Homo sapiens
ggaaagagcctaagcttgaaacactctgtgacttagtttttgcatttattctgtcttctatgccccccaaccttactccaaattaatgaggcattattttatttatttatttttttgagacagagtcttgctctgtcgtccaggctggagtgcagtggcacaatcttggctcactgctacctccgcctccagggttcaagcaattattccgcctcagcctctcgagtagctgagactgcaggcgcgtgctaccacacccagctagtttttttttattttcaatagagaccgggtttcaccatattggccaggctggactcaaactcctgacttcgtaatccacctgcctcagcctcccaaagtgctaggattacaggcgtgagccactgcacccggcctat

SEQ ID NO: 33993 - DNA, 493 bp, Homo sapiens
  misc_feature (1)...(493): n = A,T,C or G
gggggggccntntttggagnactgaaggcctctcannacgccaagcttggcacgaggagagacaccaacaggggccacactgtgaaggcagtgtgtgagtcatttcatttggccaaagattccggttttaaagtgggggcccatatgatgcctgacctgccaaacgtgggactagaaagagacattgaacagttcacagagttttttgagaaccctgcttttcgtcccgatgggctgaaactctatcctaccctggtgattcgtgggaccgggctttatgagctttggaaatcaggaagatataagagttactctcctagtgacctggttgaattgggggctcggatcctatccctcgtgcctccatggactcgagtgtaccgagtacagagggatattccaatgcctttagttagcttaggagtagagcatggtaacctgagagagctggcacttgcaagaaatgaagaccttcggatacagtgtcgagatg

SEQ ID NO: 33994 - DNA, 435 bp, Homo sapiens
ggagctgcatcttgacatctctggctccccatggaaagggcatccctagctgagaagcaggacctctgaaaagaggcaggggtgtaaaggatcagataagccctccatttcccccatccaagtgaagagagaaggaggggaggtagccccctaccctgctccatcttagagcaagggagacccagctcaggaggtcttgcttgggaagtgatgagaccttgacttttccagtctgtctttttcccctagcacccccaaactccccttaatcaccatcctaagttgctgggggtgatgcaatagcaagatgaggagcagatctgggctgtttaaactaacaggctgggtgaggtgggggtatttagggccttgagcttagagttcaacctaccaacgacccctgaagagggaagcatttgacaccacaaactgttt

SEQ ID NO: 33995 - DNA, 433 bp, Homo sapiens
  misc_feature (1)...(433): n = A,T,C or G
ggctcctgcccacacctgctccccctgtctgccctccaaggtttgtttacagttcggcctttgacaggctgaagtctgagatctaagaggagagagagatctgggtggccggggaccctcttctggcttagcattctgtgccagggctctgcagcccagcttggcctcggagagatgtgttcactgaggggaagaattcaggcctgctgatcttttccctgccaactccacttttcccatcatgaccattccctccaccttctggaattctctccacttcctactttcttttttttttgatatgnttttttaaacacacacacacgcgcacacacacacacatttacatttacattaaagcctcgggggagggggaaattggcctaagtcaggaaaaggcccaacggggtgagtgctgtggcctttgtggagn

SEQ ID NO: 33996 - DNA, 422 bp, Homo sapiens
ggattctcaccacccaatgggaacagaaataccatggcaacaagcttaaaggtgatgtgccctccctgccctcagaaagccaagtttagtgagagattaaatcccagtataccaagaaatgggcctctctggaaagaattggccaattgattctaccttcttaaaccccaactcctgctaatcttgtcctaggagtagatctgctccggagttggtgctacaaagggttccacatgggagttgtctctgattctgctccagtggtgagtgctgccagtgtggaggacagctccttctcaggcccctccctcctctgccttatgagtgcagcaggagttgggtagggatgtataggcctctctcacttttccgctaggctctgcttatgtctcaccattctttcctttcaagggaatagttgc

SEQ ID NO: 33997 - DNA, 421 bp, Homo sapiens
ggcatggctatccattccatttgacctcaatggctctgtggtgtcatccaacacctcaaaccagacagagccgtactatgacctgacaagcaatgcagtcctcacattcatctattttgtggtctgcatcattgggttgtgtggcaacacacttgtcatttatgtcatcctccgctatgccaagatgaagaccatcaccaacatttacatcctcaacctggccatcgcagatgagctcttcatgctgggtctgcctttcttggctatgcaggtggctctggtccactggccctttggcaaggccatttgccgggtggtcatgactgtggatggcatcaatcagttcaccagcatcttctgcctgacagtcatgagcatcgaccgatacctggctgtggtccaccccatcaagtcggccaag

SEQ ID NO: 33998 - DNA, 431 bp, Homo sapiens
ggagggggttgtcagtttacggagggtacttcctaactgcagactgtctggaggctgtagggtaggcggccttgcttaacaacagtgctcatcgttaatcctctctgatgtcagtcattacatctcaggtcccaagtaggaggttttcttggtggtctccagttacagcacaaaaagggctagcccctagggtttctcaaccttggcactgttgacatttggggctggaaaattgtggtggggactgtcccatgccttggaagatgtttaacagcatccctggcctctacccactggatgccagtagcatccaaccccctagcccctggtagtgaccatcaaaaatgcctacagacactgtcaaatgtcccctgcggcaaaatcactctgggctgagagccactggcttgactgatcctaagcgctccagg

SEQ ID NO: 33999 - DNA, 416 bp, Homo sapiens
gggttggtgaatttgaagctgggatctccaggaatgggcagacccgagagcatgcccttctggcttacacactgggtgtgaaacaactaattgtcggtgttaacaaaatggattccactgagccaccctacagccagaagagatatgaggaaattgttaaggaagtcagcacttacattaagaaaattggctacaaccccgacacagtagcatttgtgccaatttctggttggaatggtgacaacatgctggagccaagtgctaacatgccttggttcaagggatggaaagtcacccgtaaggatggcaatgccagtggaaccacgctgcttgaggctctggactgcatcctaccaccaactcgtccaactgacaagcccttgcgcctgcctctccaggatgtatacaaaattggg

SEQ ID NO: 34000 - DNA, 409 bp, Homo sapiens
ggcaatcagatcgcgttggtggcaaactccgtgctgcctgtatccttctgtggacagaagggagtcccctctggaatggcggggctctagggcatactgcatggggtggactcctcatgggccactcagacagggcctggagaacaaagcatcccgtgggcccaggaacttgtccacctggctccacgggcctgggagggctgtgtgcatgggacggcaggtttacgaggaggagtgaggcctcctgccggagccccacctgccttcagcctgaggccaggccccccacctactctaactaccctgctgagaccaccccactactcacagacctgttcaagaaaaagttgtcctcagggtctctcacacactgggaaatctacttgaaacttaaacattactttttctc

SEQ ID NO: 34001 - DNA, 449 bp, Homo sapiens
ctacacataagaatcacatgaagaacttaataagattctgtgtgctggggcctagtttactgaaaaatttctcagttgtgtctaatatgcaagacaggatggaaaacgactgatctaaagtaaagatcttgtgttgtaatctaaattcttctcataatgagatctattattaatcttcagtacttggcatataatgggcacccagcataagaaaatctggatagctgctacataaaaatgtcagtcaggcttgaaaagatcccctgtgctagctggcttgcttactgcaccactggcctctcatactcaaatacaaaaacatatattatacatatatgtgtaccctttttgtgttatctatgttccacagcccaaaaccagactctctgatagaaaattgaataaatcatgttgcagttacttctctggtttaaaaacaaattagcctt

SEQ ID NO: 34002 - DNA, 440 bp, Homo sapiens
aaaagtatatacagagaaagagagtgatggtcataacttttagattattccttattttattgggaatatgcaaaggaaagcgatggattagtaggaggggtaccaggaaagggttttgtcacagaggaccaggggagagagaattgaaggcatgtaaagtcagcctattggtgcatgaggtgcagctgggctggggagtaagagctcatcaatgtggttgttagtgagtgcggagagaaaggttctaggtgaggagcaagtcggaagcctaacagatggacatggagtcacagggcggtgagctgttgaaggtgacccatgagaatattctttcagaaagtttgatgtgaagacacagattgtatctcaccctggtcacgggaaggttattgaggaatgcattggcctgtttgcagattgaggagtgggtcatctggagg

SEQ ID NO: 34003 - DNA, 411 bp, Homo sapiens
ggagcaggagaaatttctggactgttaggatgaattgacgccttttccccgttatttaagatttgtgaccttgtacataaccctgtgtgacgtgcacattgcttgggtatggaacggtagaaatttgggtgtttttaaaaccttgtttggggttgttcctgtccttgttgagaatcatagagatgtctgtgttcttggagtatttcacactgaggactaatctgctatcttcattccagtccctacccctcagtgcctgctctcattcaaataacctgggaggtgacaatcaagatatctcaggaggtccaaggtggaacagacctctttggctttcccagcgtcttatacccccggtagtgcagctgtgggtggaggctggggtgtctgcacgaaatcaggccagcgttt

SEQ ID NO: 34004 - DNA, 444 bp, Homo sapiens
ggggtaaaactgccgcctttgccctgcctgttttggagcgtctgatttataaaccccgccaggctccagtcacccgcgtgctggtgctagtgcccacccgagagctgggcatccaggtgcactctgtcaccagacagctggcccagttctgcaacatcaccacctgcctggctgtgggcggcttggatgtgaagtctcaggaagcagctcttcgggcagcgcctgacatcctcatcgccaccccaggccggctcatcgatcacctccacaactgcccttcctttcacctgagcagcatcgaggtgctcatcctggaccaggctgacaggatgctggatgagtactttgaggagcagatgaaggagatcattcgaatgtgttcccaccaccgccagaccatgctcttctcggccaccatgacagacgaggtgaaagatctggctt

SEQ ID NO: 34005 - DNA, 412 bp, Homo sapiens
ggattttgttggtgaggaagaatgtaactttgaatccagatcccaatgagattaaaagctattgttatgtgtcaaaggaagaactaaaagaacttctgaaaaaagcagccagtggtgaaattaagataacgccatggtttaaaattattgcagcgacttttctctttaaatggtgggataacttaaatcatttgaatcagtttgttgaccatgagaaaatatacagaatgtgaatatgtaggtaaatgattacagaaaaatttatctgcttaacaaacttagaatgactttttccttttaaatttagttctatcattaatttatcattaaatttagttctatcatttggtactatcattaatgtattatatacactgatactttaaaacttgtgtggaaaaaactaacttat

SEQ ID NO: 34006 - DNA, 426 bp, Homo sapiens
  misc_feature (1)...(426): n = A,T,C or G
ggggagaagctcacgaatcagctgcaggtctctgttttgaaaaagcagagatacagaggcagaggaaaagggtggactcctatgtgacctgttcttagagcaagacaatcaccatctgaattccagaagccctgttcatggttggggatattttctcgactgcatggaatcagaaagaagcaaaaggatgggaaatgcctgcattcccctgaaaagaattgcttatttcctatgtctcttatctgcgcttttgctgactgaggggaagaaaccagcgaagccaaaatgccctgccgtgtgtacttgtaccaaagataatgctttatgtgagaatgccagatccattccacgcaccgntcctcctgatgttatctcattatcctttgtgagatctggttttactgaaatctcagaagggagtttttt

SEQ ID NO: 34007 - DNA, 406 bp, Homo sapiens
ggattttgttggtgaggaagaatgtaactttgaatccagatcccaatgagattaaaagctattgttatgtgtcaaaggaagaactaaaagaacttctgaaaaaagcagccagtggtgaaattaagataacgccatggtttaaaattattgcagcgacttttctctttaaatggtgggataacttaaatcatttgaatcagtttgttgaccatgagaaaatatacagaatgtgaatatgtaggtaaatgattacagaaaaatttatctgcttaacaaacttagaatgactttttccttttaaatttagttctatcattaatttatcattaaatttagttctatcatttggtactatcattaatgtattatatacactgatactttaaaacttgtgtggaaaaaacta

SEQ ID NO: 34008 - DNA, 406 bp, Homo sapiens
ggtgatggcgtgatgtctcacagaaagttctccgctcccagacatgggtccctcggcttcctgcctcggaagcgcagcagcaggcatcgtgggaaggtgaagagcttccctaaggatgacccatccaagccggtccacctcacagccttcctgggatacaaggctggcatgactcacatcgtgcgggaagtcgacaggccgggatccaaggtgaacaacaaggaggtggtggaggctgtgaccattgtagagacaccacccatggtggttgtgggcattgtgggctacgtggaaacccctcgaggcctccggaccttcaagactgtctttgctgagcacatcagtgatgaatgcaagaggcgtttctataagaattggcataaatctaagaagaaggcctttacca

SEQ ID NO: 34009 - DNA, 496 bp, Homo sapiens
  misc_feature (1)...(496): n = A,T,C or G
natggagaacgctcggaccngtttgagaccgtttggcacgaggggagatgatggctgatgaagaggaagaagtcaagccgatcttgcagaaattgcaggaactcgtggatcagctctactcatttcgagactgctatttcgagacacatagtgttgaggatgctgggaggaagcaacaggatgtgcggaaggagatggagaaaaccctacagcagatggaagaagtagtgggttctgtccaaggcaaggcacaagttctaatgctaactgggaaagcactaaatgtgactcctgactatagccctaaggctgaggagcttctgtcaaaggctgtgaagctggagcccgagctggtggaagcctggaaccagctgggtgaggtgtactggaaaaaaggggatgttgcagcttgccacacctgcttctcaggagccctcacccattgcaggaacaaagtctcctttgcaaacctggcaatggtgcttcgtcagctgcg

SEQ ID NO: 34010 - DNA, 435 bp, Homo sapiens
atcatataaaaagtatattttagtgtctttgatattacttggcaaagtacaacagctaccaaaatatacatctcaaattgtgggtagattcattaagcctcttagcaatgcataccacgagttagcacaagtgtattcaaccaacaacccctcagaactccgaaacctggtgaataagcacagtgaaaccttcactcgcgataacaacatggggctggtgaagcaatgcttgtcatctctttataagaagaatattcagaggctaacaaagacctttttaactctatcattacaagatatggcaagtcgtgtgcagttgtctggacctcaagaggcagagaaatacgttctgcacatgatagaagatggtgagattttttgcagtattaaccagaaggacggtatggtcagttttcatgataaccctgaaaatat

SEQ ID NO: 34011 - DNA, 414 bp, Homo sapiens
  misc_feature (1)...(414): n = A,T,C or G
gggctgcagttgaagggggaaattctaaggcaatttattcactgaactttacgttaatattcagtcctcgtaatctgacagaatttcaagcttggcagcattgtcgtccctaagtatcttcttggcaacacttttgactttatagatagggaaaccaaggcccaaggcaaaggcattcattcaggaataccatggctggcccgggaagcagtcacagaaatcagggttttctgactcctcccataacactctttctgttccttcagatgtgagtcactggatccgagggctgggcttcctcgttctggctccccgtgccatagccaagccctgctctcccactgggtgcctctgctcagctgcaactgtgactgcctctccctgcccactgctttgcctcagggacctatcagn

SEQ ID NO: 34012 - DNA, 472 bp, Homo sapiens
  misc_feature (1)...(472): n = A,T,C or G
ggtaggggcccccnttctgaaaacttgaggacattatgaccatcattacgccaatcttggcacgagggaaagatgtggaatacagattgccattcaccataaacttcccgacttttaacattaatatattgcttcctccacagtttgctcaggaaaaaccagagatcattgtttatccaccaataccacttcacttattggataaacaaggagcgtatgctacctctccattattaaacaattttacaatgcactcagatcttggaaaaattattcaaagtctgttggatgagttttggaagaaccctccagttttagcttctacttcaacagcatttccttatatatacagcaacccaagtgggatgtctccttatgcttctcagggttttccatttcttgctccatatccttcacatgaagcaaacaagagcatcacttctttatctgttgctgacactgactcttcttn

SEQ ID NO: 34013 - DNA, 436 bp, Homo sapiens
  misc_feature (1)...(436): n = A,T,C or G
ggctggaagaattccctgctctgcttttctgctcgttgctggcatagaaacatctagaacagaaagtatccactctggggcagatgggagagctggaaaagtagattcaagatgccttttagtcttggaagtttcttccaggaagcaagaccagcttgtatgtttacacctgcactggagtgcaggtgtaaacataccagctggagggggatggctcatggaaatctgtcccgcacagctggcccccttttggctgccactgtctagactgttggcctttgacctctctgcctcttgtggggtttgaacctacacgtaccttttggagacagctggacaaagccctattctccgcagccccagcctctatcctgaggcctctgggagctgcctgacggccagcatggggcgctgatcatggtcaaggaggcaggtn

SEQ ID NO: 34014 - DNA, 409 bp, Homo sapiens
  misc_feature (1)...(409): n = A,T,C or G
ggcacatttcccccatctgtacaataaatacagcttcaaattcagtggagtctgtagggcagataactttaatcatcactactgtagtcagtataagaaatgctgaaaaaaatccaggagggcttgtctctttgtgggtggtcactgtgatgttgggccagctcctgttcaggtccagagctgctaacgtgggttctactcagtcccagtgacttggccagaatagagctttgccaggtaactgccctgtgctaggtgaaaggggaaaagcagtagctggatatatttcaanagagggtttggaccagttcagaaagtggaacttgattgaaaagtgaacaagtgtagagtggtgagaaaattcagatgtgtcggatggcaagtaatattccacttaatgtatctgacc

SEQ ID NO: 34015 - DNA, 438 bp, Homo sapiens
  misc_feature (1)...(438): n = A,T,C or G
ggcctcgtgccaattacagatgtgaatggccacgcctggcctgtttcctttaagttagcacttcacgtgctcttacagcgttaattgccattattggtttgcctgattttcctgcatctcctcatatgtaagtctgcagcccaaggagagaatagtagctgtatgtgcccacaaggggtgtccaagcttcttgattcttgttaatatcgactccccaacattgaaaaaggagtgaagaagggaatattattttagggtactgctttaaaggaatgataaagtaaacaacgtagcagggaaaataccacttgcacaaatgtatttctttgtcaaagtgtgtacacgctttctgtttgtcctgatgtcctgctgtgaagcagggaccacattgccatttattcattgntccaggcaatgcatttgtccaacccctctggn

SEQ ID NO: 34016 - DNA, 423 bp, Homo sapiens
cgaattgttatcccacaagagagaaaacgtgatgatgtggtaatggagagggattgccaaagagaatgtagaggacaaaagctttgtgcactccctaaaaattgctgctaacaggctggcatctgcagtgtggcagcttgaagtgtttgctgcttttgacatcttatgcatttgatcagggtcaaagaaaaatacttttcttcctaacattctttgttacatactttttttttaactgtcttcagagttttcacaaagataaggtcatttataggggacagaatgtgccagtttgagggagaaagaagataaaaccttcaccattcaccaccaaaccttagagcagtgcttcagccccacccagggcttggccttcaacaaaatgtctgttgggacaggggcggagagcactccaaaagcacg

SEQ ID NO: 34017 - DNA, 442 bp, Homo sapiens
  misc_feature (1)...(442): n = A,T,C or G
ttttcttgatnacagtcttgaccatgattatcgccaaccttggaacgaggctaattgtaagtttgtgtcaactggtcgagatacagcatgtgtgaaggctctaagagacattgaacctggagaagaaatttcttgttattatggagatgggttctttggagaaaataatgagttctgcgagtgttacacttgccaaagacggggcactggtgcttttaaatccagagtgggactgcctgcgcctgctcctgttatcaatagcacatatggactcagagaaacagataaacgtttaaataggcttaaaaagttaggtgacagcagcaaaaattcagacagtcaatctgtcagctctaacactgatgcagataccactcatgaaaaaaacaatgcatgtaagtaagggagatttgattagcatatcttttaaaagtattttcac

SEQ ID NO: 34018 - DNA, 412 bp, Homo sapiens
acttaaaaagagttatacttccttagtatgagaattgtattgtggttatacaagataatgtccctgttcttctgaacaggaagtggaaaacgtcgacaattctcaaatggctcagaaaaaaaagaaaaacagagacataaacatggcaaaatgttaactaataaatctttgtgaagggtgtatgggtagtaataacacaacttttctttagggttgaaatttttctttttttttttttttgaaaaaagcccacttttgccccccaggtggaaagccaggggattaatctggttttataaaaccccccccttttgggttaaaagaaattttctgccctaaccccccaaaaaactggaaatggagggggccccccccaccccccgaaaaatttttggttttaaataaaaacagg

SEQ ID NO: 34019 - DNA, 409 bp, Homo sapiens
ggcacaggccacatcaggaactttccccactgcctccatgcaaggctgcagagctatggtccctttctccactgcactggagctttgaagacctaagaggctagtggttcctggagctagtggttacctgaacaggtatggcgatgagctacaacatcacctgagtcaccaaagttgggttggcagaggggtgaagggttcaccccattccctgacccatccatgctcttcctggccttttagccctgggttcctcatgccttccagctctgctcctggtctactccttagcccacaccctgtgggtcagcagctggcttccttctaacgtctcattctttggttctccctttcttttgctgaactccctgtccccccaaccccagaaggcaatgttgagccgaaagcg

SEQ ID NO: 34020 - DNA, 427 bp, Homo sapiens
  misc_feature (1)...(427): n = A,T,C or G
ggtgggggcagagacaccctccagtccacgagccgggcagctgcttgtggtactacaggacgccgaggccgcggtcgcgggcccatcccacgcccctgatacgtgcgacgtcggggccacgctgcttgtgtctgacgggacccacagtgtccgatgcctggtgacgcgggaggccctggacacctcggactgggaggagaaggagttcggcttccgcgggacagagggccggctgctgctgctgcaggactgcggggttcatgtccaggtcgctgagggcggcgcgcccgcagagttctatctccaggtggaccgcttcagcctgctgcccacggagcagccccggctacgggtgcctggttggtaagtgatgcctccgccctccagcagctctccccaccccagcctggccggcgctggcagaccn

SEQ ID NO: 34021 - DNA, 491 bp, Homo sapiens
tggtgagaaaactttgtacccgttgatttgattaccgctagcttggcacgagggtgagagaaggagaacatactggtatgtgtgtgtttgtagctgaaggagtgtcatatcgctgatacgtttattagggaaatctggaagatagcagcagagtttttgatatctttgaacccactcctcaaaaaacagacaaactaacaaaagtaataaaaaaccaaaaactaatggataatagctacaaaaaattatgagacaggatgcccccatgaattctaaaatgagcatgtagataaaaatcacaactataaatcccatgtggtgttagaaactgcgtgtgagaaagtaaagacaagaccaagttactcgtgatgcctctgagagtttgggaagttcaagatcatcatcaggtactactggaaaatgaggcagaccattctgaggacaacagctacagcagaaatggtgcttggaaaagtggatattcatatgca

SEQ ID NO: 34022 - DNA, 473 bp, Homo sapiens
  misc_feature (1)...(473): n = A,T,C or G
cgggannaattgatagcgaacgtcttgaccatgcccacgccaagcttggcacgagggaagcatccattcacaacacgaggcaatattgtagtccacagggattggatgcttcacttgatctccggaccttggctgcagaggccatcgcagcttttgaaaagtgaagggggtaattcccattggggtctttgcttatagcatttttctctaacctataacaaggagacattacattttactttagaacatgagaatagcagttttgctcatgacttaccattccacctgcatgggaaagcaaagcataaaacagtgcccccaatggaaaaaagatactcacaccgaacaaaacagttcttggtcttgttcttgggcttgtcaaaccttgcctgatgctctttctaaagtcaaaatatgaacgctaagaaggcataacctacatccttctctgatttcttcagcagggtcaaaag

SEQ ID NO: 34023 - DNA, 383 bp, Homo sapiens
ggcgacacatgtctgatgacttaggaagttatgtttctctttcgtgtgatgacttttcttcacaggaattagagattttcatttgctccttttcctcctcctggcttcaaatgtttgttgcagaggcagtctttaaaaagttgtgtctacagagctctggcagtgtttcttctgagccactctctcttcagaaaatggtatattcctatttaccagccttggggaaaactggtgtgcttgggtctggaaagattcaggtgtcaaagaaaataggacagcggccttgttttgactctcagagaaccttactaatgctgaatggtactaaacaaaaacaagtcgaagggctgccagagttactagacctgaaccttgctaaatgt

SEQ ID NO: 34024 - DNA, 428 bp, Homo sapiens
ggggagcactcttaagttaccactttgagacagctcttaacatcttagtgaccatttgtagttttctttttatgaggaacccatgcttctatacttgggcggacaatcgagcttaatgagaagtgacttcccttcaaattccaacagcagacatgcattggcatgattctgtcttctttttagtgtgggttattgagttcagcagttctcatattctgtttaaataggtacagcattttcaagggcacagatacagagaagctggctttctaggtattgggcttccaagccaagagttttgtccttccacctgtattagttatctattgctgtgtaaaaaattaccctaaatttagtatgttaaaatagtaaacattatctgtcagtttctgtgggttaagaatttgggagtagtttaacatgatggg

SEQ ID NO: 34025 - DNA, 456 bp, Homo sapiens
  misc_feature (1)...(456): n = A,T,C or G
ggggnaggggcggggggttttncccttgaaaacagtattgcacctcattacgccaagcttggcacgaggagaaaccattgtgcttctgagaccctaacccccttcctggatggaggcttgagggccctgggacatgtgctatctgataagattgggtcatcgctgccaaggtggagagcagtgagcaaggggcttggggcaatttccagtggagggcatccacacctccattttatgcttgtgggtcacacatttaagtttacaaatcagatttcttttccccttcagtaaaattagattttgtttttcaatcatgatttcaaatgcaatcctaagagctaatgtggacttttctttttccatgaaatgtctttaaaggatgaattagcatggtcttaaaatacatttctgaggttactagctgtattttgaattgtgagcaaaatgccgagaaac

SEQ ID NO: 34026 - DNA, 475 bp, Homo sapiens
  misc_feature (1)...(475): n = A,T,C or G
ttgagcacgcttgagaaagcttatcgcaagcncggcacgaggggaacgcagcacgggggctccgaggcggggtctgggtgttgaggggcgactggagccatggcggagtcggcgcctgctcggcacaggagaaaacgacgctccacacctttaacttcttccacacttccttcacaagcaacagagaaaagctcctattttcagaccaccgagatttcactctggacggtgggggccgctattcaggctgtggagaagaagatggagtcccaggctgcccggctacagagcctggaggggcgcacggggacagccgagaaaaagctggctgactgcgaaaagaaggccgtggagttcgggaaccacctggagggcaagtgggccgagctggggaccctgctgcaagagtatgggctactgcataagcggctggagaacgtggagaacctggtgcgcaacaggaacttctggatcc

SEQ ID NO: 34027 - DNA, 478 bp, Homo sapiens
  misc_feature (1)...(478): n = A,T,C or G
ntttgattagcatcccagaccacgannacgccaagcttggcacgaggccaaactggcagcattacagaggacttcgtgttccaccccactgtcccaggccaaccgttacaccaaagaacaagattatcgacctaaagcaactggaagaaaaacacccaccttggcatccccagttcctacaacaccttttctccgccctgtccaccaagttccccttgtcccccatgtccctatggttaggcctgctcaccaacttcacccagggttggtacagaggatgctggcccagggagtacatccacagcatcttccaagtttgctccaaactggtgtgcttcctcctgggatggacttgagtcatttacagggaatatctggccccatcctgggtcaggccttttaccctttacctgctggtaggcaccctctcttaaaccctcgtcctggaacacctctgcatctggcaatggtgcaacag

SEQ ID NO: 34028 - DNA, 408 bp, Homo sapiens
cacataacaaaagatgtttatgtactaatagttgaaatctgcctttttctcattcaagaaggcatacaaatatctgagagtgactttgttgtatggctacccttgtgatctacagtaatttattctttctaaaagtaaagcattttcaaaactcagtatttaaaccactaaccagaaacattactttggatgcatctctaataccatgtttgagcacctctgctctaggttgagaatgacattttattgtgaagatgggtgtggtccctcttcccttgaaatcttgtagtttctttttatattaactcctcactgctacagcctagaaggtgagaagcagattttaaccccatctggcagccattcaaggaaaacccagccctggctgtttactcaggctctcttaga

SEQ ID NO: 34029 - DNA, 420 bp, Homo sapiens
ggggctggccttcagcccgtggccttccccacccagcaggaagctctgggcacgccaccacccccaagtgcccgatgtctcttgcctggttcttgctacgggactcaacgatgggcagatcaagatctgggaggtgcagacagggctcctgcttttgaatctttccggccaccaagatgtcgtgagagatctgagcttcacacccagtggcagtttgattttggtctccgcgtcacgggataagactcttcgcatctgggacctgaataaacacggtaaacagattcaagtgttatcgggccacctgcagtgggtttactgctgttccatctccccagactgcagcatgctgtgctctgcagctggagagaagtcggtctttctatggagcatgaggtcctacacgttaattcggaagct

SEQ ID NO: 34030 - DNA, 426 bp, Homo sapiens
gggctgggctcccagctctcctaatccctcggcccatgcctcctgcctctcccctccctcgatgtcagcattcggttcttctgtcaatccttaccctctgcagcttgtcctcccttccgtcttctccctcatcctttccaaacagcagggtgactttagaggcatgggctccaaccccttagctctgtctgagaattatggttttactgctacgtctctaacagactcttctctcctggtctccttgagcagtgctacttaaacagttttcacagtttcattgattgactctacctccttgccccacaccacttttgcaatctttaaactttcagtggctgtgcagagtcgagggaggaaccagctctctggtttactggaacatagtcttccatctataccaactaaggtttggcttatgtttat

SEQ ID NO: 34031 - DNA, 415 bp, Homo sapiens
ggcccatttacatcacttctccttgcctcagggattaagtccaaactccttaacagcccctgctctgccctgccttgcaaggcagcctcactgcttgcccctctccatttcatctgctatggagtccaactgagcctcatctgccccttcaacgcacactctttctcctctgggagtctctgaagtgggtaatatcctctgcttatactatgcttccccttaaacctctactctcttcctagctagcttcgactcctctgtcacttgtccgctttggcatcacctcctcatagaagacttctctgactcccgagattctcaggagcatggcaggtgaggtgctcctcccatgaatggatggagattaagggaggggtgttattcatgcttaattcaccagtgcttagctgagtac

SEQ ID NO: 34032 - DNA, 480 bp, Homo sapiens
  misc_feature (1)...(480): n = A,T,C or G
ntttgacaacgttngtagatgacactgccagcttgccacgaggctttgtactttaaatgtaaattcactttgtagaaatgagctatttaaacagactgttttaatctgtgaaaatggagagctggcttcagaaaattaatcacatacaatgtatgtgtcctcttttgaccttggaaatctgtatgtggtggagaagtatttgaatgcatttaggcttaatttcttcgccttccacatgttaacagtagagctctatgcactccggctgcaatcgtatggctttctctaacccctgcagtcacttccagatgcctgtgcttacagcattgtggaatcatgttggaagctccacatgtccatggaagtttgtgatgtacggccgaccctacaggcagttaacatgcatgggctggtttgtttcttgggattttctgttagattgtcttggtttgctttccagagatcttgctcatacaatga

SEQ ID NO: 34033 - DNA, 420 bp, Homo sapiens
gggctggactaccagcctccccagttcaaactggatccccgcctagcccggctgctggggctgcacacacagagccgctcagccattgtccaggccctgtggcagtatgtgaagaccaacaggctgcaggactcccatgacaaggaatacatcaatggggacaagtatttccagcagattcctgagtagcagaagcagtacacagtcatggtcttggagccaagagaccgaccaggattctagttcaggccctactgtggattaactctgtgctgcagccaatccatgttagcccccccaagttaggaagacctggaaaccctacaaagccaaccgctttctggaatgtaatattcttggcacttggagttaggatccccaggttctagtcctgagtctggactctggatttttgattgg

SEQ ID NO: 34034 - DNA, 422 bp, Homo sapiens
gggggaggaggagcttcttcggaggaccgggagtgggcctccagtccccctgcccctgtagaggaataatgagggaggacatggggaagtcactgtcaaaggctggcacagctgtgagcccaatgcctctgatcgaaaaggagagagagggagttcacgcccctgagagtagccccctgagccggctgggacctggactgcctgctttcctcctgcctcttcccctttccctccttcacagcttatcctccttcttccctctttacatcactgcctttacctgggggggatgaggccccatggggaaggtgctgatgtggagggaggaagtggagaccgagatttgccatactgcccagggaggctgtgtgagaactgggctgtgtatggtccctaaagcctcaactctgccccagctgggg

SEQ ID NO: 34035 - DNA, 400 bp, Homo sapiens
gggctttatggcgaaggagaaagaacatcagtgtatcagcacagcatatattccaaaagccaggctggattccctccaattaccaggacctccaggcttctcctcctttcaagaactttctgaccctggatccagtctaaatgttggttataaactcacctgacatccacagggcccttccaaaatactgtcaaggctgactgctggtgcctggaacctgcacaccctcctgggactctgcatctctgctggggctggtttctcctctgagccaccttaaggaatcccaccctgacccggtcagagctcaccatgcctccctctcctacttgctcagcattttgtgtctatctagactgaagcctttgctttctctctgtgattgtggtgaaagttcagt

SEQ ID NO: 34036 - DNA, 424 bp, Homo sapiens
gggtgaaggcaatgagaaagaaatacaaaggattatgcttaattatgataagttgaagtctcgaatcagtgaaattattgacagtagaagaagattggaagaagacttgaagaagcaggcagctgagtatcgagaaattgacaaacgtatgaacagcattaaaccagaccttatccagctgagaaagacgagagaccaatacttgatgtggttgactcaaaaaggtgttcggcaaaagaagttgaacgagtggttgggcaatgaaaacactgaagaccaatattcactggtggaagatgatgaagatttgccccatcatgatgagaagacatggaatgttggaagcagcaaccgaaacaaagctgaaaacctgttgcgagggaagcgagatggcacttttcttgtccgggagagcagtaaacag

SEQ ID NO: 34037 - DNA, 435 bp, Homo sapiens
ggttggaaagtgggaccctccagcctggagaccccatggactgatgcctccactgctgtgtgccccatgttgtgttaacacctgcgtgtggggaccccatctgaggtcttggctgaggttggcatctcctgaagaacagagagcacggtgtccagagctggcccttcccccagcccacagccagctccgtgcccgagtgggcgtccccagcgagccttccctctctgccgcttgtccttgtgtctgggctgctccaagtccttgtgctgggcaccctggacacgtcctgctggtgagggacctcgggaaggtgacagtctgggtgccttggtgtggagaccaacctgaggatgtcctgggaaatgttttcctgatgaatttctccttgactgggccttaaagaacataaaaattcccattgcccaacctcagtgc

SEQ ID NO: 34038 - DNA, 476 bp, Homo sapiens
  misc_feature (1)...(476): n = A,T,C or G
ggcgctnnnnncaccgataactcagcactctgcanacgccatgcttggtacgagggcctgcggtacatgagcaagctggcgaccccagaggacaagcaggacatttacaagcagtacgtgggctttgccacactggccaaccaggtgcaccgcaagtcggtgaagaaaggctttgacttcacactcatggtggctggggagtcaggcctggggaagtccacactggtccacagcctcttcctgacagacttgtacaaggaccggaagctgctcattgctgaggagcgcatcagccagacggtagagattctaaaacacacggtggacattgaggagaaaggagtcaagctgaagctcaccatcgcggacacgccgggattcggggacgctgtcaacaacaccgagtgctggaagcccatcaccgactatgtggaccaacagtttgagcagtacttccgtgatgagagcggtctcaa

SEQ ID NO: 34039 - DNA, 409 bp, Homo sapiens
cgaggatgatctctttgagccaaatcagttcctgaatataaaggaggaaatgatgaggatgtactgaggcaacggggaagtatagaaacatccaagacaaaagccaagggatgcaaaggcagagacacaggtgctttttggtgacccagtggatatggcaaccagtgtaactgccatacaagaaaccctaggagcaaacccacaccactcattctcagctaagagattttacacaggcaaacgtgtcttaaaccatctataaatcagttattttatatgacagtcaaaaccttagaaaccttaggatcattatatctattttctgcctattaattgctgtgaggtttgatttgaccaatctgggcaatttattcatcagcttcccttgaagtgcaccagaaaatagaat

SEQ ID NO: 34040 - DNA, 440 bp, Homo sapiens
ggggcacctaccgccagctctttcaccctgagcaacttatcacaggcaaggaatatgctgccaataactatgcccgagggcactacaccattggcaaggagatcattgacctcgtgttggaccgaattcacaagctggccgaccagtgcacgggtctccagggcttcttggttttccacagctttggtgggggaactgggtctgggttcacctccctgctcatggaacgtctctcaattgattatggcaagaagtccaagctggagttctctatttacccggcgccccaagtttccacagctgtagttgagccctacaactccattcttaccacccacaccaccctggagcactctgattgtgccttcatggaagacaatgaggccatctatgacatctgtcgtagaaacctcgatattgagcgtccaacctatactaac

SEQ ID NO: 34041 - DNA, 442 bp, Homo sapiens
  misc_feature (1)...(442): n = A,T,C or G
ggcaacgttgtgactgggaaaacacacnctgtaanaagcaacaacctctcctcttcgtctccgccatcatctcggcagtggcgaagcggcaaccatgcgtgagtgcatctccatccacgttggccaggctggtgtccagattggcaatgcctgctgggagctctactgcctggaacacggcatccagcccgatggccacatgcccagtgacaagaccattgggggaggagatgattccttcaacaccttcttcagtgatacaggggctggcaagcatgtgccccgggcagtgtttgtagacttggaacccacagtcattgatgaagttcgcactggcacctaccggcagctcttccaccctgagcaacttatcacaggcaaagaagatgctgccaataactatgcccgagggcactacaccattggcaaggagatcattgcg

SEQ ID NO: 34042 - DNA, 412 bp, Homo sapiens
ggcaaatgtacacagcacagaaaaataacaaaaaacttaaagcactctatgaacagtcacttcacatcaagtctgccatccctcatccactgattatgggagttatcagagaatgtggtggtaaaatgcacttgagggaaggtgaatttgaaaaggcacacactgatttttttgaagccttcaagaattatgatgaatctggaagtccaagacgaaccacttgcttaaaatatttggtcttagcaaatatgcttatgaaatcgggaataaatccatttgactcacaggaggccaagccgtacaaaaatgatccagaaattttagcaatgacgaatttagtaagtgcctatcagaataatgacatcactgaatttgaaaagattctaaaaacaaatcacagcaacatcatgga

SEQ ID NO: 34043 - DNA, 380 bp, Homo sapiens
agcctttctcacccaaaaagccgatgttggtgaactcaaaaactatgacttccaaaggatctcaaagctgggcgcgggcaacgtcgagaatggtaaaacaaactattcccgagggcactacaccattggcaaggagattattgacctcgggttggaccaaattcgcaagctggccgaccagtgcacgggtctacagggcttcttggttttccacagcttttgtgggggaactggttctgggttcacctccctgttcatggaacgtctctcaattgattattgctagaaattcaagctggagttctctatttacccggcgccccaggttttcacagcctttaattgagccctacaactacattctcaccacccacaccagc

SEQ ID NO: 34044 - DNA, 484 bp, Homo sapiens
  misc_feature (1)...(484): n = A,T,C or G
cgccccgccngnnnnattgaaaactgaatgcnttgannacgccaagctgggcacaagggcagctggtgtgggcctcatagatgcggagaagggaggcagcctggtggtgggggacttcgagatcgcagccaagtacgtgtgtcggaccctggagacacagccgcagagcagccccttctcatgcatggacctcacctacgtcagcctgctactccaggagttcggctttcccaggagcaaagtgctgaagctcactcggaaaattgacaatgttgagaccagctgggctctgggggccatttttcattacatcgactccctgaacagacagaagagtccagcctcatagtggccgagccatccctgtccccgtcagcagtgtctgtgtgtctgcataaaccctcctgtcctggacgtgacttcatcctgaggagccacagcacaggccgtgctggcactttctgcacactggctctgggacttg

SEQ ID NO: 34045 - DNA, 441 bp, Homo sapiens
ggtggcacgaggaatcctccttttaattaaaaatggattttccaggttaaaaaaaaaaggcccttatttttgtcccccttagggccctgcttagggaaggttttgggaaaaatttttaaaaatcttgaaatcagtttcttttttatgatcaaaaaaaaatcctcttttgtccatttttgacggtaactcaaaaaatcgttcaaccaacctaatcacagctttgtaactaaaggacagttgtttgcagggagtttttctttaagtagggccaattttttaaaaaattctgggattctactttaccggggggggggaaaaagtttcaaattcagggatacgggttttaaaactgaaagggctacttttaaggaatatatgaaaactggcagggggttcccttctcccctccccccctttaccttcagtctgtgagagcatgag

SEQ ID NO: 34046 - DNA, 417 bp, Homo sapiens
ggggagccaagggagatcctggcgctataggtgccccggggaagacaggcccggtgggtcctgcaggcccagcagggaaacctggccctgatggtctgagggggctcccaggctcagtgggtcagcaaggccgacctggagctacaggccaggctgggcccccaggtcctgtgggacccccagggctgcctggtctccggggcgatgctggagccaagggagagaagggccacccaggtctcattggactgattgggcccccgggtgagcagggagagaagggagatcggggacttcctgggcctcagggctcccctgggcagaagggtgagatgggtatcccaggagcatccggccccattggtcctggaggtccccccggcctccccggacctgctggccccaaaggagccaaaa

SEQ ID NO: 34047 - DNA, 410 bp, Homo sapiens
  misc_feature (1)...(410): n = A,T,C or G
ggggagccaagggagatcctggcgctataagtgcctcggggaattcaggcccggtgggttctgcaagcccaacagggaaacctggccctgatggtctgagggggctcccaggctcatcgggtcagcaaggccgacctggagctacaggccaggctgggcccccaggtactgtgggacccccagggctgcctggtctccggagctatgctggagccttggtagagaagggccacccaggtctcattggactgattgggcccccgggtgaaccgggagagaacggagatcgtggacttcctgggcctcagggctctcctgggcacaagggtgagatgggtatcccaggagcatccggccccattggtcctggaggttcctccggacttcctcgacctgctggcaccaaaggn

SEQ ID NO: 34048 - DNA, 430 bp, Homo sapiens
ggaatattctctgatggtagtttgtatttctgtgggatcagtggggatatcccctttatcacttttttattggggctattggattcttttctcttttcttctttattagtctagctagcagtcaatctattttagtttttcaaaaaccatctcctggattcattgatttttgaagggttttttttggggctctatgtttttctattctgctctgatcttgggtatttcttggtttctgctagtttttggatttggttgctcttgcttctctagttttagttgggagcacatcgctttttgaagccctctctgtttaggtgacagctggcatttctgtatatagtcacatgacaccaactgcaactgcaagggaggtggaaagtggagaggggcacatggatattcatggagcactgtctctaccacaaaa

SEQ ID NO: 34049 - DNA, 430 bp, Homo sapiens
ggtggcacgaggctggaagaaaagtttctggtagagagtcggccgggtgcactggctcaagcctgtaatcccagcactttgggaggctgtggcaggtggatcacctgaggtcaggagttcaagaccagcctggccaacacagtgaaaccccatctctactaataatacaaaaattatccaggtgtggtggcacatgcctgtagtcccagctactcgggaggctgaggcatgagaatcgctgcaacttgcaaggtggaggttacagtgagctgaaatcacgccactgcactccactccatctgaaaaaaaaaaagagttgtctttaaacagattccaaagtaaagttttttcttcccaatgcgtggccatgatttacacagacgtgcctatcatggctcatcaacatatgaacggtgttccctaccatgcc

SEQ ID NO: 34050 - DNA, 412 bp, Homo sapiens
ggctcccatgaccgccgggctgttccttctcgtggctgggaccatcccgtccgagtctgcttcaactgcaataaaaagcccggggacctttaaccccagccccctctccgagtccttcacaattccttaggttctcagggttagaaacagtcttgcgaggtaggccctcctcccagtcacctgctgtggtgtgtgtcctctcctctccgcatccagggccactttccctcagtgggggtgagcctggcggcaggcccgaaggtgtggacccctcagggcaggggaccttgcaacttatcgcaaaggggaatgaacctgaatccgttgcatttatttcagttaaaaataatgaatatatatgtggatatctctctctcatatatacatatgaaaggcactcggggcgtatcga

SEQ ID NO: 34051 - DNA, 398 bp, Homo sapiens
gcgatcgtagctcactgtagccttgacctcctgggctcaagtgatcctactacctcagtcttccaagtggctgggaccacaagcgtgcatagccacacccagccaatttttgtttgtttactttttgtaacagagaggtctcgatctcctggcttaacatgatcctcccgcctcagcctcccaaggcaactagattacaggcatgagccaccgtgcggggccaccactgactttctgaagcccaagtgtaatagccaccataacaaacaccttttgactgatacattctgaggatcatattccttttttatatataattgtaccttttattttaaatttgagaggtacaggtgcaggtgtggttcatgggtatatcatgtgacactgaggtttggaag

SEQ ID NO: 34052 - DNA, 428 bp, Homo sapiens
ggcagacaagtgtgccatttgaccatctcgggaagtgaggagagcccccattggaccagtggttgcttagtggcttcactggattttctttaaaaaaaaaaaaaaaaaaaaagggccaaaaaacccccctcaaaaaaacaccaaaaaacccccccccaaacccgccgggggggttgggttttttgatttctttcccaagggcaaaaaaaaaaaaaccccccacccctggggattttggccccctgggggggcccgcggcccccaaccttaggggggccaaaggctcccctgacaaccccgggttacgggacccaaaccccggggcctgcccggcctcttgttcttgcccccccccaccacctgcttgaaaagaaacgggtcggtcccctgtcggaaaaaggacaggccccaaagccaaagccggccct

SEQ ID NO: 34053 - DNA, 432 bp, Homo sapiens
ggcgcagtaagaatcaataacctatactctttttttccgccatcagtttttttgtcccaaagcaggaaccatgcgcgagtggatgtccgtccaccttagccaggctggcgtccatattggcaatgcctgctgggagctctactgcctggaacacggcattcagcccgatggccagatgcccagtgacaagaccattgggggaggagatgattcctttaacaccttcttcactgacacgggggctggcaagcatgtgccccgggcaatgtttgtagacttggaacccacagtcattgatgaaagtcgcactggcacctaccgccagctcttccaccctgagcaacttatcacaggcaaggaagatgctgccaataactatgcccgagggcactacaccattggcattgagatcattgacctcctgttggaccc

SEQ ID NO: 34054 - DNA, 471 bp, Homo sapiens
  misc_feature (1)...(471): n = A,T,C or G
nattgaagaccgctttgaccatgatgacgccacgcttggcacgaggtggcacgaggggaggtgggagagcacttttaaagcacaccccaccccctgcacccgagcggtacctaagcttcccagagaccatgaccttgtatggggctggaggcctcaggcttagggagcagcctgaagcctttgctgtcaaccctcccaggaaagaagccgggcctcaggctgaggaaaaacagagtttcctctccagagggctcaatgagcagccgggtagtggcctcgggcagtcctcaccagggggacacctccctgctttgcattaactcatcagcaagctcatcgagagctaacgtgggcccagcagtcctgtgcttggaaatgatgccgtcaccttcacactcctgctgttccagcctctgcaggtgaagctgcaaggtgagcaaaggcaggcgtggggacacactcttcaaggat

SEQ ID NO: 34055 - DNA, 472 bp, Homo sapiens
  misc_feature (1)...(472): n = A,T,C or G
naagagggcgntggntnnntttgagaacgtttgacctgattacgcccagcttggcaagaggggaaggaagagagaaaggaaaggaaaaggagcataaaggcctatttataatgcagtgggttgatctccctggttaatagctaagcaccgtgccaaaagagatcaacggagagtctgaggatttcaggctggattcctggttcagccacttagtaggcacacaaccgtgggcaagttattgaacttttaagcacttatttttttctacttcatagaataaaagagcaatgcttattaatgttaagcattatgaataatacataggtctgttaagatcaaacaagaaaactatattgagtaacacatagttgtgtttaatacgttattattgttaattataagttaacccaaaaggcagacgggtgtcttagtccattcgggctgctataacaagataaactagactaggtan

SEQ ID NO: 34056 - DNA, 432 bp, Homo sapiens
ggcttaataaacaccactgataatggatgttttgtttctgtcattattataattccctttctaagatgctgatatagatcattgtgtacagctttttttttttttggagcctttccctggggttaggccctttaaaggggatttcccaggccaaccagtggggtttaaaaacctaaaagtgggaaaaacaggcccaaaccctggggggcggaaatttccccaaagggccaaaaaccagggttggaaagaattttgaaaaattaaagggaaacccccccttcctttgcctttaaaaaaggggaaggaagggggataccggcccttggaaaaaacctgccccctcgggggaaaggggaattccggggaaaaagggggggaaaaccgggccaccgggatttaagggccccatggaaaaaattaaaagggggaaaa

SEQ ID NO: 34057 - DNA, 421 bp, Homo sapiens
gggctggtggaggcatccttggcttgcctcttagagagactgtttggattgtagaattcagcttgccgagaaatttgtgaaagccgtttccaagcctagtcggcccgacatgaatcccatcagggtgaaggaggtgtacagactggaagagatggagaagatttttgtcaggttggagatgaagatcatcaagggctccagtggcaccccaaagctcagctacacagggcgtgatgaccggcactttgtacccatgggcctctacatcgtcaggacagtgaatgagccctggactatgggattcagcaaaagcttcaagaagaagttcttctacaacaagaaaaccaaggactctacttttgacctccctgcagactccattgccccatttcacatttgctactatggccggctcttctgg

SEQ ID NO: 34058 - DNA, 412 bp, Homo sapiens
ggcaaagactgatgtctcagagcatgtcttcagtatcttcaaggcattctgaaaagatagctattagagattttcaggtgggagatttggtactcatcatcctagacgaacgccatgacaattatgtgttatttactggtagtcctactttatattttctacattcagagtctctacctgccctggatctcaaaccaggtgagggtgcttcaggtgcatctagaagaccctgggtacttggaaaagtaatggaaaaagaatactgtcaagccaaaaaggcacaaaacagatttaaagttcctttggggacaaagttttacagagtgaaagccgtatcatggaataagaaagtataacttatggacaaaattaatacattctatgacatttttttctgatttggcctgcagcg

SEQ ID NO: 34059 - DNA, 466 bp, Homo sapiens
  misc_feature (1)...(466): n = A,T,C or G
attganaccgtttgaccagattacgccacgcttggcacgaggtggcacgaggtgagcccagaaaaaaggactgtttagtttaaagggaggattgaaagggaggtttaaaatcagattagaccaggtcttggcctatgagaagttccaaaaataccatttatctactatttgaaaaaagaagaggatatcccttcctacagtaaagggtatgtcagctacatgaagatgtaagaaaagcttccagtagagcttcttatattaaagaagttgatggatatttttgaatttctggcttgcctgaatccacctgcaggtaccccgatccgtttgcaagaaccagatcgtacttgaaactatagtggccacactctgccttcctgagtcccttccagtcatgtgtgcatcatgtctctttgccaagggaggggagaaaggaacttttaaactgcagctttaactttttcta

SEQ ID NO: 34060 - DNA, 423 bp, Homo sapiens
ggctattggcaacccttggtttgagagtgcaacagggatactcactgctggcaatcctgccatatttacagcttgtgtaaaaatatcatcctgggcacttcgggttctgttgtcctctttgatgaactccaagtatggtactgcctcactcaagggggtgggagttagcaagacatctactccagagttaaaagcatttacaaagtcattagcaatgaggcgtctcactttctgtgctttgacaaaataattttcatagttttcttttaataagaaaaagtttcctgagagaattcttcctctcaccacatcattaaacccttctcgtctggttgcagcatacatggcttcagtggacacatcaatgtcacatctgtgaccatattgtagcccatcaaatcttgccatattcgatgccacttc

SEQ ID NO: 34061 - DNA, 425 bp, Homo sapiens
ggcacagatgacgttgctgttttccaagttcccggcatgcatgggcaggagcaccagcttctggtgcctccatccttgcttgtgatacgatttccacgtctgacaccctaaacacgcttcctgacatccgggcgagaagagtgcatcctgtcatttgttttactgacctgagacccagtggggccaacccatggcagtgtccgggctctttagggtggaaggaggacgtgggcacggcccgggcatggccacgttactctctggagccgcttttgctcacagcatcatcagcctcacgtggcgctgactgcatccctgctgcagaagcaggcgtgggtaggggtcagcgtggcacgtgggagctggagttcggggtgtgatctctgggttgttagacacatccctgtggttgaaacatgcacgtg

SEQ ID NO: 34062 - DNA, 380 bp, Homo sapiens
ggtgccctttaatttttatgctatttctgtaatgggtacctttttttacactgagagttttgttttgtgatcagaagaaaccttttctttctttgttttggtttttaatgagaaaggtgtttaaaagtctatgtgacctggggaaccattctcaaatttcagttttgccagggctagagcccagcctttcaaggcaggagaacagttgctggaaagaaattgcacccagctgttaggcctctggcaagcaaagccgcaccagtactttgtagcggcattctccacccagctgggagggtttggttgtttcttcttcagtagaagggtgtattttaaggatcttaagcaggatttttcaattttggcactattggcatctc

SEQ ID NO: 34063 - DNA, 420 bp, Homo sapiens
ggggtggccaatcagatcaaagaagaagaagaaaagcaagtagttgaagaaaaggttgttgaaagtccagatttttccaaggatgaggactacttaggaaaggttggaatgttaaatggaggccgccgaattgactacgttctccaagaaaaaccaatagagagttttaatgaataccttttcgctcttcagagtcacttatgctattgggaatctgaagatactgctctgttactacttaaagaaatttatcgaacaatgaacattagtccagaacagccccagcattgatcaaacttcagttttactgtactttcttgtctgcacagaaagtcccagtacaacttccattgctgagaaaatcctcagaggactttcccacttcgctcctgtgatggatgacagaagagtgattcattt

SEQ ID NO: 34064 - DNA, 397 bp, Homo sapiens
ggactgccccatcccaccttacaacactctggcccctctgcttggtccccttttcccccaggcaggaggcaatcccaggggcctgcctgatagaggcatttcctgtccctgtctcctcctgcatctcctttatcctgcactgccaccctctattccccattctgtgttggactttgaaggccccaagcccagccaaagcactgagttcccccttaagacacctccacaccctccccacaagcaaagcacaaattttggggtccatgtagcatgggccacgtaggaggctcctgacttgccaggggcccagcctcagcatacccaccgagcagctgccagcctgggctgagggtgggcatgaggcaggagtcagcacttggacctatggatgtgaggg

SEQ ID NO: 34065 - DNA, 408 bp, Homo sapiens
ggctcatatatcagcggcttcaacaggaataacatgagacctggcaacagcctcattattaggtttttagaatatggacccgactgctgccactttttagacatgtatcccattccttttggctctgcaatatttggggctgtagctccttccaagcccatggtagtccctccccgagtctctcccagtagaatgcagcctcccttccctggccccttccctctcagtgacggagactccctggggccttctcgtggaacccaaaggggctgaggactgtggcctggctggcgggccagcgtggtgctcctcaggactgcagcactgagatggaacctggcctcagtttaagaacaggggccacaacagggcaggaacccaccaccctccacataggaatacaaccag

SEQ ID NO: 34066 - DNA, 502 bp, Homo sapiens
ctgcggccctttgaatcattgcacatgacacgccaagcttggcacgaggctcaacaatgtttttgttcaacagggtcatgatcagagttcgactcttgcccaactctctgttgaactgactttacccaatcatcatccatttcatagagatttgctccgatatgccaagctgatggagtggctaaagagtacagattatggaaaatatgaaggactaacaaagaattacatggattatttatcccgactatatgaaagagaaatcaaagatttctttgaagttgcaaagatcaagatgactggcacaactaaagaaagcaagaagtttggtcttcatggaagttcggggaaattaactggatctacttctagtctaaataagctcagtgttcagagttcagggaatcgcagatctcagtcattcttcctgttggatatgggaaacatgtctgcctctgatctcgatgttgctgacaagaccaaatttgataagatctttgga

SEQ ID NO: 34067 - DNA, 505 bp, Homo sapiens
ctgtgcccaattgaatccattgacacatgacacgccaagcttggcacgaggaaactcagtccccaagtctgccccccacctcaccacaccagtttgagttgatttatacaccctaatctactagaagtgaataggaatgacatggtctcttccaagaaggaacttatattcaagtcaaggagaaaaacaataataataacaattaaaagtaaacattttatttaataaacagatgttatggtaagttctgttacataaataaactgggtgccattgtacagtataatgctttgagggtactactttaaatcaaaaagtcagaaaaggatactggagtagtttagatgagagatgataaccaccaaactacattagtgacagtggagaacagataaatgagcattcaacgtataagatattaggatattcaagatatccgaggtagaattgacagaatttactacctgaatgtggggagtggtggatattgaagagtaaagaatag

SEQ ID NO: 34068 - DNA, 445 bp, Homo sapiens
  misc_feature (1)...(445): n = A,T,C or G
tagagtagatnacatttggacccgattacgccaagcttggcacgagggttggagacctggatgcccctctcgcctctggagtggctgcctgaggagcccaagtgacaagggacaactgacgccgtctctgtgagcaccgaggctttttggcctcagcaccttcgaagtggttccttggcagactgcctttcctggaagagggcacgggcgatcccgacgggggcattcctgcgggtgagagccgtccccaccgcggcggcccttctcagcccctccctccatggagggacccatagggctagacactttgaggcaagcaggaggctctgcctaatgtgaatttatttatttgtgaataaactgtactggtgtcagttggcaatttcttcttcctacccgtggacacagagctccctctctccctccaaagaagagcatgggagag

SEQ ID NO: 34069 - DNA, 394 bp, Homo sapiens
ggcggagaacggttgagactgagctaaagacaatttggggggatattctggctgtaccggacaaacggctcattgcggaagctaacaggggcgagaccaaggctttctattataaaacgaaaggggactacctcaggaatctggcagaatttgccccatgaaacaacaggaaggaggctgcggagaacatcctactggcttataaagctgctagggatattgccatgacagaacttccaccaacgcatactactctcttacgacttgcgtctcgatttttccgtatgctactacgaaactcttaattaccctgaccgggcctgcgggatggcaaaatctgcttttgatgatgcaattgctgaactgcataccctgagcgaagaaagctataatg

SEQ ID NO: 34070 - DNA, 415 bp, Homo sapiens
ggaatctgtaagtacctattaagacaaaatacttctaattatacttatgaaatggatacatattttttcttggacgttacaaagaaaatactcaattgcataacacggatgcttgacaaacttttttttttaaggcatttctttctttcatgaaacattgaaaccactgatagctcatttaaccctatcttaaacccttctcttgtctataaaactaatacgggtcacaccggaccttcggattaattggatccacattccccaatgatgtttgcaccccattcaaaatagccatgccattggcatttaactcgggaacctctctttaaaactaaaatggatgtgaaagaataaaattcagggaacgtgaagtattcacagcaattctagtaaaattagctgtcataacatgttg

SEQ ID NO: 34071 - DNA, 447 bp, Homo sapiens
  misc_feature (1)...(447): n = A,T,C or G
ataaactggatacacctgataaccctttacnccacgcttggtacgagggccaagaaagcccgaaaggtgaagcatctggatggggaagatgatggcagcagtgatcagagtcaggcttctggaaccacaggtggccgaaggggctcaaaggccctaatggcctcaatggcccgcagggcttcaaggggtcccatagccttttgggcccgcagggcatcaaggactcggttggctgcttgggcccggagagccttgctctccctgagatcacctaaagcccgtaggggcaaggctcgccgtaaagctgccaagctccagtcatcccaagagcctgaagcaccaccacctcgggatgtggcccttttgcaagggagggcaaatgatttggtgaagtaccttttggctaaagaccagacgaagattcccatcaagcgctcggacatgctg

SEQ ID NO: 34072 - DNA, 394 bp, Homo sapiens
ggcggcaaatggttgagactgagctaaagttaatctgttgggacattctggatggactggacaaacacctcattccagcagctaacactggcgagtccaaggttttctattataaaatgaaaggggactaccacaggtatctggcagaatttgccacaggaaacgacaggaaggaggctgcggagaacagcctattggcttataaagctgctagtgatattgcaatgacagaacttccaccaacgcatcctattcgcttaggtcttgctctcaatttttccgtattctactacgaaattcttaattcccctgaccgtgcctgcaggttggcaaaagcagcttttgatgatgcaattgcagaactggatacgctgagtgaagaaagctataaggg

SEQ ID NO: 34073 - DNA, 388 bp, Homo sapiens
  misc_feature (1)...(388): n = A,T,C or G
aatttctggactgttaggatgaatggacgccttctccccgttatttaagatttgggaccttggacataaccctgggtgacgtgcacattgcttgggtatggaacggtagaaatttgggtgtttttaaaaccttgtttggggttgttcctgtccttgttgagaatcataaaaatgtctgtgttcttggagtatttcacactgaggactaatctgctatcttcattccagtccctacccctcagtgcctgctctcatccaaataacctgggaggtgacaatcaggatatctcaggaggtccaaggtggaacagacctctttgcctttcccagcgtctcatacccccggtagtgcanctgtgggtggaagcttgagtgtctgcacgaaata

SEQ ID NO: 34074 - DNA, 504 bp, Homo sapiens
  misc_feature (1)...(504): n = A,T,C or G
ctgcgccccctttgaatgataaccntctgaccanngacacgccaagcttggcacgagggaattcttagaatattgtcaaggatgatcccaagatgagatatgtaccttacgcatggaatgcaaccaaccagtcctaattgaacagatcagaggctattggagatatttctataaaaggataaaattgatggaatgcctggtacatattaatgcgaggagaaacatctaagatcattggcagataatttggggttattttagtgataagtggaaagaaccagacaattattcaggaaaaacaatattttaaggaaatgacaagcaatcataagttagatcttgactcacctatcaatagcattcacatggtaataatgtgaatagttaatgtagatgcaataaaacttttgataagtaggagtgatggaaagaccggaatgaatggttgtaaagggaaatgaaagaaaatcaaggtcttattttattattgcaattcacagatat

SEQ ID NO: 34075 - DNA, 480 bp, Homo sapiens
  misc_feature (1)...(480): n = A,T,C or G
ctggggaaagtgnnncttgannaactggtatgaccctgattacgcccagcttggcacgaggcttgtccaacagggtgtcaggatttaaggaaaaccttcgtcttatgctaagtctgaaatggtactgaaatatgctcttctatggggcttgtttattttataaaattttacatctaaatttttgctaaggatgtattttgattattgaaaagaaaatttctatttaaactgtaaatatattgtcatacaatgttaaataacctatttttttaaaaaagttcaacttaaggtagaagttcccagctactagtgttaaattggaaaatatcaataattaagagtattttacccaaggaatcctctcatggaagtttactgtgatgttccttttctcacacaagttttagcctttttcacaagggaactcatactgtctacacatcagaccatagttgcttaggaaacctttaaaaattccag

SEQ ID NO: 34076 - DNA, 414 bp, Homo sapiens
ggcctttttgaaggtatattattgttaaagtgcctccctcctaggcgtaggccatgaccatttggggtacgagagcctaactttgtttgacttaatctgctgaaaagtgcagttacttctggaaattaacctcaatattaggtcagcatgggaaatggtggattagacatgtcaagtagggttcagggactgattggtcccatttgccctcaggtcagttgtttaatctcaagacctgttactactgattttattaaatcaaagtctttaattcttgcatgcccggatctaatttctgaacgaatgagcacactttaaccagttatttacagttacctttttcctttaaccggattgtgaaagcttcatgtattttaatttagattctgtgtttttaagggttctgagcatgaa

SEQ ID NO: 34077 - DNA, 404 bp, Homo sapiens
gggggagcatcttaagactctctgtttttaaaaccttctgaaccatgacttggagccggcagagtaagctgtggctgtggacttcagcacaaccatcaacattgctgttcaaagaaattacagtttacgtccattccaagttgtaaatgctagtcttttttttttttttttccaataaaaaaacctttacctaaagggggggtaaaaggctttgaaaagctgaaatctaatggggcccaagccaggggggggggggcccagtttccttttaattccccccgccccactttgggttttctttccaagggcccaagcccaaacttttgacccaaaaactttgcttgaaaacaagcaaatcccgatggtttattcctatttatgaacttgtgggtcaagtgcctttt

SEQ ID NO: 34078 - DNA, 498 bp, Homo sapiens
  misc_feature (1)...(498): n = A,T,C or G
gagagacgccgttttctttgaaaccgtatgacatggaacccctgctnggcacgaggaaagaataataaaataaaacagatgtagtggtgacagctgtagcattgtaagctttagagtagccctcatgcttctggccatgataacactagattctcaagttccttaagccagagtggtcacactgaagtgtctgtggagactaggcaggtcatctaagcaaaggggttgttgtagactattgtacataaataatagctgcctctccctgagggtggattacacttcccagccccaatgccttcacccttgccatggaacttgctttgggcaatgaaataacagcagatacttcaggagatagtgtatttttgttaatgtaccctttcctcactccagtgatgctccagagagactgctccctgctctgctgctggggtgaagatgatgtggagcanaaccacagtcaacccaccatagataagcaatgtgagcaagaan

SEQ ID NO: 34079 - DNA, 410 bp, Homo sapiens
ggccaattccaaaaagtcaccacagatgaagaattgttgcaatggctaaatcccaaacatccttggcctgtgaagtcttcatttccagaatactgaatttgtgtgacttatttggctcttaacagagtggcacatcctactgacactgtcctatggagagttacagtgcaggaaacctgaacccagctctcaggtccctctggaactttggctcttctttgttttgtctcagtgagtgatttgggccctctggctaaatagactggtcatgtccttacaggtcttaaaagataacatgtaaatgtttttaaaatggtaaaaaaaaagaaatcacatgctcagatcaaagctgtagaggaaactgacataattagattcatgtggtggctgaattaggttacccacaaagg

SEQ ID NO: 34080 - DNA, 428 bp, Homo sapiens
  misc_feature (1)...(428): n = A,T,C or G
gggtttgaagggaggagtgaaggtttgaaatgttctgaagccttgcattgtccaggaaatggtaaagcactactttattttcaactataatgtgacaaggatacagtctgtagtaaaaaaacatagttaacaagacatagaggggaaaaaatggaataattttaaaataaagaaatcaagaaaggattttttaaaagtacagagaacagatgagataaatagaaaataggataacttcagcatgtctattattatgtgaaatgttaaagactaagcactacattaaaaaaaggaagacaatttcagattggtactgttccttgtggatcagggctaccccatgggcactgtgtctagagtagcanctcacaggcagntctgcactcatacctacttttaattatatgcaaattaagggcagtatgcag

SEQ ID NO: 34081 - DNA, 422 bp, Homo sapiens
ggggtgcctgttctgggagcgagtggctctccgtggccatcctaggatccactcggccctggctcccctggggcctctctgctctgagggaggaaaggcaacagagggcttctgccagctctgggcaggggcgggcagcaaagagctgctgtcatggctacggagtgttgcacggagaggccctgggggcctgctgaggtctgggcgagtccctggtttaacagcactggtaggtattgcactgagcaagaggaagtgcctatcaatcaatcaatcagggaggaaggaaaccaggccagctttttctttttgccctttttcacactccagggattatgggtttcttccaggaccggcccctccggaagggctggtcttatgagaacccaagtggctcctccacttccactgatccctttact

SEQ ID NO: 34082 - DNA, 449 bp, Homo sapiens
  misc_feature (1)...(449): n = A,T,C or G
agagaggtanttctgaagtcgtctgcatcacganacccnaagnttggcacgaggcgaggttcctgaggcgcaccggccagggggtcatcccctttctgattgtgcccctccaagctgacggaacccggctccaccctccccgcggaacctgccttcaaggctcagctccgcacacaaagaatctggagctgccgaggccactccctaccactcacccatcaatcctcccacgctcccgggcaccaacacgcgtcccgaaccgcgcctcttcatgtttggcaggaaggcctgcagcatccgcacagtccctactacattcacgtccagcacagaggccacggcgtcctcccccagcgcctccagcggccccagcaggcccaggcctgcgttacacactgcggagacaagaggcccgaccagcccgcctcagcattaccctcagcacgtcg

SEQ ID NO: 34083 - DNA, 481 bp, Homo sapiens
  misc_feature (1)...(481): n = A,T,C or G
cccgcgccccntttgatttcatttccgtcctcannacgccaagcttggcacgaggcgagattaggagaacccaaagtaatgcaaatgctccctttttgtgggattagctccgctgctgtcagtgatgacacagactgggcttcttcaacagaaatttattttctctcagttctggaggctggaagtctgaggtcaaggttcccactgagtccgttcctggcgagggcttgctttctggcttcccggtggccaccacctcactctgctcacgtggccttctccatcatagacagagacagaagcccagagagagacagagctcccaggggtcccttcttcctatgacattggtcctattggatcagagccctgcccttctgacctcatttaatcataattacttccctagaagctctgtgtctttatacagccatgcggtggggtaggacatcaacaggggaattggggggagacacagacn

SEQ ID NO: 34084 - DNA, 472 bp, Homo sapiens
  misc_feature (1)...(472): n = A,T,C or G
agggcaggggggccgcctctgagnntctagataacgttatgacctcattacgccagcttggcacgaggctttgatgtgatcagtgatgatgcttttattggtcttccacatctagagtatttattcatagaaaacaacaacatcaagtcaatttcaagacatactttccggggactaaagtcattaattcacttgagccttgcaaacaacaatctccagacactcccaaaagatattttcaaaggcctggattctttaacaaatgtgtaagaggacctaagaaatcactgaacaattaattaatttgcagtcattaacaaggaagcctgggattgattattataatttttaattggcttttaaattaaaattaggatttttaaatctaaattttaactggccaaaaatttaaatttacatggactaacatttgagtcttctatgggatttatcattgggaattctgaataca

SEQ ID NO: 34085 - DNA, 404 bp, Homo sapiens
  misc_feature (1)...(404): n = A,T,C or G
acagttcgatcaaggttgacgatgtgtcacactgtgtaagggaatcgcatggagatgggcattccgaactgttaatggggacatgggactccagttgtctctgatcacttgtgtggattttcctggcgtagaacgacagaagccgctagtaagtcgccaagacctacagcaggaattctgcaccaaagggcataaaatcttgttattttaatttgcatctgggagaatgtctgagcaaggagacctgaatcaggcaatagcagaggaaggagggactgagcaggagacggccactccagagaacggcattgttaaatcagaaagtctggatgaagaggagaaactggaactgcagaggcggctggaggctcanaatcaagaaagaagaaaatccaagtcaggag

SEQ ID NO: 34086 - DNA, 406 bp, Homo sapiens
ggcaggcgcagctggctggggggcccactccaggcagggtggcgttagactggcatcaggctggcactaggctcagcccccaaaaccccctgcccagccccagcttcagggctgcctgtggtcccaaggttctgggagaaacaggggaccccctcacctcctgggcagtgacccctactaggctcccattccaggtactagctgtgtgttctgcacccctggcaccttcctctcctcccacacaggaagctgccccactgggcagtgccctcaggccaggatccccttagcagggtccttcccaccagactcagggaagggatgccccattaaagtgacaaaagggtgggggtggggcaccatggcatgaggaagaaacaaggtccctgagcaggcacaagtcctg

SEQ ID NO: 34087 - DNA, 470 bp, Homo sapiens
  misc_feature (1)...(470): n = A,T,C or G
agtgcggagggccggcccctacngngcatagannatcttgcacccgcctggccgaggagaanacgtcacaagaaagggttaaagccttaacaggggaacaaccattgcggggctcagggaggaggataatgctctttgggctgccgcaccctgatccccggggtcccgaaccctcccgtccctggccaggcctgccagccacaaggtgagggcccccttccgccgcaacctgccactctcacaccaatgcgggaccgccttttctttctttcccaccccccaccccaccctgccgtcctttctcccccaaacttcgcctctgattgggtgagcccccggctccccgctccccctctcctccatccccggagaaaactgcgggctccgacctgggtagcagcacccggaggcggcggctcgtctgcaggatgctacatcaacgcaagaccccagtccagatccaggactgg

SEQ ID NO: 34088 - DNA, 480 bp, Homo sapiens
  misc_feature (1)...(480): n = A,T,C or G
ntttgacaacgttgtagatgacactgccagcttggcacgaggctggagaagtgaagtatctcagtcctccctaccaagccatctcagattctgaggaagatcatggtaaaaagtgggaataacacaattatgggagttgcctcttattaacaaagagttttctaattagtgtcctgtccctaatctacgacatctacctttggtagtcctagacccagtttaggagaagattggtagagaatatgggggaggaactctcgtcctacaagcctcccactaggtgaacaagatctgtcttgggatttggagcaatttcctaaacaaggaaaggaagggaaacttgacttcctgagatgataagaaggaagaatctatttgagccagcctctgagtgggaagggaactatggaacatatttcagattgatacattattgttaaagaacattagcaaaagccacattttcttcatagcagtagg

SEQ ID NO: 34089 - DNA, 418 bp, Homo sapiens
ggaaaaaatatggattctactttttaaacatggtctcagtagtatcattacagccccatcaaaatgaaaaacaataatttcctgacgccatcgaatagctcatcaattttactatatttcctcaatcattccatgcgtgttttttatttattttattttattattattttttgagacagagtctctctttgttgcccaggctggagcacagtggcgcgaactcatcctcattgcaacctctggctactgggttcaagtgattctcctgtcatagcctcccgagtagctgggattgcgggcacgcgccaccatgcctggctaattttttgtattaaaggaggctgagacaggggtttctaggttggctaagttggtcttgaactcctgacctcaggtgatccgaccgcctcgggctttc

SEQ ID NO: 34090 - DNA, 406 bp, Homo sapiens
ggagcagtgtgactaccccccactccccggggagcactactccgagaagttacgagaactggtcagcatgtgcatctgccctgacccccaccagagacctgacatcggatacgtgcaccaggtggccaagcagatgcacatctggatgtccagcacctgagcgtggatgcaccgtgccttatcaaagccagcaccactttgccttacttgagtcgtcttctcttcgagtggccacctggtagcctagaacagctaagaccacagggttcagcaggttccccaaaaggctgcccagccttacagcatatgctgaaggcagagcagctgagggaggggcgctggccacatgtcactgatggtcagattccaaagtcctttctttatactgttgtggacaatctcagct

SEQ ID NO: 34091 - DNA, 468 bp, Homo sapiens
  misc_feature (1)...(468): n = A,T,C or G
ggtaggggggccggctatganacgatgaacctcgattacgccagcttggcacgaggagcagtgtgactaccccccactccccggggagcactactccgagaagttacgagaactggtcagcatgtgcatctgccctgacccccaccagagacctgacatcggatacgtgcaccaggtggccaagcagatgcacatctggatgtccagcacctgagcgtggatgcaccgtgccttatcaaagccagcaccactttgccttacttgagtcgacttctcttcgagtggccacctggtagcctagaacagctaagaccacagggttcagcaggttccccaaaaggctgcccagccttacagcagatgctgaaggcagagcagctgagggaggggcgctggccacatgtgactgatggtcagattccaaagtcctttctttatactgttgtggacaatctcacctgggtcaat

SEQ ID NO: 34092 - DNA, 419 bp, Homo sapiens
ggcacgaggatgaatttaaacctcttgtggaagagcctcagaatttaatcaaacaaaattgtgagctttttgagcagcttggagagtacaaattccagaatgcgctattagttcgttacaccaagaaagtaccccaagtgtcaactccaactcttgtagaggtctcaagaaacctaggaaaagtgggcagcaaatgttgtaaacatcctgaagcaaaaagaatgccctgtgcagaagactatctatccgtggtcctgaaccagttatgtgtgttgcatgagaaaacgccagtaagtgacagagtcaccaaatgctgcacagaatccttggtgaacaggcgaccatgcttttcagctctggaagtcgatgaaacatacgttcccaaagagtttaatgctgaaacattcaccttccatgca

SEQ ID NO: 34093 - DNA, 468 bp, Homo sapiens
  misc_feature (1)...(468): n = A,T,C or G
aggtcggagggccccccctgatnntccatgnaactgcggacctgctacgccagcttggcacgagggaataactctcatgagatctgaaggcttttataaaggggcattcccctgcacacaccctctcttgcctcctgccatacgagatgtgtcttgctcctccctgtcttccaccatgattgtgagtgaggcctccccagccacatggaactgtgtcaattggacctctttcctttgtaaattgcccagtcttgggtatgtctttattagcagtgtgagaacagactaatacaagtagataggtatcttttaacttgtttccagtgactcttgctttactttcaggtggatgatgacagaatggaccccttgttcacgaacttgtggaaaaggaatgcagagcagacaagtggcctgtacccaacaactgagcaatggaacactgattagagcccgagagagggactg

SEQ ID NO: 34094 - DNA, 492 bp, Homo sapiens
  misc_feature (1)...(492): n = A,T,C or G
natggaaaacgtcttgaccatgtagacgcccagcttggcacgaggagcgagctgagtggttgtgtggtcgcgtctcggaaaccggtagcgcttgcagcatggctgaccaactgactgaagagcagattgcagaattcaaagaagctttttcactatttgacaaagatggtgatggaactataacaacaaaggaattgggaactgtaatgagatctcttgggcagaatcccacagaagcagagttacaggacatgattaatgaagtagatgctgatggtaatggcacaattgacttccctgaatttctgacaatgatggccagaaaaatgaaagacacagaccgtgaagaagaaattagagaagcattccgtgtgtttgataaggatggcaatggctatattagcgctgcagaacttcggcatgtgatgacaaaccttggagagaagtaacagatgaagaagtgatgaaatgatcacggaagcagatattgat

SEQ ID NO: 34095 - DNA, 442 bp, Homo sapiens
  misc_feature (1)...(442): n = A,T,C or G
nattgaatagcagtncngaccancannacgccaagcttggcacgaggcccagacgcagatggttgacgaatgcagcaatgatgtcatcatcaagaaaatcaaacaagaaatccccgaagattattacattgtggcaaatgcagaactgacaggaggagtagatggaccagccctgtccttgacacagatggcaaaacccaagcctcagactcacgctggtccctcctgtgtagggtctgctaaactgattccccatgtcacatctgccatcagcacggagctagacccacacggtatgtctgcatccccctctgtgatctccagaccaattgtccagaagactgctagggtatctctggcttcaccaaacagaggaccccctggtacacatggcaccaaccaacaggtggccatgcaaatgcctgtgagcacatcccatcct

SEQ ID NO: 34096 - DNA, 429 bp, Homo sapiens
gggccattattaagtaaaataagagttagttacttgaacacaagcactgctatactgagacagtgatctaacaaccaagatggctactaagtgacaaacagcacagacggtgcagatacatgctggacaaagggatggttcacgtcctaggtgcaacagagctgaacagcttgagatttcatcaccatactcaaaacaatatacaatttaaaacgtatgaattgtttatttctggaattctccatttaatatttttggactgtggttgaccacgggtaactgaaactgcagaaagtgaaaccatggataagggggattactgtgtaacagtagcctcattccttgattaaatacttgctaagcatctaccatgttactgtgctaggggttggagatttaacagccaacaagacaaataatctactcact

SEQ ID NO: 34097 - DNA, 440 bp, Homo sapiens
  misc_feature (1)...(440): n = A,T,C or G
nattgatagcagacggtaccngannacgccaagcttggcacgagggtgtgcacgcgtgtgtgtgtgtgtcacatgaaatacttttgaatctgagtgaaatgaatcttctgtgttctgccaagcatttagttgaggtgtattataaactactgtagtgtagcgctgagttttgaaatgaacagcaggggctgcactgttaatgacgatacgttagcattttagcatcctttttctcaagagcagcaaaaacttatgttttcttgtcctccccacatttttgaggtgttggtaacaagtgttatttttccattttaaagatgaggaaaatgaagctcgggctggttaactgacttgctcagcgtcccatggtgagtccgagcgggcggggcgcaggccctgccgtctggcgcttctgtcgagacgtcggctttccaacctgg

SEQ ID NO: 34098 - DNA, 494 bp, Homo sapiens
  misc_feature (1)...(494): n = A,T,C or G
gtgcgncgaccaacctgataccctcganctgataacgtctgacatgactacgccaagcttggcacgagggggagagaaggagaacatactggaatgcgtttgtttggagctgatttagtgtcataacccacatacgtttattatggaaagctggaagagagcaccaaaggtgttgatatctttgaacccactcctcaaaaaacagactaactaacaaaagtaataaaataccaaaaactaatgggtaatacctacaaaaaattatgagacaggatgcccccatgaattctaaaatgagcatgtagataaaaatcacaactataaatcccatgtggtgttagaaactgcgtgtgagaaagtattgacaagaccaagttactcgtgatgcctctgagagtttgggaagctcaagatcatcatcagggactactggaaaatgaggcagaccattctgaggacaacagctacatcagaaatggggcttgtgaaagggg

SEQ ID NO: 34099 - DNA, 408 bp, Homo sapiens
tatttttgcacgagccggattttctaccggcactgggggaactcaacgttcttcttcaactactaccgcacttggaacgcggtggtccatgactggctgtacagctacgtgtatcaggatgggctgcggctccttggtgcccgggcccgaggggaagccatgctgggtgtgttcctggtctccgcagtggcccatgagtatatcttctgcttcgtcctggggttcttctatcccgtcatgctgatactcttccttgtcattggaggaatgttgaacttcatgatgcatgaccaatgcaccggcccggcatggaacaggctgatgtggaccatgcttgtttctatgccagggaattcaggtcagcctgtacttgcaagagtgggacgcacggcggcactggcccttacg

SEQ ID NO: 34100 - DNA, 390 bp, Homo sapiens
acggggatgctgccaataactatgcccgagggcactacaccattggcaaggagatcattgacctcgtgttggaccgaattcgcaagctggccgaccagtgcacgggtctccagggcttcttggttttccacagctttggtgggggaactggttctgggttcacctccctgctcatggaacgtctctcagttgattatggcaagaagtccaagctggagttctctatttacccggcgccccaggtttccacagctgtagttgagccctacaactccatccttaccacccacaccaccctggagcactctgattgtgccttcatggtagacaatgaggccatctatgacatctgtcgtagaaacctcgatattgagcgtccaacctatacta

SEQ ID NO: 34101 - DNA, 444 bp, Homo sapiens
  misc_feature (1)...(444): n = A,T,C or G
gccgggggcgtgnccctgatnactgatgacattcaaacnccagcnnggacgagggctcgtgccaagcttggcacgagggcgtcatccaatggaaccatgatccaagccacatatgcaatttaaaatattctaggggccacattttttaaagtccaaagaaacagctaaaatcagtgaaattaatttttagactacattttaacctaacatgtcaaaaatagtatcacttcagcatggaatcaatataaaaattactgggatattttacattcttttttccaaatgaaggcttcaaaatccaatgtgattttcctcttagaaaacatctcagtctggcccagccctatttccagtgttcaatagccacacctgactactggttgctgtataggacagcacggacttaggttcttcattaggagactgatggggggggtccttcct

SEQ ID NO: 34102 - DNA, 483 bp, Homo sapiens
  misc_feature (1)...(483): n = A,T,C or G
ggggaggcngngtnnnnnnaactgatatcgtatgccctcatacgccagcttggcacgaggagattcggctaggaaaagacaagctttccagagaatgtttcagagaaagttacgtggagcgtgggcgtttcgcagactcctaagtggtctggaacctaacctgcagtgtctctgagcttctggcaagtatgaggcaaggatttcacagaagaacttggagcaaaaattcccactgtcatagctataggctgtccagtcttgagggagctgcaggaacaggaaaaagagaccttcagagaagacatggcttccagaaaagagaatgcgaagagtgcaaacagagtgctaagaataagccagttggatgcacttgaactaaacaaggccctggagcagctagtttggtcccagtttactcagtgctttcatggatttaaacctgggctgttagctcgctttgagccagaggtgaaagcgtgcttt

SEQ ID NO: 34103 - DNA, 480 bp, Homo sapiens
  misc_feature (1)...(480): n = A,T,C or G
tttgaaaaactggtgatgaccactccagccngccacgaggaaaggaacccgagatctgcgcaggggttccctttgccgatttctctcacctcacctttcaaacctaaactcgagcctactggtcaccggcctagcattgctctcgccatggctctcagcgatgctgacgtgcaaaagcagataaagcatatgatggctttcattgaacaagaagccaatgagaaagcagaagaaatagatgccaaggcagaagaagagttcaacatagagaaaggtcggcttgtgcaaacccaaagactaaagattatggaatattatgagaagaaagagaaacagattgagcagcagaagaaaattcagatgtccaatttgatgaatcaagcgagactcaaagtcctcagagcaagagatgaccttatcacagacctactaaatgaagcaaaacagagactcagcaaggtggtaaaagatacaaccagg

SEQ ID NO: 34104 - DNA, 458 bp, Homo sapiens
  misc_feature (1)...(458): n = A,T,C or G
naagcccgggggcgcgtggnnccttgagnaatagtattccnttcannacgccaagcttggcacgaggcaccaatttttgtgtgtcaaccatttagttaacttttccacttgaaaaaatgcaatagaaaaccggacaccatgtttcactatctcagttaatattcacaattacagaggctacaactcaggatacagcatcaccaatgctgcccagagtcagtttatactgaaattaagttctttacaccaagtaaatggttgtccacaaccactggctagtgtacatatgaactaaaatttctagatttggggagaaacaaatgctgctccgatcatctgctctgcttcttctgttcctcaattcatgcttagaaacctttcatgttactcttggttttgtcagtttgcttgcctgtgggggtttagccctgctgaccctgcccactggaagaggctgg

SEQ ID NO: 34105 - DNA, 418 bp, Homo sapiens
ggctatttgctggagtttgtgtagtaaaagcaggatcaatatttggttctttccctttatttacaagttttcagaataatgagttggtttcttatcatccctcaagagtatcaataatgactcccacttctttcttcattattgagatggttaattttatatgttaactaaactaggctaagggatgttcatagggcttgtagaagattatttctgggtatgtctgtgagggtgtttccagaagagattagcattttaattggtagactgagtacagaagattgcgcttaccaatgtgcgtgggcaccattcaatctattaagggcctgaatagaaagaaaatgtggtaggagggtgaattttgccctctgtttgagttgagctggcacattgatcttctcctgtgcttaacattagc

SEQ ID NO: 34106 - DNA, 459 bp, Homo sapiens
  misc_feature (1)...(459): n = A,T,C or G
cgcgcccttganacctttgaaacgtcttcaccagcttggccgaggttggacgacgggcatgcctatgaataaactgggagggcttgattaaacacaaattgccacaccttaagaggttctgatggaatacgttaaaggtagggcccaggatgagactgagagtcccacagaccaagctgaggttggtctgagtctaacactgagtctagacagcagccttcccaagaggaaccacgtttgactcacagctgcacaccagcaccagcagtgtctagtagcacacacagttggtccccagtaaatatttgccgaattaatgaccattataactttcatttccaggaacaattttactacttgcttatgtatacttgctgccaagtatcttatatacagattcatttaaaaaaaaattacacatatgttgggcactatagcccttaaccttaagggggccan

SEQ ID NO: 34107 - DNA, 428 bp, Homo sapiens
  misc_feature (1)...(428): n = A,T,C or G
ggccccggccttcttcccgctggccggcatctgctgcagactggagcctgatagcagaccaccattctcgaaattggaggactcctttgaggccctctccctgtacctgggggagctgggcatcccgctgcctgcatagctggaggagttggaccacactgtgagcatgcactacggcctgacccgggactcacctccctagccctggcccagccccctgcaggggggtgttctacagccagcattgcccctctgtgccccattcctgctgtgagcagggcccgccgggcttactgtggattggcggaatgtttaaaagcagaacaagccattcctattacctccccaggaggcaagtgggcgcagcaccagggaaatgtatctccacaggttctggggcctaactactgtctgtaaatccaatactn

SEQ ID NO: 34108 - DNA, 417 bp, Homo sapiens
ttgcattcaccaagttcccaccttgtgtggatacagcagaaacttcagaagatacagaaaacaaaaactacctcattcattcattcaacaaaagttgtcaaacagctgtctcatagctgacatcctccctgataatttgatatgagtagaagaaccatttccattttatttatcttccctttgctctttttgtttttgggtttggtggttttctcttcttggtatatctgcttttctgagcttcaaattctttattcctgaactgggaggaacttttttagtgtttcaatgcaaacactaaagaagagggtgtgaaaatatgggaagacctatttggcaagcttcctctgaccatctttatggaactagatttaggaaaaaggagaggtattttctggggtttctgtagctaggttt

SEQ ID NO: 34109 - DNA, 404 bp, Homo sapiens
ggttgaactctgccagtctttcattttaaagaatcctatagcggtttttagaagagaaaaaaattgataagagtgaggaaattgtcctgtagtctattgaaaaccagtcaaggggggtttagttcatagattttgttagatgttctttccacctggcctatgatgtttagatgttcatacttgactcacatttacccagcccctcctgcgtaccaggagctgtgttaggcactttatatacattattctatgtggccctcactgatgccccagggaagtatgcattagccttcccattttgcagttgaggaggctgagtagcctcagaagggtttaggcgaccttctgaaactcacagaagtcacgtgatggagagaggattcaaagccagggcctcacaccct

SEQ ID NO: 34110 - DNA, 424 bp, Homo sapiens
  misc_feature (1)...(424): n = A,T,C or G
ggctgggtgatggtggctgctgaggactgggccgcctgggccagcttgtcaggagtggacgcagctcctgacacaagtagtttcgtgtcttctaccaaggccttggccgtcttgagaatgttctccctgtggtctgcgaaggtctcactgttctctgcattcagcgtccccgctgttgcaaacataatggtggtgtccaggtcggcaatgatcccagacacagcggtggcggctgtaatgcatgcctgggttcctttgttcccggcctggagagccgagagcaccaaggagaccttttccgtgacggcacgggcgcattcgatcagctccctcttggtgtagctgtctgtggggcagacctggagggcccctgccttctgcaccaggaagatacagccgtggcccacgtcctgcacacgagtgn

SEQ ID NO: 34111 - DNA, 445 bp, Homo sapiens
ggagccaaagtatcataccacaaaaagaatgtcactattcttttaccgatggcaggagcctctgaaatcatcagaaatgctgacgtcaagttttatgtttcaggtcattcaaactgttagcgccatggacaaagatgatcccaaaaacggacattatttcttatacagtctccttccagaaatggtcaacaatccgaatttcaccatcaagaaaaatgaagataattccctcagtattttggcaaagcataatggattcaaccgccagaagcaagaagtctatcttttaccaatcataatcagtgatagtggaaatcctccactgagcagcactatcaccttgacaatcagggtctgtggctgcagcaatgacggtgtcgtccagtcttgcaatgtcgaagcttatgtccttccaattggactcagtatggccgccttaattgcc

SEQ ID NO: 34112 - DNA, 434 bp, Homo sapiens
ggccactccctgccgtggcctttaatgtgaacaacctgcccttcacagagcccatgctgtctgtctgggctcagttggtgaacctcgctggaagcaagttagaaaagcacaaaataaagaaatcgactaaacaggcctttgcaggacaagtggacctggacctgctgcggtgccagcagttgaagctatacatcctgaaagcaggtcgggcgctgctctcccaccaggataaactgcggcagatcctgtctcagccagctgttcaggagactggaactgttcacacagatgatggagcagtggtatcacctgaccttggggacatgtctcctgaagggccgcagccccccatgatcctcttgcagcagctgctggcctcggccacccagccgtctcctgtgaaggccatatttgataaacaggaacttgaggcg
